United States Patent Application Publication US 2005/0228172 A9 - sequence listing, part 138

SEQ ID NO: 651525 - DNA, 551 bp, Homo sapiens
agcagtggtcttaatccatgtttttccgtatcatgaagaaaaaaaatctgacctactgactctgatatgcaaggctttttataattgaacttcaatccaccttttcagttgtatcttccagtatataccctttaaaagctcacatttctattataatagactgcataattcagatttcccagcttcagtgcatttcatctacctactgaaggctcaccaagccctttaacatcctgcargaaggaccaggtacggtcactcatgcctgtaattccagcactttgggaggctggggcaggcggatcacttgagcccaggggtctgagattagcctgggcaacacggcgaaaccccatctctacagaaaaaaaaaatcctgcaagagcttagtttccttattccccatctttatctccctcagaaatctctggtcttctgttacatccaggtaattatttcagaagacacatacataaactgtctttcctaatgttatgtgtatgtgggtataccttctgctgtagaccctgaagttctgggggcagaaacat

SEQ ID NO: 651526 - DNA, 481 bp, Homo sapiens
gagatcttgtatactatttacccagtttcccctagtaataacatcttgcaagactggagtacggtattayaactggatattcacattgataaagtcaagatgtagaaccattccctcataagcataccacaagttgccgtgtcccccatccctgacccctggttattgaagaagtctttctgtaggtatatgtgttttttctcttgggtaaataccaagaattgaaatggctagattgtatggtgaatagatacttaattttctaaggtactgctataggctttttcaaaattgctgtgtcattttgcattcccatcaacaacatatgagagtttcagttgctccacatccttgcaagcatttggtactgtcaacctttatttaaaaaaaaaatatggtaaatacacataatatgaaatttgccatctttaccatttttaagtgtacggttcagtggtattaaatgctttcgcattatcat

SEQ ID NO: 651527 - DNA, 549 bp, Homo sapiens
gcactccagcctgggcaacagaaagagaccctgtttaaaaaaaaaaaaaagtcactgatatggaagactttaaaaattcattactttccaaagtaatgaaataaattcaagaatcttaaaacaaagtttcttgaaataaagaaaaaatcaaaactgcagatgaaaaaagcagctcattgtgtctcagggagaaaaatctgtagaaaattattgagaccaagttatattctgttgagattactaattttgaagacaaagaaagaaatgccagcttttgctacaatcaggtagtaacagcaagttatctaccaggggaaaaatatcagttaggccttacatttctttccaacaatattcaagggaaaaaaatgtctatagagttttttgagggtagagggagaagaacgtgtgatgcaatcattttatacctagtcaaatcgtcattctcattcaaaggcaacagaaagacatctgtaatattmttttataggaggaatatttattgcagtgtccgttacatgcttacactgtcccaagtggtgaaatata

SEQ ID NO: 651528 - DNA, 558 bp, Homo sapiens
cctcatctatttatattctatgtaattttataaatggtttcagatttattatggaatgaggyggtacggtgaatgaatgaatgagtagaaacacacatatctttccttctatttcctcctttatcaggttatatctgacttgcctccttaattttcctactttagctctaccacactatatccctatttctgctcagggttcccctcttcctcccaatgacccgggatttaaaaagccagaagtcatctttggtttctcctttgccttctctctcaggaagtcactaaatctggccagtccttgcttcatttgctgctgccaatttgctccttcctgtctattctcaatgccagattcttgttgaggccctcatcacctcatgcctagaccattgcagtattttcctaacgaacgtccttggctgtagactttccccattacaaatcatcatatagatgctgtatcattattcctaaagcaccaccaatgcatataaactccttatttttgtctttcctaaatttaagcccaaaatgtaagtatttttttaaacatta

SEQ ID NO: 651529 - DNA, 527 bp, Homo sapiens
gggtccacttatacatagtttcttctgcatctgccacccctgagacatcaaaaccaacccttcttcttccttttcttcatctgcctgctcaacacgaaaatgatgaggataaagacttttgtgatgatctacttctgcttaataaatagtaaatgttttttcttttgattttcttaatattttctttaacttattgttaagaatgtggtatataatacatgtaccatacaaattatgtttatattatcrgtgagtcttctggtcaacaatagactattagtagttaagttttgggggagcccaaggttatatgcagactttcaactgcacagagagtcagccccccgcaaccctactgttgttcaagggtcaactgtattacacaaaatgtatagttgttaatggtgttactgccattaaaatatagctgttcaatgtgatttcataataaatagacatactcatatataactatttatatatttacattatataaatataatgacaattgcaaaattttctcaaac

SEQ ID NO: 651530 - DNA, 606 bp, Homo sapiens
ttacaaattatctcatttaattgtttcaagaatcttttacagagatattatctgtttcatagataaggaagcctagagaggttaaagtgcatggttggacggtggcaaggccaggcattagaaaacaagtcttcttttcacatccagtccttgttccacaacagttttggtgtttaaatacaccagcacatttcgccattttacagacatctgtttctccccacttacatctttgtaggaccctcagcttcatgtttctttagagcatggagcttcaaaatccagacaccaacgttgagatcaacaataagtcaacacaaaccaagaagtgcagccctgatgttgagcttgtcccacagcttgcccgtgtttccttctcttgaggatgtgacattgctatttaacacaatttgacaacattcatcagaatattaatgccatacttctctccggctttcctcawtttgtatctatagcatttcattttagatcctaaatgcacacttaaacttaatcatttatcatcttcatttttaattccttttctgacactccattaacaaccccctcttcatcctgcttgatttaacagcatctacaaattta

SEQ ID NO: 651531 - DNA, 606 bp, Homo sapiens
ttacaaattatctcatttaattgtttcaagaatcttttacagagatattatctgtttcatagataaggaagcctagagaggttaaagtgcatggttggacggtggcaaggccaggcattagaaaacaagtcttcttttcacatccagtccttgttccacaacagttttggtgtttaaatacaccagcacatttcgccattttacagacatctgtttctccccacttacatctttgtaggaccctcagcttcatgtttctttagagcatggagcttcaaaatccagacaccaacgttgagatcaacaataagtcaacacaaaccaagaagtgcagccctgatgttgagcttgtcccacagcttgcccgtgtttccttctcttgaggatgtgacattgctatttaacacaatttgacaacattcatcagaatattaatgccatacttctctccggctttcctcattttgtatctatagcatttcattttagatcctaaatgcacacttaaacttaatcatttatcatcttcatttttaattccttttctgacactccattaacaacccyctcttcatcctgcttgatttaacagcatctacaaattta

SEQ ID NO: 651532 - DNA, 522 bp, Homo sapiens
gaattcttcacatttacactaatgtcaaagacaagaacaaggtttggggcaatccaactcctcattgtgctcttcaaggcccatgtccatcctgtccctatgtattctcccacttcaccatctggctccagcctaccttgaaatgttctagcaaacaacctgcagctctctaaacgagtcacatcatctctagtccccaaaatggtcatccactgacatcaagacctctaacgacatgtgcccccgttcttcctggcccattcccatccaaccatcagatcccatcttcagtgtctctggctgcctgagacagggccaccgcaccccatactttaccctcatccctctacrttgcaaactcttgtcggtctgtatcccccaaactgtaagtgctgtgaaggcaggaactttgtggcttccctcttgtattctgagcacctagcctagcgtctgcacatccagatcaacacagaaaccttacagtgttctaggatccagcattgactgtgaactcttagatca

SEQ ID NO: 651533 - DNA, 364 bp, Homo sapiens
agtggttctcccagcatggtgttgaagctctgagaayagacagactgcctcctcaagagtgtccctgacccacatgtagcctaactgggagacacctcccagtagcagccaacagacaccacatacaggcggatgcccctctgggacgaagcttccagaggaaggatcaggcagcaatatttgttgttctgcaatgtttgctgttctgcatcttgtgctggtgatagccaggcaaacagggtctggggtggacttccaaaacactccaacagacctgcagctgagggactgttataaggaaaactaacaaacagaaaggaatcgtgtcaacatcaagaaaaaggacatccacaccaaaacccca

SEQ ID NO: 651534 - DNA, 364 bp, Homo sapiens
agtggttctcccagcatggtgttgaagctctgagaacagacagactgcctcctcaagagtgtccctgacccacatgtagcctaactgggagacacctcccagtagcagccaacagacaccacatacaggcggatgcccctctgggacgaagcttccagwggaaggatcaggcagcaatatttgttgttctgcaatgtttgctgttctgcatcttgtgctggtgatagccaggcaaacagggtctggggtggacttccaaaacactccaacagacctgcagctgagggactgttataaggaaaactaacaaacagaaaggaatcgtgtcaacatcaagaaaaaggacatccacaccaaaacccca

SEQ ID NO: 651535 - DNA, 479 bp, Homo sapiens
tctctactaattaacaatttttctagtaataaaacttcaaatagcaaaacttccaaatctccttaattaaaacactttataattttgagtctyttatagaggccaaaaatttaaatggaaacttgtcaaaataattgccatgtactgccaactatttgcaataatcaaacagaaaacattttttggcaatttgctgaagctatgaattctaggtacaaaagttcctcacagaaaaactaggcatatcagttggtgaattttggtcctactaggctggcaatgttacacagaaaagcagtattaagacttgtttttgttcaaacagcttctttaacattgcacagctttcattccatcttaaatcaacaagttgaatgagtagacaaggcagttccaaatcccttgtattcaggtagattgagatgaagattaaggcaaggggcccactctctcactgtctacttctaatacttctgtta

SEQ ID NO: 651536 - DNA, 479 bp, Homo sapiens
tctctactaattaacaatttttctagtaataaaacttcaaatagcaaaacttccaaatctccttaattaaaacactttataattttgagtctcttatagaggccaaaaatttaaatggaaacttgtcaaaataattgccatgtactgccaactatttgcaataatcaaacagaaaayattttttggcaatttgctgaagctatgaattctaggtacaaaagttcctcacagaaaaactaggcatatcagttggtgaattttggtcctactaggctggcaatgttacacagaaaagcagtattaagacttgtttttgttcaaacagcttctttaacattgcacagctttcattccatcttaaatcaacaagttgaatgagtagacaaggcagttccaaatcccttgtattcaggtagattgagatgaagattaaggcaaggggcccactctctcactgtctacttctaatacttctgtta

SEQ ID NO: 651537 - DNA, 479 bp, Homo sapiens
tctctactaattaacaatttttctagtaataaaacttcaaatagcaaaacttccaaatctccttaattaaaacactttataattttgagtctcttatagaggccaaaaatttaaatggaaacttgtcaaaataattgccatgtactgccaactatttgcaataatcaaacagaaaacattttttggcaatttgctgaagctatgaattctaggtacaaaagttcctcacagaaaaactaggcatatcagttggtgaattttggtcctactaggctggcaatgttacayagaaaagcagtattaagacttgtttttgttcaaacagcttctttaacattgcacagctttcattccatcttaaatcaacaagttgaatgagtagacaaggcagttccaaatcccttgtattcaggtagattgagatgaagattaaggcaaggggcccactctctcactgtctacttctaatacttctgtta

SEQ ID NO: 651538 - DNA, 450 bp, Homo sapiens
atcaaactgacagtagctgagagagagaaaaaaaagagtatgagatacttaataatgtgagatatatttaataactatctggcagaaaagtaagtcttatcaggaagctttattttattttatttttttcgagacaggtcctcactctgttgcccagaccagagtggagagacacgattatggcataccacagcctcgatctcctgggctcaagtgatccttctactctagcacctcatgcagctgagaccacagggatgcgccaccatgctgggctaattttttagctttttygttgagacaggatttcactatattgcccaggctggttttgaactcctgggctcaagcaatcctcccaccctggcctcccaaagtgctgggattacaggcatgagccaccacacctggccatcaggaaaattttaagacaccatctggagcatgtga

SEQ ID NO: 651539 - DNA, 450 bp, Homo sapiens
atcaaactgacagtagctgagagagagaaaaaaaagagtatgagatacttaataatgtgagatatatttaataactatctggcagaaaagtaagtcttatcaggaagctttattttattttatttttttcgagacaggtcctcactctgttgcccagaccagagtggagagacacgattatggcataccacagcctcgatctcctgggctcaagtgatccttctactctagcacctcatgcagctgagaccacagggatgcgccaccatgctgggctaattttttagcttttttgttgagacaggawttcactatattgcccaggctggttttgaactcctgggctcaagcaatcctcccaccctggcctcccaaagtgctgggattacaggcatgagccaccacacctggccatcaggaaaattttaagacaccatctggagcatgtga

SEQ ID NO: 651540 - DNA, 524 bp, Homo sapiens
ctgtttaggattaaacaagttttattgggggtctgaagacacttcccaggcctctgcaaacaagtttattgcgggtctgaaggaactccccaaacctccatgatttagcaggagacaagataagggtaatcaccccagcacctggacscatttagattaagtaaatttactgaggctccagaggaaagtcttcgggactcagatcttagttatagattaaaagaagttaatcactatgtcttcagatgaatgcacacttacatgtagacataaagcttagaaggtatataatctctggaaaactaattttgagttggtctggtgatattttctgggccttctccctgtaacctgttacagaaataaaaactctgccctttcccctttcatcagcatctcattattgggccatgagaataagcagcctgaccctcagtttggtccgggaacagttccacatggctggggaggccccacaatcatgctggaaggtgaatgatatggttttgctgtgtatccaccca

SEQ ID NO: 651541 - DNA, 524 bp, Homo sapiens
ctgtttaggattaaacaagttttattgggggtctgaagacacttcccaggcctctgcaaacaagtttattgcgggtctgaaggaactccccaaacctccatgatttagcaggagacaagataagggtaatcaccccagcacctggacccatttagattaagtaaatttactgaggctccagaggaaagtcttcrggactcagatcttagttatagattaaaagaagttaatcactatgtcttcagatgaatgcacacttacatgtagacataaagcttagaaggtatataatctctggaaaactaattttgagttggtctggtgatattttctgggccttctccctgtaacctgttacagaaataaaaactctgccctttcccctttcatcagcatctcattattgggccatgagaataagcagcctgaccctcagtttggtccgggaacagttccacatggctggggaggccccacaatcatgctggaaggtgaatgatatggttttgctgtgtatccaccca

SEQ ID NO: 651542 - DNA, 524 bp, Homo sapiens
ctgtttaggattaaacaagttttattgggggtctgaagacacttcccaggcctctgcaaacaagtttattgcgggtctgaaggaactccccaaacctccatgatttagcaggagacaagataagggtaatcaccccagcacctggacccatttagattaagtaaatttactgaggctccagaggaaagtcttcgggactcagatcttagttatagattaaaagaagttaatcactatgtcttcagatgaatgcacacttacatgtagacataaagcttagaaggtatataatctctggaaaactaattttgagttggtctggtgatattttctgggccttctccctgtaacctgttacagaaataaaaactctgccctttcccctttcatcagcatctcattattgggccatgagaataagcagcctgaccctcagtttggtccgggaacagttccacatggctrgggaggccccacaatcatgctggaaggtgaatgatatggttttgctgtgtatccaccca

SEQ ID NO: 651543 - DNA, 529 bp, Homo sapiens
gtaatagaagactcactctagtacagatgtccgttctcccaaattgatatyccagtttagtgccattcctatcaaaatctcaagtattttatggatagaggtaagattatttttgggtttataggaaacaacaaaacactagaatagctaaaacaattttgaaaaggaacaataaaatgggagaaatcagtctacctgattttgagacttactataaagctacaggaattaagactgtgtggtattagtggagggttagacatatggatctgtagaacaagttagagaacccagaaatagacccatacaaatgtgcccaaattgatttttgacaaagataaaaaaaattaactcaatggagaaaagatggctttgcaaacaaatggtgctaaagcaattgtacatctatgggtacacaataaacaatgccctaaacctcacacctcatgcaaaagtgaactcaaaatgggtcatgttagttaaacgctaacatgaaactattaaacttttccaaaaataaaggagaaaa

SEQ ID NO: 651544 - DNA, 422 bp, Homo sapiens
ttggtaaatttgaacttcatcaaaattaaatgcttttgcttcataaagtcctggtaagatgaagaaaagacaagccacatactgggaaaaatatttacaaaccacgcatctgacaaagactagtatctagggtgtataaagaatcctcaaaactcaacattaaaaaagcaaacaatctacaggctgtgttagtccattctgggactgctataaagaaatacstgagactgggtaatttataaagaaaagaggtttaattggctcacagttctgcaggctgtacacgaagcatagtggcttctgcttctagggaggcttcaggaagcttccaattatggcagaaggcaaagggggagtgaggtacttcacatggctggagcaggacaaagggaggaggacaggttccacacacttttaaacaa

SEQ ID NO: 651545 - DNA, 422 bp, Homo sapiens
ttggtaaatttgaacttcatcaaaattaaatgcttttgcttcataaagtcctggtaagatgaagaaaagacaagccacatactgggaaaaatatttacaaaccacgcatctgacaaagactagtatctagggtgtataaagaatcctcaaaactcaacattaaaaaagcaaacaatctacaggctgtgttagtccattctgggactgctataaagaaatacctgagactgggtaatttataaagaaaagaggtttaattggctcwcagttctgcaggctgtacacgaagcatagtggcttctgcttctagggaggcttcaggaagcttccaattatggcagaaggcaaagggggagtgaggtacttcacatggctggagcaggacaaagggaggaggacaggttccacacacttttaaacaa

SEQ ID NO: 651546 - DNA, 422 bp, Homo sapiens
ttggtaaatttgaacttcatcaaaattaaatgcttttgcttcataaagtcctggtaagatgaagaaaagacaagccacatactgggaaaaatatttacaaaccacgcatctgacaaagactagtatctagggtgtataaagaatcctcaaaactcaacattaaaaaagcaaacaatctacaggctgtgttagtccattctgggactgctataaagaaatacctgagactgggtaatttataaagaaaagaggtttaattggctcacagttctgcaggcygtacacgaagcatagtggcttctgcttctagggaggcttcaggaagcttccaattatggcagaaggcaaagggggagtgaggtacttcacatggctggagcaggacaaagggaggaggacaggttccacacacttttaaacaa

SEQ ID NO: 651547 - DNA, 663 bp, Homo sapiens
tttaggtaagggtttcaaaatttagaaggtatttttttccaaattaagggaaaaaagatacaactacagtcatgcataacttaacaacatggatacattctaagaaatgcatcattagcaattttcttcattgtgcaaacatcatagggtatacttacacaagtctggatggtayatcttgctacaccctaggttatacaatatagcctgatgacaaaaaaaggaaactgaggcaaaattaatattgagagtttatttgggccaaggttgaggactgcagccccagaaactctgggaagtgctcatttcagccctccttacaagctggtttttaaaaggcaaaagggcacaaggagtgagctgatagaaaactgtttgaataggaattctcactggtttacagaaataacatcgattagtaacttgctacacattgttgaactacagagtatgagtttcagcttctgacatgtggcatttcatggctacatggcatcagatagtctagcacccacatagcgaagtcttcaagaggtaattatttagctcaaagggtgagtgagatgagactgctgtcacattttaatgtctctctgggcctgataatttaaaaggggctcatattcctcagataaaaatttcttttctctctcaatctgattg

SEQ ID NO: 651548 - DNA, 663 bp, Homo sapiens
tttaggtaagggtttcaaaatttagaaggtatttttttccaaattaagggaaaaaagatacaactacagtcatgcataacttaacaacatggatacattctaagaaatgcatcattagcaattttcttcattgtgcaaacatcatagggtatacttacacaagtctggatggtatatcttgctacaccctaggttatacaatatagcctgatgacaaaaaaaggaaactgaggcaaaattaatattgagagtttatttgggccaaggttgaggactgcagccccagaaactctgggaagtgctcatttcagccctccttacaagctggtttttaaaaggcaaaagggcacaaggagtgagctgatagaaaactgtttgaataggaattctcactggtttacagaaataacatcgattagtaacttgctacacattgttgaactacagagtatgagtttcagcttctgacatgtggcatttyatggctacatggcatcagatagtctagcacccacatagcgaagtcttcaagaggtaattatttagctcaaagggtgagtgagatgagactgctgtcacattttaatgtctctctgggcctgataatttaaaaggggctcatattcctcagataaaaatttcttttctctctcaatctgattg

SEQ ID NO: 651549 - DNA, 617 bp, Homo sapiens
aaaatagtatgcattccttctaaaattagtttagatatggtgaggccttttcctgagagttatggttttatttttctttgactccagttgtaaattaacagcattggctatctctccacagggccaccaactacaaaggaactggaagacctctgaaatttgggactacggcagatttcataatttgccttgcgcatttgggaactgttagtaaatcttctttctcatcactgacatcagtatgtttttgctccaaatttgtatttagtgaaggctgaactcctaattgtcattgccccatagtaaagcatagttktgcctgactgacagactaatgaagctcaagttactgggaacggaggttttacgaggttgccctgagattgatcccactgagctgggagtccagagggtcccatgaaggctactctgcttcatgacctcaggagagttgatgcaaagaagatagagcagctgaatttggttcaaagccaacctggcagtggtaagagtattaatatacaagacaagtgtttacagatgaagatgttgtggaataggatgggaggaagtaggattaactagtacaattattcatcaagtctaaatcattatag

SEQ ID NO: 651550 - DNA, 617 bp, Homo sapiens
aaaatagtatgcattccttctaaaattagtttagatatggtgaggccttttcctgagagttatggttttatttttctttgactccagttgtaaattaacagcattggctatctctccacagggccaccaactacaaaggaactggaagacctctgaaatttgggactacggcagatttcataatttgccttgcgcatttgggaactgttagtaaatcttctttctcatcactgacatcagtatgtttttgctccaaatttgtatttagtgaaggctgaactcctaattgtcattgccccatagtaaagcatagtttwgcctgactgacagactaatgaagctcaagttactgggaacggaggttttacgaggttgccctgagattgatcccactgagctgggagtccagagggtcccatgaaggctactctgcttcatgacctcaggagagttgatgcaaagaagatagagcagctgaatttggttcaaagccaacctggcagtggtaagagtattaatatacaagacaagtgtttacagatgaagatgttgtggaataggatgggaggaagtaggattaactagtacaattattcatcaagtctaaatcattatag

SEQ ID NO: 651551 - DNA, 550 bp, Homo sapiens
atccttagcaaactaatgcaggaacagaaaacagcatgttcacacttataagtgggagctaaacgatgagaacacatggacacatagaggggaataacacacactggggcctattggagagtggaggatgagaggagggagaggatcaggaaaaataactaatgggtaaaaggcttaatatctgggtaatgaaataatctgtacaacaaacccccatgacataagtttcctatataacaaacctgcccatgtacccctgaacttaaaataaaagttaaattaagaaaaaaaaaaagatagggctttctttctttcaactcctttttcttctctgctggagttctaagccagaatctgttacaacatacaagggaatatattatttcctcttgtccctccttccacctggctgggccaggactagaccccagttgtrgccccagttgtggctgagggaaagcacattcatgtcatgtccctctgtggtgtcttccagccaggtcctgacaggtgtgtgttaggtcagtctctaatgagagctctaagatca

SEQ ID NO: 651552 - DNA, 488 bp, Homo sapiens
ccctccttccacctggctgggccaggactagaccccagttgtagccccagttgtggctgagggaaagcacattcatgtcatgtccctctgtggtgtcttccagccaggtcctgacaggtgtgtgttaggtcagtctctaatgagagctctaagatcaggatgtgtcctgggtgacatgttagggggatgggggaggaggaagtgatgagtgagagaaagaaatctgaacttacagcttccttggtctgaagccatayggtctaagtggcttacagaaaaaggagggctccataaagcagaacccaccttaccaggccctcttaaaatagggatgagagtctgagccacaacaaaaattagaatgagactttccttttctcaccattattcctgtacattgacctcccttagagatcatagggaaagggctggctatgagtaaactctagattccatggtcacagtgacctctaataaaagcctcctta

SEQ ID NO: 651553 - DNA, 401 bp, Homo sapiens
tgcaaaaatctcattaataatccaccccatttagcttataatcaataaataaccataagtataatcagtcaagcagccgacgccactgctctgcctattcttttgtttctttacytatctaataaagtcactttcactttactttgtagactcactccaaattctttcttgcaccagatccaggagccctctcttagggtctggatcaggaactctttccagtaacactactgcccccttttgagctatgtattcatccttgaaactgcttgctattgccacaagtaactatacattaacctaataatgtcacactggacactatcactcatagcctatagcttaacagtgcatagccaatcagtgagcaatgttgtttctgtaaaccaatgtgaattcct

SEQ ID NO: 651554 - DNA, 561 bp, Homo sapiens
gcaaaaatctcattaataatccaccccatttagcttataatcaataaataaccataagtataatcagtcaagcagccgacgccactgctctgcctattcttttgtttctttacttatctaataaagtcactttcactttactttgtagactcactccaaattctttcttgcaccagatccaggagccctctcttagggtctggatcaggaactctttccagtaacactactgcccccttttgagctatgtattcatccttgaaactgcttgctattgccacaagtaactatacattaacctaataatgtcacactggacactatcactcatagcctatagcttaacagtgcatagccaatcagtgagcaatgttgtttctgtaaaccaatgtgaattccttacaaacaatttcatatcrgcctactccctgtcccccttttctgcctgtaaaaaacctgcttgtaataaaggcggcatgaagctcatatccagggttacttgggtctaagtcttccgggcaactgtcctcactttggctcaagtaaatgttttgttatatt

SEQ ID NO: 651555 - DNA, 567 bp, Homo sapiens
gaattcactggaagtaagttccagttaattttatgttaatatcttaagaaacttggaatatgagtagctgctttatcatcagaaatagcaagaatacccaaaatttattgtcakaaatgtattattgttccaccaggttttccatattaaacaaattgattctggtatatttcatttcaaggcaatttctttctgcatcaatcactcctgttgactctcataatattctcatgggggtcaaagtactatcagtgtcctcttttttatttattttatgtctttctagtgacttaaccttaggtccctatgcttacttaaatttagagataaagggaaaatactaacaatgttcattcttaagtagaagattcttttggtctttttagccatagataagcatatttaatcctagaaggctacacagagttagaaaagaaaaaggaaatatcagagaccttagtgggtatttcctctctctcttttctcttaagagcatttaatcttttggttttctaagcaaatcttttgcagctgcttagttctctgttcgtgtcaaggaccctttgt

SEQ ID NO: 651556 - DNA, 608 bp, Homo sapiens
atgccagtttggcaagaggtaaactgtctacctaagccgttcccaaatttatgaccttcaaaatcatgagaaagctaaaacaggtgttttaagtcaataaactatggggatggttatgcagcattagcgactggaataatatccaagtttcaattttaggttttagaacgaaatattgcttccgcatttccatgttcaaagcttcctgctcttttccccaaaatcaactttgctggaagtttccaagcagaaagtcagtatcaaaagtttggtgctagttttataataaaataaattcctctcatttgtaccccatttgcatcccatttgcaaagaaaatttgcagaggcctatatagagcctaaatatttttgaggaagtagatcttaggtctatttctttatgatrttagacagttacctgtgataaattagtgcagtcttatacccttgtagaattatattcaggattataactggaaggttcctagacacttacttttttgagaagaagggttttgaagctggcaggctggcattcaaatcttaatcctaccattaatcttgggaaaaatacttaaatttttatgcatctcaatttcttcacct

SEQ ID NO: 651557 - DNA, 562 bp, Homo sapiens
aggtctttgctaggatacctgtgtaaaaaaaaaaaaaaaaaaagacaaatgaacaggaacaaaaaggtatacaaattttactaacatgtatatagatataggagccatgcacwgagtatgagactcaaaggaagtgccagatagctgaagtttttgtaccatcttgaggttacagaaggaataggggaaagataggatatgggagggagagaggaggaaaggcatggtgagcaaaagcagacttgttattgcagaaatctcacagatagcaactctcagaaagaatacatggtggcctgcagtaacatttttctgtcaaaacttctttgaaggtataagattttagtctctttttctgtgagttaatctttcctggatccggataagaggaccctcagaaaaagtctgtttgcgttgctgtatttttttactaatgcagattttctctataatgcaaatctcccacacaaaagggcaattttttcaggggtatttctgtgggttgcagcccttcagaatagccatatagaaatacaccaaaaaagtatattttgtggtgaaa

SEQ ID NO: 651558 - DNA, 563 bp, Homo sapiens
tttttaatgtaggcacttatagctataaattttcctctcagtactacttttgctgtttcccataggttttggtatattgtgtttccattgtcatttcaagacaattttaaattaccrtcttaattgacccactattacttcagcagcatattgaggtatgtttgcagagcttccaaaatgcccttgttattgatttgtagttttattgcattgtgatcagaaaagacgcttgatattttttctgttttttgaatgttttaagacttgttttgtgcactatatgtacaaaataatatatggtctatccttgagaaagatcaatgtgctaaggagaagaatgtgtactctgtatccattggataaaatgttctgtaaatatctcttaggtctatttcgtctatagtgccaataaaatctgatggttccttgttatctgtctagaagattgggtcaatcctgaaagtgggttgctatgtctccagctattattatattgggatctatctctctctttagttctaataaaatttactttttatatctgggtgctccagtgttgggtg

SEQ ID NO: 651559 - DNA, 563 bp, Homo sapiens
tttttaatgtaggcacttatagctataaattttcctctcagtactacttttgctgtttcccataggttttggtatattgtgtttccattgtcatttcaagacaattttaaattaccatcttaattgacccactattayttcagcagcatattgaggtatgtttgcagagcttccaaaatgcccttgttattgatttgtagttttattgcattgtgatcagaaaagacgcttgatattttttctgttttttgaatgttttaagacttgttttgtgcactatatgtacaaaataatatatggtctatccttgagaaagatcaatgtgctaaggagaagaatgtgtactctgtatccattggataaaatgttctgtaaatatctcttaggtctatttcgtctatagtgccaataaaatctgatggttccttgttatctgtctagaagattgggtcaatcctgaaagtgggttgctatgtctccagctattattatattgggatctatctctctctttagttctaataaaatttactttttatatctgggtgctccagtgttgggtg

SEQ ID NO: 651560 - DNA, 563 bp, Homo sapiens
tttttaatgtaggcacttatagctataaattttcctctcagtactacttttgctgtttcccataggttttggtatattgtgtttccattgtcatttcaagacaattttaaattaccatcttaattgacccactattacttcagcagcatattgaggtatgtttgcagagcttccaaaatgcccttgttattgatttgtagttttattgcattgtgatcagaaaagacgcttgatattttttctgttttttgaatgttttaagacttgttttgtgcactatatgyacaaaataatatatggtctatccttgagaaagatcaatgtgctaaggagaagaatgtgtactctgtatccattggataaaatgttctgtaaatatctcttaggtctatttcgtctatagtgccaataaaatctgatggttccttgttatctgtctagaagattgggtcaatcctgaaagtgggttgctatgtctccagctattattatattgggatctatctctctctttagttctaataaaatttactttttatatctgggtgctccagtgttgggtg

SEQ ID NO: 651561 - DNA, 420 bp, Homo sapiens
cacgccgcactcacaccgggtgcctgggaaaatcgcagacgccggggaggagcagggggcggtgatgggaaggggagctgcgaggcgaagtgttcttcagggaagcgggctcgagtctccgcagctgcggcggcggcggcggcgcgctgggccggcggcgggcgcgggyagggggccgggggtgccgcgcggtaggagcctggcttggacagccgaggagcaggaagtggcctctgacccaggacaccgagcagggctctcttgcctggattcgcctttacaaagtaactcgcgaaggtccccggaggggcgtcaagcggcgacagcggcccgcccgcccgcagtccgaagcccccagccctgctgtcttgccttcccccattccatcagttgccattgcaacgccaatcctgttacacg

SEQ ID NO: 651562 - DNA, 616 bp, Homo sapiens
gagttttaaaacttttttagtgagattaaacatttcaaatatgtygtatatgtttgcttgtttaagcaccttacactataagtcattgtaataaggcatacatttacaagcaaatgtatttctgctccatagaaattaatgaaaactacagggaacttgaatatagaaattggaaatgattttataaaatatatttttaaggaggctccattctggaatgtttgttttcctatgaggattctcttatgagcagctatttgtttacagcataaactgttttaaaattattttaggtcatgttcgattatatgaaaacaagtatcctaatatacatgtttataaatataaagtgaattagtatttgaagttgttttattaattttttaaagaattcctttcttttgtacgatgtgcatgacttgttatttctggattctttcttttagtttccttacattagattttcatttaaaatatcattttaattctcaaaatttctatttagtctccactatatatcttaattgcatgagaatgcatatccctagagaattggatagtgtactttatttctaaggtcagtgatctgattatcttctcattctctccattttag

SEQ ID NO: 651563 - DNA, 621 bp, Homo sapiens
tttaacagatggattgatgcctcacactaacacacctgcctagaatgtaagggaagattattacaattgcatattgtgtagttttgactttagtccttttgtttaaatctaataaactgttgctagcagtcttcaaatgaacaacacagatgcatttatgtaacagtgccccatgaccaaaagattatgtggtgtcttactatctatcctgttctacaatattaggtttgtgctagtcatacagctgttgctaaatagagactccccagaactgtctgagttaatattcactccaatcattctgctgccctgtggagtattagagcatgacagggctgtagtcacatttcaaaggcagaggacttcactgttcttagatcacacacacctaatatgctagtcctacataacttgctcttttttttctttgctattagtctgctcttgctatttgcagtcatttgcccttcaggttttacatctttctcatacatttcaaaatttaattaattttgtgtattttgtaactttaaatcacttaygttatcttgcaataaagaggagtagggacttcagaagtatttatttccttaaaatatgttttctgtacattagggggca

SEQ ID NO: 651564 - DNA, 614 bp, Homo sapiens
tcagaccattgtcagatgcagagtttgcaaatattttctcccattctgtaggttgtgtgyttactctgttgatagtttcttttgctgtgcaggagctccttagtttaattaagtctcatttgtcaatttttgtttttattgcaattgattttggagacttcatcatgatgtctttgcctgggctaggacttccagtacaatattgaatatgagtgatgagagggggtatctttgtcttgttttggttctcaagaggaatacttccagtttttgcccattaagtgtgatgttggctgtgggtttgttgaagatatttcctattattttgaggaatgtgcctttgatgcctagtttgttggccttttctgtgtctattgagatgatcatgtggtttttttagttccgcttatgtaataaatcacgtttattaatctgtgtgtgttgaaacaaccttgcatcccaggaataaagcctacttgattgtggctgattagctttttaatatgctgctggttttgatttgccagtgttttgtttaggatgtttgcatctatattcatcagggttattggtttgaagttttcttttttcatgatgtctctgccaggttttcg

SEQ ID NO: 651565 - DNA, 614 bp, Homo sapiens
tcagaccattgtcagatgcagagtttgcaaatattttctcccattctgtaggttgtgtgcttactctgttgatagtttcttttgctgtgcaggagctccttagtttaattaagtctcatttgtcaatttttgtttttattgcaattgattttggagacttcatcatgatgtctttgcctgggctaggacttccagtacaatattgaatatgagtgatgagagggggtatctttgtcttgttttggttctcaagaggaatacttycagtttttgcccattaagtgtgatgttggctgtgggtttgttgaagatatttcctattattttgaggaatgtgcctttgatgcctagtttgttggccttttctgtgtctattgagatgatcatgtggtttttttagttccgcttatgtaataaatcacgtttattaatctgtgtgtgttgaaacaaccttgcatcccaggaataaagcctacttgattgtggctgattagctttttaatatgctgctggttttgatttgccagtgttttgtttaggatgtttgcatctatattcatcagggttattggtttgaagttttcttttttcatgatgtctctgccaggttttcg

SEQ ID NO: 651566 - DNA, 506 bp, Homo sapiens
tggagagtcagggcagcccagaagagggggatttccctcagtgcagcatacccaccctgccaagaggcagatagactgcttatttaagtggatttctgaccccactcctcctaactgagtgagaactcccaacaggagtctccagacacctcatacaagaatgttccagccagcatcaggccatggccctctgggaaagagctcccagaggaaggagcaggctgccatttttgctggtctgcagcctccacaggtgatatctacagggatgggagagactcaggtgaataggggctggagtggaccccaagcaaaccacagcagcgctacagaagacgggcctgactactaaaaraaaacaaaagcagaaagcaacaatatcaatgagaaagacaccacaaaaaccccatctaaaagtcagcagcctcaaagaccaaaggtagttaaacccatgaagatgagaaagaataaacacaaaaatgctgaaaactcaaaaagccagagtg

SEQ ID NO: 651567 - DNA, 396 bp, Homo sapiens
atcattgaaaactgtagaaattctaaagggttttcagaaagtttgtttgaataaacaagtcctgctaagtaactcatcaaaataaaaagcatacttagtgtaccttagaaaataacgtaactgatttggtcttttgyaaggcctgggtgcaataggtatgagtctttgtttacatattatcaacttgtatcaattccagaaggcaggcagagatgccctgaaaaaattctaaatcaggaaattagaggatagcttctttgggttatggaagattttaattcaatcctaccaagatcacaatgtactgagatcttatgatagtaattagagtgtctggtggaatcttattgctgtttagagactatcttggtgtagctgatccaattctcctaaaat

SEQ ID NO: 651568 - DNA, 406 bp, Homo sapiens
ttacatattatcaacttgtatcaattccagaaggcaggcagagatgccctgaaaaaattctaaatcaggaaattagaggatagcttctttgggttatggaagattttaattcaatcctaccaagatcacaatgtactgagatcttatgatagtaattagagtgtctggtggaatcttattgctgtttagagactatcttggtgtagctgatccaattctcctaaaatggacaagtagtagagcagcaaggttagctactttgattatcactttctaatcctttcactatgggtcttgagcagctacaatgccaagtcatctggyaggaagtgtatttgatttaactgaagggaagctagcaggtaatcctagttattttgcctagggtgtaggtctacaggacaag

SEQ ID NO: 651569 - DNA, 376 bp, Homo sapiens
ccagtgtttaccctcctttgctttctaagaacttgtacattttgtgatagaagtggatgtagtttacagataatgttttccccaaattactgaatgacattgatttggagtgrtataacaaagtactccttgctttgcaaagaaatgttgatagctttagtgactgtattagtatgtgaggtattaattgaggactcaatccaggaatctttcaaatctgaaaaagatgctgactcatttgttagtgatcaagtacagtctgtaatcagctttcatcttgagtctgcagagaaaaagagtagtgaaatggggatgaagatagaaagttaaatttcaagaattcacttgtgctatttatttgaaatctagatattat

SEQ ID NO: 651570 - DNA, 576 bp, Homo sapiens
gatgctgacatttaattttaactattctagtagatgagaagtggtatgtcattgtatttttaatgccatttcacggatgactaaagatatggagcactttttcatacacttatttccaatttatgtctttctttaaattttctgatttttttgtcctaatttggttgaaatttttaaaatgctttattggagttgttcatatatattgaataaaagaagtattttgtcacatatgtgagtttgcagatatgytctcccagtctgtggcttctatgtttttatttccttaatggtgacttttgatgagcagaagtttatggtattaatggagttcagttttatcatgttttgtagttagtgctttttctgacgtttcagttttctaagaaaactttgtttactataaagtgtatactatgttttctttcagaagcttcatagttttagctttttatttgggattatgaataatttcaaattattttacttttatgatgtgagatcagggtcaatatatctccagaatttatgcaagtgctccagcaacacaacctgaaaagagtttctttgttccac

SEQ ID NO: 651571 - DNA, 625 bp, Homo sapiens
gccttttctgctgaaatgtaacccttcctcttgttagcatagaaataaagaactgatagtgaatttcaagttacttctttacatttcaaaataaagtgagtctcatgtttactttccatattgaattaataatgttagaaagagttgtaaacaggaaattgtgaaaacataattgggtaattatcacttttgagaaagtctaggtttgtaatacaatatatttgycttctttcaatgatacattgcaaataaatagtatcactattcaaataatattatcacatttagttaataaaacattcaagtaaacacaaaatattgatttctcacacaatgttgaaagctaataagtataaaataaaattatgtacaagaaatctaaggtcgtgacagattatttaaaataatttatagtgaatattactgttattattattattaattttaaagtcagcgtttctttctgttggccaggctggagtgcatggtgtaatcatagctcaccacagcctcaaactcctgagctcatgatattcttccaccttaacctccagattatctaggactatagggaggcaccatcacttctggctaaatatatatatatatatagtagagacttgct

SEQ ID NO: 651572 - DNA, 625 bp, Homo sapiens
gccttttctgctgaaatgtaacccttcctcttgttagcatagaaataaagaactgatagtgaatttcaagttacttctttacatttcaaaataaagtgagtctcatgtttactttccatattgaattaataatgttagaaagagttgtaaacaggaaattgtgaaaacataattgggtaattatcacttttgagaaagtctaggtttgtaatacaatatatttgccttctttcaatgatacattgcaaataaatagtatcactattcaaataatattatcacatttagttaataaaacattcaagtaaacacaaaatattgatttctcacacaatgttgraagctaataagtataaaataaaattatgtacaagaaatctaaggtcgtgacagattatttaaaataatttatagtgaatattactgttattattattattaattttaaagtcagcgtttctttctgttggccaggctggagtgcatggtgtaatcatagctcaccacagcctcaaactcctgagctcatgatattcttccaccttaacctccagattatctaggactatagggaggcaccatcacttctggctaaatatatatatatatatagtagagacttgct

SEQ ID NO: 651573 - DNA, 625 bp, Homo sapiens
gccttttctgctgaaatgtaacccttcctcttgttagcatagaaataaagaactgatagtgaatttcaagttacttctttacatttcaaaataaagtgagtctcatgtttactttccatattgaattaataatgttagaaagagttgtaaacaggaaattgtgaaaacataattgggtaattatcacttttgagaaagtctaggtttgtaatacaatatatttgccttctttcaatgatacattgcaaataaatagtatcactattcaaataatattatcacatttagttaataaaacattcaagtaaacacaaaatattgatttctcacacaatgttgaaagctaataagtataaaataaaattatgtacaagaaatctaaggtcgtgacagattatttaaaataatttatagtgaatattactgttattattawtattaattttaaagtcagcgtttctttctgttggccaggctggagtgcatggtgtaatcatagctcaccacagcctcaaactcctgagctcatgatattcttccaccttaacctccagattatctaggactatagggaggcaccatcacttctggctaaatatatatatatatatagtagagacttgct

SEQ ID NO: 651574 - DNA, 602 bp, Homo sapiens
tgctattgtctgaattgtgccacctctgcccccaaattcatatgttgaagttttaacttccagtacctcagaaaatgattctgtttgaagatagggcctgtaaagtggtgacttagataaaattgggacaatggatgagctataatctaatattatctgatgttgttataagaggaggatattaaaacagacacagagggaaaatgatgtgaaaacatcagatgaagatggccatctacaagccaaaattgtgagaaaatatatttctgttatgttagtcacctgactggtacttgctcatcacagtactgttatactaatatagtgataaaagcccraggaaacataaaatagaaatatctatggggaagacagatagttgtggtctatatataggggaaataaagtctatacctaaaatattccaggaactaaaacaaatgatttacacagaaatggaaactcttataataacctgagaaactctataactggaaaattgagaaactgaaatcaagaactcaaagatggatttaataacagatttgatatagatgaagaaatactattgaactggataatagatcagaagacaatttccc

SEQ ID NO: 651575 - DNA, 602 bp, Homo sapiens
tgctattgtctgaattgtgccacctctgcccccaaattcatatgttgaagttttaacttccagtacctcagaaaatgattctgtttgaagatagggcctgtaaagtggtgacttagataaaattgggacaatggatgagctataatctaatattatctgatgttgttataagaggaggatattaaaacagacacagagggaaaatgatgtgaaaacatcagatgaagatggccatctacaagccaaaattgtgagaaaatatatttctgttatgttagtcacctgactggtacttgctcatcacagtactgttatactaatatagtgataaaagcccgaggaaacataaaatagaaatatctatggggaagacagatagttgtggtctatatataggggaaataaagtctatacctaaaatattccaggaactaaaayaaatgatttacacagaaatggaaactcttataataacctgagaaactctataactggaaaattgagaaactgaaatcaagaactcaaagatggatttaataacagatttgatatagatgaagaaatactattgaactggataatagatcagaagacaatttccc

SEQ ID NO: 651576 - DNA, 652 bp, Homo sapiens
gatatgcaaatcaaaaactcaatgagaatctcaccaccagtcagaatggctatcataaacaacttgaaaaacaatagatgctggcaaggctgacaaggctggcaaggagaaaaaggaatccttatacgctgtttgtgacaatataaattagttcagtcactgtggaaagtagtttttagatttctcaaagaattttaaacagaactcttatttgacccagcaaccccattactgggtatatatccaaaagtaaatacatcgttctacccaaaagacacatgcacttgtatgttcattgcagcactattcataatggcaaagacaaggagtcaacctaggtgtgaaccaatggtggaaaaagaaaatgtggtacatatacaccatggaataatacatagccataaaaaaagaatggaattatattctttgaggcaacatggatgtagctgaaagccattatcctaagcacaggatgaacacagaattaacgcaggaacagaaaaccaaatgctgcatattcttacttataagtgagaactaarcatcgagtgttcatggatgtaaagatggcaacaatagacattggggactgctagagagggaagggaacttgggggctctgcattgaataactattgggtactatggtcac

SEQ ID NO: 651577 - DNA, 613 bp, Homo sapiens
gtggaaattgcctaatcagttgtcagtactgtatctggaaactaatcttggtaatgtgtgatgatgctctttcaaaatagctgaaaagaaattaccgtgtgcttgttcttacttcatccccattttgttgtatggtatttaaatgaaagattatttgtcttcctattgaatttccaaagctgatatttgcatttgccattttttaatgatggatagaaacattagttgtcttactttgctaagtttggcgtaggacctatcatatattttatgttttttgtcacagtcctgttactagaatgctagcaattaracatatgcaatgagtaacctaattgctttcatacagtgatttgaagtgctgcaggcagtaactcctgcactccaaattacaatgttttaacttgtaacatgttagagggaattataggactttctataatataaatatcctattaactaattcttgtgctgttaagttacaggctttgacttccgggtcagaaaaagtcacctacttcagataaatcttgagcattgacacaagtcaaagtcttgtcttcaaacctgtgagaaagtgacaataaaaatgaactgctcttgtgagacacag

SEQ ID NO: 651578 - DNA, 619 bp, Homo sapiens
attggctttctgtgcgggagcagcaggacctagaccaaacctctcatggttcagtaacatagtctctatgagaaacagtatagtggctcctaaatayattaaaaatagaattatcatatgatccagcaatcctacttctgggtatttattaaaagaattgaagccggctgggcgcggtggctcatgcctgtaatcccagcactttgggaggctgaggcaggtagatcacaaggtcaggagttcaagaccagcctgaccaacacggtgaaaccccatctctactaaaaatacaaaaattagccaggcgtggtggcatgcacctgtaatcccagctactcgggaggctgaggcagaagaatcacttgaacctgggaggcagagcttgcagtaagccaagattatgccactgcactccagcctgggtgacagagccagactccatctcaaaaaaaagaattgaagtcagaatctcaaaaatttatttttattttatgttcatctcagtattcacaatagccaagatttaaaaacaacctaaatatctatcaatggatggatatataaatacaaatgtggtatatgcactcaatggaatattatttgaccattaataaataaa

SEQ ID NO: 651579 - DNA, 595 bp, Homo sapiens
aaacagtatagtggctcctaaatatattaaaaatagaattatcatatgatccagcaatcctacttctgggtatttattaaaagaattgaagccggctgggcgcggtggctcatgcctgtaatcccagcactttgggaggctgaggcaggtagatcacaaggtcaggagttcaagaccagcctsaccaacacggtgaaaccccatctctactaaaaatacaaaaattagccaggcgtggtggcatgcacctgtaatcccagctactcgggaggctgaggcagaagaatcacttgaacctgggaggcagagcttgcagtaagccaagattatgccactgcactccagcctgggtgacagagccagactccatctcaaaaaaaagaattgaagtcagaatctcaaaaatttatttttattttatgttcatctcagtattcacaatagccaagatttaaaaacaacctaaatatctatcaatggatggatatataaatacaaatgtggtatatgcactcaatggaatattatttgaccattaataaataaaaatctgccatgtgtgacaacgtgactgaacctgcaggacattatgtta

SEQ ID NO: 651580 - DNA, 568 bp, Homo sapiens
ggggctggggatagggagaagtggggagttgctgttcaagttgtatacaatttcagttatacaagatgagtaagtaagtcctagagatctgctgcacattttgcttatacttaacaatactatactgtatatttagagatttgttaagataatagatctcacgttacatgttcttacyacaataaaaatattaaaagcaaagtaaaaagttggtgttggcaagtcaggtttggtccatggagccttatttgctaatcttttgtctagattatcctgactgatacagtctcataatgaagtcatgggaaatacatgaatgtgaatttcaaatcatgtattttgattgattctcctgatgttttagtcctgaaattaaactaacacttgcaaagcagttttgacactctgtgattttcattttccatgtagtttctaaataatattaggactgtgtttacatttaaaaataaatttctacacctttgaattaaaaaaacaaacaaacaaactattcacctgcaaatcctgctaactatcactaaaaaggaaggataatttgtgaggttag

SEQ ID NO: 651581 - DNA, 566 bp, Homo sapiens
attataggaaaaagaaaaaccttttttgattgagttgacaaactttgatataaaattatattctaaaattttttaatgtctatggcagagaggttaatacaacattttattttatattacaggatatcacctgtcttcagggattttatagtatttcatggatatggtttgtgaagagttttgagagaagaaggtctgcccttttcacacagtgagaaagtgtccaaattcttatgcatttctaatctgtaacactatattattaattgcttatgttaaaaaataacaattttatttaacttgtgagtacaggtacacttcaaatctgtgctgcatttctgaggttatgtatttgtgtatacccagttctgcttgagaatcttgtggcatcaacckcttaggagaccagaagagtctttttggcttctgaatgttttctcttgccctttctattacccttaaaagaaatttcaatgatggtacagatgactggagtctagtgtggactgattctatgatgataactcgaaaactttggaaggtgtttcagggatagtaagcaccag

SEQ ID NO: 651582 - DNA, 582 bp, Homo sapiens
acttgtagggcaaatgcaggctggctgcttttacctttcaagtgatccacataagtattgttgatgttgttagtgaaggaggacaaactcattgagagggcattcctgcaatgcatgtccactcccctcgcatasagtaggtattaggttaatgtattagtctgttcttgcattgctataaagagctacctcaaactgggtaatttataaagaaaaaaaggtttaattgactcacagttctgcaggctgtacaggaagcatggcttaggaggcctcaggaaacttacaattatggcagaaggtgaaggagaagcaggcacataatatgtggctggagcaggaggaagagagtgaaggaggaggtgctatacatttttaaacaaccagatcttgtgagaactcactgtcacaagaacagcaagggggaagtccacctgcgtgatccaatcacctcccgcattgttggaggaccctcctccgacattgaggattacagtttgacatgagatttggatggggacacaaagccaaaccatatcagttaatatgtgtgtagtaagatgataaactgaaatatttatg

SEQ ID NO: 651583 - DNA, 582 bp, Homo sapiens
acttgtagggcaaatgcaggctggctgcttttacctttcaagtgatccacataagtattgttgatgttgttagtgaaggaggacaaactcattgagagggcattcctgcaatgcatgtccactcccctcgcatacagtaggtattaggttaatgtattagtctgttcttgcattgctataaagagctacctcaaactgggtaatttataaagaaaaaaaggtttaattgactcacagttctgcaggctgtacaggaagcatggcttaggaggcctcaggaaacttacaattatggcagaaggtgaaggagaagcaggcacataatatgtggctggagcaggaggaagagagtgaaggaggaggtgctatacatttttaaacaaccagatcttgtgagaactcactgtcacaagaacagcaarggggaagtccacctgcgtgatccaatcacctcccgcattgttggaggaccctcctccgacattgaggattacagtttgacatgagatttggatggggacacaaagccaaaccatatcagttaatatgtgtgtagtaagatgataaactgaaatatttatg

SEQ ID NO: 651584 - DNA, 657 bp, Homo sapiens
ccatgaagaacttctgagaaccacttaatccaaaccttcacctttactaagaaaggacaataccagaagtcttatgaaatcctatcaactttttcaaaatactacaatgtgctttcaaattttcttcraaaatccatttcttcaagtcctacggtatttgcctgcctctgctttccccagagatttctcactgcttacttcaacataggtttttctaaattcctattcaattattaaaattaatgcctgccaaggcattaatagtgacaatactattagcctttcttctcctgtcctccttgcaaacttattaaggtacattgttaagtgagatttcctggtctctagtggttcaattcccacctactagagcttcttctttgtccttgacttttcttccctggcaatcaggctctgaagctgcttctcactaccagtcctttcacatacctcagcactaccctccaaaatgtttgttggcttctaggaatttttctgtccttctcctttatatcagtacttgtattgttcctaatactaggctttgctttgaaacatatgcaaaagctctgactaatgtcataatataaatatctcaaaacctatccaaaaagtaatcagtaaactaaactctctcttcctatatttgattggcta

SEQ ID NO: 651585 - DNA, 408 bp, Homo sapiens
ttaactttaagtacgtataattgatatacatcaattatacctcagttaacaatgaaaataaaaatattaaaccttttaattctaaaamattacattcatatgttgggctcacatataaaaccagtttgatcttataaaaataactggacattatcctgtagctttactctgaaggagtatttccttatgttcttgtctaatttaaaataaatttctttcagtcttactgaggtagagataaataaaacagcaaattaactcctctgtctaaaaatgcccattactgttttcttctaaacaatttacttttcattagtaatcagatcccattttgacaatagtaattttcattccttttctctaagccatagtttccttgttcattcaagggtacattagttgctagaa

SEQ ID NO: 651586 - DNA, 408 bp, Homo sapiens
ttaactttaagtacgtataattgatatacatcaattatacctcagttaacaatgaaaataaaaatattaaaccttttaattctaaaaaattacattcatatgttgggctcacatataaaaccagtttgatcttataaaaataactggacattatcctgtagctttactctgaaggagtatttccttatgttcttgtctaatttaaaataaatttctttcagtcttactgaggtagagataaataaaacagcaaattaactcctctgtctaaaaatgcccrttactgttttcttctaaacaatttacttttcattagtaatcagatcccattttgacaatagtaattttcattccttttctctaagccatagtttccttgttcattcaagggtacattagttgctagaa

SEQ ID NO: 651587 - DNA, 408 bp, Homo sapiens
ttaactttaagtacgtataattgatatacatcaattatacctcagttaacaatgaaaataaaaatattaaaccttttaattctaaaaaattacattcatatgttgggctcacatataaaaccagtttgatcttataaaaataactggacattatcctgtagctttactctgaaggagtatttccttatgttcttgtctaatttaaaataaatttctttcagtcttactgaggtagagataaataaaacagcaaattaactcctctgtctaaaaatgcccattactgttttcttctaaacaatttacttttcattagtaatcagatcccattttgacaatagtaattttcattccttttctctaagccatagtttccttgttcattsaagggtacattagttgctagaa

SEQ ID NO: 651588 - DNA, 481 bp, Homo sapiens
ctgttagttcctggcttgactaatctatcttactggtgatccattcaataaatgagaaacattattctggctgggtccttttgtatctaagtataatattatcttttgactgtatatatttttgaactaaaataggcttatataaactctgaacataaatatgacctagggtttttttctttaataaaaggagaaaaaaactatagaagaaatcttcaatcacagactgaaattacytcaattttttaaaattccaaattccaaattttaatgatcacaaatatatcttttaagatatatactctacagcttaaatttattaaaaaattatttagtgccactattatgttgactagaacctatccacaagccggttgcagtggtgcacacctgtagttgcagctactcaggaggctgaagctggaggattgcttgagcccaagagttcaaggccagcctgggcaacatagcaagaccccat

SEQ ID NO: 651589 - DNA, 591 bp, Homo sapiens
cagggatacacattcatttaaatgctaagaggtagtccgatggcaaaacaacttcgtggttatgaatacagcttgataaagtgtagttgatactrtccacacattattctatacatatttaaggtttgtaattgtttgtcctccaatgcaataaaattctcatgtttgcaccaatcaaagaatacttacatatgtctatcctcatattgaaaaatcatgcctttgaaaatgccttaattttctgcaagcatctaaaatatctttgaaatttctaccactcacatatagttccaagctacgtgtttgcctcagcatctgcacaaaagccaccacacatggaaagccctgcttggaccactgcccacagggattctcaaccctggagtctgtgcccagattaaacagtcagaacaaatccttttgccaggagtctgaacatcatcctcaaaaacgacatgtatctctttctatagaaatatctagtttactgtaaactagatatttattagcctgaggctgagcacctgattgcctgttcttcatggaaaagcagccgctccagttgttaaaagctattcttaagaaataatt

SEQ ID NO: 651590 - DNA, 439 bp, Homo sapiens
tgaaccatatgatctttaaagacaagctctaatggtctgcagcaaatgtgcaaagacccagctgtcccttattcactaccacctatgcaaccactctactttcaaatcaacaagagagaggaccttgctagrgagataggttagtaaacctatttgagtacggcaacacaggaacagtacagtatgagagttcaaacaagcagtataaaacaaccacagtacacacagaaactcaaatgcatggagcttcagcatgtcataggttgtttactctttttcctgttcaaatctagttttcactttttcttcagcaaaggaagatagtatagtcatccccagtatcatgggaaattggttccaggacaacccttggataccaacatctgaggatgttcaaggtaatgatataaaatggtgtagtatttgcatgtaactatgc

SEQ ID NO: 651591 - DNA, 405 bp, Homo sapiens
acaaacaaacaaaaagaacattcctcttccttttccctcccactgcgtatttggatgctgctttcttttcactgtatctctccatgcaaattaattcagataaataagctctaaccaaattaccaactgatgttggatatcagctttgaatagcttaaaaagcatctccttcagagcaggtcagtagcactttgtctatcatttgytatcaagctatctatcctaatagcttggcagtcttctaaacaatttactgcatttctgccaccagtgagcaagataagctgttctgtcaggcattatctttgacaatcttacatagctacagtccagaatctgtttctttgtcaagtctaggcatattcaagtttcaaagacaaacgaaaggcaacataaaaaatacca

SEQ ID NO: 651592 - DNA, 605 bp, Homo sapiens
taatttataaaatattatttatagcattatcagtcttaatgaccctcacattacagaatggctagcatccctggaccacatctatttattactgtaaaaaaaaaatttcttcttgcacccccctacaaattcccaaaatacctactaaaggggaaactgtctgccttactccctcaactgataactactaattcataaaatggaggtagtaccattctaaagggccatgctgtcagaaaagctacctttatactcttagtccatcaaaccccaaaacaatatccctgaaaacctattaagagctttatttctaaaatctcctccctccctggatgaatcatttgcatatcaattgctagtggagatgtcctgaggtaaaacaccaccgacttcccaacttccccttccatatcatctaacttagcctaaccctacatccactctcaatgtcccactgccagaacgactcatttctgatacacaaataatgctaactatcaatcccacaatcaaaggatttactgtggtagaatgcctcagaaaatggttagaagtgytcctcttttaaaagaaaaagaagttctaggccacattttagtttttct

SEQ ID NO: 651593 - DNA, 645 bp, Homo sapiens
actatgttgcccaggatggtcttgaactcctgagctaaagtaatcctctcaccttggcctcccaaagtactaggattacaggcatgagccaacatgcccagcctaacagtcagattttaagaaaaattaacaacattaataccatactgaaatactctctttgcatatctgacatcaacctatgtgttgctatagattacctaaggatgatgcaacagaaaagttgaaagacttttacagggaccatccatatacccaccacttagactctgcatttamaatttttactgtatttgttatactatactatgactatactgtatgctttctgtatgattaatccattcaccaatccatcttagggtttttttaatgcatttcaaagtaagttaaacacattaatatagtttcccccaacagtccagcatgcatagcattaactagaatttaacatgtattattcctttttttccttttgcagtaaattctacatgcaatgaaatgtgcaaattataagtctaccatttcataaacttgaacaagtgcatacatgtatgcaacctaaactcttacaaagtcaaaacactatcgttatcccaggaaattctctcatatacattgttttgtattcataaagtcacttat

SEQ ID NO: 651594 - DNA, 645 bp, Homo sapiens
actatgttgcccaggatggtcttgaactcctgagctaaagtaatcctctcaccttggcctcccaaagtactaggattacaggcatgagccaacatgcccagcctaacagtcagattttaagaaaaattaacaacattaataccatactgaaatactctctttgcatatctgacatcaacctatgtgttgctatagattacctaaggatgatgcaacagaaaagttgaaagacttttacagggaccatccatatacccaccacttagactctgcatttaaaatttttactgtatttgttatactatactatgactatactgtatgctttctgtatgattaatccattcaccaatccatcttagggtttttttaatgcatttcaaagtaagtyaaacacattaatatagtttcccccaacagtccagcatgcatagcattaactagaatttaacatgtattattcctttttttccttttgcagtaaattctacatgcaatgaaatgtgcaaattataagtctaccatttcataaacttgaacaagtgcatacatgtatgcaacctaaactcttacaaagtcaaaacactatcgttatcccaggaaattctctcatatacattgttttgtattcataaagtcacttat

SEQ ID NO: 651595 - DNA, 624 bp, Homo sapiens
atgacctaagtagtcacataacacacaacagtcacaaagaataaaaaacgtctaaggggaagtctggaatacatcaagaacaatgtattcttcaagactcagctcaaattctatcttttatagttcattcccatctttccattttccacattttctaaaatactattaaactgtctttattttaatagtaatttacttctaagtacaaagctgcaattcagtttacctttgcagagaaggaaaggaaraacaacagatacaaagcaagtcaatggtatcctctctaatttctcttcttggttacttgactgatttgaattataaagtttaagaggaattttaaaagtaacctttttttaatctgcaaagccatattccaagaccaactctcaaatctgcagatagaaaggaaacattctactagtataagaagtataacaaatttaaatttagaactaaccaaacacaagaaatcttttaaaattcgcatgtaaccgttgaataaggaaaaaaaacctttcctaacaatatcaattcaaaatgctttgcttcagctgagcctggtctgaagcactccagagcaatttacctactgagtcataaacatgaacagttcatttcagt

SEQ ID NO: 651596 - DNA, 560 bp, Homo sapiens
aaactcagagttagaagttttctcaggccaggcgcggtggctcacgcctgtaatcccagcactttgggaggcagaggtgggcagatcatttgaggtcaggagtttaaaaccagcctggtcaacatggtgaaaccctatctctcctaaaaatacaaaaattagctgttaaaaagggcatggtggtgggmgcctgtaatcccagctactcaggaggcttaggcaagagaattgcctgaatccaggaggtggaggtcacagtgagccgagatcacaccactgcactccagcctgggtgacagagcaagactccatcttcaaaaaaaaaagaagttttctcaaaggtgcctgtaaatcctctccaaaggtggccattataggcacttgcccagccctttatatagcaataaatattggtataagctaactaataattgcagggtcctctgtaaacataaagtactaaatatttattttaaaagaactacactgatccatcactaaatttagtggatagagttcatcactgcaactcctaaaaatgacactagcccccaactact

SEQ ID NO: 651597 - DNA, 617 bp, Homo sapiens
tttaaccactacctatcagtctccaaaagagcactgactttctaaataagaatggaaccctggccaggcacagtggctcatgcctataatcctagaactttaggaggccacagtgggcagactgcttcagcccaggagttcaagaccagcctgggcaacatagcaagacctgtctctactaaaaatcaaaaaaattagctaggcatggtggtacatgcctctagtcccagatatttgggaggttgaggcaggaggatcactagaactcggcatagctgcagtaagctatgaccacgccattgcactcctgcctgggaaagagagagaccttgtctcaaaaaataaaaagaaaaaaagaatgggacatttaaggaccaaagctagacatgataaagggtttacccgagagactatgaaggtctctactacctccctttaattccctctgtgtaatctatagtcccaaacaaaggacagacagagaagttacttacaagctacttacatattttaagaaacagraaaggaacagtagacaagatacttattttattctccattatatcacagagagcgatttgcctctacaattaccttatttgtagaagccttaaggg

SEQ ID NO: 651598 - DNA, 530 bp, Homo sapiens
acacacttacgtcttgcaggttacacatcacaagcccttgtaatakcctgtcatcttcagatttctgatcacaatgcccgctacaaaaagccatgccacaaataatctttcaaggttttcttactgacactttcattactatcattccaacatctcttaatggttgacctctgaccatttgaagcaaaccaaatcctattgtacacaaaacagcgctgaacacaataacacagtatctaaacctaaaatacttaaaacaaaactaacaacaactgcagtattttttttaattatatagaaatagatctaggcaatttcatgaagttttactactttatatttactgcagtgtgagaaatgtgatacaaagcacacacaaagagtaaacaatgagaaggaagaaaaggagggactataggaacttttaaaaacatcgtttaaatctactccagactcaaattattaaaataataaaataatctcagcagatgagctaatttaagatgatggcgatgtttgctatagcaatt

SEQ ID NO: 651599 - DNA, 575 bp, Homo sapiens
aatactttgcatgtttagtaaacatccatcttgaacagaagataccttgacatcagttctatttaatacttatggcaattaagagatttagaaagcagaggaaaagaccaaaaaaaaagtatgtgttacaaagtgtcatcatgcttgtaggaccccagcattcttgaaactaacgcacctttaaaaagtaatatttacactgctgtaaatatttgcaaagtatcaatgtttaattcacttagaattttaaggattatggatttactagcgaaaattcccctaaagcaactttcccatatcagtaacttttatttagggaaacaagtttaatgtacataatacatgtgaccttggaattcaatagaattttcgaaactagaagtaactcagaacrttcactagatgtgttttaaagtcttttttgatactgtccttaacatttgcttatttgcaaattaatatgtaagaatgagtctaaaagtaagttttaggaatggttattcgacaaagatgttattcctattaccaatactgcgaaatgataattacagaaacaatgtgggatccgttttata

SEQ ID NO: 651600 - DNA, 585 bp, Homo sapiens
tttcaacactaaatgttccctggaggctaaacctgagtctgggacctgcctcaaggctgttgccctgtgaccttgggtgaggcacggaccytctctgctcctctgtttcccgggagacagccctgggctaatgacccccacttccaatgggaccagaggagcaggtaacacacacatgctgtgggaccacaaggccattatcagcaacggcggcttcatgtagcagggtgaggtcaactgggcagagagagaagcttactcttgtgtgaaaagcttcagtactgcacatggaacaagcccagggccagtcatcccaagcagtagaccctatgacctcagccatgtcaccgtctccaggccttcatcttctcatgtttccatgagggtattcgatgggacagtcccattctaagaatctgttttggaggtggctagactgtgtcctgccaatccctggggttgtcctgtaaggacaggcatccttgagtttgtagattgattctgtaggtctcaagcgggcctctctctcaaatagctagatcttgggcttcattcattcatgggctttctgcttaacatgtatgt

SEQ ID NO: 651601 - DNA, 627 bp, Homo sapiens
aactacaatgatttcagaaacacttgagggaatgggatttccctcagtacatcagcaccgatggccattgaaaaatagccatacatgtacagagacactcgttacagacgcactgcatrggactccttggtgctcacatggaggttcaaatgcttgtctaatatttgtgggccccgaaacctctactttaaggaagtagagcaatgaccacaaagtgtgccactttggctacatggtactgtagatactctcaggagctcttatcacaactaggtcctggataaattaaagaaaacatatattttaatgcgttgatgggcttattggaaataaggaaagttttgagaggtgtgataaataaataaatgtatgccagagggctgaaaccaaagcaaggaatggtaataaacaagtaaattgaataataactataaaataggattgtcctgagtttgaagacctatatcagcaccaccaatagaaaactaacttttggtcgggtatggtggctcacgcctgtaatcctcgcactttgcaaggccaaggggggtggatcacttgaggtcaggagatcaagaccagcctgggcaacatggtgaaactccgtctctactaaaaatacaaaac

SEQ ID NO: 651602 - DNA, 588 bp, Homo sapiens
ctatattattctcatttcagttccgaactccctataaacaaaaatgcccatgagggacggcattagtgggacatatcataggctacaacccatctacccatgctgttagagttgttcttactcaaaggatacttgccaaacttcctaagaaaatacagggaagcctcagggcaaaaactgctacacgtgggactggaaccagaaactgaaggaggtcttccatccatccaaagcctcagtctgtgcttcattttgtggaagtgttttactcctctctttatctgcacacagtattctcttcttggtgagcacatggcaatgtctggctatgccaaatcctccgaattgacctggcacaggtccaacaatctttaaagattggtcaacacactctctcccccgaaaatccccagatttcatatcagaatgtgtttggctcagctttggttcctgatccaatcagctctgcacaagaagatggagtcttataacatggcttccggggactactscagtggttcactgacagtttaagaaacaaattgtggactgagcagattcccaaaatacaagtaacctcacatgtag

SEQ ID NO: 651603 - DNA, 602 bp, Homo sapiens
tagaaggatctgaagaccgtgtgaaccttactggctgccccactccaacaacctgagcccacaggcaagcaacttgctacactgaacctagtaccccacagtctctttcagagaacggaacaagagaatggcttcttatcacagcagccctgggaacctgagctgcatacaggcaatggaatgaattaatgcatgcacatacaaacttgtatttacaggctattcttgtttaaaaaacctagtatggataatacaggattgcgtttctttttttttttttttttttaaaaggggtctcaccctgttgcccaggctggagtgcagtggcgcgatctaggctcactgcaacctccgcctcccgggttcaagcgattctcctgcctcagcctcccaagtagctgggactacaggtgcatgccaccaggcctggctaatttttttgtatttttagtagagacggggtttcaccatgttagccaggatagtctcgatctcctgaccttgtgatctgcccgcctctgcctcccaaagtgctgggattccaggtgtgagccaccrtgcctggctggattgagtttcttaactcaacctgcttaaatgtt

SEQ ID NO: 651604 - DNA, 667 bp, Homo sapiens
ataagaaaccgccagacaaatttgccagagtggttgttaagtgtctcatcccactaacaatggagaagagttcccattgctctacatcctcatcaacacttaaaatggtgaaaacgctttaaattgttaatattttggtcattttaataggtatgtaatggcatttcattgtgattgtaacttgtacttctctaatgagtaatgttgttgagtatactttttcatgtgtttcttggccatttgaatattatcttttgtgacaaatattgcaaacatggtagctgaagacaaattatttactttgctcacaaaatggcaatttgatcagagctcgttgaagacaactaaatgtctgctctgcatggcatcagccagggcaacttgaaggctgagggtaattcaacagccgggaactgaaatcatctgaagactcactcattcctgtgtctgaagttgatgctggccctcagctggatctcgagggaggccattggccagaacacctcctcatggcctctccatgtagcagtttggcctgctgggttccaaaagcatcccaagagaacgaagtggaagttcatggcgtcttatgacctagcytcagtcacagtgttattttcacaatacgctaatggttgaggcagtcactcaggtgcaaggggagggg

SEQ ID NO: 651605 - DNA, 379 bp, Homo sapiens
aaggcaggaacatttaagtctgctgaagctgctcccacagccaccccttctcccaggtgctctgttgcagggaactgggagttttatctataagcccctgactggggctgctgtctttctttcagagatgccatgcccagagaggagkaatctagagaggcagtccgtctacagtggctttgctaagctgcagtgggctctgccatttttgaacttccccgaggctcggctttgtttacactgtgagggggaaaccacatactcaagcctcagtaatggcggatgccctccccccaccaacctgaagcgtccaggtcgacttcagactgctgtgctcgcaatgagaatttcaagccaggaaatcttagcttgctgggct

SEQ ID NO: 651606 - DNA, 379 bp, Homo sapiens
aaggcaggaacatttaagtctgctgaagctgctcccacagccaccccttctcccaggtgctctgttgcagggaactgggagttttatctataagcccctgactggggctgctgtctttctttcagagatgccatgcccagagaggagtaatctagagaggcagtccrtctacagtggctttgctaagctgcagtgggctctgccatttttgaacttccccgaggctcggctttgtttacactgtgagggggaaaccacatactcaagcctcagtaatggcggatgccctccccccaccaacctgaagcgtccaggtcgacttcagactgctgtgctcgcaatgagaatttcaagccaggaaatcttagcttgctgggct

SEQ ID NO: 651607 - DNA, 453 bp, Homo sapiens
tacagaagttttctactgttcttagtgtttaatactgttgttcttgttgtcrtttttaacatgaaagggcattggatttctcaattttttttctgcattgagataattgtatggtttttgtccttaattttattaatatgatatattacattcattgttttaccctggaacaaatcccacctaatcatgatgtatcctttttatatgttgctggcttcagtttgttagttttgttgaatattttggcatctatattcataagagatattgctctgtagtttttttttttttcataatgactttttctgattttagcatcagggaaatagtgaccttacagagtgagatgggatattttccctcctcctttttttttttttttcacagagacagagtctcgctctgtcacccaggctggagtgccgtggcacaatcttggctcactgccaacct

SEQ ID NO: 651608 - DNA, 585 bp, Homo sapiens
ctgtcccagagagctgaagaactgctactggctcaatagctccagtggggaaaggctggagacccaggctgggagaacctgcccagtgaggagatacgggaacagggactcatgtaacaaacatatagaaaacatgtaacatgtagaaaacatgtaacatrtagaaaacatgtaatatatagaaaacatgtaacaaacatatataaaagtctggccacttttccattgggctgctggaatatgcaggaggtctgctccagtttctaatcacctcagattttccagcacctgaaggtatcaacaatcaaggctgcaaaacagcaaagatggcagtgtgtcactccctctgggagctccatcccagggaggtatggatctgttgccagcttgaacatactggcgagggtagttgtaaatcttggtcaggagattctgcccagtgaggagaaatagggtccaggacccataaggaaaggcagtctagctgcagcttcacagagctgctttgctgtgctggggaactgccccagtccctagttgccttggactctctagagccctatggcaagaagagctaaggctgtg

SEQ ID NO: 651609 - DNA, 585 bp, Homo sapiens
ctgtcccagagagctgaagaactgctactggctcaatagctccagtggggaaaggctggagacccaggctgggagaacctgcccagtgaggagatacgggaacagggactcatgtaacaaacatatagaaaacatgtaacatgtagaaaacatgtaacatatagaaaacatgtaatatatagaaaacatgtaacaaacatatataaaagtctggccacttttccattgggctgctggaatatgcaggaggtctgctccagtttctaatcacctcagattttccagcacctgaaggtatcaacaatcaaggctgcaaaacagcaaagatggcagygtgtcactccctctgggagctccatcccagggaggtatggatctgttgccagcttgaacatactggcgagggtagttgtaaatcttggtcaggagattctgcccagtgaggagaaatagggtccaggacccataaggaaaggcagtctagctgcagcttcacagagctgctttgctgtgctggggaactgccccagtccctagttgccttggactctctagagccctatggcaagaagagctaaggctgtg

SEQ ID NO: 651610 - DNA, 474 bp, Homo sapiens
gtgggttagaaaggttgacgaaatactgatctaaatttacatcttcaaatctattattgttctcagatttctgtgaatacttgtttcattaaaaaacgataatcctaatattctatgacaaaaatattatgattactatatatcaatagggattgtggatgacatcgtccattatagttaccaggcccttccttcttcatcatttttaaaaagtctctctttccctccttcyctccctcccttatatttgaaatgataatctgtacacagttatttctcatctttagaccagttaatatgttctggaacagaatgtgaagtaattggtatattttaagttaccttataatagaattaaattataaaatccattgaatccaagaaaaccagatctattatgagttgggccttcagtggttagctttcagaataacacttttctttttgaaaataattaaatgtttgtcacaggca

SEQ ID NO: 651611 - DNA, 639 bp, Homo sapiens
gggttacaggtgtgagccactgggcctggcctcacttggccttttaaaaagtagcattaatttgtcacatagcaagtggtgtagtgctgcctgaagtattttctgggccaagatggaataaaattacacagttaagaatatggtaccataatgcagataattatgcacaatttattgctattttataktatccgcttatgtcacattttaccttataaataaaatataaatagctgcactacttgtcttttcagttcatacatttttaataaactttctgaatactgtggccactgttgggccatttgaatgcatttaaagtatttttaccaaaacaaaaatttggactacagcaaaggactttctttctagaaatttgacataggatttaatttccacttagctattaattcaaaccttggatcacttctcttattcttcttttgttattgattggattctagaaataaggggagcactggtttgatgttagaattcttcaaatctgccacttcacttttggccaaatttattctaagacagtcctaggcaggctgcagtgtgtgtgctcatagctgtggtttgaggactatggtgatcaccaagcccagttcctttatcaaattgataggacacact

SEQ ID NO: 651612 - DNA, 639 bp, Homo sapiens
gggttacaggtgtgagccactgggcctggcctcacttggccttttaaaaagtagcattaatttgtcacatagcaagtggtgtagtgctgcctgaagtattttctgggccaagatggaataaaattacacagttaagaatatggtaccataatgcagataattatgcacaatttattgctattttatagtatccgcttatrtcacattttaccttataaataaaatataaatagctgcactacttgtcttttcagttcatacatttttaataaactttctgaatactgtggccactgttgggccatttgaatgcatttaaagtatttttaccaaaacaaaaatttggactacagcaaaggactttctttctagaaatttgacataggatttaatttccacttagctattaattcaaaccttggatcacttctcttattcttcttttgttattgattggattctagaaataaggggagcactggtttgatgttagaattcttcaaatctgccacttcacttttggccaaatttattctaagacagtcctaggcaggctgcagtgtgtgtgctcatagctgtggtttgaggactatggtgatcaccaagcccagttcctttatcaaattgataggacacact

SEQ ID NO: 651613 - DNA, 540 bp, Homo sapiens
agaaagaataccagagtcagccgccagtccaagagaactaggaggccacttgggctggcttctggatccatcactggaggggggccattgaaccacaggcaggtagccacaagggcaatcctggatgagcccccaaatttgtaactgcccaaggggttcacattgcccactgcctagacagagctaattcatcaagacaggggaattgcaatggagaaagagtacttcacacagagccggctgtgtgggagaaccaagttttgttattactcaaatcagtctctctgagcattcagggagcrgagtttttaaggataactttgtgggtggggggaagccagtgaaccaggagtgctgattggtcagagatgaaatcatagggagtcaaagcagtcttcttgtgctcagtcaattcctgggtgggggccacaagatcagatgagcctgtttattgatctgagtggggccagcttattcatcaagtgcagggtctgcaaagtatctcaagcactgatcttaggagcagtttagggagggtca

SEQ ID NO: 651614 - DNA, 417 bp, Homo sapiens
agattgctgggagtatcctcagcctgttatgaaggagactcttttagacctgatwtactctccagccagcctgaggtaagtctgtagccaaagagagggttagtactttactctgcaaaaattccttatgtcacctctattgccttgcattgtcatgagggcatgtgactttttcaatattgttctttcatgctaattacacacccatgtaaaatgggagtagctccctgctctcttcaacctgatcacttctgtcttcctatgagcaaatgactggagtctaattctgtaaaccaggtgtctgcaggtacactgcaggtgaagctagcagtacaaaccactaccacttacatttggttgtgagatgggaattttgcatcttatttctcttccttaaaattgattggcatagaattc

SEQ ID NO: 651615 - DNA, 557 bp, Homo sapiens
cactatgactactcttttgcatgtaattttttgtttctaagttgaaggagggtaataactgaatggtggatgcaatgtagattttaaaggttkcatttcagatttttaaatcacagaatgtaagcaaacaaaccatgttgaacaaaatggtttagtccacatgtcagctccaggggctctctctctctttttttttttttttaagacagagtctaaccctgtcacccaggctggagtgcagtggagtgaagtggtacttcacagagtcctctatattttcaagtttgtttcaaagtcacataattcaggccactgtatggatggtgtagcccacagagctacacccatcgcgatatggtcaatggagattcaatagtcttttcttatatgtgaatttgtgaattatcctcaagggtggaaaagattcttccaaaccaaagtggaatgacagtaagtgcccttggcacagccatctgtctgctcacttgtgtttaggaatccagatgccaggtgagaacccacagcaaccacagcttggtggagtgagccacagcggc

SEQ ID NO: 651616 - DNA, 625 bp, Homo sapiens
gctttctgtgttctcagtgcatggaagcagrtgtgtacggtgccctgtggccctcactggctggcataaccccccagagatgactcctgctctcaccctcagagtgagagtaggaacgcttagctgttactggggttcggcagcctgtctcatgattccctctgacggaattttctgtgggaatggtttgttgacagggcctacttggagcttgagatcaccctttctcaggagcagattcagaagtacacggactgcctgcagttctacgtgaacagcacacttaaggaactgaggaggctcttccttgtccaggacctggtggattccttaaaagtatagttgcttaagctgttcacttcacagtcttgactgttattttccctaaaggtgtaatactgtaaactgctacatcaagaagaataaaaagcaagtgctaattatattctagagtcagaagacctccagttgtatggcaccatgaaccagtctaatcccttcattgtaccaatgatgaaaatgtggctgagacatttgtccagggttgcccagtgagtcactggcagagctggaatcaaacccaggtcacatagcttctagctctatagtctttacaacacaccag

SEQ ID NO: 651617 - DNA, 625 bp, Homo sapiens
gctttctgtgttctcagtgcatggaagcaggtgtgtacggtgccctgtggccctcactggctggcataaccccccagagatgactcctgctctcaccctcagagtgagagtaggaacgcttagctgttactggggttcggcagcctgtctcatgattccctctgacggaattttctgtgggaatggtttgttgacagggcctacttggagcttgagatcaccctttctcaggagcagattcagaagtacacggactgcctgcagttctacgtgaacagcacacttaaggaactgaggaggctcttccttgtccaggacctggtggattccttaaaagtatagttgcttaagctgttcacttcacagtcttgactgttattttccctaaaggtgtaataytgtaaactgctacatcaagaagaataaaaagcaagtgctaattatattctagagtcagaagacctccagttgtatggcaccatgaaccagtctaatcccttcattgtaccaatgatgaaaatgtggctgagacatttgtccagggttgcccagtgagtcactggcagagctggaatcaaacccaggtcacatagcttctagctctatagtctttacaacacaccag

SEQ ID NO: 651618 - DNA, 625 bp, Homo sapiens
gctttctgtgttctcagtgcatggaagcaggtgtgtacggtgccctgtggccctcactggctggcataaccccccagagatgactcctgctctcaccctcagagtgagagtaggaacgcttagctgttactggggttcggcagcctgtctcatgattccctctgacggaattttctgtgggaatggtttgttgacagggcctacttggagcttgagatcaccctttctcaggagcagattcagaagtacacggactgcctgcagttctacgtgaacagcacacttaaggaactgaggaggctcttccttgtccaggacctggtggattccttaaaagtatagttgcttaagctgttcacttcacagtcttgactgttattttccctaaaggtgtaatactgtaaactgctacatcaagaagaataaaaagcaagtgctaattatattctrgagtcagaagacctccagttgtatggcaccatgaaccagtctaatcccttcattgtaccaatgatgaaaatgtggctgagacatttgtccagggttgcccagtgagtcactggcagagctggaatcaaacccaggtcacatagcttctagctctatagtctttacaacacaccag

SEQ ID NO: 651619 - DNA, 547 bp, Homo sapiens
ccattttaactcgacaactgtgtgtatgtgtttaataccactgctttttaaacctgagtcttcagccttactttatggctcccttatatattaggagatagagatttcagttttacatacccatagctaacatgatcattaaacttaggagttttccctaattcttacattactatttttaggtatrtagtcatctaaagtgatagctcttatattgcattattattcaatattttgttttattaaaaagctagcctaatctttaactataaatatatttcaccaaaggactagactttttcacaaaaactctatctaattatctgataataatgtggctggacctaggtgagggtcagatttagagagaggcattttaggtagttaaagatgtgtaataacaaaataagaaaggccaatcacattaaagttcctctgctcttagattatatgtgatgtgcttcagttccctctgaagtttataaacttttgttttttactgtgtattatttacatttgtcctcttaaagtcattaggaactcatag

SEQ ID NO: 651620 - DNA, 547 bp, Homo sapiens
ccattttaactcgacaactgtgtgtatgtgtttaataccactgctttttaaacctgagtcttcagccttactttatggctcccttatatattaggagatagagatttcagttttacatacccatagctaacatgatcattaaacttaggagttttccctaattcttacattactatttttaggtatgtagtcatctaaagtgatagctcttatattgcattattattcaatattttgttttattaaaaagctagcctaatctttaactataaatatatttcaccaaaggactagactttttcacaaaaactctatctaattatctgataataatgtggctggacctaggtgagggtcagatttagagagaggcattttaggtagttaaagatgtgtaataacaaaataagaaaggccaatcacattaaagttcctctgctmttagattatatgtgatgtgcttcagttccctctgaagtttataaacttttgttttttactgtgtattatttacatttgtcctcttaaagtcattaggaactcatag

SEQ ID NO: 651621 - DNA, 435 bp, Homo sapiens
gagtatcacaaatcatacctattactttttcatttggtttgttggttgagtccaaaaagaggagtacctgttatgttctggacacttcatatgataggtacagagggtataaagataaatgaaatgatctcagccctaaaagagctcttagcccagtggtgcagacaaaattatacagaaataactataataaaatatartaagtacagtagagctatatgaaatactaaagtcagagagatgaggaaacaattgttccttcctggacaggatagtggaaagccattaagataaggtggcattcaacctgggccttgaaggatgggtaaacagtcatcacgtggatgataaggggaaagacgttgcaagaggaagaggtaataaagcaaagacagagaagcatgaaaatgtaagtcatgtttaataggcaacagt

SEQ ID NO: 651622 - DNA, 431 bp, Homo sapiens
gagtatcacaaatcatacctattactttttcatttggtttgttggttgagtccaaaaagaggagtacctgttatgttctggacacttcatatgataggtacagagggtataaagataaatgaaatgatctcagccctaaaagagctcttagcccagtggtgcagacaaaattatacagaaataactataataaaatataataagtacagtagagctatatgaaatactaaagtcagagagatgaggaaacaattgttccttcctggacaggatagtggaaagccattaagataaggtggcattcaacctgggccttgaaggatgggtaaacagtcatcacgtggatgataaggggaaagaygttgcaagaggaagaggtaataaagcaaagacagagaagcatgaaaatgtaagtcatgtttaataggcaa

SEQ ID NO: 651623 - DNA, 549 bp, Homo sapiens
atgtattctaaccaattaagctatattctagttgattaagctaataaacctaaattcattattttgctccctgtatcgtgaggtcggtgaacacagcsaatagtatcaacaaataaaacattttatagtgaaaatgccttcattcaaaagcattgctggagattgttgtcaatttaataatttattcacaaaatattgtgactcccaggcccatctttacagaagccctccctggaatccttcctagtggaggaaacctgctttttattcagttgacatctggcttagccatatgatttgggttagccaatggaatgtaagcataagtgatttatcttataattcagctgaagctttaagaaccattgtgatgttcccccgttactcttccctctaccataaaaatggcctggcttcatcagtctggatccccaaatggagctgcagacaatccacagctaatacttttattagcaagccactaacttctaccatagcaagccactgagatttgggggttatgcttggttactatagcataacttcctg

SEQ ID NO: 651624 - DNA, 549 bp, Homo sapiens
atgtattctaaccaattaagctatattctagttgattaagctaataaacctaaattcattattttgctccctgtatcgtgaggtcggtgaacacagcgaatagtatcaacaaataaaacattttatagtgaaaatgccttcattcaaaagcattgctggagattgttgtcaatttaataatttattcacaaaatattgtgactcccaggcccatctttacagaagccctccctggaatccttcctagtggaggaaacctgctttttattcagttgacatctggcttagccatatgatttgggttagccaatggaatgtaagcataagtgatttatcttataattcagctgaagctttaagaaccattgtgatgttcccccgttactcttccctctaccataaaaatggcctggcttcatcagtctggatccccaaatggagctgcagacaatccacagcyaatacttttattagcaagccactaacttctaccatagcaagccactgagatttgggggttatgcttggttactatagcataacttcctg

SEQ ID NO: 651625 - DNA, 512 bp, Homo sapiens
tgggagagaccaggcagcaggaggaggagcctccaagcctgcaaggggcaagggggtcattcccagcctccccaagagtgcagggttgcctgagtctgcagcattggtttggktggctgggtggtgggctggggtggggacagagtaggggagttggataaactcctgtctgctccatggagtgggaggtccagctctacagctacagctgcagtttgggcagctgcagcagcacccagggagctcccattccaactcagaaagggcagggctcccacttgtccccatcctgccaactccagggagcatacaaccccggccacacctctcccctgcagctggcgtgttggcagcagccgctgccatcacaatcatagcttactgtagcctcaaactcctggtcccaagtgatctttttaccacagtctccccaatagctggggccacaggcatgtgccacaatgcccatctaattgttttttattttttgtagagaaggtggtctggctata

SEQ ID NO: 651626 - DNA, 512 bp, Homo sapiens
tgggagagaccaggcagcaggaggaggagcctccaagcctgcaaggggcaagggggtcattcccagcctccccaagagtgcagggttgcctgagtctgcagcattggtttggttggctgggtggtgggctggggtggggacagagtaggggagttggataaactcctgtctgctccatggagtgggaggtccagctctacagctacagctgcagtttgggcagctgcagcagcacccagggagctcccattccaactcagaaagggcagggctcccacttgtccccatcctgccaactccagggagcatacaaccccggccacacctctcccctgcagctggcgtgttggcagcagccgctgccatcacaatcatagcttactgtagcctcaaactcctggtcccaagtgatctttttaccacagtctccccaatagctggggycacaggcatgtgccacaatgcccatctaattgttttttattttttgtagagaaggtggtctggctata

SEQ ID NO: 651627 - DNA, 579 bp, Homo sapiens
tataaattatttataaataatttttttttgcctcaaaaagtgacatttattgaaagacaaagaaatgataagatgttcatcccttggctyccttctctccccctcatgctgtacctcaacccaccccaagattcactctggatgtggctaggtagcaggacagcccccagcccctcagatgagatcagcaacattgaggggcatctcctcaatggaggcgttgtagaaggtctcgatatcttgaagagtcctcttgtcttcttctgtcaccatgttaatagccacacccttatggccaaaccggccaccttgaccacctttaaaactgcgattaacacaagaaaattgtctaaaataaaattttggatttgattcagataaaatactctaaaacccccagtcaaggagagagagaaatgtaatatttgtacatctgttcaatatttagtgtatcagatgtaattgtattaaaaatataatttacgagagatttctgagtaattctctaattcttgccaaaattagctgttgggatcagacattaaaatgaactcacttttcagattgaaacctcaaaat

SEQ ID NO: 651628 - DNA, 473 bp, Homo sapiens
tgaattcttttcctttgacatatcagctgaggatgatgttacaaagcatgtctttcaatgtgtatctgcmtggactccgggtctgagagaatgatatatacttctactttatgcctgcaagattcaaaaggccttttcaaatattcatgtctttttctttttcctttttattctctgctggtatgtgttatgtgatgagaagaatgtcagagtctctggagtcttatttttaagttttaggcttgcctgaggggggaaatatattggaaatttgctggtcaagctgttcacattttctcataacatgtctaataattgcaatgcagtttgttcaaataatttagtcaggatttgcatacttagcatgattgactctgaagtgagttattgggcagtgcctggcattcaatcagtaacacctgaggagaacattgcctttgtgttgcaaccaagaagaagttaaaaaaggcaca

SEQ ID NO: 651629 - DNA, 588 bp, Homo sapiens
tcctcttctttctaaattaaccttggagtggaagggaaatgcattcatgattttgttattatactcactagtattggcggttgtttgtcctttttattttctgtggttttgaaaacttaacatatacatccatggagtatattacttagtgtctttttcttccatcacatttctggactaacttttgaaaaaatattttgcttttaattttcatcagcttctgaggctcatctatctccaaatcaaccaggaaaaaaaagtagaagaaaatcaccagctgttgggaaagttatttagaggatgttagccagattaatctttacataataattatgaattagtaacgtttctcctccataaaatccacatatttagtgagcttcagagaacatagaagaggmaagagaaaatgacagtgaagtgatgtattagccatggctctctagagggacaagactaataagatagacatatatatgaaagggagtttattaaggagtattgactgacacagtcacaaggtgaagtcccacaataggccgtctgccatctgaggaccaaggaagccagcccaagtccccaaacctc

SEQ ID NO: 651630 - DNA, 572 bp, Homo sapiens
atttccctccaaataaggttttcaaatttcataatgagaagaacacaggttagtttagagtactgtagatatattcttgtcaaagatatcaactgggtaaaatgctatcggaaacatccaagaagtttaaaaagttttgttggccaggtgtggtggctcatgcctgtaattccagcactttgggaggccgaggtgggcagataatttgaagtcagaagtgtcagaccagcctggccaacatggcgaaaccccttctctactaaaaatacaaacattagctgggtgcagtggcaggtgcctgtaatcccagctacttggtaagctgaggcaggagaattgcttgaacctgggaggcagaggttgcagtgagctgagatcacgccactgcactccggcctgrgtgacaagagtgaaactctgtctcaaaataaataaacaaacaaacaaataaaataaatagataaataaataaataaataaataaaattttgtcttccttgcttgccatttcttataatcagaaaaactagagaaacatctttcaacatagtctatatgcagtaccagatttg

SEQ ID NO: 651631 - DNA, 447 bp, Homo sapiens
ttttgccttttccagagtgtcatataattggaatcataaagtatgtatcctttccacactggctttttttcacttagcaatatgcatttaagatttctccatgtatatttgtaccttgatagttcatttatttatttcactaaatagtatttgattatacattcccctattgaagaatgtctcagttgtttccagtgttggcaattataaataaaattgctataactattcttgtgtagatttttttttgtggacagaaatttcaaktcaggaaaataactaggagtgtgattgatggatcatataagactatatctagctttgtaagcaactgccaaaccatatcttaaagcgactgtaccattttgcaccgtctcccaaaatgaatcataaatcgtgctgctttgcatgctttccagcatttagaattgtcagattgttaaattt

SEQ ID NO: 651632 - DNA, 594 bp, Homo sapiens
acatattcaaaatatctgaatgtgataaagtcatataaactttttctaaagatgtatttatttacttttaattaattaattaatttatattttaaataataggattggagcctcactactcctaggctcaagtgatccttctgcctcaaactcccagagtgctgagattacaggcataaatgatgcacttggcctatttacttattttttaatgaaattttatattttaatttgctttataacttggtcttaccacatcctccatccacactccaattctagaaacctatgtgacacaggattcttttggtgttacttcaccagccagaaatctctgcagctggtggcacctctgcccaggttttgttcaggccctctgggctctctttgcccactccgcctgggagactgtgtttgactcgctccaccagcccacattctgcaccctccatagctctgtgctcagcccacagctgttccaggcgtgccacagatggcttccaccttgggcaccagtgtctggatgagggggtgcgtagcratgcccaaaaatttagagacgccaccaactgcagagcccaagggctgtcacag

SEQ ID NO: 651633 - DNA, 549 bp, Homo sapiens
gtaaacacatttaatatctcaacctttttttcagggcagtacattgacattctgttcccctgggaaatctaatttaatgaaatgaccttgaaatcagccctgaaaaatatgtatttcagtcaaagcttaatacatagactcagagtttggtcatttatttattagagaataattatggctaccagaataggaaatactcttcctattaggtctaaaaataattgtaagagcttaactgttctcatggatatgacaacatcaatctcattaaccgctgcaacttaccacactagggtgcatagcactgatttttcagccagggtctatggtggtgactttgacaggcattactcacgatgactgatatgagtcataggactrtgactgatagagaacactcccagaacgtttctgcatggatccataaagctgttgttcttgccaaacacgttttcaatttaaatttggaggtgattcatttgaattactgcataaataccaaagatctcagagaagagagcactagcatgggaaagcatgggcctgtct

SEQ ID NO: 651634 - DNA, 531 bp, Homo sapiens
gggttgaggctacagcgagctatgatcatgctattgcactccagcctgggtgacagagtgagacaatatctcagtgaaatcaactatacaacccattattattaactatagtcaccatgctgtacatyatatctccagtgcttattcatcttatatccaaaggtttgtatcctttgacaaatatctctctttcttttccttatctccagaacctggccaccactattccacctattctgttaccaggaattcaatgtttcttttagattccacatatgagtgagatcatatagtatttgtctttgtgtgtcttgtttatttcacttagtataatgtccacattgttgcaaatgataggattcttttcttttcaaagactgaaaaaaaaatttacttttattgcttctgtaccatggctattgtgaatagtgctgcaataaacatggagtgcaggtatctttttgatataatgattttatttcatatggattttattttctttatacccagaagtggtattgctgcattgta

SEQ ID NO: 651635 - DNA, 604 bp, Homo sapiens
tgatgtgctttcaaagtaccatgtaacactgctttttagtgactgttgccattggcagtttcacatttatttttggctctttgattaatattaatatctgtctatcctactacacaccaagccccagaattataagaattgtatgttttctcattcttatatccttggagtccagcacgtgatggtgatccaataaatgcttgaagaatgaatgcacattatataacactactctacaatattgatacaatttcataatgtttaagtataattttgaaacattcttaaaacagacactactgttctggctttttgctttgtattatgtgattttggcagatcaatcaataaatgcctactctggaatcatttgagagatatatccagaagttggatataggttggaggacttggcttagatgwgtggccatcgcagggttactgatttctcaccctcacacagttaacctcacccctcagtcacagtcaggctcctgctttggaccaaagaggagtaaaaattatttcccatcaatggatacctgagaaatagcaaacacctcaaaggggaaaatgctgagaaaagatttagagatgagtcaaa

SEQ ID NO: 651636 - DNA, 639 bp, Homo sapiens
ttcctaagtgggaggagatggagtcttgccattctgtggcatcactcagcaggtgcaaatgaagtatgaaatgaaaaatcccaacccacacaatgcacagagaaaaaacaggttgcaytttgtagtcactgctgtgccaggatatttactgtcacagacaacgcagctccagtcaggcaagcgccccaaatctctctgctctgacacctgcaagaaaaatggtgtttcactctgcgctactttgcttatggtgatttccctccacgagtctctgtccttcaagaagaaaaccagttaaagtgtttaggagctcatgactttcttaacaggaaagaatgatgtgagaggggcttgggggttctgtttggaaatgtgggagattctcagaatggatgataaaatgtttttaaaattaggttccacatggaattatcatgctttttttagcttatgaaaaaatatcgtagctaatatttatgcttgtgtcattgtttgaaggttagcagggaacctactatcactgttgatatctaaggtaaaactgagtaaacaaaattatcttagttaattcaggttaattgatagcaccatgcttttagataattctgtcattatctctgtatctgtctcaattgattt

SEQ ID NO: 651637 - DNA, 453 bp, Homo sapiens
tggtttgaaatttgctccatgattttgataggtcatctgtatttgctcttgtgtgaaacactttcaataacccttattggtaaagcacttggagatcattggttgaaaagtgcaattgactctgagtgctggcttcagagccttacaattgagagccatcataaattttatytttgctggcataaatacggagatcttttttatgcagagagggagctcttttattttgtaaacatttttatgctaggtgcttcagtaatgaatcttagatcagtataaaaattgtttgcaataataatctatataccagtctctatgtgatgttcttatagctttctctgcttgccctggaataagaaagcattaatattttgaaacaattctgtatgtgtgattgtctgtttttatggtaatcagaatacaaaagataaaaacacgcaggtttattttgaa

SEQ ID NO: 651638 - DNA, 555 bp, Homo sapiens
aatagccacacacacaaaataaaatacctaggaatagagctaactaagaaggcgaaaaatctccacaaggagaagtacaaaacgttgctgaaagaaatcagagttgacacaaacaaatggaaaaacattccatcatcatggataggaagaatcaatattgttaaaatggccatactgcccagtgcaatttacagattcaatgctattcctatcaaactatcaatgccacttttcacagaattagagaaaaactattctaaaattcatatgcaaccaaaaaattgccttagtggacaaagcaatccaaagcaaaatgtacaaagctggaagcatcagattacctaacttcaaagtataatacagaggaataataaccaaagtggcatagttctggtacaaaaacagacatataaaccaatggaacagaatagagagcatagaaataaagccccacacttacagctatctgatctttgacaaagttgacaaaagtaagcaatgaagaaaggactccctatgmaataaatggtcctaggataactggttagtcatatg

SEQ ID NO: 651639 - DNA, 394 bp, Homo sapiens
aaatctggtctagacttaagttacttaagtcaaggactgtatctcatttatctttagattgctgacacttagtgtagtctctggcatgtcaaaagtacttatgaatacttgtaaaataaatgaacaaatggcctttcacaatgaaaccttccagaatacacccaatcaataccgctttcccacattccaaatatcattctattagctttcatatagccatttgcttttttgattagcttttttatatagccatcttgatatggttcggctgtgtccccacccaaatttcatcttgaattgtggctcccataattcccacgtgtcatgggaragacttgtggaaggtaattgaatcatggggttgggtctttcttgtgctgttcttgtgatagtg

SEQ ID NO: 651640 - DNA, 652 bp, Homo sapiens
atgcagtacattgattctttcacttttagataggttatttctaccctgaccaaagggagagagtgtgtgtgtagacacacatatgtatatatccttatgtacatacagtctagtgtttaaagctatccaaattcagaatctgttccagaccacaatgctagaaatcatcawcaaaaaagataactagaagatacccattgtttgaaaattaagaattatacttccatataatctaaaagacaaagacaaagatgaactcttaatgatttgttactattttgaagtaagttataaaactgcttaaaatcaaaacttgtgaaatatagctgaaacagtacttaggaggaacttttgggagctttaaatgcatatacagttggccctctgtatccatgggttctgcagctacagattcaaccaaccatggaaggaaaatgtagttaggcctatgatagttgcatctgtactgaacatgtacagactttttttttttgtcattattccctaaacaatatagtataacaactatttacacggcacttacactgtattaggtattataagtaatctagagatttaaagtacagttgacccttgaataatgcaccagttagaagcaccaattcccatgccatcaaaaagccacgtctaa

SEQ ID NO: 651641 - DNA, 540 bp, Homo sapiens
ttgggtaaggcttggccattggtggttttattttgtttgttttcttttaactttctattaagcagccagggttgagaatcaggaatctggagcagtgttctcaaactttagattatattaacatcacctggaggtgataaaaaacttattactggggccgggcatagtggctcatgcctgtgatcctagcattttgggaggccaaggcaggcagatcaccagaggtcaggagttcaagaccagcctggccaacatggtaaaaccccacctctactaaaaatacaaaaattagcttggtgtggtggcaggtgcctgtagtcccagctacttgagaggctgaggcaagataatcgctcgaacccggaggcaaaggttgcagagagccgagttcatgccactgcactccagcctrggtgacgagagcgagactctgtctcaaaaaagcaaaaaacagaaaacaaaaaacaaaaaacaaaaccacacaactgattactgggctctacacttagagtttctaatttggtagatctggaatgagcc

SEQ ID NO: 651642 - DNA, 563 bp, Homo sapiens
taataaccaagtaaagcagaaactgctggaacaaatctgtttttaagaaatgttatgaatacataatagttatacattggaaygaatcttgaaagaggctagttttgtgtaccaataatgacatgactcattttctcatcttcttcctgctcttccttttcccctgggcatacacagtcttttggggagtcttatgattacaatataattatagcaaaacttcgctaaggtgaagcagtcctcatcttattggacacagctgataattcctttctccctgaaatactctcttcacttgacttccatgatcttatactcttggtttttctcgtgtttctctggccacatttttgtcagttcttcatctcccctacattaaaatgttggagtgccacaggaatccatttattagatcctttatctaaactcactccttcagtggtctcatctaggttcatggctttaaatactgtctatatgctgataacattcaaatctataccagctcagattgcttccctgaattatagacatgtatgttcaacagcctaatttaaaacccc

SEQ ID NO: 651643 - DNA, 589 bp, Homo sapiens
taatcagctctctttatatgcttagtttaaaactctttagcctgtcttatatgatatgaatcagagggaattgataaatattcctaaaaacacctggatggatcaccttagtgaatgtctaattgcctgtgaaattctgactgtgaagttttctgtgaaacaagaaartttagaatcaaaggagatgtttaataattttattttcactttcttaagacctttgctaaaataacaggtaatgatatcactggagagctctagcagaaaatagatcttggcaattggtcagtaatttgagattaatgtaatgcaaatcatgaacaaaaattgagaagcattttatatattttcagggagattgctagttttatagtgcttttttgatttggaggttactatagtagcagcagagtattattaagtgtgtatttctcaccacataaataaaagtttttgttcaagtatttgaaatgccagtaatattggattgtgactactttatggcataaaatagtttttctatgaataaaggctcacataggcttaagacttcaaaaaagtgaagatttgaaaacaaagctacagaaat

SEQ ID NO: 651644 - DNA, 400 bp, Homo sapiens
tcactctgcacaagtaaacccttgccaaacagcaagtgccaggagacgatgtttcacaaagcttttaaaaattattattattattattattattattwttttgcacacattatctagtttggtaaaactgtcaccaatttacaatccggaatcaccatgtgagtcgaattaacaaatgtattagcaacttgtagtcaaccagattgcagttccagctccctaactcaatgcaattttaataatttctcttctctgagtctatctcagtttctcatctgtaaaatgagtaaaagcaaaccacttgcagttcagatgttgagattcggtgggaaggacctcgagaaacagcggacaatttcaggatttaggactttaggtcttgatgggtggatggtactgt

SEQ ID NO: 651645 - DNA, 539 bp, Homo sapiens
tctatttatgtcaaatttatatgacaaagatcaagacatcttcacaacaatttttttgcayaatatttaaatcactttacaaattaaacaactaatcacttactgtactattatttgaacgatattaggtgaagtattgaaaagtgtaggttgggtgcagtggctcatgcctataatcacagcactttgggatgccaaggtgggaggactgcttgagtccaggagttcgggaccagcctgggcaatatagtgagaacctgtctgtacaaaacatttaaaaattagccaggcatggtggtgcatgcctgtagtcccagcactcaggaggctgagttgggaggatgacttaagcccaggaggttaaggttgtagtgaactgtgattgtaccacagcattccagcctgggtgacagagtgagacctgtctcaaaaaaaaaaaaaaagaaaagaaaaaggaaaaagaaaagtctcaactctatagtattcatcttcagatgtaaaatagtaaaaaataattttgagaataatggttgtttttc

SEQ ID NO: 651646 - DNA, 579 bp, Homo sapiens
atacgttgattgtgaccagctctgctggcaattttggcacctgacaagatacaacaaaattatctaggttattacaagaaccaagctaatcaacagcatcaaacaaatatgtaaaatacatagttcaaaaaacaaaggcttagaagagaggccaatggcccctgctctactacctagcaatacatgatttacaattatttgtgtattgagtccttttcacttatcttcgctccattaacttttctttatataacgtaaatgttttgtctaaagtgtggtaggtaatattatcctgctgatctgccattatcattagaaatatacatmattttcataagaatctccaaaaccaatcaaatcattaataataaatacatagtttcttgctggaagaaaatagcagtgaatcatttataatgctaataatggtttcattaatttatctgttttgtgaggttacagttccactgggcttttaaagtgaaatatacctacagtaccactgtgtacagtatattgcataggcctccactgaatgattgtttcaaccaccaactttaagacaaatattaaatacag

SEQ ID NO: 651647 - DNA, 543 bp, Homo sapiens
aaatttggctttgctttttacttttggttggtttataaaaaatttttatcttttcttcttttttagtattttaatttttttctatgtttggggtgggggttatagataccagtccaattttaatattctgtatttagtatagactgttatggaatgatttgtggtgcttctgttgatataaccaacaaatatttgttgaatgcctgccttataccaggcactattccaggaatgggggtatagaagtgaacataatagacaaaaatccctgccccctcaaggagcttggattctagtatggaagacatgggcgtgtagtacattagacagtgataacactaaggacaaataaagcagggaaggggacctcgcatttttggagagaatactcaggaatatgcagaaagggtgacatttttaaagaaaagaggatatgaacaatgagmactccagaaaaaggacctaaatgctttacaaatgcctaagggaataaggaatgaaaaattttatatttatactattgcaagcattgatgtttattct

SEQ ID NO: 651648 - DNA, 582 bp, Homo sapiens
tggcattcaataaatccttcatgaacgaccttttctggacttttgagctggtgttgtggttgaacagtggcctccaaaaagatacgtctgtgttcatatcctgggaatctgtgaaagtgacctttattacaaaataggtatttgcagatgtaattcggttaaggatcttgagatgagatcgtcctggattaactgggtggccctaaacccaatgataagtgtccttataaagagacaggagagaagtcacagacatcatgcaaagatggaggcagagattggtgtgatctggccacaagtgaatgaggccaaggatggctggcagccacctggcgctcgcagaagcaaggaagtcttctcccstggagcctttggagggagcctggctctgctgacaccttgacttcagactgctggcctgcagaaccaggagagaataaattccttcagacacgagtggcttctccatcgtcatcagagctggtctttcctttagctaaggttaccacctctgtggaagctaacagaatgtctgaagaaagcccaggggtgggactgagttggtggactctggagggatcc

SEQ ID NO: 651649 - DNA, 582 bp, Homo sapiens
tggcattcaataaatccttcatgaacgaccttttctggacttttgagctggtgttgtggttgaacagtggcctccaaaaagatacgtctgtgttcatatcctgggaatctgtgaaagtgacctttattacaaaataggtatttgcagatgtaattcggttaaggatcttgagatgagatcgtcctggattaactgggtggccctaaacccaatgataagtgtccttataaagagacaggagagaagtcacagacatcatgcaaagatggaggcagagattggtgtgatctggccacaagtgaatgaggccaaggatggctggcagccacctggcgctcgcagaagcaaggaagtcttctcccctggagcctttggagggagsctggctctgctgacaccttgacttcagactgctggcctgcagaaccaggagagaataaattccttcagacacgagtggcttctccatcgtcatcagagctggtctttcctttagctaaggttaccacctctgtggaagctaacagaatgtctgaagaaagcccaggggtgggactgagttggtggactctggagggatcc

SEQ ID NO: 651650 - DNA, 582 bp, Homo sapiens
tggcattcaataaatccttcatgaacgaccttttctggacttttgagctggtgttgtggttgaacagtggcctccaaaaagatacgtctgtgttcatatcctgggaatctgtgaaagtgacctttattacaaaataggtatttgcagatgtaattcggttaaggatcttgagatgagatcgtcctggattaactgggtggccctaaacccaatgataagtgtccttataaagagacaggagagaagtcacagacatcatgcaaagatggaggcagagattggtgtgatctggccacaagtgaatgaggccaaggatggctggcagccacctggcgctcgcagaagcaaggaagtcttctcccctggagcctttggagggagcctggctctgctgacaccttgacttcagactgctggcctgcagaaccaggagagaataaattccttcagacacgagtggcttctccatcgtcatcagagctggtctttcctttagctaaggttaccacctctgtggaagctaacagaaygtctgaagaaagcccaggggtgggactgagttggtggactctggagggatcc

SEQ ID NO: 651651 - DNA, 409 bp, Homo sapiens
cgaatgcagcctcaggtatgagaaagttactctcttcccatagccgaagattaactagggctgttctggaaggttcctgacccagagtgggtcagactcaagagatacattttagcttcatatgtaaacacaaacttgacaaactctcagaatgcagtggttgtgcatggagagctttccccatgctctgccggtctctgtggtgactaycgaagcccaaagcctccgtggaaggggcaggtcctgacacttccatagaccctgaccaccgagtggtggatggatgggatgagagccaccagctgacctggggccagcccgtcctttggctgacaagtgaccaaccaggtgctttcccttaagaatttgaactaagagacatagatttgtccatggaggggccggggag

SEQ ID NO: 651652 - DNA, 409 bp, Homo sapiens
cgaatgcagcctcaggtatgagaaagttactctcttcccatagccgaagattaactagggctgttctggaaggttcctgacccagagtgggtcagactcaagagatacattttagcttcatatgtaaacacaaacttgacaaactctcagaatgcagtggttgtgcatggagagctttccccatgctctgccggtctctgtggtgactatygaagcccaaagcctccgtggaaggggcaggtcctgacacttccatagaccctgaccaccgagtggtggatggatgggatgagagccaccagctgacctggggccagcccgtcctttggctgacaagtgaccaaccaggtgctttcccttaagaatttgaactaagagacatagatttgtccatggaggggccggggag

SEQ ID NO: 651653 - DNA, 409 bp, Homo sapiens
cgaatgcagcctcaggtatgagaaagttactctcttcccatagccgaagattaactagggctgttctggaaggttcctgacccagagtgggtcagactcaagagatacattttagcttcatatgtaaacacaaacttgacaaactctcagaatgcagtggttgtgcatggagagctttccccatgctctgccggtctctgtggtgactatcgaagcccaaagcctccgtggaaggggcaggtcctgacacttccatagaccctgaccaccgagtggtggatggatgggatgagagccaccagctgacctggggccagccmgtcctttggctgacaagtgaccaaccaggtgctttcccttaagaatttgaactaagagacatagatttgtccatggaggggccggggag

SEQ ID NO: 651654 - DNA, 409 bp, Homo sapiens
cgaatgcagcctcaggtatgagaaagttactctcttcccatagccgaagattaactagggctgttctggaaggttcctgacccagagtgggtcagactcaagagatacattttagcttcatatgtaaacacaaacttgacaaactctcagaatgcagtggttgtgcatggagagctttccccatgctctgccggtctctgtggtgactatcgaagcccaaagcctccgtggaaggggcaggtcctgacacttccatagaccctgaccaccgagtggtggatggatgggatgagagccaccagctgacctggggccagcccgtcctttggctgacmagtgaccaaccaggtgctttcccttaagaatttgaactaagagacatagatttgtccatggaggggccggggag

SEQ ID NO: 651655 - DNA, 614 bp, Homo sapiens
aaagctttgggaagttcactttgtcaaagatgaaacgttcaaaataaatgtaaacactattttaaatttagttaaaatgttcagccttgaagataagattgtttttgtggtcttaatacaaatacatattttgccaaatcacagcttcatgataaaaacagcgttttgctaaatttaactaccaagtagcaatgaccttggaattggttgtaatgaacatgtaatttctattttattcaaaccagctgtgataatctaccaagtgaaatacaagctgcagttgttaaatgttacaaatatttttatacctactcagagtaactatgattaagctgaagtagtatttwaaaaaaaaacaactttggcaacatagtatatgtttttttctttgctgcaagtcattaaacagattttagaaatgtttcagcttttgcagaagtactttgttaatcagcccaacagctttctgatgataccaaacttttttttttttttacattttggttaaaaatacatatattttggttaaaaatcatttggaaatatttaatcaaagtactcagtggatggcgcactaaaataaaacatcatattttaaaacttttagcacattg

SEQ ID NO: 651656 - DNA, 614 bp, Homo sapiens
aaagctttgggaagttcactttgtcaaagatgaaacgttcaaaataaatgtaaacactattttaaatttagttaaaatgttcagccttgaagataagattgtttttgtggtcttaatacaaatacatattttgccaaatcacagcttcatgataaaaacagcgttttgctaaatttaactaccaagtagcaatgaccttggaattggttgtaatgaacatgtaatttctattttattcaaaccagctgtgataatctaccaagtgaaatacaagctgcagttgttaaatgttacaaatatttttatacctactcagagtaactatgattaagctgaagtagtattttaaaaaaaaacaactttggcaacatagtatatgttttttyctttgctgcaagtcattaaacagattttagaaatgtttcagcttttgcagaagtactttgttaatcagcccaacagctttctgatgataccaaacttttttttttttttacattttggttaaaaatacatatattttggttaaaaatcatttggaaatatttaatcaaagtactcagtggatggcgcactaaaataaaacatcatattttaaaacttttagcacattg

SEQ ID NO: 651657 - DNA, 255 bp, Homo sapiens
gaattcaaaatacacctgtgtgcgtttggactaaactaataaatcatgtacartgactaagaagacatatgacaacatcctagaaagacaatacattattgccaacaaaagtgcttagcactaagctgtgctaggactatgtagactgaatttctgcctctcctcttacactggcatgcttatacaattcatacttttttctttcctttttttttttttattttgagacgaagtttcgctcttgttgcctaggcc

SEQ ID NO: 651658 - DNA, 411 bp, Homo sapiens
gcgtttggactaaactaataaatcatgtacaatgactaagaagacatatgacmacatcctagaaagacaatacattattgccaacaaaagtgcttagcactaagctgtgctaggactatgtagactgaatttctgcctctcctcttacactggcatgcttatacaattcatacttttttctttcctttttttttttttattttgagacgaagtttcgctcttgttgcctaggccggagtgcaatggcgcaatcttggctcacagcaacctctgcctctcggattcaagggattctcctacctcagcctcccaagtagctgggattacaggtatgcgccaccatgcccagctaattttgtatttttggtagagacgaggtttctccatgttggtcaggctggtcttgaattc

SEQ ID NO: 651659 - DNA, 326 bp, Homo sapiens
aagacatatgacaacatcctagaaagacaatacattattgccaacaaaagtgcttagcactaagctgtgctaggactatgtagactgaatttctgcctctcctcttacactggcatgcttatacaattcatacttttttctttcctttttttttttttattttgagacgaagtttcgctcttgttgcctaggccggagtgcaatggcgcaatcttggctcacagcaacctctgcctctcggattcaagggattctcctayctcagcctcccaagtagctgggattacaggtatgcgccaccatgcccagctaattttgtatttttg

SEQ ID NO: 651660 - DNA, 415 bp, Homo sapiens
gcgtttggactaaactaataaatcatgtacaatgactaagaagacatatgacaacatcctagaaagacaatacattattgccaacaaaagtgcttagcactaagctgtgctaggactatgtagactgaatttctgcctctcctcttacactggcatgcttatacaattcatacttttttctttcctttttttttttttattttgagacgaagtttcgctcttgttgcctaggccggagtgcaatggcgcaatcttggctcacagcaacctctgcctctcggattcaagggattctcctacctcagcctcccaagtagctgggattacaggtatgcgccaccatgcccagctaattttgtayttttggtagagacgaggtttctccatgttggtcaggctggtcttgaattcccaa

SEQ ID NO: 651661 - DNA, 269 bp, Homo sapiens
ttgcgtagggatttaatgaagtgggtgtctaacccttccaaagctgttttcaaaggttgctcattgatggatctatgctggtgtgaaatcacagtttctgccctcattttaccttatgtgacattttaataaatttctgatttgaggatattggtggcaggttaagaaaatttgcaagtgrcctgccactggaagaagtagctcttgtatgagaagacaaagttggtaccaaaagggatcctgacaaatttggacaatgggctaaacct

SEQ ID NO: 651662 - DNA, 598 bp, Homo sapiens
ctgcttcctgccaaccccagtggccagaatcttttcacagagtaaaaagaattcccaggagagcctgtgtacagacagctgcctaccacaaggcactgcagcaggggtggcaccagcataaacatccaaggtcatgtggtgttttaggaaaggaaccgagatcagaagaccaggttaggctggcacatgctcacagccgagaagrtgccttaaatggatttggtgatgagcaggtaagcagaacagaaatccctgctgcaggccagaactcaaagggcttggggggcagcttttaaactatagatgtcacactcagaagacttcagagcctaacgctgccctggactgaatattaagtggatattgaaggcatttccaccctgctcattctctgcttttgaattctcaataggcagtgagttccgggccccacagcctaatggagtagcagcttccaattctccaggtcagaataatagaggagaaaagggagcagaggctcagggcagcaatgtcctacagaattttccacgatggtgaaatgttctacatctgcaatgcccattgccacatgtgactattgagcactgtggcaact

SEQ ID NO: 651663 - DNA, 443 bp, Homo sapiens
gcctaatggagtagcagcttccaattctccaggtcagaataatagaggagaaaagggagcagaggctcagggcagcaatgtcctacagaattttccacgatggtgaaatgttctacatctgcaatgcccattgccacatgtgactattgagcactgtggcaactgggtgcaactgaggaactgaattttttattctatttaactgaaactggtttaaaatttcaatagccaaatgcagctagtgactgtatgttacacactaagcctcagtgaacatccttcctttacctacctccagggcttggaagrgaaaaagacaggataaattagaacagaacatcccaatcggtgatcaagccaggaaaagcagatggtgtagaatgggaaacaggggagaccatagtgtcaaccttcttcctagacacagacaccagctgcctgaa

SEQ ID NO: 651664 - DNA, 349 bp, Homo sapiens
attagcatctagcaatgtttttccagacaagtgactaaaatagatttaaatcaatttacaaaattacattgcattaaattttgatactaaatgggttcagtatagctatgtgatgcaattatayaaaatgtgttaatgtcaaagaatacaaccaaaattacagcaaaacacatataactctttccaaaacattcatttaatgaaaatctactgcaaaaaaaatcatcataccttgaattgttatagtgctttcacagttaagacactctttcctctgacccacagagaactttgtgtgaattatcacacccattttatagacagagaacctggtgtcagagaggaaaag

SEQ ID NO: 651665 - DNA, 516 bp, Homo sapiens
taatgtcttcactggagctattacrtactcttttacaaaacagagtaaaataggaatctgtgtctccaatttacaattctggatggtcactcacatgtctggggccttggtggggatggttgaaagactaggctcagctagactgtcacctggagaggctacaccttccctctccaacatagacaccttggggtaggtggacttccatgttcggcagctcaggcccaccagaaagaatgtttcaagaggcccaggttgaagctgtaaggctcccaagtcataagaagttctatggtgtctcttctgctgctttcttgggtcaaggaagctgctaaatccagcctagattcaagggaaaggaaatgggattccacctttccatgagtggagcagtgaagatatctggccacatatgatctacttcaggctgccctctgccacaaagcatttacatttctgccaagtgtgaaatatagttatttccttccccagtcctccgaagtttcatctcatcgt

SEQ ID NO: 651666 - DNA, 348 bp, Homo sapiens
atgccaatctttggaaattcccatttcctgcacaatctcagggtaaaagtgaatgataaaggaaacaaaggaggtagaaaagcatccttgggagggttgattccttgggccacctggtgccaattgactgctacaatttagagacccttgactaaactcagaaaatccaggactgtaacctatattcaacctgatcagctaggggtttctttgattttaggaacacttaccaacgagtacaaactgatgatatgaggccctcagtttttatagtgtgttctttctgaagctgaaygctaggtcacaaacataaccttttacaccaaaaaattaatcactgatgctcat

SEQ ID NO: 651667 - DNA, 334 bp, Homo sapiens
attaatactttgccattttaaaaatgttgtcttaaygccacagagaacatgtggcaccaatgagctaatcatagtcaaagaaaacattgattctaagagtggtttgcagcagtagtctctgctggaatgatgcctggtggggggaaagattattaaagttcaaatcgggtgagttctcattcccaccaaattggctttggtgggagtgatataccaagcaaagaaatccatgccttgggtgttaggcagtgaaggggatctgcagcattttggaagggaaaactttattgaagaataacatacattaagaaagtacctatcttcagtgtacagt

SEQ ID NO: 651668 - DNA, 607 bp, Homo sapiens
cagggctttgcttgtgggaattgctgatagagattttcacatccgctgtcttagacagcttagactgtttatgaccacttttcctttccagcctggaatctcaggtggcagattccacttttgtggcaagacttaggtgtcgtgtgtaccctaaaaaatagaaaatgcttgtcttttttcattcagctctttcttatgtggttgtgcattcagcgcagcatcctttctctagaaacccctcgtacttagagttctrctttatgacagcagcttgacttgctgccagagaagctggaaatgaaggaggtttaagataaatatcaatgatgatttttttcttggtctctctttcttgctctctttctctctccctttttttttgaaaaggaaagtcatatgctcatatcctaacttgtcccagtagagagtcaattacaaccagttggccataaatccaatccaagaaaaatactgagggaaggaactgtagcagtagatacggagggtctctagaatcactataaatgttaagaacttgtcagctgcgaacccagggccgttaagcgatattttaggactcagtgtttcccaacatggccccaaatga

SEQ ID NO: 651669 - DNA, 574 bp, Homo sapiens
ttgttcttataaagttgatggttacagttgaagcctgtatatattcattccactaagatcccattatcctctttcccctccatgttaactagtgtattgaagttggcgtgtattcttccaggccatactgtatttgcatgagctcactagctatgtagagtattattttgtgttagtggaatcctactgtatatagccttctgaagctaaatttgttttgtataacatgattttcaagatttatctattttttttaattaaaaaaaattttttttgagacagtcttcctctgtcacccaggctggagtgcagtgacatgatctcaacttactgtaacctctgcttgctgggctcaagcgatcctcccgtctcagcctccccagtagctgggactacaggcatgtgccaccacrcctggctaacctttgtattttttttttttttttttttttgtagagacagggtctctctatgttgcccaggctggtctcaaactcctgagcccaagcagtcgcccaccttggtctcctaaagtgccgctattgcaggcatgagccaccacctctgaccaaga

SEQ ID NO: 651670 - DNA, 441 bp, Homo sapiens
ccattttatgttctttataagggtggtacattattaattgatttatgaaggactaggtagaaatgcagaaggaaaagtttccatctgtgtgttgggctgtgygatttgtttggctgggttcgttcttttgtgtctgcgtgaatcaggaatcatgtgtgaagcagcccttgcatgtttttttccagttcagatccaggaagtataaagaaagcacaaaaggccctctgggcccctctagggcagaccatttccctctgaaaatgtcaccacagctgcctgagctccccctcccccatctctcttccctggcactacctgggacacttctgagcggaattgggaaaagcacagagaatggagtcacagagacctagactcggatcccagctctgcctctcagctgggtggtctcaggcaagccatcggcttctcagagcccca

SEQ ID NO: 651671 - DNA, 625 bp, Homo sapiens
taaaaacgtgttccggcagctcagagctgaatgggcttcagggggagcagggctgagcccgttgctatgacgacaccaaatcttttcacgcctggcccttcctcagcacactctgtctagctctctccagctattaatttgcctctgtcccagctctcactccctcagtcccctgggctgtgagtctatacatgacctaataccttttgctgcttctatggtacttccgtttctctcatcttttcrtcacttatatttccttgggaatctctgttttctgttcctcttgaaaacaagttacccgcttgagttaaaaacacttaaaaatgttatttcaaagcatggtaatcattgtttattatccctaatgataaattcaattgtaagggtctgcatatagttgagaagaatcttactatgttctacatttttttatatttcaggttgaacgttggctactacactactctttctgttgctgagggtaagatgaaaataggaaggagtctgttatactctgggaaagttaatttgtgcttagtgttaaaatctcaggttattccacaaacagcatcacctggtaacaactgtaagtgaacataagactttaaaatatgtgtttact

SEQ ID NO: 651672 - DNA, 406 bp, Homo sapiens
ggtggctcatgcctgtaatcccagcactttgggaggccgaggagggaggatcactggagctcaggaattcgagaccagcctgggcaacatggctaaatttgtctctacaagaaatmcaaaaaaaaaaaaaaaaaaaaattagccaggtgtggtggtgtgcacctgtaatccaagctactcgggaggttgaggcaggagaattgcttaaacccaggaggcggaggttgcagtgagccaatcttgtgccactgcactccaacctgggtgacagagtgagaccctgtcttaaaaaaaaaaaaaaaaggaaagaaaaataagatatatctatatatctatatatctatatatcttcattttcttttatataatatatactaggtcacatatatgtatatgtatatattag

SEQ ID NO: 651673 - DNA, 380 bp, Homo sapiens
gttgcagaatagcagtaattgctgcctgttccctcctctggaagcttcgtcctagaggggcacccaccagatgccagccagagctctcctgtatgaggtgtctgtcagcccctacttggaggtgtctccaagtcaggatacacaggggtcagggacctacttgaggaggcagtctgacccktagcatagcttgaacgctgtgctgcgagatctgctggtctcttcagagccatcaggcagggatgtttaagtctgctgaagctgtgcccacagccaccccttccccaggtgctctgtcccagggagatgggggttttatctataagcccctgactggtgctgctgcctttttttccagagatgccctgcccagagaggaa

SEQ ID NO: 651674 - DNA, 580 bp, Homo sapiens
ctttctgttttttggttttccttctaacagtcaggcccctctgctgcaggtctgctggagtttgctggaggtccactctagaccctgtttgcctgggtatcaccagcagaagttgcagaatagcagtaattgctgcctgttccctcctctggaagcttcgtcctagaggggcacccaccagatgccagccagagctctcctgtatgaggtgtctgtcagcccctacttggaggtgtctccaagtcaggatacacaggggtcagggacctacttgaggaggcagtctgacccttagcatagcttgaacgctgtgytgcgagatctgctggtctcttcagagccatcaggcagggatgtttaagtctgctgaagctgtgcccacagccaccccttccccaggtgctctgtcccagggagatgggggttttatctataagcccctgactggtgctgctgcctttttttccagagatgccctgcccagagaggaagactctagagaggcagtctggccacagtggccttgctgagctgcagtgggctccacccagttcgaacttccctgtggctttgtttacac

SEQ ID NO: 651675 - DNA, 380 bp, Homo sapiens
gttgcagaatagcagtaattgctgcctgttccctcctctggaagcttcgtcctagaggggcacccaccagatgccagccagagctctcctgtatgaggtgtctgtcagcccctacttggaggtgtctccaagtcaggatacacaggggtcagggacctacttgaggaggcagtctgacccttagcatagcttgaacgctgtgctgcgagatctgctggtctcttcagagccatcaggsagggatgtttaagtctgctgaagctgtgcccacagccaccccttccccaggtgctctgtcccagggagatgggggttttatctataagcccctgactggtgctgctgcctttttttccagagatgccctgcccagagaggaa

SEQ ID NO: 651676 - DNA, 542 bp, Homo sapiens
ttacggtatactggttactgctttaggcatgataggcaaatgcygaattcccaaacgaagctgtctcactgagttttaaattaggccatatatgtaaagttaaaatataagggaatggagtaggctaagattttttaaacagtttacaaaaagcattgccattaaagaaacaatgataaattgaactttatttaaattgagaacttaccttcatcaaaagacagcattaagagtcaggcatggtggcatatgcccatagtccgagctactcagcaggctgaggcaggaggactgtttgagcccaggagttcaaggtcagcctggaaaacatagtgagaacttgtctcaaccaatcaataatatacacatacataagacaatacgaagagaatgaaacatcactgcatccatattacaataactaaagttaaaagcatttgacagtgccattctgagggaggatataaagcaattgaaactcatattttgctgatgggagtacaaattggtacaactaatttggaagactattagcagcatct

SEQ ID NO: 651677 - DNA, 643 bp, Homo sapiens
gaacactggggggtcttctagatttctgcatttgttctgtattttgttcttcacattttttcaagctgaatactttgtatatatgcactttgtgtaatttaaaacgtaattaacaattaaaatataactaatgttttaaatataaagaacataaacaagtaccttttttaaggtttagcttttagtttgtttcttcttttctttctttctttcttgcatctttcatggagataaagagggtgagctgaagaaaattggaacttggaacagacaagaatgcagaaagtgagaggacacagaaaaaatagtaaaatgggcaagagacagcctttaagcatatgggttggtagaaaaatctgagaagaaatgaagtagggatagttagattaataacaatgtgcaaaccatgaaaaaaggtattttttgcactctacaaatgtggcactacacwctattctaattttctgtgtagtaaccagttgaccagcgcttagtaacagtccgtattcttaggggtttgaatcctgaagtggtttcatttggtatgctgactgtccttgtttcatatccatcctagttctatgggacgccttctccaaaataagcatactgtaaaggcttatagataacttaaactaaaaga

SEQ ID NO: 651678 - DNA, 416 bp, Homo sapiens
cgtagaaaaacattttatatgtactattcttaaagatcacaattatttttaaactttctattttcaaatacttgtgattaataaggcattctatgatgaaatagycatggcttatatatttttgtcttttcacatatgatgtgtttggaacccaaattttttactgattttattgtgttgttggtaactagtatttacagctaacctatctattcatattttacatatatatatatatatatacatgcacacacaccgatacatttaccttttaaaaaaatgatttataagtgaactgttaggctccagtgatttcagtgttttgttcatgttttattggaaatgcacgtggtttcttaggcttttaaacaaatacatggaatggttgaaagatttattttgctcgtgcttagcta

SEQ ID NO: 651679 - DNA, 417 bp, Homo sapiens
cgtagaaaaacattttatatgtactattcttaaagatcacaattatttttaaactttctattttcaaatacttgtgattaataaggcattctatgatgaaatagccatggcttatatatttttgtcttttcacatatgatgtgtttggaacccaaattttttactgattttattgtgttgttggtaactagtatttacagctaacctatctattcatattttacatatatatatatatatatacatgcacacacacygatacatttaccttttaaaaaaatgatttataagtgaactgttaggctccagtgatttcagtgttttgttcatgttttattggaaatgcacgtggtttcttaggcttttaaacaaatacatggaatggttgaaagatttattttgctcgtgcttagctaa

SEQ ID NO: 651680 - DNA, 554 bp, Homo sapiens
gccaaaacttgtgtacttcattaacctacactattctgtgtgcttaattttattaatctataaaagataatatactgtctattcacatcaaataattaaatgtattttgttagtgaggtataaaagagaaactggtgataatttccagctttgccaaacagaattcatcctggctgttttgcacagaaggtatgtgtatatgttggccatagaagatactgtcattgacattctcacaggggatatctggtatcaactttaaaatatttgtttaggagaactaatttttaaacatcaatttttgcctcctattcgtaggctaagtttaatttctaatgaaaatcaaaacagactctttaatctttttaaatagcagattttctctttcctraagtgcctcagattaatttcttaatttttgtgttcagaaaaaaaaaactagcatagctctattcaaactttatgcttctgttacaaaattgttcattattaagatcaccttgaagcaaagatatcttctcatgtcgtcttttaattacttgctactttgccta

SEQ ID NO: 651681 - DNA, 554 bp, Homo sapiens
gccaaaacttgtgtacttcattaacctacactattctgtgtgcttaattttattaatctataaaagataatatactgtctattcacatcaaataattaaatgtattttgttagtgaggtataaaagagaaactggtgataatttccagctttgccaaacagaattcatcctggctgttttgcacagaaggtatgtgtatatgttggccatagaagatactgtcattgacattctcacaggggatatctggtatcaactttaaaatatttgtttaggagaactaatttttaaacatcaatttttgcctcctattcgtaggctaagtttaatttctaatgaaaatcaaaacagactctttaatctttttaaatagcagattttctctttcctaaagtgcctcagattaatttcttaattyttgtgttcagaaaaaaaaaactagcatagctctattcaaactttatgcttctgttacaaaattgttcattattaagatcaccttgaagcaaagatatcttctcatgtcgtcttttaattacttgctactttgccta

SEQ ID NO: 651682 - DNA, 611 bp, Homo sapiens
ccttgctttcctgagtttaaaatttatcctgggaaagaaayatattaaaataattgtggcaaacaattatactttgcttttaagaatgaattttttttgtaatatattaattctgatatcctttaagttaagtaaatgcacagccagtttatacatcttcattgttcattttgttgttttaagatacattgtaaagaatattttatttcctaaaaattttatttcctgcatatcttctctaagattctctggctagcaaacattgttatatatgcatagtttacaccttattagaagtaaaaaagaattaaaagtaagaaaaatttccactaggaacaataatgaggtactagttgaaagaccaattttcgatctgttttccttcagtctgtttgcaaagtctttgtaagggtttcctatgtatctaaaatccagagatgctccaacgctccttttcaaaagcaaaagcagaacctccattactgctgccccagcataacagcctggttgtttaataagcatcaaagaaagcatttcaaaaagaaaatacttttatttgacattttaaaaacactgcttcatataaatgcttaatatgttttaatagtgtc

SEQ ID NO: 651683 - DNA, 611 bp, Homo sapiens
ccttgctttcctgagtttaaaatttatcctgggaaagaaatatattaaaataattgtggcaaacaattatactttgcttttaagaatgaattttttttgtaatatattaattctgatatcctttaagttaagtaaatgcacagccagtttatacatcttcattgttcattttgttgttttaagatacattgtaaagaatattttatttcctaaaaattttatttcctgcatatcttctctaagattctctggctagcaaacattgttatatatgcatagtttacaccttattagaagtaaaaaagaattaaaagtaagaaaaatttccactaggaacaataatgaggtactakttgaaagaccaattttcgatctgttttccttcagtctgtttgcaaagtctttgtaagggtttcctatgtatctaaaatccagagatgctccaacgctccttttcaaaagcaaaagcagaacctccattactgctgccccagcataacagcctggttgtttaataagcatcaaagaaagcatttcaaaaagaaaatacttttatttgacattttaaaaacactgcttcatataaatgcttaatatgttttaatagtgtc

SEQ ID NO: 651684 - DNA, 574 bp, Homo sapiens
gatttctgctgaaatgagagacaaaaatccagattgcagtgaactgagaggtaaatgaaaaatgtagaaatggagacagtaaatatagaccacttttcccaggaaattgccttctacctgttcttacttgctgcctctgaaaagatatagtaaggaatttcatgttacatagcacaattaagtgctaattatagcaatggattattttctgggtgttagtgaaataatggcattctacttgtacaagctcagtaacatgaatccttccatcaagagcctcagtacttgaaggagggtcatatctacacctttgtattatgaacatctttgattcccaattctatttcttttttctactctggagcttcacagtctcaattgccaaatacayccagatgaaattttctcttttcttcctgtcttctatctttcttataaattctccttatacctctaaccatatctcttcaagggattcaaatattttatcatccatacattatctttctaatgttaaatattattaactgaataaacaccaaacttcttagagcatttaaggcccttcagactt

SEQ ID NO: 651685 - DNA, 527 bp, Homo sapiens
ttcaagggattcaaatattttatcatccatacattatctttctaatgttaaatattattaactgaataaacaccaaacttcttagagcatttaaggcccttcagacttttgttccaacctactttctcagcttttatctttctgtgacctcccctttcatgcttcaatgtcaccttgggctctatgcaccctgaactttctggcttccaatttcttacactgttaactctacgtggacttgtccctcactgcaatctcatatctaaatcctagatcctatctgacatttatggttttactcagttgtcatattctctataaaagccttttttgtttgtttgtttgtttgttttgagacagtgtcttgctctgtctcccaggctggagtgcagtggcatgatcatagctcactgcagcctygaccttctgggctcaagtgatcatcctacctctggctcctgagtagctaggactacaggtgtgcaccagcttcctggctaatggttttgtttatttgttttctccat

SEQ ID NO: 651686 - DNA, 437 bp, Homo sapiens
caggaattccatctcagctctgcttccaggaaacctgacccaagacagaggttgttgcaagggcagaggccacaggcatctacaccagcctctggcgttcagtctgtgagcggcccaacgctgcccatgtgctcctccttaaagcctactcaaccctggggtctacaggcaaattcctcgcgggcgccttccctkgtcctggctgccgctctgcttcctttgcaagctccttctcgcacccttgcgctggctccctccagagggctccatcccctgcccactgtgccttcgtgggtggtgcccagatctctgtctcctctgccctggacccctctgcccctgactggcagatctatagagttcagtgcccctggaggctccacgtccatcccacagggacccggactctcatcttcctcctgagcgtgctctccctg

SEQ ID NO: 651687 - DNA, 492 bp, Homo sapiens
atgtagacttgttctcaagatttggtatcaagttactattctgaaactaatgtctgctgcggtccttccggaaatctctttttattggaccctttcttggcttactctttcmttttactgaaatgttatttaattgtttcttgagaaaagttggataggaggtaaatgttagggacttaacctcttttaaaaaatgtctgtattttattttcacacttgattggtagtttggaaatatacttttatttaactttatttatttattttagagacagggtctcactctgttgcccaggctggagtgcagtcgccattcagaagtgcagttatagcccactacagcctggacttcctgggttcaagcatgtctttccacttctacctccagagtggctgggattgcaggcctgccctgttgcaccaggctacattaacattttgaagatgtttctcctgtctttgaactttcatgtctctttcaaaaggtttgat

SEQ ID NO: 651688 - DNA, 492 bp, Homo sapiens
ctcttgctctgatgtagacttgttctcaagatttggtatcaagttactattctgaaactaatgtctgctgcggtccttccggaaatctctttttattggaccctttcttggcttactctttccttttactgaaatgttatttaattgtttcttgagaaaagttggataggaggtaaatgttagggacttaacctcttttaaaaaatgtctgtattttattttcacacttgattggtagtttggaaatatacttttatttaactttatttatttattttagagacagggtctcactctgttgcccaggctggagtgcagtcgccattcagaagtgcagttatagcccactacagcctggacttcctgggttcaagcatgtctttccacttctacctccagagtggctgggattgcargcctgccctgttgcaccaggctacattaacattttgaagatgtttctcctgtctttgaactttcatgtctctttca

SEQ ID NO: 651689 - DNA, 572 bp, Homo sapiens
gacaatatttgtgagcccattcatttctaccgtatcaaattgttagtctagccagtctccttcaaacttctctccctctacccatcatcgtcaagatctaaaggaattcactacctcttcttctcccaagaaaaaaaaaatcgctcctccccctctcccaacccccccacaacccattccagaaaaggaaagaagaggggacgcaaagtggaataagttacgacgggcgaccgagcgcatagaaatgggaccaaagcccaggctcaagacrgagacgaggaatcagtaaccacagccggaggatcttggctatttgccagcagagaactgactggttctaagaaaccagaggcagagcgagtgacaggaagggaaagagggcccacccttgggactgcctgaaacactcaaagaatgaaaaagaaacgtcaggaatccgagacgggatgcggtcggccagagcgaccagccaggttaacaaccagctcagaaagccgggacacgggtgagagacccctgggaaggaaacagcgcccggggacggcctgctaaaaggaaactgataaccagga

SEQ ID NO: 651690 - DNA, 552 bp, Homo sapiens
tctttggtggtgcctgcaacattccttcctccctatacacagagtctgaatgccaagacttctgtcatcacattgtcccattaatttgtttcctcagtgtgtgtagatcctatcatttccaggaaatttgaagaataaataaagtgaatatttatttatattgttgcagtagaggtccactcttgcatttgtttagtaacagacttaggaatgaccaaaaaactcttcttttcatttgaaagccttttgaaaatgtttgtcccaaatgagattttatgtttaaagcagcatgatatccctgttctatgaactgagcgtcagggatccatcacttgaaaatgattcttctgtcattctgaggtttaacacatatttttctcccaaattaactggagttttccattaaacaatgatgatcttacaaaaattttctttctcatttacaaygtcttgacacacagcatccaataggcagtaatgtaaaattgaaatcacagaagcaagccttccgttattgtctgggggttaaaaatccaaaataatgaaaagcgc

SEQ ID NO: 651691 - DNA, 576 bp, Homo sapiens
tgcaggtttggaacatatttgttgctggttatttagaaaattattaaatctgatgttcatgttgttttttgctttcaaggcatccagtggccatttgagagaartgagactgaaatgcttatttattttgctttcaattgcatgatttgacttttcaaataaaaataattaacatatcctctccaattacaaaagaaaaataatccctcctcctcctccttaattgctttaaactcaacatttacctcatttagatacatgtgactcaagtactgaaagctgctcagctcataatgtgaggggggagggaagagtaacattttgtaatgaaatcctcaaaagtagctctaaatgttggctgccttatgtcttaaatgacatacttcatatgatagaaaaaagtcaatgaaaagtttgatctggtatttattaggtaaaaatggcttcagatgtttcccagctaaatagaccatggcagaaaaattataatgaaagagcagaagagttgctatgggtgtttattccctagaaagccattagaataaaagtcaccctcactttttgctggcctctctc

SEQ ID NO: 651692 - DNA, 649 bp, Homo sapiens
caatccccaggctttggaataagtagaagaaagccttgctaccctaaatagtgacagctggaaatcacgagggagcattctgtttgggagtcatgacccttcccgtcacatttctgcattctggcaggctgttggagagatctgtgtgacagcctcacctttcagcacgcctcagtcacaccagggagacagcaggagtgaggaggaaggagagagaagagagcttgcgcctgcttcctaaacagttccttctctctgggtcaggaccaggttacagaggtcaccagtcatgtggtaacatcctgatgataaggtggaaagtctctcctctactcccttgaggtggcatttgcatgggccattaaagaagggatgttgatctctcctgggccatcgtccacacacgtatctcagcccyctgccaaccccctcagcaaaggcacccgggttagaatctagacattcacagtggggaactcttgatttttaattatgcaggaaaccactttatctttttaaaatgataaatgacttaggagaagcagacacaatcatgccttttcaggattgtttaggagatttggaggtagaaatatgatggattggatttgaattcacttagcgctgactaagataaattgtcactaaa

SEQ ID NO: 651693 - DNA, 589 bp, Homo sapiens
ttgttggtgtcttggaaagatcacagataggctttgacatacacaaacctggctcaaatcctacctctgccacttatttgcgctctaacaactctggacaagttccttaattgtttggagccagttttctttataatagrttctacctattatgttatggagttatattaattatgaagttgtttgatagtattagaaataatgtttaaaagtgcttagaattagaaaagcgtctggaatataatcagagttcaataaatggtagctatccacatcaataaatactcattaagcacccaactgaacaaaatatgatggttgattgggagctcagtctcccacaaataaaatatttgccacatgtcttcactgatctgccatagtgtctacattggaggtagcaaaagtagtaatttaatagtctattatccaaccccatcccaaaactgaagttgaacccctgactgcagataattgttgaaatactcaaataatatttcctgcaatgccttagctacccttctttcccacattctttttttaaagcctttgtgagttttatttaaatgtctgagatgagaatgaagca

SEQ ID NO: 651694 - DNA, 576 bp, Homo sapiens
tatctttaggctggtcctctttttctcttgtcaggttttgcatctttaactcattgatttattcattcaacaaatatttattgctaaacgtcttcctgttccataaagagtggtaggatctaaagactgagcaatagagtgagacttcatgtctacaaaaaaaattaataacttgccaggtgtggtggcatgcacctgtagttctagctgcttgggaggctgaggtgggaggatcacttgaggccaggagggccaggctgcagcaagccatgattgtgtcactgcactccagcctcggcaatagaataagaccctgtctataaataaataaataaataaataaaagcttagcagtaaacaagagagaggtgattgttgtcttggttgaatgtacagattaggagggaatcagattcccaagcattcattgattaaatgtattgagcaccartatgatgtctgatatggatagtagcattgaagatatagagtggatttgcacgtgtggggactgtgataaaacaggaaacttcgtgtgccctggcagtgtgtaaggtgacatctcaacatcagact

SEQ ID NO: 651695 - DNA, 588 bp, Homo sapiens
ataataaataatattttagatttttatgtttatctgcatctgtttcaagaaaatgtatgatttttcttctacttattttaaaattcttatattttggtgaataaggatattgccttaataatctcataaccattaaatgtaagaattatgaattgataccccatttatatgatttttctgtgctattttatagttaacaaagtacagaatttgcagtcagacttggtttccaattctataaccttggacaaataatttagaccctatgaacctcagggtcttcatctgtaaactgaaatcccaaggttttagacttattttcaggatgtaagtggaaaccaaatgacagtcttaaacacaatacctgtcacaaaatacagcataataaatgactgctattatgatgcccatgttatgtagatattcagattaaatttttcagcagataagaaaaaakatatagtactataatatatataaacaaatagctgtatataactaataaattactatgaaaatgaatttcaattcagaatgttaaaaaatttcactgtttaattcttcaattttgtgacttgattttagaac

SEQ ID NO: 651696 - DNA, 574 bp, Homo sapiens
tcattgcaattatgacattatgtgtsacaaagtaaattaagatattctttttttcaattacatttttaaaaacatcaaacaaaaatgttttctgtaatttttgtaaatgttgccttctctagttagaaaattttaaaaaacagtataaaataaaactgtttaaatgtaattatgtgcacacctaaaataatggaatagaccctatcttcctcatacacaagtgtatgtatgtatgtatgttttttccctatgctttatagcaatccaaataaaagactgctagataccaattagtgtgactcaattgcatttttcctagagatatggaacaaagaaataaaaaaatccaatcttctgcagcgtttcaaaattatcagttctaatgaattatcgccatataattatattattaacatttgctttgcctctattataagttattctcattagctttcaatttccttcagtgtcacaggattcttcatagtacagtgactgttataaaataaactcatactatgtaatagttctcagtaaaactgggctgagtttgtgaagggtatgcatcataatg

SEQ ID NO: 651697 - DNA, 572 bp, Homo sapiens
ctgtgtgttctacctgtcctagctaaatgagcttagcgtcttttatgcttcaattccttcaactgtaaaatgaarttattaataatacttatttcacagtctggttgaggggattaaaagagatgatgcatgtaaagtgtagcatagtgcttggaaggaaatgctcaatgactagtagcaatgttacctgttgattgattgatcgattgattgaaatggagtctcactgtgtcacccaggctggagcgcagtggcacaatctctgctcactgcaacctccgcctcccaggttcaagtggtcgtcctgcctcagcctccagagtagctgggattacaagcgtgcaccaccacacccagctaatttttgtatttttagtagagatggggtttcatcatgttggccaggctggtttccagccagcaattatttttatatgcttacattttttgagagtttgttaaaaagtttgtttccccacattttaagtctcaaactagaatcttgttactcctacatgttagaagagtttataccttgtagatggtattcaaaaggactgtctctctcaaat

SEQ ID NO: 651698 - DNA, 521 bp, Homo sapiens
ggacctgccccgataatcacgtaggttcttttctattttcctaagcgtcggctggcttgagaaataaagggacagagtacaaaagaaagaaattttaaagctgggcgtccgggggagacatcacacattggtaggatccgtgatgcyccacaagccacaaaaaccagcaagttttattagggagtttcaaaaggggagggagtatacgaataggtgtgggtgacagacatcaagtacttaacagggtaatagaatatcacaaggcaagtggagacagggcgagatcacaggaccacaggaccgaagtgaaattaaaattgctaatgaagttttggcaccattgtcattgataacatcttatcaggagacagggttttgagatcaaccggtctgaccaaagtttattaggcgggaatttcctcttcctaataagcctgggagcgctatgggagactggagtttatttcacctctgcaatctcgaccataagagacaggtacgccccggggggggccagttca

SEQ ID NO: 651699 - DNA, 652 bp, Homo sapiens
tatgcacagttatacagcttctctgcatggtttatatgaattaacttactaataatattttaaataacaactgttagtaaaaacaggcacaatccaagtctctaaatatgtataacattttattaaagggtcagataatccaggggcattattataaggctgactttatatgcagttaatggaaaggttgtattactctatagtgtctctttctycctctacatatatatagttagatgtataagatatatcatatatatgagagagacatatatataaagagagagagagagagagagacagagttaaagtgatgatcctgcaagtaagtttgcataacttatttagttgtactcctaaaatcagcacatacatttatacatttcatggtgtatattcagatgttttattactaaaattaatttcagtagctttcttaacattaatctgtaataaagttttaaagtcgtggttaacaatgagaaaacacatttactttcaaatacagtttgataaatgtaattttagaaaacgctgaggtgatgaatgtgttcattgacttgattgtggtaattatttcacaatgtatatatacgtcaaaccatcacattgtacattgtgaatatatgcagttttataaattctaccacaa

SEQ ID NO: 651700 - DNA, 652 bp, Homo sapiens
tatgcacagttatacagcttctctgcatggtttatatgaattaacttactaataatattttaaataacaactgttagtaaaaacaggcacaatccaagtctctaaatatgtataacattttattaaagggtcagataatccaggggcattattataaggctgactttatatgcagttaatggaaaggttgtattactctatagtgtctctttcttcctctacatatatatagttagatgtataagatatatcatatatatgagagagacatatatataaagagagagagagagagagagacagagttaaagtgatgatcctgcaagtaagtttgcatwacttatttagttgtactcctaaaatcagcacatacatttatacatttcatggtgtatattcagatgttttattactaaaattaatttcagtagctttcttaacattaatctgtaataaagttttaaagtcgtggttaacaatgagaaaacacatttactttcaaatacagtttgataaatgtaattttagaaaacgctgaggtgatgaatgtgttcattgacttgattgtggtaattatttcacaatgtatatatacgtcaaaccatcacattgtacattgtgaatatatgcagttttataaattctaccacaa

SEQ ID NO: 651701 - DNA, 491 bp, Homo sapiens
gggatctgcctgtactccaggttggtgcaactccaccgccctccagtgaagtcccagaagcgatcaagtttaaagtgaaagggggatggaagcattttttctccctatgccttcggagtctgtggcttcagtttgctgcaggttctctccgtggacttctcagaaacctcaactttccacttcgagggacagaaagctacaaggaaaacgctgatggttttggtggagattctcctggacttcagtggtgtcctctggtacatctgtccgcggtgtccctttggtttatttctgtggtcttcctgcgcagtccctcagcggctcggagtttggccttccrgctctccaactcagatcctgagcctcctaagctcccgcggagaccctgaagtcccggatctggcgccgctcgccgacctggagggaggctgcaccgctgaagtgcagtctcggagctgcgctcctctggaacaaagcagccagacgtggct

SEQ ID NO: 651702 - DNA, 451 bp, Homo sapiens
ttggggagctctggctgtgaacacagcccacccatataatccattttgcacggtccgttatatcagaaaaaaaaagcgcaactggacgggggtggggcagaccaacgaaacctagacagacacacacacactcagaggagagaggaagaattgaaagacttgagaagactttgataacctccctgctggcccttctgtkttccggaaagatcctggatgttggctaccttttcaagtcatcttggcatgtctctagtgttttgtaagccgctttccagctagctgcgtgtgtgtgtgcgcgcgcgtgtgtacgcgcgcgcctatctgatgcatttgactgtcttttatccaactgcccagaagcaaatgtgttaactcggcgatgccccttcatgcccgggttcttgcagagctctgaggacgcccagacccattttcctggctggatttg

SEQ ID NO: 651703 - DNA, 451 bp, Homo sapiens
ttggggagctctggctgtgaacacagcccacccatataatccattttgcacggtccgttatatcagaaaaaaaaagcgcaactggacgggggtggggcagaccaacgaaacctagacagacacacacacactcagaggagagaggaagaattgaaagacttgagaagactttgataacctccctgctggcccttctgtgttccggaaagatcctggatgttggctaccttttcaagtcatcttggcatgtctctagtgttttgtaagccgctttccagctagctgcgtgtgtgtgtgcgcgcgygtgtgtacgcgcgcgcctatctgatgcatttgactgtcttttatccaactgcccagaagcaaatgtgttaactcggcgatgccccttcatgcccgggttcttgcagagctctgaggacgcccagacccattttcctggctggatttg

SEQ ID NO: 651704 - DNA, 440 bp, Homo sapiens
agatatcttgacatcattaatatttacaaatattttaatttggaatcccgcactcaacaaaaataggcctaactttaagtgaaaagtttaaggttatttttaggaattatgttaggatatttgccatgtattgactgttcaaatatcaggcacttaaacaatatattactggacattgggtcytgacctcaataacttattttcttagtaacatgaaaaatataaacaaattaataagcttgaaagtaatttattaactgaaacttttagttctattttgatgttctacgctttgtagtaggagagagagaagaaattaagaaatcatggctgtgttttgtagaagttggtattgtgcagtagttagaaaaaggaactatggaattctaccccccttggtcacagccctgtataaccttgaacaagtctttgaacttctc

SEQ ID NO: 651705 - DNA, 630 bp, Homo sapiens
ggaattctaccccccttggtcacagccctgtataaccttgaacaagtctttgaacttctctgagcatcagaatcctcacctaagaaatagggctaataatatgacttatgcaatcagacggtctggaggtttcagtgatatagttcattaggcacctgactgttattawcattatcaccatcaccatgatcatctcatcattagctagcatgagcaccaagagggaaagtataaaggaggtaataatcgtatggcttcaaaagctcaccagaccaggggtcataatatagtccagtgtcttcaggaaccaggcagaagatgtaaagcagagaatctagctgagtttaagaaatcgtaggctgtatttctaatactctggagaatgcatgacttaaccacagatgttcaaatttatattcattttaatctctgatggacatggcattaggcaacttgtaagttctcctgacatatatattcaatcttaaattttttttaaagcatctctgccaagtggtcatcttgactaagcttgagtaactttagtgattcccaaatcactccaactaaaatatattatttcacttttatatagatgtattataattttctcctttaacttgagccaaa

SEQ ID NO: 651706 - DNA, 476 bp, Homo sapiens
gtatatgtcttaagaaaccaaaggagaaatttttaaattgtctttcatttgctcttccaggataaaaatacactctaccataatcaaataaggaattcatttaccaatattagacataaagcaattaataacctctatcgcaggaatccaaaaatacttatttatgtattctatggtcttcaaaagagtgaggaatctcattttttcaattgttatactgggaagaagcatattattatgaatataaaatatatagctgaattcactgaagaaacagtcacacatgagatctctaaattcacaaaacaaaaatattgtatgaactgaagacaaactgtcagttcacarttgattgttgtttataatcatcattttaaataacaaaatgggatttttgttgtttaataacaatacaagctataaaagataattatatcaaatatagttatcattaatacttgaaattcttgctgcta

SEQ ID NO: 651707 - DNA, 542 bp, Homo sapiens
cctcccaccctcacacccacccactgggttcattacattaaatccaactataacctcaactagaattaaattttagccaaactcctcattaaagcattttattaaattgcaaatgtttgataaaatttagttttctgggctaaatatttttatttataaggttaccaaaaatgactccaatactagcaaagcatttctgcttactatgcttttatgaagagaattgatgatatttgtaggaagctagtagctggattgattggaagaaggaggccctggattcaaagaagtaagacatagagctgacaagattaggacttcagcagggatagtggcaccaggcttttatacaagcawagtaggtaatcatacaagctgcttattttcagaggctcttatttatagtgattgaaactcagatttagagcctcattgtttcattcaaagctttgattccacttcaatttaaagaaccttgagttaagctaataggattgggcaatgtgacaaactgttaacagataatcctacctcagggatga

SEQ ID NO: 651708 - DNA, 453 bp, Homo sapiens
gcaggtgtgagcccctcatgtctctgatcctctccctcctatcacccccagctgcagcccatccaggagcactcaccctctgacagctgtgaagcttcaacaccggcttccccacccaccaggagactcaagggacccaagggagactggagtggctgctctgagtttgtggaaaaccgtgggcacaggaaggagttatgagctgtgaggactgcaatgagcccaagtgggagatggctggagtgctgtgacttccaaagcacctggactgggggagggaggaaaagagcttctatgtcctgccactctgccctctgttctcctgagtccccataccaacctctgggtcacctatgggacaccctaaatagccacagggyggtcctaaaagtgctggaacaagaagatcaacaagaagatcaaaacaaataacacttacatacacacaccatg

SEQ ID NO: 651709 - DNA, 521 bp, Homo sapiens
ttgacaaattgcaaagacctagggatcaatcactggtttgagtggtttaccccattgccccatgccttggcacatggcactgcccagggtagcccagctggggaacagccccaaagttgagctgtatcctcttctaagattyggacaggtcaggggctacctgtggtgctgagcgggtgaatcattgcacagagatggcaaagccacctgtctgagctttatcccaagggaaggagatggataagacctgaacacagccagatttcaggagcaatacgatagagtgctgtggctatcttaggctcaggcctatgggctcctgagtggggacagagaagagagtgggaagcagccttagctgagacaccaagatgagatgttatgttttggctgtgtccccacccaaacctcatcttgaattgtagctcccataatccccatgtgttgtaggaggaacccagtgggaggtaaccaaatcatgggggctgtgctgtgctgttctcatgatagtgaataagtct

SEQ ID NO: 651710 - DNA, 521 bp, Homo sapiens
ttgacaaattgcaaagacctagggatcaatcactggtttgagtggtttaccccattgccccatgccttggcacatggcactgcccagggtagcccagctggggaacagccccaaagttgagctgtatcctcttctaagattcggacaggtcaggggctacctgtggtgctgagcgggtgaatcattgcacagagatggcaaagccacctgtctgagctttatcccaagggaaggagatggataagacctgaacacagccagatttcaggagcaatacgatagagtgctgtggctatcttaggctcaggcctatgggctcctgagtggggacagagaagagagtgggaagcagccttagctgagacaccaagatgagatgttatgttttggctgtgtccccacccaaacctcatcttgaattgtagctcccataatccccatgtgttgtaggaggaacccagtgggaggtaaccraatcatgggggctgtgctgtgctgttctcatgatagtgaataagtct

SEQ ID NO: 651711 - DNA, 615 bp, Homo sapiens
ctgggtcagaaactgtgcattttttacagcacctgatacctgtgttgttatgttggcatccaaaactattgtcatcagtttacattttcccagcagtatgtgagagaatctattttttttctactcctcactaacaattagctttgtcgttaagaaacaataacacaaaaaccctttgttgatttaataggtgacttattttaatatacttttctcttcaccactagtgagactaaactatttttaagtktattagcttcatgtactccttattttgtgagttatcttctcatattcttggatccttgttctactgaagtatttttttccttattggtatataggaattaatgatatattaattatcttcatccattctcatagatgttgcaaatttttatttacacttcattcctgcctttttggtgttttttttttaatagaaaagtgtttaatatttatgcaaacttaccaatattttactttattatttttgtctttagaaaaggccatttctactagctattcaatacactgtcacttgtattttctttagattcttctggggtttgctacttaagatttactttaatccgtctggaatttagattggta

SEQ ID NO: 651712 - DNA, 534 bp, Homo sapiens
ctttgggagggatgatgccaagaatgcctgaaagggtctttcttccctgggattcaggggaggggacaggattgtttcatagagatgttctgaactttgcctctgtttaggccttctcatcttctctcatgtattgagcctgctattgtagatgtaatttattcctttttttctagtttgtactttgctgagtccttttttccgtctgtcattgattttcaggtttatttttgagcactttaccttttcctctgcattgaatattatataaatgtataatatataacatgttatatatatattttctctctrcttttatgtgtcaggtttgtttctttagttcttttattttgtgtattgaaactattttggagtattatgttaaattagaattcaaagtcagatgtgtaagcatcagtaagcaatgctttatattagtggggttctgatagcatttagattgaatccagtatctgaaaaaagcattttatatatagagtactgtcatcgataaaaaacaaattatactgttca

SEQ ID NO: 651713 - DNA, 550 bp, Homo sapiens
ccattgtgtgaaaacaagttaagttgcttggttccagggaatgtggtccaagtgtcataaatgcatctgtttaataatgcatatcagtagctcttccagaatttgggtgccttgagctgcctttgtttcctcatttccagaaaaatgaacaagtccgtgtcttgacaaaagcactagatggcagcataggacatctattcaactgtctctctccacaggctgctggaattttgacagatacaaaacggtacctgtggttttgtgtataaaactggtataactgtttgtacatttaaaaaatgtaacaataaattaaacataagggaaaagggttgctaataaatacagtgttagactgcatttttgtataccaggtgacaagcctgggcattcaaacctgatttgtgtaggggatgggcaggatgggaagcgagttgaaagagttgcaaaatgtacacgctkggtggttatagcttccttgagggttgttgttgatttacccatatgtctgtgtgcattccatagaggtgaaaatttagggaagtgaggg

SEQ ID NO: 651714 - DNA, 541 bp, Homo sapiens
agccaaatgcatttcttttgaaaataatttacctagtttctggtatattgttatagcaacacaaaatggactaagacactacctaaagccatatatttttgacatgagaaaatattttcttatgtttactgtggggactttaaaaattctgagctctagccttgggaatccattgagtaatcacgtgactttgagcaaggattgcaggagctctaagtcaccattttcttcacattaatataaaaattatccatcaaagatctaactcaaatgtctatgctggcttacaaccatctctctcacctttgtgaattctgactgccatgagagttgcatgttttagaattatttattccatgttagtaacatctctccaaatagatagcttaccttttttcctgcaataaaagtatatattatatatatatatatatatatayacacacacacacacacatatatacatatatacacatatatagtatatatactatggtattttctataataaaaatatttattgatcggtggatgatattgg

SEQ ID NO: 651715 - DNA, 319 bp, Homo sapiens
tgaattattttgtaacaattcttttaaaacataaattatttcatgtatcctttcaaaataactttcaattaaagtataatattatccactataaatgccaaacatattaatctaagcatacaaccagagggatcctatctcttagactcatcacatattacattttgaaacaaggcaagctgtaaataaataaatcaggaataaagtatcttgatttttcagaaaatgcacttcctttttttttttttttttttaagcagaktctcactctgttgcccaggctggaatggtgcagtggcacgatcttggcccactgcaa

SEQ ID NO: 651716 - DNA, 588 bp, Homo sapiens
tagataaaccatactggatagagaggtgggaaatgaagattcgggcagtatctagttatgtgaccattggctagtagtttatggttgtgtttcccacatataaaatcttcagagcatatccaatgatttatcaaagttcaaaaatttattgtattggattacataagtatatattttgaaataagacaccagacagggcacggtggctaacgcctataatctcagcacttcgggaggccgaggcaggtggattacctgaggtcgggagttggagaccagcttaaccaacagggaaaaactctgtctctactaaaaatacaaaaattagccagatgtggtggcgcacacctgtaatcccagctacttgggaggctgaggcactagaatcactggaacccaggaggtggagattgcagtgagctgagatgrcaccattgcactccagcatgggtgagagagcaagacgctgtatcaaaaaataaataaataaataaaataaataaataaaaagaaataagacaccaaataggaacagtcataatttatgttaaaaaattaaaattcacaaaagataaaaactatatggct

SEQ ID NO: 651717 - DNA, 625 bp, Homo sapiens
gtctgaaaataaatatgattttgtttatacctttccagtctatatttaatctctcattgcattgtttaggaacttcaagaccatgtctattagaagtcatatgagcagacatttctatctcatgccttattttagggagaaaacagtcagtttttctccatgaaatataaagttagctgaagctttttctgtgtatgcccttatcaggtggatgaaatttctattgatacctagtttgctgagagttttggtaatgagtggatgttggattttatcatatgctttttgtgcttctattgagaggatcatttgagtttttttagtctgttaattttattaattacattgattgattttgattgttaaatcartcttgaatttctgaaataaattctacttggttacaatgtattactctttttttagcatagttagatttgatttgctaatatttgaaggacttttgcatctatgttcatgagggataatggtctgtcattttcttcttttataatgccatctggttttgcaattgattcaggacaggcaagcctcaaaattggggcataccctggaaggattcttggctttgcccaggaaagaattcaaaggtgagctggtggtt

SEQ ID NO: 651718 - DNA, 607 bp, Homo sapiens
gctgttcctattcagccatcttgctattgctaaagggagatatttcttttacttggccaaagatgctcacatatctcagattcttccacggctatccaagcgtccccatttgaagtcttagtatgtaccttcttttccaataaacacctttactttcaaataacatacttggcaagtgtatgagttcagtttataatatagcatctggcycaactagatttttaacctaattttcagccatacctgctgtgcactgaaaataaataagtggttcttgtacggctgctatggatattttttgaccatatcttgtggtagaaattttaaagccttgagttttaaattttatttctgtaaactcttcagaagcaacacctcaccccacagtatttaaaatcaccatccttaccataatagttaagtgcagcactctattattctcccaaattgttaccttttataggcagtttactctcaagtaatctcagttaataatttaagaaaccattattccagtacttgctgtatattactagtttcacattttctagtggaatttatgacatccctgcatttaaactcacacagctcagcaactcactctaag

SEQ ID NO: 651719 - DNA, 523 bp, Homo sapiens
ctcacagttctggaggctgggaagtccaagaccaagttatcagcagatttggtgtctggtgagggcttgctttctgctgccatgatggtgcctcttgctgcatcttcatgtggtggaagggtcttttacataccacaacacactgggtgtcttcacrtggtggacggaaaaaatgaaaagaagaaaaagccctagagcatccattcaacctcttttatcagagtactcttttataagagtactaatctattcatgaaatcatgagagtaaaaccctcatgacttaaattactacctaaagggctccaactcttaatattctcacattctgtattaagttttaacaaatgaattttagaggattatgtgcaatcaaatcacagcaaggacccagaaatatagacctagacaacacatcccagacaccagtaattgttcaagtctcttcacatgaggtacctgatattatggagcagatattcacaaccactgatgtgccattctgaaattcctgacccatagac

SEQ ID NO: 651720 - DNA, 523 bp, Homo sapiens
ctcacagttctggaggctgggaagtccaagaccaagttatcagcagatttggtgtctggtgagggcttgctttctgctgccatgatggtgcctcttgctgcatcttcatgtggtggaagggtcttttacataccacaacacactgggtgtcttcacgtggtggacggaaaaaatgaaaagaagaaamagccctagagcatccattcaacctcttttatcagagtactcttttataagagtactaatctattcatgaaatcatgagagtaaaaccctcatgacttaaattactacctaaagggctccaactcttaatattctcacattctgtattaagttttaacaaatgaattttagaggattatgtgcaatcaaatcacagcaaggacccagaaatatagacctagacaacacatcccagacaccagtaattgttcaagtctcttcacatgaggtacctgatattatggagcagatattcacaaccactgatgtgccattctgaaattcctgacccatagac

SEQ ID NO: 651721 - DNA, 523 bp, Homo sapiens
ctcacagttctggaggctgggaagtccaagaccaagttatcagcagatttggtgtctggtgagggcttgctttctgctgccatgatggtgcctcttgctgcatcttcatgtggtggaagggtcttttacataccacaacacactgggtgtcttcacgtggtggacggaaaaaatgaaaagaagaaaaagccctagagcatccattcaacctcttttatcagagtactcttttataagagtactaatctattcatgaaatcatgagagtaaaaccctcatgacttaaattactacctaaagggctccaactcttaatattctcacattctgtattaagttttaacaaatgaattttagaggattatgtgcaatcaaatcacagcaaggacccagaaatatagacctagacaacacatcccagacaccwgtaattgttcaagtctcttcacatgaggtacctgatattatggagcagatattcacaaccactgatgtgccattctgaaattcctgacccatagac

SEQ ID NO: 651722 - DNA, 523 bp, Homo sapiens
ctcacagttctggaggctgggaagtccaagaccaagttatcagcagatttggtgtctggtgagggcttgctttctgctgccatgatggtgcctcttgctgcatcttcatgtggtggaagggtcttttacataccacaacacactgggtgtcttcacgtggtggacggaaaaaatgaaaagaagaaaaagccctagagcatccattcaacctcttttatcagagtactcttttataagagtactaatctattcatgaaatcatgagagtaaaaccctcatgacttaaattactacctaaagggctccaactcttaatattctcacattctgtattaagttttaacaaatgaattttagaggattatgtgcaatcaaatcacagcaaggacccagaaatatagacctagacaacacatcccagacaccagtaattgttcaagtctcttcacatgaggtacctgatattatggagcagatattcrcaaccactgatgtgccattctgaaattcctgacccatagac

SEQ ID NO: 651723 - DNA, 333 bp, Homo sapiens
tatcttttctcctcaaagcttccatacctttcctctctcattctcaaatagtgatttcacattatatttaattgagacattagaagacatcaaatgcaaatgccttcatttctytatcaccaaatttaactttcacttgcaaccaccttctccttccctccagtgacagggaagcttgctgcatgtactctatggaggaatccattcctccacttgtactctgggtcccatccacattcacctgcttaaggaacttgctttttaagttaccctctttgactcctaccccatcaaactttccctctctgtggatcattcctaagaagtatgaag

SEQ ID NO: 651724 - DNA, 535 bp, Homo sapiens
tatgagttttttggtgatgaaatcatgtcttccttaggatatttttctttaaaagactcgataaatcatttctaattcctttaattaatgtctaaatagtagagaaatatcaacttttatcttattacacagtttatatatcccataatgcaataaagtttcttaaaacttgatgtttggtatcktttagaaaatgttaacaaataaatatttacttaactttccaacagttggaatactggaaaaatatttttaggtattggagttttgtttatattttcttttatactatgtaatatttgataatgtatataatagcataataaaactttcaaatatacctaaaattatttatcagccaacttgaaatgtcaacatcactaatgccattgcatcatccgtgtgctccttccctgtcctatacactagaccttctgtagtcccacatatgtgagctatgctgcagaatatatagtttaaatatgtttactttagacaaagtgttataataatggtatcatattgtatgtagtgt

SEQ ID NO: 651725 - DNA, 422 bp, Homo sapiens
gtttaccattattgtttcttctactaaagtatggctatcaattcttttgtcctttatttttttattacattgtctttcctcagtgatttgtaattctccatgtattaggttattaattttattctcttaatatgtgacataaatgatcactttaattgtggcatctgttgataaacgaagttgttgatttatatrgcattcataaatattttttatattaaaagtttttgtggtttgtttaaaaaattctaccatttataggtctgggtgtggtggctcatgcctgtaatcccaacactttgggaggctgaggcaggcagatcataaggtcaggagtttgagaccagcctggccaatatggtgaaactctgtctctactaaaaatacaaaaattagccaggcatggtggtacgtgcctgtag

SEQ ID NO: 651726 - DNA, 422 bp, Homo sapiens
gtttaccattattgtttcttctactaaagtatggctatcaattcttttgtcctttatttttttattacattgtctttcctcagtgatttgtaattctccatgtattaggttattaattttattctcttaatatgtgacataaatgatcactttaattgtggcatctgttgataaacgaagttgttgatttatatagcattcataaatattttttatattaaaagtttttgtggtttgtttaaaaaattctaccatttataggtctgggtgyggtggctcatgcctgtaatcccaacactttgggaggctgaggcaggcagatcataaggtcaggagtttgagaccagcctggccaatatggtgaaactctgtctctactaaaaatacaaaaattagccaggcatggtggtacgtgcctgtag

SEQ ID NO: 651727 - DNA, 571 bp, Homo sapiens
ttgttttatgtcttaaacaagttgagagggtcctctttctatatttagagggaaaacatatgtgaaattgttgttgttatccaaaagtttggtagattttatttgtaaaaccccagtggtctggggctttctttatggtagaatttttatctaataaataaatttatttaatgactgcagaactattcaaactttccattgtttcaggtagttttaataattttaattccatttcaattttaacttctgaaatcaaaatcaaacattatcttttttttttttttttttttttttaracaaggtctcactctgtcacccaacctggagtgcagtggtgcaattatggctcactgcagcctcacctcctgggttcatgcgatcctcccacctcagcctctcaagtagctgagactataggagtgcaacagcatgcctggctatttgtttttttaagttttgtagggatggggtctccttatgttgcccaggctggtctcaaacttctggtctcaagcaaccctcctggtctggcctcccaaagtgctgggattacaagagttagccactatgc

SEQ ID NO: 651728 - DNA, 428 bp, Homo sapiens
tcgtcttgttttgtgtgattgtaaattcagactctttggtttgctttgtactacatgaaggtcaaggaatgttcagtgtattaaatggtcaatttgtctggtggaatacaggcttgaacatttaaacgtggcttgtacaagaaatagagtgtacagttctgaaaaatcaggtatttcctcatcaataattatgatggaatatcttaattacagtgtgtcaatgatattgggatctcacagagaggaatacatagtttcattgaggaaagcctccacgggragatcaagtgaatctctactcatcaaaaaggcgtggaggagagcaagcagcttctatgatggagaaggtgacagcaatttaaagagaggggcccaccattcctttttcacaaaatatttcagatatccaccttttggtctgttcatgt

SEQ ID NO: 651729 - DNA, 452 bp, Homo sapiens
gcaatataacctaaaatgtcatcagaatggagatgcatttcatcctggtgaattcttacttcagtttagaggattttcggattgtttcgtgtaatagctggtgccagttctaagcagactgctaaaatactacaatctttattggagtgtgactgaattatggtacagaaggaaaataatcatcctaagcaaaaccatagtcagtatttctgtggttctgtatctagaacaygtttatctaactaccccaaactcattctctaagctctagacttgtctgtccaacagcctccattagttcgtggatgtcttaaagcttctttaaacttatcatgtccaaaactaaacccatgatcttcacttcatctctatgtccactattttaataccaggcaccacttactacctcagaacataagcacattcttaactcttctctgcacttaagctac

SEQ ID NO: 651730 - DNA, 618 bp, Homo sapiens
ccacttattggtatgatatcaatatcataccaaggaaggagtctctttccttctctaatgtggggacatcacccttggatagtgtattaatcacacttttattttctgtatctctgaggctttgactcctgggacttgtggatcctggagagattgaccctcctagggcaagtcaatttctagacatagcaaaaaactcactccttagccgcctttcatatgcaaactaaccaatctaggacccagcagcccaccgcctactttatcaggcttttatactcttgccactattcccttcctttaatcatcccagagccaacaagaacactggagaagtccctatgctccagagcccatgcaaattattcaggctatgcaatcctaaaccagcttaccccgctcggcccattccttcctagggaaacgacagttgaggcttgtgcccatacttggccytcatttcctctgcctcctgactgaccccggtgcttcccagtgcgaccctgggtggcatgatgtgccccaccccccataggaacttggagtaataatcttttcaatggcagtagtcctctgatctgttggcctcactgtccctgaataataatacaatctatt

SEQ ID NO: 651731 - DNA, 606 bp, Homo sapiens
ggaggaggaagccatcatgactttatcacttccccaaagtccccacctcttaatactatcacattggatatcaggttccaacacaggaattttggagggaaagrtacatccaaacaatagcagtgtgtatgcgatttaagaaatataaattgcacatgtgtaccactggccagtgaatttggtgactctgttattgactgtgtcaaaacttacatttccattttttctgttttgatatatagggaagtttcttcttgtatcactgcataattttgatgaaggaactcgaaacaggcctcttttctctgaattagacttctctactctatacaattagctttccccctttgctcagtactccctatagtcacaccaaattgtcatctaatgaaagttatattgcctagtatttttcccctatgtatttcctaggagattcagcagaaattaaaagaattagcccaggttaagatgactaaaataattattctttggttaaaagaagcaaagcttacatccagggactcattcaagttcatttaattttacacggaagagtttaaaaaaagtggttaactgaaaaatatataaaatgaaatattaaaa

SEQ ID NO: 651732 - DNA, 597 bp, Homo sapiens
gctcaatgaagaatagtccttactcccagtgctatccctgagatatctctcaagttctcatgagagttagtagggaaatgggctctggaggataacattttcrttacagaacacatatactctgtaatataagaatttgtgtttacagacatgacagataacttttggaaacttgaaatacagggaaattgtatgatctcaatttcccacaccattgctcttaaaactatctcagtgttctcccaaatataatggatggatttctgaaaattttgaaattttgaaacatttatgcttgacaatactgcaaattatgttttccccaaatcatggtcaaataatttttttatcaatcctagtgtgaaatggcacagaaaatcataaatgtctttttttctccaaactgtctacctctgaaatatattctatttttcaagctttaataaagcctttattgaacctattaataaagtgttattaataatttggcttccattcttataagtatcataatcttgcaagctggtttagggtagatgaaagctcctctttcggctccaaatgatgtgccaagcatgggaaacagcgttttgcctt

SEQ ID NO: 651733 - DNA, 625 bp, Homo sapiens
tttttgttaatgttgaggttagtttggaaaatattgacctcttcatgatawtgtgtgtgaagaactttacttatttatcttttcaaccttaaatataagtttctaattttctccatacatgtttttcaccttatttgttaatatttttctctatatagctgattatttttgtttctctcatgaacgaatacttgttattgtttctttcctatctgactgttgctggcattcagaaacacagttgttctttgtatagttatcttgtatctagtatcattgttgaattttcttattatttataatcatttatttctagagtatctctgattttctatattgaaagtcattttgtctgtaaagaataatttcacttttctttctgaatcttgatatatcattccattttttttcttatctttttgcattggctgggacctccagggaagttttgcacagaggcaatgacagcgcacattattttattccctaacacacatttttacaataatattttactgcccagagattttgtgttgccatagtaatgattcataatgaagtctacatgttgtttatctctgtttctgccttctccagtccttggctatccccaacttatagaatt

SEQ ID NO: 651734 - DNA, 618 bp, Homo sapiens
gaattcctttttggaattttttgttggattttttgttaatgttgaggttagtttggaaaatattgacctcttcatgataatgtgtgtgaagaactttacttatttatcttttcaaccttaaatataagtttctaattttctccatacatgtttttcaccttatttgttaatatttttctctatatagctgattatttttgtttctctcatgaacgaatacttgttattgtttctttcctatctgactgtkgctggcattcagaaacacagttgttctttgtatagttatcttgtatctagtatcattgttgaattttcttattatttataatcatttatttctagagtatctctgattttctatattgaaagtcattttgtctgtaaagaataatttcacttttctttctgaatcttgatatatcattccattttttttcttatctttttgcattggctgggacctccagggaagttttgcacagaggcaatgacagcgcacattattttattccctaacacacatttttacaataatattttactgcccagagattttgtgttgccatagtaatgattcataatgaagtctacatgttgtttatctctgtttctgcc

SEQ ID NO: 651735 - DNA, 625 bp, Homo sapiens
tttttgttaatgttgaggttagtttggaaaatattgacctcttcatgataatgtgtgtgaagaactttacttatttatcttttcaaccttaaatataagtttctaattttctccatacatgtttttcaccttatttgttaatatttttctctatatagctgattatttttgtttctctcatgaacgaatacttgttattgtttctttcctatctgactgttgctggcattcagaaacacagttgttctttgtatagttatcttgtatctagtatcattgttgaattttcttattatttataatcatttatttctagagtatctctgattttctatattgaaagtcattttgtctgtaaagaataatttcacttttctttctgaatcttgatatatcattccattttttttcttatctttttgcattggctgggacctccagggaagttttgcacagaggcaatgacagcrcacattattttattccctaacacacatttttacaataatattttactgcccagagattttgtgttgccatagtaatgattcataatgaagtctacatgttgtttatctctgtttctgccttctccagtccttggctatccccaacttatagaatt

SEQ ID NO: 651736 - DNA, 529 bp, Homo sapiens
cagtaataaggaagatgctcactgctcattcttcttgtgacaataaactcaaatgaatcattgcatgatagcagaaggtagagcttcagtttatcatagaaatgctcttaattagacttgctacaccagtgtatgtctcatctgaattgcccrtgtattattgataaactttattgggttattttacatatcatgtattcatcttggtctgatcaagtctcagttgtgtattgcaatatgaatttgccaactatggttggctggttggttcactggagttcatcagcccacagttctaattcaggatgtcattgaggtatgaatatattaggttattctgcagcccagaggttgatcctttattagctcttcagtatttgataattataatgaagatcacaaaactgcaagatctaattaagtttggaactttccaaaattgactttctgtacaaaatttcatgctgaatgaatgtgacaatccagaaaattaaagaaatagcctcttgcatgactatatttcatttcc

SEQ ID NO: 651737 - DNA, 529 bp, Homo sapiens
cagtaataaggaagatgctcactgctcattcttcttgtgacaataaactcaaatgaatcattgcatgatagcagaaggtagagcttcagtttatcatagaaatgctcttaattagacttgctacaccagtgtatgtctcatctgaattgcccgtgtattattgataaactttattgggttattttacatatcatgtattcatcttggtctgatcaagtctcagttgtgtattgcaatwtgaatttgccaactatggttggctggttggttcactggagttcatcagcccacagttctaattcaggatgtcattgaggtatgaatatattaggttattctgcagcccagaggttgatcctttattagctcttcagtatttgataattataatgaagatcacaaaactgcaagatctaattaagtttggaactttccaaaattgactttctgtacaaaatttcatgctgaatgaatgtgacaatccagaaaattaaagaaatagcctcttgcatgactatatttcatttcc

SEQ ID NO: 651738 - DNA, 542 bp, Homo sapiens
ttaagctcagtaacagctgagatattgttttcctttttatcaaaccacaattgaataaataagaaaggaactggcaggcaaaaacaggagaaacaatagtgaattacgaggtaagtgggaagtactacattaatgttataaaagtctgaccaaacattttgtttagagaatacacacatacaaaaagaatagaaggacataggaagaaaagtacagtaaattcttttaaacctatattttagacgatyacttctctcatgctttgggtccacttttgttcaacaggcatccaagaaagacttattgactgcttaatttgatttccattctcatcccaaatcaacaattttaatttctatgatgccttaatttaaaatatattaaaatatagtcaccatgtcatgcaatagatcactaaaacctatatcctctgtctaactcaaactgtacactgtgacaccaacatctcccccgtgccccgctttcttccaccccagcaccctccggtaaccaccattctactctatacatttgtgaatttg

SEQ ID NO: 651739 - DNA, 546 bp, Homo sapiens
ctttgggtccacttttgttcaacaggcatccaagaaagacttattgactgcttaatttgatttccattctcatcccaaatcaacaattttaatttctatgatgccttaatttaaaatatattaaaatatagtcaccatgtcatgcaatagatcactaaaacctatatcctctgtctaactcaaactgtacactgtgacaccaacatctcccccgtgccccgctttcttccaccccagcaccctccggtaaccaccattctactctatacatttgtgaatttgacttttgtagattccccatataagtgagacaatgcagtgtttgtytttctgtgcctaacttattttacttagcatgttgttcttcaggtttatccatgttgttgcaaacgacagaatttccttctttttaaaagtctgaatagtattctatggtgggcatttataccacattttctcaatccattcatctgttattgatggatgcttaggttgcttccatatcttggctgtggtgactatagttgacccatttttttaaagtag

SEQ ID NO: 651740 - DNA, 546 bp, Homo sapiens
ctttgggtccacttttgttcaacaggcatccaagaaagacttattgactgcttaatttgatttccattctcatcccaaatcaacaattttaatttctatgatgccttaatttaaaatatattaaaatatagtcaccatgtcatgcaatagatcactaaaacctatatcctctgtctaactcaaactgtacactgtgacaccaacatctcccccgtgccccgctttcttccaccccagcaccctccggtaaccaccattctactctatacatttgtgaatttgacttttgtagattccccatataagtgagacaatgcagtgtttgtctttctgtgcctaacttattttacttagcatgttgttcttcaggtttatccatgttgttgcaaacgacagaatttccttctttttaaaagtctgaatagtattctatggtgggcatttataccacattttctcaatccattcatctgttattgatggatgcttaggttgcttccatatcttggctstggtgactatagttgacccatttttttaaagtag

SEQ ID NO: 651741 - DNA, 565 bp, Homo sapiens
catgattgtgtcactgcactccagcctgtcttaaaaaaaaaaattacactgaagaacaaaggatgaataattatttgcctttccagtgctagagtaattatgaccatgtgatattgaccatgtgatattggcatgtgtaatccctgaacatatcaacatattacaactaaactctacttatgacagggtggattgcacatgcagtcatgaagaatgaacttttcaatgcatagtatttaaataattggttagacacacaaraaagaaattggactccagccttttacttatgcaaaaacaaatctcaagtgggttaaaaacataaatataaagtgacaaaattataaaatttgaaaagaaaacaagaataattttaatatcttaggtgaagaaaaagttcttatgacacaaaaagggcagaaccaaaacggagaccatagacatatttggctcaaataaaaccagggacttctgtttatcaaaagacatcttaaagaaagtgttggcaaaggtttgaagcaatcagaactcttagacattgctggtgggaatataaatcagtata

SEQ ID NO: 651742 - DNA, 589 bp, Homo sapiens
ttgtaataccctgagtggtttttgttcttcttactggaatctgacagatacagaaggtaatcttttgagttatktttataaagcccactaaaattgatcatataatctgacaaaggcagcataaaaataaaactgaaagccggttttattaatgaatgtcaatgcgaaatgtataagtgaaatgcaatataaaatattaaaaacagaatttaatggataattttcaaagtaataaatcatgggtaactagggctcatcccaaaatcatttatcatatgaatatgtcaaaggactacaagagaatgaaatagcaggtgtaaatttttgaaaggggagacaagtttattttttatgataatgtgcttttatagcaccaaagaatcagctgaagagttatttaaaacaatatgaatatttaataaggtgactggtttcaaaattaatttataaaataattagcttttagtttaaaaacaataactagtatgaaagaaaacatctcaataacaaaagcaaagagaaaagtaaagttggaaataaacttttgaaaatgtacagaatttacatgaaggaaacttgagaacactgg

SEQ ID NO: 651743 - DNA, 589 bp, Homo sapiens
ttgtaataccctgagtggtttttgttcttcttactggaatctgacagatacagaaggtaatcttttgagttatgtttataaagcccactaaaattgatcatataatctgacaaaggcagcataaaaataaaactgaaagccggttttattaatgaatgtcaatgcgaaaygtataagtgaaatgcaatataaaatattaaaaacagaatttaatggataattttcaaagtaataaatcatgggtaactagggctcatcccaaaatcatttatcatatgaatatgtcaaaggactacaagagaatgaaatagcaggtgtaaatttttgaaaggggagacaagtttattttttatgataatgtgcttttatagcaccaaagaatcagctgaagagttatttaaaacaatatgaatatttaataaggtgactggtttcaaaattaatttataaaataattagcttttagtttaaaaacaataactagtatgaaagaaaacatctcaataacaaaagcaaagagaaaagtaaagttggaaataaacttttgaaaatgtacagaatttacatgaaggaaacttgagaacactgg

SEQ ID NO: 651744 - DNA, 589 bp, Homo sapiens
ttgtaataccctgagtggtttttgttcttcttactggaatctgacagatacagaaggtaatcttttgagttatgtttataaagcccactaaaattgatcatataatctgacaaaggcagcataaaaataaaactgaaagccggttttattaatgaatgtcaatgcgaaatgtataagtgaaatgcaatataaaatattaaaaacagaatttaatggataattttcaaagtaataaatcatgggtaactagggctcatcccaaaatcatttatcatatgaatatgtcaaaggactacaagagaatgaaatagcaggtgtaaatttttgaaaggggagacaagtttattttttatgataatgtgcttttatagcaccaaagaatcagctgaagagttatttaaaacaatatgaatatttaataaggtgactggtttcaaaattaatttataaaataattagcttttagtttaaaaacaataactartatgaaagaaaacatctcaataacaaaagcaaagagaaaagtaaagttggaaataaacttttgaaaatgtacagaatttacatgaaggaaacttgagaacactgg

SEQ ID NO: 651745 - DNA, 387 bp, Homo sapiens
actttgtagcattttttactaagctttccttcacctttgtgcagcccttattctggaagtcatgcttgccaatgtttggtgtttgaagttgccaacggggagagctatagtttaytttctaattcacaaataatcataaggtggttattttcataatctaccctttttattcagtgcccgcgccaaacaggaagaatctaccgccttgacacttcacgttgtaaataaaccttttctggcttcaataatgatcccaaggcagtagtgctgtgggcatcttaaaacgaaactttcttacacagaagaggtttacaattctgtaaaggtgttgtgatggcatttatgtagtctgatattctgcaatgcagtcatacctacaaatatgat

SEQ ID NO: 651746 - DNA, 387 bp, Homo sapiens
actttgtagcattttttactaagctttccttcacctttgtgcagcccttattctggaagtcatgcttgccaatgtttggtgtttgaagttgccaacggggagagctatagtttattttstaattcacaaataatcataaggtggttattttcataatctaccctttttattcagtgcccgcgccaaacaggaagaatctaccgccttgacacttcacgttgtaaataaaccttttctggcttcaataatgatcccaaggcagtagtgctgtgggcatcttaaaacgaaactttcttacacagaagaggtttacaattctgtaaaggtgttgtgatggcatttatgtagtctgatattctgcaatgcagtcatacctacaaatatgat

SEQ ID NO: 651747 - DNA, 387 bp, Homo sapiens
actttgtagcattttttactaagctttccttcacctttgtgcagcccttattctggaagtcatgcttgccaatgtttggtgtttgaagttgccaacggggagagctatagtttattttctaattcacaaataatcataaggtggttattttcataatctaccctttttattcagtgcccgcgccaaacaggaagaatctaycgccttgacacttcacgttgtaaataaaccttttctggcttcaataatgatcccaaggcagtagtgctgtgggcatcttaaaacgaaactttcttacacagaagaggtttacaattctgtaaaggtgttgtgatggcatttatgtagtctgatattctgcaatgcagtcatacctacaaatatgat

SEQ ID NO: 651748 - DNA, 597 bp, Homo sapiens
gatctttttgatacagattcttaatcctgaaaacaaaattaccctttctttcctctctcactctgtctcagtctttccctctcatgcacacagaggactctaataattaattttttttaaaaaagtagtcattctatgaagactataggaaaaaaaaaactctccatgtaaccattgtttcagtggagaaactcatttctaaacatataattaaaaaaccaggactggcaagcggacttagtaggaaacacactatacttcctacagcttttaagtagctatgggaagacagtggcacccacttacygaaagcaggacctgctacattactggggcccctgcctccatctccaaacctggaagtactctcttcctcaacagcatgggcctgaaatcagaggcccacaaagagggtgatcaaagggtgaagaaaaggcacaccttcccatgaaaacatctgatttccattggaggtaaatctgtttaggcgtgttctgttttcatagtaacaactgaaacagcaactgaataagtaaggtgatagaaaactatgatgtcaagaagaaatttgttgaacagaaatttaataaaaatgat

SEQ ID NO: 651749 - DNA, 443 bp, Homo sapiens
gtctaggaaacctagtgaaatatgtatgagaaactttgaagaaaaatttttagaaacaattttaatatcagaggaagatcttagagttgtatgtatcttacaaaaaaaactctataaacttttccatatatattggatttattatatttctccaaagcaacttgaaaggcattgaattatgttccctttcagctcccccaaaaataaaaacaccataggtaataaaagcagaaaagttgactctgaaattcattttcgtatagatttataggaaaactgctttgatgtcttttccattcccttgccaatttaaaaaaaaaaaaagaaaagaaagggaatgtctattaagtttagcataaaaaaatctactcttcaaacctcatttatctttgatgagccctgggcagagtgccataataayactatgcacattataagaattc

SEQ ID NO: 651750 - DNA, 371 bp, Homo sapiens
gactctttttccttttcatatacactttaccattagtttatcaagttccttataaaatccagccatgcctttaaccacattaaatctttagctcaatctgtggcaggtttgacctcattttggtattgaatcattttaaccatgaagagcatacaatttccttttaggatctcttttatattgttctacaaaattttatgatttttctccatataagtctttaactgctttataacttttcagaattattcctgggtaccttaaatattttgtggctactgcaaactttttaawtggcactttgtactgtttatttctgtggtacagacatacaattgatatttccatattgatatcttgtctagcttctc

SEQ ID NO: 651751 - DNA, 595 bp, Homo sapiens
agtctttaactgctttataacttttcagaattattcctgggtaccttaaatattttgtggctactgcaaactttttaattggcactttgtactgtttatttctgtggtacagacatacaattgatatttccatattgatatcttgtctagcttctcttataactcattaattttaataatttgtaaatatattaatttgagttttctatgtagaaaagtaatatatttcttcctttgggggaaaagaatatcatacacttgtgaatatttgtgaagaatgttaatttatttctttttcaatctttatgacattttttccccctttttttaactatgtgcccaaatctgcagtaagactttaaataagcagtagtgatagagggcagccttctcttgttactgattttaatttgaatacttagagggccttcttatacaaacatgaaactaagacatcatctctcttccttggaaattagttaaaattaataacaatttwaaaaaaatgaacaaagacccacaatctctagcttctataaaactagggaacaggcataattcatagatacaaaaatacacttaaaagcttccaaaa

SEQ ID NO: 651752 - DNA, 479 bp, Homo sapiens
ttttaccacagcaatagacagtggagaaggagctgcagaatactcaagggaagaagttgtgagccaagaattttttattcaacaatgctgaacatgtaagataaacagtgctgaacatgtaggaacgaaggaatcattttccaaagagtctttcttgaggaaactactagaaaattaatttcaacccagagatgagctgggggaaattgtagcaaaacaattcatggggagcatggaatatatgtaactataaaaccataattcagacaaatacgaaatttaggacaaaatataatgtgaaagttatatgcctatatatgtagaaatcacacagctacctaaaattgkgaaggaagaaagtaaatgggagataagtatactaattacaaaagtactctgttagctagaagtcaaaggaaccctacaaggctgagaaaaataattataggtgtatttaaaagtacaaatgtaagtgttga

SEQ ID NO: 651753 - DNA, 592 bp, Homo sapiens
gttcttttaatatttgtaggatctgtggtgatatttcctcttttatttctgatatttatagtttgtatcttccttctttgttcttgaacagtctgacaaaatgtttataaattttgaacttttcaaagaacttgcttttggtttcatgaattttctgtgttccatttcatggtttctgctcttattttatcatgtcctcccttctgcctatttttctttcacctggtcttcttttcttagttttttaacacttgatcttatccaaaaggctgagaagagatattttcctaattaataaatgttaaagattagataattgattaaagaccttttttctttttttttcttctttttttttaagggacaagtcttcactctgttgcccaggttagagtgcagtggcatgatcatatctcgccgwagccttgaactcctgggctcaagtgatcctcccacgtcagcctcccgagtagtcggaactatagtcatgcaccaccaagcctggctaatttttatttttatttttattttgtagaggtagagtcttgccatgttgcccaggctggtcttcaaccaagtgattatcctgcgt

SEQ ID NO: 651754 - DNA, 564 bp, Homo sapiens
tgggcatgctttttattctgtcaagccattactgtggagagttgagtcaatctagtcagcagtttagctgggcttgagttttgttttcctttggttaccttcctttggttaccttaagtgcaccacagaattcaacttcttctgggggtgaatggctgttaccttatactttgttagtagtccaggatgctgaaggttttttctcagtttacacatcgtacctacaacttttagcaggtccttgtggtgtgataggctcaacaaaagttacagttttgtaaactaaattattacttttttcatgttcttagggtgggaacaacattctcttgtggttttctacatctgaagcrgttttctatatctactacacttggtattcttttaataaacccccttttctgtttaaatcagttttacaccactaatattttttcctaatagaggagacaaagtatggtaatagttaagggcgtacaaaataggattcagacacaactggttttgaatcctactctgccacttaccttatcactaactttactagtcagataattgagcaca

SEQ ID NO: 651755 - DNA, 503 bp, Homo sapiens
aaaaaaattctactatttggaattatctactattaacatttagttgtatgccatttcaactctgtaattacatgtttttatgtgtatgcttatatgaacacatacatatggatgaaaaaatggataaacagggatcataactgtaaaaaatgtcatttaagttttggctcaaatgtgactgcctactagatgctttccctgatctcctaagcaaatttagctatcacccccagcaggttaaaatcttaccacttagttttatttcttatgtcatttaacatggtttaacattattctgttcatttatttgcttatttgttaattgtttcctcaacacaaatgtgaattcactgacagttggggccttgtttatcatgctcgctattaggaaatatttattaaacaaatcaatgaagagtgttataattttttttttttttactttgcaatrtaacgtgagcatttctcaatgtcattaagtaagccttctgatttttaatgac

SEQ ID NO: 651756 - DNA, 589 bp, Homo sapiens
tctcattattgcttcataaagatccttctcctgggctggagagtttagggaaaataactgaagtctgaacttagagttactaactgctttcatcttctcttggttagaaaaggtactaattcagaaataaatttgggctatgaataaggtaaagaaaattaggcaaaatgcaagatgatagagcagtatcttaaaatttgtcttgaaaagtcaaagtgtttcatgcctgttgcttactcactaatgtttcagaaaaaaaaaaattgtaaggtcaggcatggtggcttatgcctgtaatcccaatactttgggaggcagaggcaggaggattgcttgagcccaggagtttgagaccagcctgggcaacatggcaagaccccatctctgaaaaaaaaaaaattagtgaggcatggcaacacagcacacagctgtagtctcaactattcggggggctgagttgggaaaattgcttaagcccgggaggtcaaggctgcagcgagccatgattgtgctactgcactccaacgtgggtgayggagcgaaaccctctcaaaaaaaaaaattgtgtagatagttatagaaagaatgg

SEQ ID NO: 651757 - DNA, 642 bp, Homo sapiens
atttccagatgagccataccttggactttgtccttaatactgattttagaaattttcttccgactataacatcttgtcatttcaatacaagaaatgtctcttcatttttcctaaatttatttcttctcctctatatctattcctattcttcctatttttatagtctattaactttttatttcatctaactctggctatcctttggcagtttgctacttcgcatatccctacttgaccttttttggagcaaatgcctttgtgaagtcttcctagagtcttccaggtgagcattagtatgtctagcatattgtatgtatwtggcctccatagcccaagcatagtccttattatactgtattcagatcattagatgagtttgccatcctcactgtactagagagtctttgagtggagtgtttgtttcttattcatctttgttttcccagtagctaccacaagacataccacactgtaagttttcaatgaacgatcagtaaattaatgaataaataaattagaagagtcaaactttttatacaaatgtttgaatactaatatagtgtaacgcaggatggcagagaggagagcattgaaagccttcagaggatttaacattgatttgctggaatcatacttgccaaa

SEQ ID NO: 651758 - DNA, 421 bp, Homo sapiens
ttaatagatagtaacatataatgaaatagatgtattgatatgttcccatccctttttcagattcttactaaggtgtaggttggagtcccttttgaggagtagaagcacagaagaatgaagtagggataaacattttataaccacatgggtaaagtaaatagtagagattgggctaaagtcagattatgagatatctagcataattacaacaggagatgtacrtggtaaatagagctgcactgactgtcccagccgtcactaaatttcttcttagtgactccaaaatttacctgtgcttacaaatttaatataaggccttcaaaaaaacagcccatctcttttcctttcccttcctttatggtgtttgcttacaagttgatactgttctcaagtagcatacaaaatgtcaaaaaattagttt

SEQ ID NO: 651759 - DNA, 421 bp, Homo sapiens
ttaatagatagtaacatataatgaaatagatgtattgatatgttcccatccctttttcagattcttactaaggtgtaggttggagtcccttttgaggagtagaagcacagaagaatgaagtagggataaacattttataaccacatgggtaaagtaaatagtagagattgggctaaagtcagattatgagatatctagcataattacaacaggagatgtacgtggtaaatagagctgcactgactgtcccagccrtcactaaatttcttcttagtgactccaaaatttacctgtgcttacaaatttaatataaggccttcaaaaaaacagcccatctcttttcctttcccttcctttatggtgtttgcttacaagttgatactgttctcaagtagcatacaaaatgtcaaaaaattagttt

SEQ ID NO: 651760 - DNA, 658 bp, Homo sapiens
gcttttctgttaatgttaaactaccgtaatgtttttatttttgtgtgtgggaaaatatgaaagtaacatattttaaggaaaattaatagtttgttaaaaataagcatttcaaatataaattttgaacaatttggcaatttcttggctttttataatcatrtataaatatactaatttttaggatactattagaagaaatttgttttggatactcttacaagaattttgatgcatttgcataatgttaactttgcatatgtcttacagaaataatttaataagattagggttttcataacctattgataatcatgaattaatgtgtctgcccagcccatttatctcttggaggggaaacctaattaagcaataatatttactctttaattttttttataatgtagctaagcagatactttacatatttatttattggtatatatttaagtgttcccatttgaacagtttgaatcaggcattcataacatggaaataatttgattactttgttatatttctcattaataacaaaatattatattaataaatgtcaattatttaaaagatgtttaataaaatatttatagcattctaaattgatgaaaataacagtgttatttagtttctctggaacaaaacaatctagttaaaagagata

SEQ ID NO: 651761 - DNA, 541 bp, Homo sapiens
ttaaaacataaaaataacaaaaataaaacttttcagaaagttatctaaagactttttcacacgtctaatgattctaaagaggaaatgagattagaaaatgtttagatagcagttatatttcaaagaattttcatattggtatcaaatttaaggctgatagtctgtttagtaaataaaaattttttaagttatatttcaaaagacatacaattatcagtactgattttaatgcttcagggataaacttttctctttcacattggaaaaggtagctccaatatcacatatattaaatctttgaatgtaagcatagagcatattttcagaaaacttttttaatatagtctttgagttttctgtagtaaatacatgtgtatagtaatcgagggttttttaaaaaatgcttttgattcattgtcttgctactgaaacatactattttgcataattttcaaattaattttgaacacttcctgtactgatgctgagtgtataaatttacagcaactttacagrggaaaatttgacaatatatattaag

SEQ ID NO: 651762 - DNA, 652 bp, Homo sapiens
gtattttcggctactgatccaaatagatattttacaataaaatcatggaacttacctaggtggagtatgcaatgcagtgaaagagacgaacatcgcatcaataggattctgctacaagtaacaaggaaaacatcacattcaaactggtttataaggaattactggctcatgtaattgaaaaaccccaaaatcatgtatacatcagggaaggcttgctctagcagctggacaatatcaccaagaaggcaacgtccttctgtctcctaccatttcttgcagcctcaagacggcagctagaagactctagagttataaacttcctcattcatatccaacaggaaagagaaagtgtctttttcctgtctttcccagcagttttgtagacaatcactgggaatagaccaccttatgtcatataccaagttcccaaaccattaccmgttttcaggggcatgaagtgagctcattggcttggtcaaggtcacctgctccactgctagtcctggaaagggggtctgggtttccagaattctgcagaggatctgaagcaaaccaggggctaacagaagggggagggcaggacagcagataacaagaaacatgaatctgactccagtgaactggaagcattttgtaactagcattgaatgcc

SEQ ID NO: 651763 - DNA, 597 bp, Homo sapiens
taatgagttcaacttagattctcaagtacaaaatatctgctgatatagcaactttaaaaagtttcattttattgtggtaggaacacttaccagatctatcctcttaatagatttctaagtgtacaatacagtattactaactatagacactatgttgcacagcagatctctagaagttgttcatcttgcataactgaaactctatatccattggttagcaactccccatttcttcctcccctcggcctctggcaaccactgttctactctctacgtctgtgagtttgattattttagatgccttatataagtgaagtcatgcaatatttgtccttctgtgacytacttcacttagcatagtgtcttccaggtttttccatgttgtcacatatttcagcatttccttcttttttaatgctgaataatattccgttgtatgcatctaccacactttctttatccttttatccatcagtggacatttaggttatttctacatcctggctattgtaaatagtgttgcagtaaacatggtagtgcagatatctccttaagatccgaacttcatttcttttgaatatatacccagaagtgaga

SEQ ID NO: 651764 - DNA, 597 bp, Homo sapiens
taatgagttcaacttagattctcaagtacaaaatatctgctgatatagcaactttaaaaagtttcattttattgtggtaggaacacttaccagatctatcctcttaatagatttctaagtgtacaatacagtattactaactatagacactatgttgcacagcagatctctagaagttgttcatcttgcataactgaaactctatatccattggttagcaactccccatttcttcctcccctcggcctctggcaaccactgttctactctctacgtctgtgagtttgattattttagatgccttatataagtgaagtcatgcaatatttgtccttctgtgacttacttcacttagcatagtgtcttccaggtttwtccatgttgtcacatatttcagcatttccttcttttttaatgctgaataatattccgttgtatgcatctaccacactttctttatccttttatccatcagtggacatttaggttatttctacatcctggctattgtaaatagtgttgcagtaaacatggtagtgcagatatctccttaagatccgaacttcatttcttttgaatatatacccagaagtgaga

SEQ ID NO: 651765 - DNA, 663 bp, Homo sapiens
ttacggaattggcctgcatatatacagtcatcaccgtctttgccgaattagagacgacatattttactctgtgaacaggccagtctccactcactggatgtttggggtcaaggaggagtaacctgaacctctcgttggctttgatgtttggagtcgaacatccgcactgctcatcgaagacccccgtgcttcagttccctctgtcttccatttcccccgcccatggttctcgcccccccaagccgttctccggaaccccttgccgggccggcgggaagcgtggacsgagcgggccttggccgcgtcttttccggccaggtttggtttagctcgcgcagcgcccgcgcagcccgccagggggaccccggcccgccgggcggcatctgaggagaaagcgtccgaggggcgtggagccagggtcctgcggtgcctgctccgggaatactgcgagtcggctggagctccccagccgctccggagaactgggggagccgggtccctggctcggtaaccggtggtcccgcggtagctagaggcgggccccacgggtgggtgtgtccgtttccgcacgccagccttccagcccgggaagagcgcctgcaagcgggtactttgttcccaaagatgggttttgtctgcgggtgatttgggctctcgaagtgc

SEQ ID NO: 651766 - DNA, 588 bp, Homo sapiens
gcctcaggcaagaagggagggccatggagctcttaaatgttcctgttgtgttatcctaccagggtgggtggagaggccaggtaggggttgggccaggtaagtctgtgctctggctccctgcatgcaggcacaagtatcggctccaacggagatcagaaggcagttccctagcctttggagaaatgttccagggaggagcacagctgcccctgctgcacaaaataatccacacagagacgggggatggtagcaggcagcagtaagccccactcagcttctacacacttgaaaaggcatgtcttagaaccagtgttttgctagtggcagccagctgggttccaggcagcctgtgctcagagctcaaaactgcctctggccataagctttcccaatggagacagaaaccgtgctttcaggccacacccctccrcccctgcccatgaagctgaggtgtccaactcctgcacccatgtttataacacacttcttacttgccccttgattctgctcatcaaggttccttcccattcaatattcgactgcagatcttcattgggagcttatctcaacctgtgcccatcacctgag

SEQ ID NO: 651767 - DNA, 450 bp, Homo sapiens
ttaacttggcaaatcaagatatatatatatatatatggatactctacacatatagtaagtagcaaaattaagactcaatcctaaggaacccaagttactttccaaatatatgacttaactacacggtgaatctacataatagaaagagtagaattttaaacattccatgattggtttagcatcatgagccaatatcctaatcaaaattaaatattttccctgtcacctatttgtctcctttaacttttatttacccaataccaagccaatctgtatatctgaagttgtaagaagtgacttaagatgtttcacttctgtatttctgcaatgtttttccttcagctctaagtrtcaaatctttctccatttatatgcctttccaatttgattctcagataaacatttccttttccaagacgtctttccatattcatccttgaacatttcaaa

SEQ ID NO: 651768 - DNA, 362 bp, Homo sapiens
aaataataagacttgaaagtcaatattattccttgatccatgggcagcagaatggatgttgtgttaacaagcatgaaaacattaatctcatcatacatctccatcaaagcacttgggtgactaggtgcattgtcatgaagcagtaatattttgtaaggaatccttttatctgagcaccaagtctcaatagtggacttaactgttcagtaaactctgctataaacagatatgctgttacccayattttgttgttccatttagaggccacaggcagagtagatttagcataattcgtaagggccctaggattttcagaatgctaaattgtcttttactttaagctacaagttgctatagcccct

SEQ ID NO: 651769 - DNA, 436 bp, Homo sapiens
aaggtaagctttgtgttggattagtttgcccaactgtaggcaaatgtaagtgttctgagcatgtttaaagtaagctgtgatttttggtaggctgggtgtattaaaattcatttttgacatgatattttcaacttatgatgggtttatcaggacataaycccaccataagttggggaaggtctccacttttctttagagtcttaaagctcttccccaagtgcagtaggaaaagcgatcataagtattgccttatattcactaggacataaaatacgttattgtgtagtatgtgagaaagcaaaatgccctttgccttttcccccccgtttttcattacctacttgctagagttatagatagtatcacttgattgaaattgtgtttataatcacatcttagtcatgttgggggagattttttatagacatgttttaaa

SEQ ID NO: 651770 - DNA, 436 bp, Homo sapiens
aaggtaagctttgtgttggattagtttgcccaactgtaggcaaatgtaagtgttctgagcatgtttaaagtaagctgtgatttttggtaggctgggtgtattaaaattcatttttgacatgatattttcaacttatgatgggtttatcaggacataaccccaccataagttggggaaggtctccacttttctttagagtcttaaagctcttccccaagtgcagtaggaaaagckatcataagtattgccttatattcactaggacataaaatacgttattgtgtagtatgtgagaaagcaaaatgccctttgccttttcccccccgtttttcattacctacttgctagagttatagatagtatcacttgattgaaattgtgtttataatcacatcttagtcatgttgggggagattttttatagacatgttttaaa

SEQ ID NO: 651771 - DNA, 436 bp, Homo sapiens
aaggtaagctttgtgttggattagtttgcccaactgtaggcaaatgtaagtgttctgagcatgtttaaagtaagctgtgatttttggtaggctgggtgtattaaaattcatttttgacatgatattttcaacttatgatgggtttatcaggacataaccccaccataagttggggaaggtctccacttttctttagagtcttaaagctcttccccaagtgcagtaggaaaagcgatcataagtattgccttatattcactaggacrtaaaatacgttattgtgtagtatgtgagaaagcaaaatgccctttgccttttcccccccgtttttcattacctacttgctagagttatagatagtatcacttgattgaaattgtgtttataatcacatcttagtcatgttgggggagattttttatagacatgttttaaa

SEQ ID NO: 651772 - DNA, 436 bp, Homo sapiens
aaggtaagctttgtgttggattagtttgcccaactgtaggcaaatgtaagtgttctgagcatgtttaaagtaagctgtgatttttggtaggctgggtgtattaaaattcatttttgacatgatattttcaacttatgatgggtttatcaggacataaccccaccataagttggggaaggtctccacttttctttagagtcttaaagctcttccccaagtgcagtaggaaaagcgatcataagtattgccttatattcactaggacataaaataygttattgtgtagtatgtgagaaagcaaaatgccctttgccttttcccccccgtttttcattacctacttgctagagttatagatagtatcacttgattgaaattgtgtttataatcacatcttagtcatgttgggggagattttttatagacatgttttaaa

SEQ ID NO: 651773 - DNA, 588 bp, Homo sapiens
tgcctataatcctagcactttgggagaccgaggcaggtgggtcgcctgaggtcaggagttcaagaccagcctggccaacatggtgaaataccrtctctactaaaactacaaaaattaactgggcgtggtggcaggtgcctgtaatcccagctactggggtggctgagtcaggagaatcacttgaacctgggaggtggaggttgcagtgagctgagatcgcaccactgcactccagcctgagtgacagagcgagactccatctcaagaaaaaaaaaaaaaggaaactacacacaattttaaagttttaatgcatgctgtgaaatgactgttcagaaaggttttaaattagaccctcttcaagcgatgtgagaattttgctctgccattgacatcattatgtattattaatttaaaactgtttttgatctttttattaggaattcgatgtcttaagtaggtagatgtattagggttctccacagaaatggaactgtgtgtgtgtctgtctttctgtcacttacacacacatgcacacggacatacacacactctctcacacacacacacagagcgagagagagagagaga

SEQ ID NO: 651774 - DNA, 588 bp, Homo sapiens
tgcctataatcctagcactttgggagaccgaggcaggtgggtcgcctgaggtcaggagttcaagaccagcctggccaacatggtgaaataccgtctctactaaaactacaaaaattaactgggcgtggtggcaggtgcctgtaatcccagctactggggtggctgagtcaggagaatcacttgaacctgggaggtggaggttgcagtgagctgagatcgcaccactgcactccagcctgagtgacagagcgagactccatctcaagaaaaaaaaaaaaaggaaactacacacaattttaaagttttaatgcatgctgtgaaatgactgttcagaaaggttttaaattagaccctcttcaagcgatgtgagaattttgctctgccattgacatcattatgtattattaatttaaaacwgtttttgatctttttattaggaattcgatgtcttaagtaggtagatgtattagggttctccacagaaatggaactgtgtgtgtgtctgtctttctgtcacttacacacacatgcacacggacatacacacactctctcacacacacacacagagcgagagagagagagaga

SEQ ID NO: 651775 - DNA, 598 bp, Homo sapiens
ctagctagtcaaaattcaaattaaattatgtattgggttaagtctatcattagaataaaacaggtgttattatccttctcctaacactattctggcaaaaattagctttagtaaatttaattgcycttgatgttgtactccaaatactttttaattcttaaattatggaaataagataaaaaatagaagacttcaactctgtcattcatttataaatgtcattttgccagtgataccttatggattatgctgatatattaaaatgagattaaaaaaataaaatgacattttattcaacattttaaaaggtgggtcaaatttttgttgctaatatatgtggtacttttaggggaaaatgacaataaaatatgtatcttcttaaaaagatgccagtttaagatatcaagagtatgttttaattggccatgtctctggacaaattgggtacgtataagctccaaaatgggtcagacttctgatactgaaggatttttctttggaagatttattaatattaggaatctcaggggcttgaagtgtggggaaagtatactcttggctttctttaacaacctgttgtgtgtttgtcacccatctt

SEQ ID NO: 651776 - DNA, 583 bp, Homo sapiens
tatctcattgttcctagaagatatatctcattgttccttgaagtctcccagcaagggcctgggagacttgctgaaagagagatgtctttctgttctttttctactttgctctgtgctaggagaggctaacttctacgggcatatcaactggtctgccttaacttctggttggcctcagaatatgggaaacaaagcctaaaaattagagatcagaaagacaatgggtttgagttacttattctcctagctcagttagtgcctggctttaggttggctgttattattgtctcttgaaggccacagatcgtgccctgctccttttctacagtgacatgtttacctgagttctctaaataattcctctccttatatactcagggttggggctgaaccgtctttccactatcacgagccattggatgttttaccattcttttatgttttcytttaactatgttgaagcctttgttcaacagtcccttctgtaaactctcttcaatcgcatactccttttgagtttgtatttggtttcatgtaccaagctgactgatacaggtggggtgcagaacacgtcattagctgt

SEQ ID NO: 651777 - DNA, 499 bp, Homo sapiens
ttttgtattttgaattccttaacttttatttgttttagaaattgaggcaaggtagatgaggacaaaactggtttctaaaaataattacatttgcaaatatttgcagaagctttagtcaaaccagagtttacttcaagaaattttttaggccgggcgcggtggctcacgcctgtaatcccagctactggggaggctgagaattgcttgaacccgggaggtggaggttgcagtgagccgagatcgcgccactgcactccatcctgggcgactgagtgtggcaccatctcaaaaaaaaaaaaaaaaaaaaagatgcctgtaatcccagcagtctgggaggccaaggkgggcggatcacttgaggtcaggagttcgaggccaacttggtgaaaccccgtctctaccaaaaatacaaaaaaatcagccaggcatggtgatgtgtgcctgtaatcccagctactcgggaggctgaggcagaatcgcttgagtctccagctgccct

SEQ ID NO: 651778 - DNA, 613 bp, Homo sapiens
aaaataggataaaagttggcatttgggctacagtagtcaaaactccaggctttggtgacacagaaagaccaaacaaagctattgctataatggcatggtgtttggaagagagcttgaccctaaagcttgaagatgttcagtttcatgacttaggaaaagttggagcagycattgtgaccaaagatgatgccatgttcttggaaggaaaaggtgacaagactcaaactgagaaaaatatgcaagaaataattgagcagttagatgttactattagtgtctatgaaaaaggaaaactagaagaacatccggcaaaattttggatgcaatagctgtgctgaaggttgatgggaaaaatgatgtggaagagaatgaaaaaaacagagtcagatacactgaatgttacaggagttacaattgaaaaagatatcatttgggtgttttgccttggtacatttcatccttagattcactgctccagctaatgaagagtaaaaagttagtatagaaataattaaaagaacactcaaaattctggcaatagctattgctaagaattcaggtgttgaaggatcacccaccgacagtcgagaaaattatgcaaagctccccagaa

SEQ ID NO: 651779 - DNA, 613 bp, Homo sapiens
aaaataggataaaagttggcatttgggctacagtagtcaaaactccaggctttggtgacacagaaagaccaaacaaagctattgctataatggcatggtgtttggaagagagcttgaccctaaagcttgaagatgttcagtttcatgacttaggaaaagttggagcagtcattgtgaccaaagatgatgccatgttcttggaaggaaaaggtgacaagactcaaactgagaaaaatatgcaagaaataattgagcagttagatgttactattagtgtctatgaaaaaggaaaactagaagaacatccgrcaaaattttggatgcaatagctgtgctgaaggttgatgggaaaaatgatgtggaagagaatgaaaaaaacagagtcagatacactgaatgttacaggagttacaattgaaaaagatatcatttgggtgttttgccttggtacatttcatccttagattcactgctccagctaatgaagagtaaaaagttagtatagaaataattaaaagaacactcaaaattctggcaatagctattgctaagaattcaggtgttgaaggatcacccaccgacagtcgagaaaattatgcaaagctccccagaa

SEQ ID NO: 651780 - DNA, 558 bp, Homo sapiens
ggcaagaagtttcggcaagaaccttgagcaactttgccacatcaggaagtaatacagtcttgatgacagaggtgtattgatggagctcaggaagaattgacttgaaaagaatctcattgtcacagataggacaatttgagcttcaataaaacaactactatgatagatacaagcatttcaaataagctgaaattcatgagtatacaattatgcaaaaaaatattgatcacttgtggagaatgccatataaagcattcattctcttgagaacgggcaaataaatagaaagaataactatcttattaccttgattccatcaaggtaataagatagttactgaagataatgtctctttaggaatattctaagtaataagtgaagaatrtttaatatatttttctttcacccctaggccattcattcataagatatgacccagggcactttgaggtccctgactccttttctgagggtccatagttcccaataaatcctaacaatactaccaggttaaatttttaattctattcttctcatgattttatgttgttctccaga

SEQ ID NO: 651781 - DNA, 458 bp, Homo sapiens
taaaaagtgctaataaccatctgaacctatagcaagccataatctgtttgctgggggaaggtcttggcctcaatgttgaaggctgctgactgatcaaggtggtagttgctgaaggttggggtggctttggcaatttcttaaaataaagcaacactgaagtttgctgcatcaattgactcctcctttcatgaaagatttccctgtagcatgcaatgctgttttatatcattttacccacagtagaacttctttcaaaactgaggtcaatcctttcaaaccctgctgctgctttatcaactaagtttacgtaatattctaaatcctttgttgtcgttttaacagtgttcacagtatcttcaccaggagtaggttccatctcaacgaaccactttatttgctaatccataagaagcaactccttataygcattcaagttttatcatgagattgcagcaatt

SEQ ID NO: 651782 - DNA, 600 bp, Homo sapiens
agggggaagcactgttctaggtgagctgtctctgcacaggcctggagctgggagtggggaggggcaggccaagagtggcacacttggcataggagcttcacctaagatatcggcaggaactaaatttgaatagaaaggaaatgacagattatgaagggttgaaatcattcactttatctagtggtgttttgaaaaccagtctacrcaaagggaggaaataaaaaaacaagccacctgattttcagcatttgctgatttccatggtataaatactttcacaatggctgatttcaagctaacaaatcccaaatccctaaatatgttaaaatctgcttactgattttagctcattctcagaaaaaacaaaaacaaaaacaaaacaaacaacaaaaaagaaacaaacaaaaaaaactattctaagatttctgagtaggagagcaacagagcagaacaaggccagacggggaagttcaatttggtagtggcagaatggaaactgtagaggctagagctgggaaggccaatctggatgttattaaaataattcaattgggagtttagtaaatctgctgatcacaacacacattacaaaaaagaggg

SEQ ID NO: 651783 - DNA, 549 bp, Homo sapiens
cctctcacaacatgtgggaattatgggagctacaattcaagatgagatttggatggagacacagccaaaccatatcaaaaggttttcttttaaatttcttctgtatggttgtagagctttcatgcattcagaagtgagctctgcttctgtctcaggtgacaaatgtcatactgaacatgctaccccatcctacactctacttagttcctttcaaaagaagttatctggcttaatctagggaataaatgccactgatgtcacttactctgtgcggagtttccagagggtcacattggtcctgttagcctgcagacagacttttaaataactatcctgactgctgtttcacaacccctttcccagaggcctgctaactaaacctaaaactttcctaacatatgtaaggcatctcctttgactatgtaggacttccagttgtgtcttctaatcttgaytatctgtcaataaaattatgttctccagaaatcattcataatttcagtttcaattgtactgacagcatcacatcctatttgtaatgcagttatg

SEQ ID NO: 651784 - DNA, 586 bp, Homo sapiens
gttgaataccaagggctgctaatgtcagaacaagagcacaacactgctgaagtcttgccaaagggatcgaccctgaattgatcaagcctgcggatctagctgccaaattgcaggaaatacagagaacagaggcatgtattgaactgtagcatgaatgtgcagttttctagccagtgggaaactctataggctgaacagttcaggttttctctagcagataagttgtaagaaaaagaggtagtggggaaggtgtaaagtaggagcgattttgaagaatcgtcaagtgaaaaaaagtggacaaggctatagkgtagggatgcctacgtgaggaacaaagcaattaaccagaaaagtcagggtagttgttacttttagttggagggggctgttcattggcatgtggtgaatggcggtgtctttattttttttggtggtggttacatggtgtgtgccttctaatagtcccttacgccatacaattgttttatatggctttcggtatctatattttatcgaataaaatattaagaaagaattgagggggtcaatgaaatatgggctagaacagtacccagcagagggcagg

SEQ ID NO: 651785 - DNA, 626 bp, Homo sapiens
agtggtgtatccgtataatggaatattattcggcaatagaaaggaaggaaggttttgagttagacagagggcatggttgtgtaataactgtgaatgtgctaaatgctactgaagtgatcagtttaaaatgattaattttatgttatgtgaatttcacctcaattgaaaaaaaaggatgaagttctgatatttgttataacagctatgaatcttgaaaacattatgctaagtcaaagaagccacatatgaaagatcacataccttacratttcatttctgtgaaccatccagaagaggcaaatacagacagacagaaagcagattggcggttcccgggggctgggagaagggtagaatagggaggaactgctgatagagatggggcttttcaaggggtgatgaaaatgttctggaattagctagtggcgactatgtgaacatactaaaaccaccgaactgtacacttttaatgggtgaattttatggtatgtgaataatatctcaatcaagctgttatttaatatatacaaaagtaatataataaacaaatacaattcttctacttggagactttccagcctactgttgcctaaatctaatagtgaggtaataaataataataatca

SEQ ID NO: 651786 - DNA, 534 bp, Homo sapiens
gctggcatgagatgagatttgtttgcagagatgtataaaaatttcaaagccccaaaggagatttcaccacagatcattaagtccatctaattgtcgtcctactacccatttagayggggaccctgttatgctaactcctatcctgtctcttgtgagtgatacagtcaacacacatgatgatcacagcaccagctcagacaggtgtgttttaaaacaaaagtgtgttataaatgtacagcctcagcagggaaaatgtgggggcgaagaaacacacaaatacttggctagagtcggtcacaggtgaagatggggatgactgtgttttccgtttcatccaaacattttggcctgactcagataattttttttccagcatattctgtttgacacaagggaaacggtgcaaatccatcaccaccattgtggaaagagctccaaactcattctcacgaatggtggatcagtaatactacatgacaaatggtagcatttttgggaaaccattatatttgcaccagtgagaagtcagaatca

SEQ ID NO: 651787 - DNA, 614 bp, Homo sapiens
caatgcaattccagtcaaaatttcaaaaggttttaaaatataatttgataaattgattctaaaatttacatgagtagaaggggtggagtaagatggctgaatagaggcttcaccaatcagtcccccaataaagacaccaatttaacaactatttrtccacaaaaagcacctgcataggaaccaaaaattaggtgatcactcacaatatatggttttaacttcatatcactgaaaggggcattgaagaggctagaaaagagttttgaatcactgacaccacccttcctccctcacctagcagtggctatgtggcagggagagagaatctggacacttgggagtgggtgagtgcagcaactgtgaaacattacatgaaacttagttctgccctgtcatagcaaaaagcaataccaggctgaactcagctgacgtctgcccacagagggagtatttaaaccagccctagccagaggggaatcacctatcccagcggtctgaactttagttctggcaagtcttgccacctagggatggagtgctctgggaccctcattaaacttgaaaggcaccttaggctacaaggaactcctgggtgagtcctagtgctgaactgg

SEQ ID NO: 651788 - DNA, 574 bp, Homo sapiens
caaatctaacagttattggccttaaagaggaggtggagaaagagataggggtagaaagtttattgaaagggataataacgagaacttcccaaactaagggagagatatctatatccaagttcaagaaggctatagaacaccaagcagatttaacccaaagaagactacctcaaggcatttaatatcaaactaccaaaggtcaaggataaagaaaagatcctaaaagcagcaagagaaaataaagaaataacataaaatggagacctccaatactgactgttgggagtttgattataaaatgccttgaggcmgtcttctttgggttaaatcttcttggtgtcttacaaccttcttgtacttggatgttgatatctttctctatgtttgcaaagttcaatgttaccttacaggccaggagagagtggcatgacatatttaaagggctgaaggaaaaatacatatatcctagaatagtatatccagtgaaaatatccttcaaacatgaaggagaaataccttcccagacaaacaaaagctgagggatttcatcaacaccagacctgtcctacaaaaa

SEQ ID NO: 651789 - DNA, 607 bp, Homo sapiens
aggtggctgaggcaggacaatctcttgagcctatgagtttgaggctgcggtgagctatgatagggccactgcactccagcctgggcacagaatgagtatcctgtctcttaaaaaaaacaaacactgcaaagctgggtgtggcaatctcaattactcagaaggcttgaggatcgcttgagcccaggagtttggaaccagcctggggaacatagcaagaacgcgaatagaaaaaaaaaatttttttaaccctacaaattactatgttaatgtttaatttatttgaccaaagccaataaatgatgaaatatatasagttagtaaattgtaactcttcttccccatccttcctcccttatcagacattattgttgaagcatgtgacagaactatgactctgcaattgaggctatgagacttctgtcatagctatcactaacattcactacaaactcatccagtcctgtcacaaagctttctgcttacaagaaaattctcatgtctggtcttaagcaagcaaaaaatattttaggcaagtctgaagacaagaataggtctcatgaagcatattatagaatttttctctaaagaataattcacaattgaatcc

SEQ ID NO: 651790 - DNA, 600 bp, Homo sapiens
ttaaaagaaattcatcatccaaatatcttctcagtgttaagcaagcacatgaagttagctatagctcgacccttaacagctaatcaggtaaactcttcaactcagttttgaacgtaacatagtatactacagactttttgtttttgtcctcagagctaaagagaaacaatggctatatggcatactatgaggattaattttatatgtctacttgactgggccatagggtgcccaatatatggtcaaacattattttaggtgtttctgtgagagtgttttggataattttaacatttaaattggtatactgagtaaagcagatgatactccctattgtgagtaggcctcatccactgagttaaaggcctgaatagaacaaaaagattaaccctcccccaggtaagagcgaattcttcctgcctgatggccttcaaaatgggacatcagctctttttcctgcctttggactcaaaccattggctcttcctgggtcttgagcctgctgrcctttggactggagctacactatcagctctcttgattttcaggccttcaaacttagactcaaactacattattggctcccctgggtctcccaga

SEQ ID NO: 651791 - DNA, 576 bp, Homo sapiens
aattcctgacctcaggtgatctcagcccgcttcagcctcccaaagtgctgggataacaggcatgagccgctgtgcctggcctgagcctattttcttagcagttgaacaataacagtacctacttcacagagttgctgagaaaattgagagaaaatttaggtaacatccttagtagacaggcccttctgccaatcaagtccatttatttatggcccacaatgtacctcctctatgccaccacatgtcaagaccaggattcaggaaatggtgctttcttgttgtttggtttgttgtttttacctgtctctttgatgagttccaagcatcccttaggcgtacaaggaatgaaacagtcattgaggtcacctctagcaagtytcccagcattgatgctagtcaatcttaaaaaagtgatggaaataagaaggaaataaaggcaattagatgtctttactctttagaaacatttatgctgtattccccaaatagaaacatattataaatgaaagcatgcaatgagacataggaagccaagccacacttacccatccacatccttctcgggtgcaatagcat

SEQ ID NO: 651792 - DNA, 587 bp, Homo sapiens
ttctctagattctcaaaatgaaatcttaggtcactgattttaggcctttcttctttttattatgtaattattagctaaattatttaaagctattttttgctctggctttcgcaacatcccataatttttgataggctggattttcctaatgcagtttaaaatccttcctaaaagggaatccactgccttgaagggaaggacccagtcctggcagaattaatcacccactgactaaagagcccttgggccctgaataaccaggagtgatactcaggtagtatgctgtgggccttgggctctgagaggtgctggcttcagttgtgacccagcacattcccagctatggtggctatggtaaaagaccccatctgtttaagaaaagcagaggaaaaagtaaagggcattttatcttgcacactaggtaccagctcagccacagtggagtagaacaagcatgatcttggggtccctgagttcaggcctaggctcttggacagcatttctggaccttccctgggccagaggggagcccactrccctgaagggtgagatcccatgcctggcatcattcactgaagagccactgg

SEQ ID NO: 651793 - DNA, 519 bp, Homo sapiens
gtccctctcatttctagtaatattctttaagactaccagaaatgatattaatatagctactgtgaccttctaatgcttgttttcatgatacatcattttccatccatttactgtcaacccgtctttgcctttatatttaaagtgtgtttcttatagatagcttatatttgggtcttgctttttttttttccattcttacaatctttgtcttttaatgagtgttagcccattcacaaaatataattattaaaaagcacattatttggtgtaaagtttatttgttttatgatttttttactgtgtgtatttttttattgtttcttttctaccttgtggggttgaattttttagaatttcgttttaatttatcatcaatcttatttttcaatattttcctgatagttcttgaccactttcccccaggacagttattaattattttgccaatctccttccccaatcccaccaccataaaaacaaaacaaaaaattaaatacaawcttgccaggattataatta

SEQ ID NO: 651794 - DNA, 409 bp, Homo sapiens
atgtgagtcattacctatgcagaggatgacagggtaggggacgggaactgcaagcagggaaaaactatttrcaccatatatgtgtatattgcttgaacatttgtatttggtatatgttacttttataatttcttaaaaccagtgggaaaaaactaatgggggaaaaacaaaaaaggcttattaaaattttgaataacaaaatatttcaaaacaaatatgatcctaaaatacagtacttactacaatgtccatataaaactaagtacagaaaatttatatttgtaataagtctttgttgtttttatgtatttgtttcaaaatgtctagagttaactagtagaatccagaacctgaagccatgttgaaagaattcttaacgtattaaatatttttattttgaaaaacttca

SEQ ID NO: 651795 - DNA, 613 bp, Homo sapiens
atacagaaaagtagagataatgaaattttgtgtcactgtatatgccacttgaaaacttacttgcaccacatttctaagtatcaaagtcaattaaattttctttgtttagtttccatgaatttattgtaatgaagcatgttttagtatttttcatatttcatttataatttcttatacagattttgttttccctggagtttctaattgcacttctatatttctatacacaaaataatscacatattctttactatatcattaaaactcttgggctcccttactaatgttgaatgagctaacataatttccaaactctaattaagcacagacatttctcattgagaggtctatacctttccaggctaatcactcaatttcattaaagactgtttctcaggcttcagcctgggtgcactcataggattagggagatataggaaaggccagttatcaccaccctgctccagacaattttccaaactctaacctcattttctgctcctcttcccctccaattatctatatctacaactcagggaattcagtggaaaaactttttcatttattttaaacaatgctaaatgttaattattgtactactctgtaatacaat

SEQ ID NO: 651796 - DNA, 458 bp, Homo sapiens
ttggttggaatttcttttctaagaatgcagaaaatagggccccaagatccctggcttgtaaagtttctgcttagaagtgcactgtgaacctgataagattccctttgtatgttatctgccctttttctctagtggcctttaagattttttctttagcattgaccttggacagtctggtgactatatgcctggtgaggatcattttgtataatatctcgcaagtgttctctggatttcttgtatcttgatatctacctctctagcaaaattgggsaagatttcttgggttgttctcttaaatatattttccagattatttgctttctctcctctctcagaatgccaataattcatatgtttggttgctttaaataattccatatttctcaaagactgctcatttacaaaaattctttattctttatttttgccaaatgtagttcaaaagatggtcttca

SEQ ID NO: 651797 - DNA, 526 bp, Homo sapiens
gtttacattcccaccagtagtgtaaaagtgttcccttttcaccacatccatgccaacatctattattttttattttttaaattatggccattctttcaggagttagatgatattgcatcgtggttttaatttgcattttcctgataattagtgatgttgagcatattttcatgttttttggccatttttatgtcttcttttgagaactgtcaattcatgtccttagctcaccwtttgacaagattatttgtttatttctttctaatttgtttgagttccttgtagattctggcaattaggactttgttggatgcatagtttgtgaagattttctcccactctttgggttgtctgtttactctgctaattatttattttgctgtgcagaagctttttagtttaattaaatcccatctgtttatctttatttttgttgcatttgcactggggttcttgatcatgaactctttgcctaatccaatgtctagaagaattttccgatgctatcttctagaatttttatggt

SEQ ID NO: 651798 - DNA, 568 bp, Homo sapiens
atcccatattcttggaagacttactattaagatgtcagtactattcaaaatgatctacagattcaatgcaatccttattaaaatcccaattattatttttttgggcagaaatagagaaagstgtcttaaaattcatacaaaatctcaagggactcccaaatagccaaaacaatctttaaaaaggtgaacaaacctggaaaactcacacttcctgatttcaaaatttaatacaaagctacagtaatcaagctacagtagacaagagatagaaacagcccaaacatccatcagtaattaaatggatcagcaaaatgtggtatatgctacaatagaatattattgatctctaaaagtgaatgaatttctgacatatgctacaatatagatgaaccttgagaacattatgagtaaaataagctagtcacaaaaagataaataatgtatcattccacttatatgaggtacttagcatggttaaaatcagaaagatagaaagtagaatggtggttgccagaggctggggagagcaaggaatggagagttattgtttaatgggcatagagtttca

SEQ ID NO: 651799 - DNA, 591 bp, Homo sapiens
gagtagtagtatggtttacaagaatttatagtgtattttgacatagctagaaaagaagatttggaatattccccacacaaagaaatgataaacgtctgaggtgatggatattccaattaccctgatttgatcattacacattgtatgcaggtatcaaaatatcacatggaccccataaatatgtacaactatataccaataaaaaaygaaacaggtagttggagctaaattagaaaagtagaagcataatttgatagtcagtgggggagtcactgaaggtaactgattagggcagtgacatggccaacattatgggcactgaagattaattaagctgtgatctataggtaagctgaaaaatggaaaacaccaattaggatgatattgtaacagtccaggtgaacagtaagactgaaatataatggtttcaatgaaaatagaaaataaaaataaatatttaagagagagaactgataaaacttaatgactagttgaatgtagtcacagtcacagagagaagttaaaattgttaccatgctccaaaccttaaaagccagaataatggagataccatcagggacgtcagaagga

SEQ ID NO: 651800 - DNA, 483 bp, Homo sapiens
cttagttcttctttctctagattctcaaaatgaaatcttaggtcactgattttaggcctttcttctttttattatgtaattattagctaaattatttaaagctattttttgctctggctttygcaacatcccataatttttgataggctggattttcctaatgcagtttaaaatccttcctaaaagggaatccactgccttgaagggaaggacccagtcctggcagaattaatcacccactgactaaagagcccttgggccctgaataaccaggagtgatactcaggtagtatgctgtgggccttgggctctgagaggtgctggcttcagttgtgacccagcacattcccagctatggtggctatggtaaaagaccccatctgtttaagaaaagcagaggaaaaagtaaagggcattttatcttgcacactaggtaccagctcagccacagtggagtagaacaagcatgatcttggggtccct

SEQ ID NO: 651801 - DNA, 589 bp, Homo sapiens
gccccaattcatgacttccatctaaggcctcgccacctctagaactgctgctgttccctgaggccccatttccttcatagttaatggaggtggttgggctagatcttcagagcccatatttaccgtggcattgtctagctcttggtgattcatttaaacaaaacaaggacgacccacaactaccaccsccaccaccagcaccaccaccatcaccatcacccccatcaaaaacctccgtctatttctcaagactgaaagtgaaaagggttgtttcttttcaaatatttaaaaacaaacccaaactacctttgggcaagaagcctagaagagcatgcctcacctcataccatcagttcttggtatttgaatccagtgggctaatccagtattgttctagcagcaccttgaagcttaatagagctcaactacagctgcccccaagtgggttacactagtattcggcacgtgtaagccaagtgttacaagtttctgtgaagaagtcatttcagtttgggaaaaattgtctaatttggccattcaatttgcattgttctgaaagttgccagacttgtcctgccaggcattagtg

SEQ ID NO: 651802 - DNA, 606 bp, Homo sapiens
aactgtgtctccacagtatatatacctgggccagcttgaagatcgcagggtgccatgtggcctgagcaatatgcatgctatcttctgcttcctgataaatgctaccatgcatgacctcctagatagagattgtcaacctgggtaagatctagatctaatctcctgtgrcctactcccattagtccctggatgcaggcaatctttggttgatacctaaattctgattaagaaagcaagatatttatttttgatcatagagcctgcagatgcagggatgggcgggatagaaatgtgggggtgaaagatggaaatttactttgcagtgctcttcctcaaatactcatcgctcaactcgtcttggagttgaaggagcaattgatgccggacttgggccctaaaaggcagataaaaaagccacggtgggaatctttgattctggccaaattctacagaatagaaaaagaagctgaattggctaattctggaaatgtagttttagaaaatggtttaacaccaggattgttctacaagatcagattttctagcaaagataaactaaatatatatttttttcatttgggataacaatcaaaatgaatttgtgat

SEQ ID NO: 651803 - DNA, 606 bp, Homo sapiens
aactgtgtctccacagtatatatacctgggccagcttgaagatcgcagggtgccatgtggcctgagcaatatgcatgctatcttctgcttcctgataaatgctaccatgcatgacctcctagatagagattgtcaacctgggtaagatctagatctaatctcctgtggcctaytcccattagtccctggatgcaggcaatctttggttgatacctaaattctgattaagaaagcaagatatttatttttgatcatagagcctgcagatgcagggatgggcgggatagaaatgtgggggtgaaagatggaaatttactttgcagtgctcttcctcaaatactcatcgctcaactcgtcttggagttgaaggagcaattgatgccggacttgggccctaaaaggcagataaaaaagccacggtgggaatctttgattctggccaaattctacagaatagaaaaagaagctgaattggctaattctggaaatgtagttttagaaaatggtttaacaccaggattgttctacaagatcagattttctagcaaagataaactaaatatatatttttttcatttgggataacaatcaaaatgaatttgtgat

SEQ ID NO: 651804 - DNA, 597 bp, Homo sapiens
cttccccggctgctccctgagcactggtagttcacaatacattcttagtgcttagccacagcaggctgcagtacaaaggaggtcccttccaatgctgatgggacattccaaatggaattgcttgccttcattcaattctatattttagccctcagtgattaaaaatgccttctttgttacaggrttagggttagaggccacaagagaaagaccatattgatagtctgagaaatcaatgttgtcattgatataaagaaatcatgtgaggctgaattcatctgaatcctgattcatccttgaaaggcagctggtgtaactgcctcctacagaaagacttcatcttaagttacctagattcaaagggcaaatattctgtacccacaatttagctctgtcttccccaaaccaagatgttttcaagtgggatggcaagttactaactcatagtcttctgacagcaggaagaggggcttaagaatgtggaccacatagatgtcaataatccaacattaattttattcaataaactttttaaataaaatgcaaacatcagattactttctccctactaccaaaacttttattaaagagagacca

SEQ ID NO: 651805 - DNA, 524 bp, Homo sapiens
gaattcaattacaatgaagataatttggagtagacaattgtattttggttgcatgacatccattttatcttagtgtaataacaccacaggtttttttttttttttttttttttgatggggagggggaacaaattacctttaccctgttagatatactcttacagtttttttttttaaataaattacctttaccccattagatattctcccaaactggcatcagatgtgtggccaaagccagatcaatcaaaataaacttcaggaattttacaggaactatttaaaaaaagaaaaaaaaaagagtttctytttcctgagagacatgattttgggaagagcattccactttaaaggcagagtttggagctgctgaggctgccacgtggagactggaaatagcaataatctaatagaagccagagaaaccgagcactcatggcctaatgtgatcctgcatcaaggtgtgttcaaacacagacctatcctttgatttttacctttgagatttacaagaaccaataatt

SEQ ID NO: 651806 - DNA, 524 bp, Homo sapiens
gaattcaattacaatgaagataatttggagtagacaattgtattttggttgcatgacatccattttatcttagtgtaataacaccacaggtttttttttttttttttttttttgatggggagggggaacaaattacctttaccctgttagatatactcttacagtttttttttttaaataaattacctttaccccattagatattctcccaaactggcatcagatgtgtggccaaagccagatcaatcaaaataaacttcaggaattttacaggaactatttaaaaaaagaaaaaaaaaagagtttctctttcctgaragacatgattttgggaagagcattccactttaaaggcagagtttggagctgctgaggctgccacgtggagactggaaatagcaataatctaatagaagccagagaaaccgagcactcatggcctaatgtgatcctgcatcaaggtgtgttcaaacacagacctatcctttgatttttacctttgagatttacaagaaccaataatt

SEQ ID NO: 651807 - DNA, 524 bp, Homo sapiens
gaattcaattacaatgaagataatttggagtagacaattgtattttggttgcatgacatccattttatcttagtgtaataacaccacaggtttttttttttttttttttttttgatggggagggggaacaaattacctttaccctgttagatatactcttacagtttttttttttaaataaattacctttaccccattagatattctcccaaactggcatcagatgtgtggccaaagccagatcaatcaaaataaacttcaggaattttacaggaactatttaaaaaaagaaaaaaaaaagagtttctctttcctgagaracatgattttgggaagagcattccactttaaaggcagagtttggagctgctgaggctgccacgtggagactggaaatagcaataatctaatagaagccagagaaaccgagcactcatggcctaatgtgatcctgcatcaaggtgtgttcaaacacagacctatcctttgatttttacctttgagatttacaagaaccaataatt

SEQ ID NO: 651808 - DNA, 547 bp, Homo sapiens
tcctttgtagaaatagacaagataatcctaaaatagacaagatgatcctaaaatgaaaaagcagaggacatatttcccaatttcaaaccttaccacaaagctgtagtaatcaasacattgtggtactgctgtgaagatagacacgcagatcaatggggtagcactgagagtctagaaataaaccctattatcttaggtggctagttgatttttggcaagggtgccaggaaaattatggggaaagaatagttttataataaattgcgccagaacaactgaatatcaatattcaaaagaatgatgttacaccaatatctcacaccaaatacaaagattaattcaaaacatataattgacctaaatacaagcattaaaactataaagctttcagaagaaaacaggagtaaatcttcctgttcttggattaggcaatgatttcttagctatgacaccaaattcacatgtgacaaaggaaaagaattgataaatggaacttcattaaaattaaaaacttttgtgcttcaaagtacaccaccgaaaaagtaaa

SEQ ID NO: 651809 - DNA, 547 bp, Homo sapiens
tcctttgtagaaatagacaagataatcctaaaatagacaagatgatcctaaaatgaaaaagcagaggacatatttcccaatttcaaaccttaccacaaagctgtagtaatcaagacattgtggtactgctgtgaagatagacacgcagatcaatggggtagcactgagagtctagaaataaaccctattatcttaggtggctagttgatttttggcaagggtgccaggaaaattatggggaaagaatagttttataataaattgcgccagaacaactgaatatcaatattcaaaagaatgatgttacaccaatatctcacaccaaatacaaagattaattcaaaacatataattgacctaaatacaagcattaaaactataaagctttcagaagaaaacaggagtaaatcttcctgttcttggattaggcaatgatttcttagctatgacaccaaattcacatgtgacaaargaaaagaattgataaatggaacttcattaaaattaaaaacttttgtgcttcaaagtacaccaccgaaaaagtaaa

SEQ ID NO: 651810 - DNA, 461 bp, Homo sapiens
ttatatacacctggcacaaattttttgacatatatatgtattgtgaatatttttttcccattttgttgtttgccttttcattttcttaatggtgcctttcacagagcagtttttgaaataccattccttagggcacartgggtacatccatatacaaacaaggtttgctaatgcgtggagtgaatgtctcttaaaattcagtgccaaatcaaatcatattgcccattttatagtgactgaaatgtatctgtggcaaagagtccctgggcttatctaacacaagacctactggtgatagggcccccaaattttgtgctaccaggagtctctgcctcattcctttcttatctctccaatacccttccacagaaagtcttcttcactgcacaaagtcagcaatgagtacagacactatttcattacagtgtaaggatcaccatgacctccttgttgtagtggag

SEQ ID NO: 651811 - DNA, 547 bp, Homo sapiens
ccaggcacaccactttccacttctgggaaggagtgcccttgaggcacttttcactgctgggaaggaggcccttgaggtgcctcagtggtcagtgctgccatggccagtacatccaggcagtgaggacaggagccccttccacgtcaagatctctacagttgcctcaccactgagccccaatccttgcttttcctctattctgatcacatgaccagagttgagttggttccagcctgggggaaagaatccggtacatacagactactccttctcttaacatctctcctccacagctgctagaacccaccratttgtgctgtgtcccagactttagttctttttatccatcccccacaaaaaaaaaaaagagaaagaaacattacatcagctatcagaaggaggttgtgacttccttgcatgggctagctttaagggcaaggagttgctgaggtagaaaattctccagtggcagccttgatggatgacaagacgttgtccctggggatacaatgatttgcagcagcatttcagcaatccaaaatacacc

SEQ ID NO: 651812 - DNA, 583 bp, Homo sapiens
tctgggactgtgaatacagatgtaggagtcactggtactcagaatccacatactgattgccaaaagctcttcccctaccccaccacccctccatccaagcatgataccctgttattctagacaacctctttgtccttgtccctgacatgtgagcccctttcccttctctaggaagtgcccagtttgttttacaattcatgtaaaaattcgataaacaagcaacctatttttaggtataaataataaacatttctaaaagggtatttgttgggaggctgaggtgagagattgcttgaggtcaggagtttgagaccaacctaggcaacataaggagaccctgtctctaaaaaaagtttaaaaataaataaagattatttgttaacacaaataaattattcctaaatagtgtgaaaagtttctgggagaatattcgggggacagaaagcctttctwagttctctcaagtcctaacaacaatgcaccatccagccctacctctgggtagaagattctgcttccccattggagatgtgtaagccacccaaggaacaattcctaactggacagtgaggcctaagatagc

SEQ ID NO: 651813 - DNA, 520 bp, Homo sapiens
acagtattatataaataacagtttagatgataagagacctctgggctcccaactttctacaagcaagcaacaggctgagagagatacttggctgaaaacataggttgtttcttaaaaaaaaaaaaaaaaaagttatatcagaagatggaatcaagaacccagagcgttgagtcaggagtagagccagattctaatcaaggaattctgcctgcttgagtggaggaatctgaaaatatgtgcccagatacatatgtcagaattactatggaccaattactgctattgcctccattaccctcctttttgaatgaggatattaaggttaccatgtccctgtttcaacattgtatggtgggtgtatggtttaacttgtaagtataatttagaggaaatgaacaggggscaggatatgctatgttggaaggcaaatctcatttctggatgaagagaaattacatgtgagaaattttatgtctggaccggatggcagatcaaaaaatcatggacttcaaaccagaca

SEQ ID NO: 651814 - DNA, 614 bp, Homo sapiens
gtaaaatttctaccctataagagtgaacatgtttgtacaatgtgcgcataaatgttaaaccaaccctttagcgcacaatgatgaatggtttgggggagtttatggtctaaaagtggccctatgtgattttttttctaagttactctcactacttccatcttctcactcacttgaaacgttaaagattggaaatcacagatgggctgtcagtaattaatgacataattaactagcatttttggagggctacaaggtaggggaggttgttaattctgccctggccaacacctgggtcttctgattttattaaaaatcaggtggcagcaaaattttcccaaggaaccaaatatttgtaccacaatattataggttttctccgaatttcttctggcacattttttttcttttgacaactatggtgtgtacagacctaaattcatcaaagataaatattacagtataactgtcaatgcaaaggaggcaaagactatgatttaggctaaagatagcatcccgatctgttttctcctcgtggtcccygacttccatctcatagggactatgcctttttagttttcttaaggataccaaaatatgtctgctaaaatattctc

SEQ ID NO: 651815 - DNA, 596 bp, Homo sapiens
agtctctagcctcctttgtattatttatttatttatttacttaggagatggagtttctctcttgtcgcccaggatggagggcaatggcgtgatctcggctcactgcaacctccacctccgggttcaagcaattctgcctcagtctcccaagtagctggcattacaggtgtgctctgccacacctgrctaatttttctattattagtagagacagggtttcacaatgttggccaggctggtctcaaactcctgacctcaggtgatgcccccaccttggcctcccaaagtgctgggattacaagcgtgagccaccatgcccggcctctggcctcctttttctaaaaagtagcccacttcagatgttgaaaaccctctctctctctcactatgttcccttctgagcagactcagaaaggttctgaaaaccaaccctttgccattaatgactgactagttgtactttcactgaaatcccaccaaaatcacctcaaactagtacctacagtttaagcctttaagtctatgattgtgaaacaaaaggtacgtggccttattaataaattttggcatctgtaaggtgggagataatcgtgaga

SEQ ID NO: 651816 - DNA, 596 bp, Homo sapiens
agtctctagcctcctttgtattatttatttatttatttacttaggagatggagtttctctcttgtcgcccaggatggagggcaatggcgtgatctcggctcactgcaacctccacctccgggttcaagcaattctgcctcagtctcccaagtagctggcattacaggtgtgctctgccacacctgactaatttttctattattagtagagacagggtttcacawtgttggccaggctggtctcaaactcctgacctcaggtgatgcccccaccttggcctcccaaagtgctgggattacaagcgtgagccaccatgcccggcctctggcctcctttttctaaaaagtagcccacttcagatgttgaaaaccctctctctctctcactatgttcccttctgagcagactcagaaaggttctgaaaaccaaccctttgccattaatgactgactagttgtactttcactgaaatcccaccaaaatcacctcaaactagtacctacagtttaagcctttaagtctatgattgtgaaacaaaaggtacgtggccttattaataaattttggcatctgtaaggtgggagataatcgtgaga

SEQ ID NO: 651817 - DNA, 523 bp, Homo sapiens
gatgggtgtgagatggagaggggtgagatggagagaactgcagatagccaggaaaccatccttctaaaggaactatgccttttctgggccatctttccccaaaatgttttaaaaaagatttctgagattaagtttttcttttcaagcagctcaagtggtacaacacacagcatctctcttttggaggctcataatgcacattgaatatactgtattaaagactctttggagttccacaaagaaattttactcgtgtttcctaagcgtattttattatggagttgtgttctgtccccagcagatcaccttaattaatatctcttgtgtattacttcattctcacgctgctataaggatgttcccaagactgggtaatttataaaggaaagaggtctaattaactcaaagttcagcatggctggggaggcctcaggaaacttagaatcatggcagaaggggaagcaaacacatccttcttcacagggtggcagaaaggagaagmatgagaaccaagcaaaggggg

SEQ ID NO: 651818 - DNA, 504 bp, Homo sapiens
ggcagttgataagtagcacagccaggattcaagyccaggtctttcagactccaaacccagtgtcctcaatccctactccatgggtctaactagacctcatgataataaatattcttcaaaaatgctcacccttagttaaatagcaacttctgtttattgagagcctgctatatagaaggcactgtatttgggatttcacatttattatttttaaccctgataacgtggcaaagtaggtattcttattcctatttacaagaaaaaagagcagaaaacaaaaaacataactggggccaagggaaactagaaaattctgtctgactcaaaatccacgtgctttccctcatgctatcatgctcttcatcaaaccttggagtaccaccaagaattagatgactttttggcttcttgaacaaatatttatcttgcctatttaatgcctagctggaacctaggaaatgacaacccctccaaaataagacatggaccttgttcttctggatc

SEQ ID NO: 651819 - DNA, 484 bp, Homo sapiens
tgaattccttttcctcccctttgctttcaaaccccacattatcactagctcaactacagctacttttggactcttatagcactttttatctattcccattatggcacatatctatcatgttatattgaatttatttgactctgactttttgtccttgctgcctagtgctgaraactggtaggggtttatttaatatccagagaaattccaagtagtcttgtttgtgcagatctttcaaaagtacagttctccaactttatgagtaagagtttgaaggtgccttagaggtcttctagtctaccctcttattccatgatgagcaaaatcaagacctacagaagttgagtcatcacttagtgagtgcctgctatctcagttcatcttcataatgacctttgaagtaggcatttctactaatacccattttatagaagtgaaattgaggcctcagtgaatgtaagcaatttaggcccaaggtcatgta

SEQ ID NO: 651820 - DNA, 489 bp, Homo sapiens
caaaccccacattatcactagctcaactacagctacttttggactcttatagcactttttatctattcccattatggcacatatctatcatgttatattgaatttatttgactctgactttttgtccttgctgcctagtgctgagaactggtaggggtttatttaatatccagagaaattccaagtagtcttgtttgtgcagatctttcaaaagtacagttctccaactttatgagtaagagtttgaaggtgccttagaggtcttctagtctaccctcttattccatgatgagcaaaatcaagacctacagaagttgagtcatcacttagtgagtgcctgctatctcagttcatcttcataatgacctttgaagtaggcatttctactaatacccattttatagamgtgaaattgaggcctcagtgaatgtaagcaatttaggcccaaggtcatgtagccggttacctggcaagataaaattagaattc

SEQ ID NO: 651821 - DNA, 489 bp, Homo sapiens
caaaccccacattatcactagctcaactacagctacttttggactcttatagcactttttatctattcccattatggcacatatctatcatgttatattgaatttatttgactctgactttttgtccttgctgcctagtgctgagaactggtaggggtttatttaatatccagagaaattccaagtagtcttgtttgtgcagatctttcaaaagtacagttctccaactttatgagtaagagtttgaaggtgccttagaggtcttctagtctaccctcttattccatgatgagcaaaatcaagacctacagaagttgagtcatcacttagtgagtgcctgctatctcagttcatcttcataatgacctttgaagtaggcatttctactaatacccattttatagaagtgaaattgaggcctcagtgaatgtaagcaatttaggcccaaggtcatgtagccrgttacctggcaagataaaattagaattc

SEQ ID NO: 651822 - DNA, 527 bp, Homo sapiens
cttcttcttttgattattttctaatcatttagaaatgtgaaaactacctttagtctgtgtgtcatacaaaagcaagtgactggtcctttcttgctccaaatcatccattcatccttagagacataagcctacatctgtttctagccacaaagttataggattgtgagaattctctttccaaccctcccttctcctggatttacacacacacatacacggacatacactcctgattaccccaaagtcctttcctagtaagctggccaccctctcccagagttccatawgttcaaaaattacttctattttctttaattctatttcttggagcatctgattatctgactgaattaattcacattaaagagtgattagtggggatcaactctccctttgagaatttccatttaaaagaacatgtaccagtgaggctaacggaatgttggggaaaacatttttgagtggctggatacccagctcttcatttaggaagttgattttggtattataaggcttgccaagtaggc

SEQ ID NO: 651823 - DNA, 547 bp, Homo sapiens
ggtactcatggacataaagatggcggcagtagaccctggaggccacaagaatggggagagagggaaggagacaagggctgaaaaactacctattgggtactgtgctcactacctgggtgatgggatcattcatatctcaaaccttagcatcacacaatatrcctacttaacaaacttgtacatgtaccccatgaatctaaactaaaagttaaaattattttagaaagaagaaaggcaatgacatgcaacaataagcagtcagactgatattcaccccataccctgacaactcccttcatttattctcaatcacacttggggtgcttctgcaggaagggaatggaggaggtttggctcttgggaccactttctgtgtctgtgattatagattataatgttaatttctggtttggttttttgggggctagggggagaaattagttttctttaattttttctcctctctggagcaaagctgtttttctctcattctttttaaataatttcattgtcaatgaaaacacaaaagacagttgaaagcaattca

SEQ ID NO: 651824 - DNA, 547 bp, Homo sapiens
ggtactcatggacataaagatggcggcagtagaccctggaggccacaagaatggggagagagggaaggagacaagggctgaaaaactacctattgggtactgtgctcactacctgggtgatgggatcattcatatctcaaaccttagcatcacacaatatgcctacttaacaaacttgtacatgtaccccatgaatctaaactaaaagttaaaattattttaraaagaagaaaggcaatgacatgcaacaataagcagtcagactgatattcaccccataccctgacaactcccttcatttattctcaatcacacttggggtgcttctgcaggaagggaatggaggaggtttggctcttgggaccactttctgtgtctgtgattatagattataatgttaatttctggtttggttttttgggggctagggggagaaattagttttctttaattttttctcctctctggagcaaagctgtttttctctcattctttttaaataatttcattgtcaatgaaaacacaaaagacagttgaaagcaattca

SEQ ID NO: 651825 - DNA, 658 bp, Homo sapiens
ttgcccttttcttcaaattccatattcatattaacagcaaaaatggatggttggggggcagccgtctgcatctgttttgaatcatccttgtttccaggcctcagtctcttcccacacttctccaaactgtcatcaggtttaatggcaaggcagccttgggcgctgcactccaccctcagagaccagtcagaactctcagtggccctgagtgctagaccttggaattggaaccatcttagagatcatctggtcttggaatttctttacccccttctttaataacttggattgaacatttatagaacacttactatgcaccaaggaatgttttaagtagtttgtatatattagctcattcattcatcacacagccctatcaagtaggcaccattatccccayttacagatgaaaaactggggcacagagaagctgagtcattgaccaggatggccttctacagggtggcagagctgcctttcctcgttacacattctgcattccagccaaacgtgctgtaggctctaggtctccatcttaggcctctgctcactcctgttccttttgcctggaaagcctccacatctggtccctcccctaaactctgcattgtccaaatcctatatagccttcaaaatgaagggcggatgctgtctcctc

SEQ ID NO: 651826 - DNA, 535 bp, Homo sapiens
attttacaggaaatttattacatcgtgttcaaatgtcatctaatgtgttccttgatgctctttgggtaattttttcagcaactgctggcaagtttttgagagataggttagaatatttattgagcacctactacttatttaaaacactgtacagggctccagggatgggaaggataacatataaatacatagtttctatacacgagaaattttagtttagttcagataatttttaaaacacacrcaataacccaaatgcctttacagagctatagttcagcaacaaggcatcctaacaatattttgatcaaaggactctgaaccgaggacagagagagccagtcaaaggggtctaaaactctcaatggagctgaattttaaaccaagcttttttgtaaatcacaatttcctctctgatcacaaaagcaacatgtgctaattgttgaacatttgaaaatatgaaaatttcagaaaagaaaattaaaaccagctgtaattccaactcctatattaactttttggtgtatttgtaatg

SEQ ID NO: 651827 - DNA, 614 bp, Homo sapiens
aggatggcaacaatgacagctactgtgtattgagtgttcactacgtgcaaggaccattccaagggctttatgtgtattaactcatttaatattcacattcttgctagaagataagcactgatcacaatatctttttatgaatgaggaaactgagccacaaagaattaattctaaaaagaattaaatttgcccaagtcacagaagcgttgtagaaccagaattcaaatttaggccatttgccttcagagcttataccctttaccactataatttacagactctgaggaaagtggacacgtatgaagctgattggcagcgaaagaaactaagaaaaggaaaggccaggatggagcctaatggatattaaagcaaaactgagttaaattycatctcagggttgacaaggacttgctcacatgctgatgatggtggcaactgattaatggaaaaattgcaaagggccttggaatgtgatcatcatgttacacaaggttccatacagaagtaattataataaagccaactccctctcacaggtaccaaacctgaactgatgctgtctatgcccaagtggtaccattgcccaatttccctatttctgccaaagctatgcc

SEQ ID NO: 651828 - DNA, 515 bp, Homo sapiens
gctcaaggctctatataaaagttttctcacaccattttataagatggctattcctcctatcatgccttattcatttctaaaccccagcttctctttctgctattcttgcttcctaaaacctccaattccatcctcttcacagctcaaaccttaggccatcattaaggttctgcaccagaaccaagttgtccactaacagctttcctgagtgacttcgggctgcaccattgtaattcttcaraaagtgtatacacatggtagccaaagagcctgggccctggagccagaccacctggagtcaaatcctagctctgctacttaggagctgctggttagttaacctttctgtggctcagattcaccatgtgtaaaatggattgtaagagtggctacttggtaagattgttgtgaagtttaatatatgtgttaatatatgaaaacacatggaagagctccaggtacatagtaagtgctctgtaaatatcatctattattattattgcaactacatttca

SEQ ID NO: 651829 - DNA, 549 bp, Homo sapiens
cgaactcctcagctcaagtgatcctcctgcctcagcatcccaagtagctgggactacaggtgtgtgccaccaggcctggctaatttttattttctgttttttatagagatgaagtctcacgatgttgttcaggctagtcccaaactcttggcctcaagcaatcctcttgcctcagcctcccaaagtgctggggttagtcatgagccaccatgcccagccatgctgtggatgttaattatgttaattataaaaggcagccatcttagtagctggacacccatttatagatgtgtcttccatgactattttcctcctcaaagctaacaagggatataaatcatttcattagttgacaatttctaccraacacatcgttttgacggagtcccatattagatagaatttaagttgtcacaaagatagtatgtttggaataatgtatgattttatgaagcaagcttgttaaatgaggaatggatgaatctgaaggaagaaaaggcaatggagaaaagaaaggaagaaacattaagtccattaaatgcaatcgac

SEQ ID NO: 651830 - DNA, 549 bp, Homo sapiens
cgaactcctcagctcaagtgatcctcctgcctcagcatcccaagtagctgggactacaggtgtgtgccaccaggcctggctaatttttattttctgttttttatagagatgaagtctcacgatgttgttcaggctagtcccaaactcttggcctcaagcaatcctcttgcctcagcctcccaaagtgctggggttagtcatgagccaccatgcccagccatgctgtggatgttaattatgttaattataaaaggcagccatcttagtagctggacacccatttatagatgtgtcttccatgactattttcctcctcaaagctaacaagggatataaatcatttcattagttgacaatttctaccaaacacatcgttttgacggagtcccatattagatagaatttaagttgtcayaaagatagtatgtttggaataatgtatgattttatgaagcaagcttgttaaatgaggaatggatgaatctgaaggaagaaaaggcaatggagaaaagaaaggaagaaacattaagtccattaaatgcaatcgac

SEQ ID NO: 651831 - DNA, 576 bp, Homo sapiens
attttttttttagaaagcttggttcaactgagaactttacacaaaaacaaaatcagcttaaaatatgcattgtcactgagaaaatatggaacttaagcagggaaattttaaaagtcacaacttttggcaatgtagtartagtctcttctggctgatggaggtccagcaatctaagtatcagcccagtccgactacagcttatggaaaaatcagtcaaactctaaacaacaccttttcaactgcctgtgaccataagaatggtcacacatacacaaatactcaaattgttgcaagggcttatttaattttacacttcatcttttcctcaaagctcaccttctggcattctcaaggaagggcttcagttgtttccaggaaggggtgtcactttatctctgctcacctcacagaagtcagagactcgtaagccatttgaggaagatggcacaccaccattattgatgccattctcttctttctcaggaagattcccccagatccctcatgatatgaattttgtgcagaagtctatggccaagtggggattcagacatagccctctgtccaactccaagt

SEQ ID NO: 651832 - DNA, 592 bp, Homo sapiens
ggagttgcttatagatgaggaaaatggctcattaagatgaactctactcctagtgaagatgctgtgaacactactgaagtaactacaaagtatttagaatcttatataaactgagytgatgcagactcagaccttaagaggattgacttcaatattaaaagaagttctactgtaggtaaaatgctatcaaacagcattgcatgctacagagaaatcttttgtgaaaggaagagtcaatcaatggggcaaacttcattgtttcttgtttcaagaaattgtcaaccttcagcaaccatcattctggcaaatcagcagtcatcaacagaaaggcaaatccctctaataaaaaaaaagattatgactagctaaaggctcagatgatcattaccattttttatttatcaagaaagtatttttaaatgaaggtgtatacattgttttttttagacaaaattctattgctcgcttagactaaaatataatgtaaataaaacttttatatgcactgggagaccaaaaaatttgtgtgactcactttactgtaatatttgctatattgcagaggtctggaaacaaacacataaaacctcca

SEQ ID NO: 651833 - DNA, 590 bp, Homo sapiens
ttggtcctacaagctaaaaattgctcactcatgaattccacaagtctgagagtccactgagaaatatgtcccctcattaatatgtctgattaataattaatgtaaactttgcctttagcacaagatagtactttgaattataaacctttataattaagaactatcattttgctttcagacaataaagatgccatttagtagactgcattgttgccctttttgcaacattgttttcctgggagccttgaagagttaatgaatctccaaatatacctaatytctgtgcaaaaatttagctttacctaagggatctgacccagttctttaaaataaaaattaaacctcatataaaaagcaagataaatgaaggtatgactgtactgaggtgataggaaaagccttaacatacttatcatttcccttctcacctacattttcctgtgatacttgctcttgtgtcaaccctttagtgaatattgcttgagctgcttaaaattatatattcaatgtcagctttatgctctaaggaatatttaatgtgagacatcattcacttttgcatagcaattagctctgtagtgtgaaaactg

SEQ ID NO: 651834 - DNA, 559 bp, Homo sapiens
ctcaaacacaacgacaacctgaccctctcattttctccatttctaagtgaaatgctggaggcaggggaaggtgttgaagttaaaataagaattaaagaattggcactgccatgcatgctctttgagctaatgttattaccatatcctctgtccagcaatttgttcaggttaaacatcagaaaggggtaaggtaagtgtctatttttacaatacagctggggtttgaaaacttatggtttgaacacaaaacatgttattaagctgaggtttttcaaagcaggaacatctcatgaaatggatttgctagggtttcatttgaaaatgtaatgacaagtattcagttgaagaccaggaccccgatctgtgcatgcatatttatcaatttctttkgggggaaaaatccaggtgactccaaatttagattttggccctgatcttgtttattttgtacctgaaacatgttacatacagcctaggtcaatgggacaataagtcattctttaaggtaattactgagtgcctgctgtttcaacggaattttaggggcagcaagatgtat

SEQ ID NO: 651835 - DNA, 613 bp, Homo sapiens
tcttgttctagtagatttgttcagaaaatgatagaggataaaaagtatcaataataggataagtgtgccaaaagcctgcctatggttggttacagtatataaatacccaaggagtttggcctgtaagtagcaggctttagagatgaaaagtctaaaaagctactgtgagagaaatgtaatctttcactattggggaaatttcctcaagagaaaaaaagatgagcagcagaaaagcacattattcctgagtwaatccatacataccgatgacagaaaaaataggatgtggccccgtctccaagaccgtaatcagatatgtcactaatgcctttgatactttatgaggagctttaggtttatagtaatgaaatttatatgatccccatttgctatgaagttagtcagaaaaatgcctttgtcacagaggatttctcacaggggatttgaaagaaaactattctaattaacactagtggtatcataaacaccaagtagaacagctttaactaaaactatatgtataatcacagaccctcccaccaacagtgaaaagtatagccaagtaaaatgagaaattgtacaaataaaataaaacataaagtttttaagcatt

SEQ ID NO: 651836 - DNA, 612 bp, Homo sapiens
ccctgtgtgtcggtgggtgctgcccctggggacaggtcactcaccggggmcacacatggaggacgcattctgctggaaggtcaggcccctgtgatccacgcggcaggtgaacatgctctggctgagccagtcgctctctttgatggtcagtgtgctggtcaccttgtaggtcgtgggcccagactctttggcctcagcctgcacctggtccgtggtgacgccagaccccacctgcttcccctcgcgcagccaggacacctgaatctgccggggactgaaacccgtggcctggcagatgagcttggacttgcgggggttgccgaagaagccgtcgcggggtgggacgaagacgctcactttgggaggcagctcggcaatcactgcagtgagggacacgtgtcagcccggtgcccgccactcccgcccccttcggctccctctctgtcccggtggctgggcccggccctcacctggaagaggcacgttcttttctttgttgccgttggggtgctggactttgcacaccacgtgttcgtctgtgccctgcatgacgtccttggaaggcagcagcacctgtgaggtggctgcgtacttgccccctctcaggactga

SEQ ID NO: 651837 - DNA, 612 bp, Homo sapiens
ccctgtgtgtcggtgggtgctgcccctggggacaggtcactcaccggggccacacatggaggacgcattctgctggaaggtcaggcccctgtgatccacgcggcaggtgaacatgctctggctgagccagtcgctctctttgatggtcagtgtgctggtcaccttgtaggtcgtgggcccagactctttggcctcagcctgcacctggtccgtggtgacgccagaccccacctgcttcccctcgcgcagccaggacacctgaatctgccggggactgaaacccgtggcctggcagatgagcttggacttgcgggggttgccgaagaagccgtcgcggggtgggacgaagacgctcactttgggaggcagctcrgcaatcactgcagtgagggacacgtgtcagcccggtgcccgccactcccgcccccttcggctccctctctgtcccggtggctgggcccggccctcacctggaagaggcacgttcttttctttgttgccgttggggtgctggactttgcacaccacgtgttcgtctgtgccctgcatgacgtccttggaaggcagcagcacctgtgaggtggctgcgtacttgccccctctcaggactga

SEQ ID NO: 651838 - DNA, 577 bp, Homo sapiens
ggcatggaatcattcctccaagtccaktaacaagggctggggcctgagcagccagtcggcccggcagcagaagccacgcatcccagctctgggtagtccggggagacccaaagcccaggccgggcctggcagccaccctcccagagcctccgctaggccagtcctgctgacgccgcatcggtgattcggaacagaatctgtccttctaaggtgtctccacagtcctgtcttcagcactatctgattgagttttctcttatgccaccaactaacatgcttaactgaaataattcaggataatgatgcacattttacctaaaacttatcctaaagtgagtagttgaaaagtggtcttgaaaaatactaaaatgaaggccactctatcagaatatcaaagtgtttctccttaatcacaaagagaaaacgagttaacctaaaaagattgtgaacacagtcattatgaaaataatgctctgaggtatcgaaaaagtatttgagattagttatcacatgaagggataacaagctaatttaaaaaactttttgaatacagtcataaactctccctaagactgtt

SEQ ID NO: 651839 - DNA, 577 bp, Homo sapiens
ggcatggaatcattcctccaagtccattaacaagggctggggcctgagcagccagtcggcccggcagcagaagccacgcatcccagctctgggtagtccggggagacccaaagcccaggccgggcctggcagccaccctcccagagcctccgctaggccagtcctgctgacgccgcatcggtgattcggaacagaatctgtccttctaaggtgtctccacagtcctgtcttcagcactatctgattgagttttctcttatgccaccaactaacatgcttaactgaaataattcaggataatgatgcacattttacctaaaacttatcctaaagtgagtagttgaaaagtggtcttgaaaaatactaaaatgaaggccactctatcagaatatcaaagtgtttctccttaatcacaaagagaaaacgagttaacctaaaaagattgtgaacacagtcattatgaaaataatgctctgaggtatcgaaaaagtatttgagattarttatcacatgaagggataacaagctaatttaaaaaactttttgaatacagtcataaactctccctaagactgtt

SEQ ID NO: 651840 - DNA, 562 bp, Homo sapiens
gctcagttactccatcagacgcacccaacctgagtcccattttccaaaggcatcggaaaatccacagaggctcccagatcctcaaggcaccccagtgcccgtcccctcctggccagtccgcccaggtcccctcggaacatgccccgaggaccaacctgcaatgctcaggaaaccccacaggcagtagcagaaaacaaaggccctagagtggccattcttacctgaggagacggtgaccgtggtcccttkgccccagacgtccatgtagtagtagtagtagtaatcacaatggcagaatgtccatcctcaccccacaaaaacccagccacccagagaccttctgtctccgggcgtcacatggaagctgactgtccgtggccctgtcctgcccttctcatggaaccctctgctggcctcccacgtaccccacattctggcctgacccctcagaagccagaccactgtcggcctgggaagtccaactgcaagcagacggctgctaagtcacccccaggagtccaaaaaccccggggggcacccgtcccagagagcgggtgccttg

SEQ ID NO: 651841 - DNA, 505 bp, Homo sapiens
ccacctggtgagtatctgttgaatagagaaatgtgcagcatctccacagagcctccagggcttctgtgctctccaaacatctctgggctcctggcaccctctcagggtatgatgtgttggtgtctgggttgggcccctgtccctgagggtaggactcaggcaaggacaaagctctggactcaaagagstggtgtgggggtgagtgaaaagaacaggagctttgaggtcagaaatgcgggtttcagcctgcattgtccccatgagcaggggctgcagactcgccaagacctcagtttctaccatggtgagagagtgtcagagactgcagcacgtatttcaagtgtccagggacagcaggggtctgggttggaccagctctcctgaatactgagggtgcgatcttgaccattgtgaaaggaaaataaaatctcaggactccaaactcactatgccaaaatgaaccgttgaggtgggaagctgagtcatgaaaaaaaaaaaaagtcat

SEQ ID NO: 651842 - DNA, 480 bp, Homo sapiens
aaaaactacaaaacactgctgaaagcaatcatcaatgacgcaaacaaatggagacacatcccatgctcttggatgggtagaatcaatattgtgaaaatgaccatactgccaaaaacaatctacagatttaatgcaattcccatcaaagtgccaccatcattcttcacagaaatataaaaaacaattctaaaattcatttggaaccaaaaaagaccccacatagccaaagcaagactaagcaaggtgaacaaatctggaggcaytacattacccaaattcatactatactacaaggctatagttaccaaaatagcacggtacttgtataaaaataggcattagaccaatggaacagaacagagaatccagaaatgaagtcaaatacttatatccaactgatctttgacaaagcaaacaaaaatgtaaagtggggaaaagatgtcctattcaacaaatggtgctgggataattggcaagcca

SEQ ID NO: 651843 - DNA, 505 bp, Homo sapiens
ccacctggtgagtatctgttgaatagagaaatgtgcagcatctccacagagcctccagggcttctgtgctctccaaacatctctgggctcctggcaccctctcagggtatgatgtgttggtgtctgggttgggcccctgtccctgagggtaggactcaggcaaggacaaagctctggactcaaagaggtggtgtgggggtgagtgaaaagaacaggagctttgaggtcagaaatgcgggtttcagcctgcattgtccccatgagcaggggctgcagactcgccaagacctcagtttytaccatggtgagagagtgtcagagactgcagcacgtatttcaagtgtccagggacagcaggggtctgggttggaccagctctcctgaatactgagggtgcgatcttgaccattgtgaaaggaaaataaaatctcaggactccaaactcactatgccaaaatgaaccgttgaggtgggaagctgagtcatgaaaaaaaaaaaaagtcat

SEQ ID NO: 651844 - DNA, 545 bp, Homo sapiens
tttgtgacacttcaaatgacccttccaacacagctatctgccactctgtcagcaatagggcctgcttctctgcaatgccaagaagtggtatctgctgtggaatatagtttgccataatacttgcttcattaagaagaaccagccaggtccctttgttatcaaaggcatataatctagctaagatggaaacctcatcatgaatagctggagggcagactggatacgtaggcatactctcatggattaaacgatgagtttcatagcctgggaaacattgtcccctttccaacacaatgcaggcattgaacagaagccattttagaagggcaagaaagccacatacttttgagattcggctactcctacaaccagraaataccctggctcactggtaaagggagtttattctagtctagccatttttccattttttcaagcccaaccttaggtccaagtattctctggctaccttggaacaatatatgtcagggctgggcccacttttcaccttatctactgccacatacactgcttgcaaagtaagt

SEQ ID NO: 651845 - DNA, 525 bp, Homo sapiens
ggattggaatttgataacttgaccacagttgcagctctacaaacctacaaactttatgatcgaaaggtcactttaacccctgcttcttgaggaagatataatttaagaatgcaaaataagaaaatatataagactttttgaattgctaaatattcattatatgttattttcactggaggctaggggaagaatgttttatagaaaaaagaaacatctaaaaaaaagaagaagaacatgaragaaaggatttacacaccctagaaaatgagagtaatgcttcctgagaaaatctaagcaaagatgaaggatacagacagaagtcctgagctctgattttaactctgtcccttaatagctcactgaacctgcttttctcatccacgaaacagaaagaaaacactgtctcttcagcatctcctataggacttgaggatgaaataaaatcaaaaacatgaaattgctctgcaaatacatgttcttttggctgtaaggattgcagcctgactggagcaaagacattagctg

SEQ ID NO: 651846 - DNA, 562 bp, Homo sapiens
tgtggtttagcatgatgtggggaggccatatgtttgtgtgtacacatatgatcacgcatgctggtaagaggtactagacacatgtttcccaggggtaacatctctcaaataaaatcacattgccatctgaactgagtccctgaaggaagtatttaccagtgagatagaatatagaagaggatatgccagaagaaggatgagctgggagaggaaattttttcttctgcagatataagtcccacttaggtcctgtagcagcttctcattattacctacctgggcctgggggaatgtaacaacctgcctcaaccattggacagatttgtgaaaaatttctattagatatccttttccttcttgtcacttatcattttgccacratagccagatgatgctgtttctgccatgggtctctcctcagctatagtcaggcaccaggaaagcagggagaccatcttgttcttatattaaatataagccccaagggtgatgtacacaacacactgtattctttagagttgtttcaaatgaaacaaaaatgtgtgtgttggttagtggtttt

SEQ ID NO: 651847 - DNA, 502 bp, Homo sapiens
aaaagggaaacaggtaaggagagccctatcactgatgaacttgctgcagaaaggcaattttcaggtcacagggcagaataggaaataaagacccactatctcactgggaggaagagatagagttcagagtttggggagcccaaggcagctagaatttacaaggcacrgtactagagagaagagagctatgtaataagagatctagagatctttagaggcttctccttgaatattcagcacaataaatgcaaatgaagaaactagcaagcctggggcaacaatcaccaaaaaaggagcagagaagacatgaattttcctatcttcatagagatataaataggaaaattcagtgtatgaaacttcccacagctttacttctaggccctcaagtagatgtcaagtgatacagatggaatggtagggatttttacctgggtgtgtcaaacatcaggagccccacaggctagaaagtttgatttccaaacagaaagatggaaagacc

SEQ ID NO: 651848 - DNA, 589 bp, Homo sapiens
atgtgtcccctgcagcaaacttctcagcccctttgcaaattagtggttacaaatggggaggatggagtttgtacaacttcatcagcattggagctctctctttyacccatctaagacaagttgttacttacattcacatcacttctgtgaagtttgaagggattctaaaagaatcaatttaaaataaaaatgaacagttaaataacttgtccaaaagcacatagcacatgagtgaacgtgatgagctttaaatctagatataactgacttcagacgtatattctttatataacaactttattgaggtgtacttgtgcaatacactgcacatacttagtgtgtacatttttgtaagttttggtatgctatacacccatgaaattatcaccacaggaaaataagcatatatatatatatatataaaacaaaagttccctcatgtctttctttctgcccctccctgaccaccaccctctgcatctcaggcaactattcatctattttctgtctattgattagtttgcatttcctagaattttataacaatgaacattcatagcacacactttttccctcaatttctctcatt

SEQ ID NO: 651849 - DNA, 589 bp, Homo sapiens
atgtgtcccctgcagcaaacttctcagcccctttgcaaattagtggttacaaatggggaggatggagtttgtacaacttcatcagcattggagctctctctttcacccatctaagacaagttgttacttacattcacatcacttctgtgaagtttgaagggattctaaaagaatcaatttaaaataaaaatgaacagttaaataacttgtccaaaagcacatagcacatgagtgaacgtgatgagctttaaatctagatataactgacttcagacgtatattctttatataacaactttattgaggtgtacttgtgcaatacactgcacatacttagtgtgtacatttttgtaagttttggtatgytatacacccatgaaattatcaccacaggaaaataagcatatatatatatatatataaaacaaaagttccctcatgtctttctttctgcccctccctgaccaccaccctctgcatctcaggcaactattcatctattttctgtctattgattagtttgcatttcctagaattttataacaatgaacattcatagcacacactttttccctcaatttctctcatt

SEQ ID NO: 651850 - DNA, 547 bp, Homo sapiens
aacacatttctatattttactgtgcttcatacgtatccagacactcaccattgtagaaataacgccatttctaacaaggagatgaaattttagtgacaattgtttaaagattgtatgtgacattctgcaggcaaataatcttttgaccagagaaccttccctaaacgtcatggtctaaaatctttgaaaagcatatttgaaactttcggtgagtgacatacactgacttctcagatagccttgattaggcttcctatctaaaagcatagtaaaaccttgattaatggaaatgtttgaagaatgggacgttctggctaattctgcaaattttttttcaatgacaaaatatttaataaataattgtctgatgcatcctcccaaccatacgtaagtcagtgaggggtggggactagtttgaactggaagagattaagttgttkagttttgatttaatttagagatttagagatttagttgtttatggcagagttccctcccatgtagcagtttatgattagagtcaatgacgtgacctggttcatctgag

SEQ ID NO: 651851 - DNA, 505 bp, Homo sapiens
taaaccacaacagcctgaaaggaaaggagtatttagtgctcacacagattttgctcttttaagaaacagtaatcagtctgtgtatgtaatttggagagtaacataaattcagatggggcttgtttataattgagtactaatgtgggagtattgtgctaatgaaagagtcaagagggaggcagaggctgctttaatggatggtttgtaatagtattaatagtaagacacagcaaatttgcctaacctgtaagccactggttggtttctaaaggcttattacatttttctacagcatctttttaatcatggtgcattggtggtgaattggcctaggtttagctgggggatggatccatggagtagttatttctttctgagagtagaatgtctcaagaaacaggtgccctaggtgatgccaaatatcactrcacagagcagtaacagcagagggtaattgcctgtgtaaatgagaggcagtggagagatggtaaccctggggctgcat

SEQ ID NO: 651852 - DNA, 406 bp, Homo sapiens
ggaattctcccagatcttacccaagtacaccaacatgttacctctatgagtctacaagaactacagcattactaggcttggtgggggggggggtcccctaatagagatatggctgcagtgaccaaagacttagatcacaacactcaattctctttgaacacttggaaagccttctcaagaaraatgtgtgcaaacaagcccagacagcaaagattagaataaatacctatttcttcaatgtgcaggcattgacaatatccacaatcatcaagaccatcaggaaaacatgacctcacctaatgaactaaggcaccagtgaccaatcccagagtaacagagatatgtgacctttcggacagattaaatcaaactggctgttttgagaatgctgaacaaaattcaagac

SEQ ID NO: 651853 - DNA, 532 bp, Homo sapiens
gaggcgatggttatgctaattaccctgataggattattacacatcgaatacctatattgaaatatcacactgtaccacataaatatgtacaatttttatgtgtcaatcaactaataacaataaaagcatttaggtaaacagaatcccttatagattttctgttattggaaagagtttagtttattaataatttattatttttagtaatttttatctttctgaaatgttaatatgcaactcaaaatgtttctcctttaattatgacttaaaatttttatatagagcatattaaaaatcttcagactsaacaagcatctttgcagtcagaaaacacacattttgaaaatgagaatcagaagcttcaacagaaacttaaagtaatgactgaattatatcaagaaaatgaaatgaaactccacaggtaataaaaattatgttaactccattgaacagcaagtaaaatagctttagagatatatgttacatagttagctatagtgattattgaaagttctcaatttatgattagatt

SEQ ID NO: 651854 - DNA, 629 bp, Homo sapiens
gagccactgtgctcagcttatcttgattttgtttttagtattttgatttccaatgccttctgaatgctcattcctggggctcttttgacacccacatattctgaattaattttcagcaataactacatctatgtgtactctagcaaccagatagaatatatgctacattataaagaagtctgttctctttctgttcaaccatgttgttcaatgatcccacwcaccatgagaaaaaaggcctgccatggttgtgtgttatcccatggcacctcatcttcccaatttttttcccccagaaagaatacagaataatgaaaacctttctgacagacccatcttgataatagctgtgcaaattattgagtgttttgaggaattttgaatgctaattacctttaaatagatcatctctacatgtaattcttaccccaatacacaagaaatttgattttcatcataaaaagctggcaatttgtcaccatgtgcttgtgaattacatctgcatgaaaaatacatggtgcttcatgtcatttattcaatgtatactcagtaccagatactctgtcaactactatatatgcctttaattctgacaaccaccatatgtgttagacatcattgtccccatt

SEQ ID NO: 651855 - DNA, 341 bp, Homo sapiens
tctaaatttttttgtatttttagtagagacgggattttatcatgttgaccaggctggtcttcaacttctgacctcaggtgatccatccgccttggcctcccaaagtactgggattataggtgtgagccagcacaccctaccaagaggaatatatttttttaaatagaaaccaaatggccaagactgaatgcatggtccttaagggacagtgcatatttcctatctgcaaaggtcacctggcctttgagcatgcagcaagcaatgaaaatgcctcagagctaaacccagcrggactgctctgttaacaaggactcaccctagtatgaagtcatctcttttcc

SEQ ID NO: 651856 - DNA, 418 bp, Homo sapiens
atgtaaattacatcttctgggtggagcagtgcaatgactatgtacgacacttggccttaacagaaaatgtttatctagatgacaagtactaatgcytagtaggacattaaagagttacttgtcatcaccggagcccacttttgtaaaacatttaagaataaaaaacagtttggtgctattaataattacttccacaagagataggaaagtgagactaaagaataaaatgtaatgtttttaagtattctactggcatcttcaaagtgtgatagaagcaaccactgaaaagaatgtcctaggagagaaaaacagcagcaccagggtctctaagttcatatgtaaaaagaatagatacttctacattgtcttataggccaagtattaggggctaagaaacaaatcaatacttgaggatgat

SEQ ID NO: 651857 - DNA, 487 bp, Homo sapiens
taaatttctaataaacataacctaaaaatrcttctcccatggacatcaaaaagcatgaaaatgtaatatactttccattcatttattgaaccaatacttattgagcactagaacgaggatacagctgtatgcagagctgatgtagtttttggctcatgaggcttaaaagttaagtgaggggagaaaaatgagtaggcagggaattagggttctatgtaaagagttcttaaccctagagcatcaggtaatcatggtcctgtggaaagagttctaccctagcccatgaggtatcaggaaaaacactgcaggcaaaggatggctctgtgaaaatcggaaggatagagaggcccaagccagggaagaaatgtaagttctgcacacagatccaagctgcttgtaatgtgaagccagagatgaatcccagctcaactgagagaaggaaaaaaatgttaactgcacaatactttctcccaactctctgtccgct

SEQ ID NO: 651858 - DNA, 481 bp, Homo sapiens
tctaataaacataacctaaaaatacttctcccatggacatcaaaaagcatgaaaatgtaatatactttccattcatttattgaaccaatacttattgagcactagaacgaggatacagctgtatgcagagctgatgtagtttttggctcatgaggcttaaaagttaagtgaggggagaaaaatgagtaggcagggaattagggttctatgtaaagagttcttaaccctakagcatcaggtaatcatggtcctgtggaaagagttctaccctagcccatgaggtatcaggaaaaacactgcaggcaaaggatggctctgtgaaaatcggaaggatagagaggcccaagccagggaagaaatgtaagttctgcacacagatccaagctgcttgtaatgtgaagccagagatgaatcccagctcaactgagagaaggaaaaaaatgttaactgcacaatactttctcccaactctctgtccgct

SEQ ID NO: 651859 - DNA, 481 bp, Homo sapiens
tctaataaacataacctaaaaatacttctcccatggacatcaaaaagcatgaaaatgtaatatactttccattcatttattgaaccaatacttattgagcactagaacgaggatacagctgtatgcagagctgatgtagtttttggctcatgaggcttaaaagttaagtgaggggagaaaaatgagtaggcagggaattagggttctatgtaaagagttcttaaccctagagcatcaggtaatcatggtcctgtggaaagagttctaccctakcccatgaggtatcaggaaaaacactgcaggcaaaggatggctctgtgaaaatcggaaggatagagaggcccaagccagggaagaaatgtaagttctgcacacagatccaagctgcttgtaatgtgaagccagagatgaatcccagctcaactgagagaaggaaaaaaatgttaactgcacaatactttctcccaactctctgtccgct

SEQ ID NO: 651860 - DNA, 560 bp, Homo sapiens
gataccatatatcttttggtttatgaccttgaggtggggcatttttagaggcttcttacctttaaaggccatagtttaggtaacatttgtgcaggtattttcaattacttagtatatctattcttatcatatagtmaggacctggaaaacaaacaaaacaaaacaatggatggctcctcagtcccatggagacactatgagaaagaactttgctgagatgggtagatagatggaacaacatatttatattgtaggaatgtaacttaatatcaggaaaagcataaattcaaaagacaaaaagatacaggagaaggacacatagatattttggtggttggatttccagtagattgtatctttcttggtcagcactacttttaaagaaaagcccagctttcctagatgaacaatgacttaaaaaaaaaaaaaaaaagactgcttggtaccactgggaacatatatgacaatatttcgggatcaaagaaattcctatctttactctgaaacctttcactccaaatcagtctgtagaaatctgtgattctgttcctattatgata

SEQ ID NO: 651861 - DNA, 476 bp, Homo sapiens
tgaaaaataagtcacacagaatgcttaattcatgcacagtcaggcaaattctgtctttctcaaatcctgagcagctacaatttcatggtatgatggtttacatgtcaactttactgggctaccagatgccaggacatttagctaaatattactcatattgtcttggatgtgtctgtgaggtgtttctggataaaagaataacatttgaactggtaaactgagtaaagcaaattgcccccctaatgtcagtgggagtcatccaatcagytgaatgcctacatagaacaaaaaaagctgagtaagagaaaattgttcctgcctgactgcttgagctgagccattggtctttactgaccttcagggtcaaactaaaacgtcagttctttttgagtctcaagactgctggctttcagatgaggacttacaccatcagctatcctggttctcaggcatccagctcagactagaagcagacc

SEQ ID NO: 651862 - DNA, 562 bp, Homo sapiens
ttcttccctgtttggttggctctgaattgtataaatagcctctgccactttgctctgtctctcctcggagaaggtttcttatcgtgaaaaataagtcacacagaatgcttaattcatgcacagtcaggcaaattctgtctttctcaaatcctgagcagctacaatttcatggtatgatggtttacatgtcaactttactgggctaccagatgccaggacatttagctaaatattactcatattgtcttggatgtgtctgtgaggtgtttctggataaaagaataacatttgaactggtaaactgagtaaagcaaattgcccccctaatgtcagtgggagtcatccaatcagttgaatgcctacatagarcaaaaaaagctgagtaagagaaaattgttcctgcctgactgcttgagctgagccattggtctttactgaccttcagggtcaaactaaaacgtcagttctttttgagtctcaagactgctggctttcagatgaggacttacaccatcagctatcctggttctcaggcatccagctcagactagaagcagaccat

SEQ ID NO: 651863 - DNA, 625 bp, Homo sapiens
tatgcaattagaatgaggcttacactgtccccaaattttgttagtcactgaatctatagctgggttttctttaaccttcaattccaatcatagtttcaagctgatagtctgtaatttgagggacaaattacaaatgtatcaccatttttataaaattgtagggaaaaagaaagaggtaaaaagtcagtacatgcataacaaggcaaagaagagaacaggagtagttattaatttcttactctgcaactggccataagatcacagttgtttatgacactgtttatcctcttcctatttcatattacttttgacctcacctagcactgtgactaattagggctctgccaagcagggtgacccgaatcctaattcctgaggggtttttactcttagtggttctgcctgtatgtggttgcgatagttgtccatttaacttgacaaaaaagcatggaagttcttagagatgyttctgtaaaattccctgggtcccatacatacatctctttgtaggaaaaacttactctccttaataatcaggaccaattgttccagttaatacacgtaacttctttgcttataggcatggaaagaccaaattattcagtggcaatcatagagttcaaat

SEQ ID NO: 651864 - DNA, 536 bp, Homo sapiens
acccacttttaccttcttctaagaggactgcaaacctacttcatcctttcctcccttccttctcatgatttgttttaaattgattcataagycatctgacttcagcatcttaatttggtctgtgagcttctctgtccaatgacatctgagattaccatgagctttggtatttcctcacatcacatttaactacagacaaaaagggccaggtattggccactaattcagatcatacatcttattctgaatgacagtgtcctcaacttccaattacagcttcatccaagtgacactctaactgatttttccacagtccattatagtattttaaaggctggttgcttcaggcaacttgtggtgaatgataacagtgactcttaccggcctgagttcattttcttaacctctgtgccataaataaatccactgtttaaaagtgatgttgtatgggtcaccataataatgtcccattaagtaagtaaacagatgcaaaggcatggttacaaggcaggcaaatctatatacagagtaattgt

SEQ ID NO: 651865 - DNA, 536 bp, Homo sapiens
acccacttttaccttcttctaagaggactgcaaacctacttcatcctttcctcccttccttctcatgatttgttttaaattgattcataagtcatctgacttcagcatcttaatttggtctgtgagcttctctgtccaatgacatctgagattaccatgagctttggtatttcctcacatcacatttaactacagacaaaaagggccaggtattggccactaattcagatcatacatcttattctgaatgacagtgtcctcaacttccaattacagcttcatccaagtgacactctaactgatttttccacagtccattatagtattttaaaggctggttgcttcaggcaacttgtggtgaatgayaacagtgactcttaccggcctgagttcattttcttaacctctgtgccataaataaatccactgtttaaaagtgatgttgtatgggtcaccataataatgtcccattaagtaagtaaacagatgcaaaggcatggttacaaggcaggcaaatctatatacagagtaattgt

SEQ ID NO: 651866 - DNA, 536 bp, Homo sapiens
acccacttttaccttcttctaagaggactgcaaacctacttcatcctttcctcccttccttctcatgatttgttttaaattgattcataagtcatctgacttcagcatcttaatttggtctgtgagcttctctgtccaatgacatctgagattaccatgagctttggtatttcctcacatcacatttaactacagacaaaaagggccaggtattggccactaattcagatcatacatcttattctgaatgacagtgtcctcaacttccaattacagcttcatccaagtgacactctaactgatttttccacagtccattatagtattttaaaggctggttgcttcaggcaacttgtggtgaatgataacagtgactcttaccggcctgagttcattttcttaacctctgtgccataaayaaatccactgtttaaaagtgatgttgtatgggtcaccataataatgtcccattaagtaagtaaacagatgcaaaggcatggttacaaggcaggcaaatctatatacagagtaattgt

SEQ ID NO: 651867 - DNA, 528 bp, Homo sapiens
ctctctctcttttttttttttttttttttttttttgagacagagttttgctcctgttgcccaggctggagtacaatggtgcgatcttggctcaccacaacttccgcctcctgggttcaagtgattctcctacaaatgtatcgcaaagaactcccgcacckttccctgaaggagacaaagtttctccagaggccagctcattccagaggtacggatggctggttcttctctccacttaattttaaaaaatatatgttctttcttatgaaaaaaagaatccgtttctagagaattctacgaatggtgagtcacactctggagtgccacttccatgaatgccgagtgatcagtggaggtggctcacacgccagggctcactggagccaccctcactcctgacacattccctcatttcctgcttcttccattcatgtctgtctttgtctcacttaatttttgccccaaatcttatcatcttacagaactgaagctctttgaaattcagcttctatgaagactctgcaagccc

SEQ ID NO: 651868 - DNA, 417 bp, Homo sapiens
tgcttaatactctgtctcctaaggaacagggacagttgttcctgttctggaggacagcaactgtggtagcaactgaatggagggacagttgctaccacaaattgtcctaaaaagtagacctttaggatggaatgttggatttgtcttctatctacaatagggtctccactgctgggccatagctggcatacagtgatattacaatttctaaaacttcrcctgtggctaattggaatgagatgcaggtagaaaataaggctttatgagatcaaatggccattgcatttggggttaagtggctttttctgatggtattggaggtattgcaaggagaaaatgatagactcagggaagctatctaccagcgtaaggcatgctttgtaatgaaaactttaaggacgctcctgacatctacaa

SEQ ID NO: 651869 - DNA, 433 bp, Homo sapiens
gagaatccagatagatccgatccaagagagcatttggtggaactgcttggctagcctctcctttggtcagaacagtcaagtccaaatgccagcccagccgggagagccagctccgtctcctcgattccgcygagcaccaacacacgctgggtcacgcagaagctgtgggaggaaggagatgggtccagctccccaagacctcaccttctaatggaggaaggagaaacagacctaacccagaaaatgccaatagggccatttctctttcttggtgaaacctcccagaagtcccagcctgggcaacatggcgagaccccgtctctacaaaaaataaaaataaaaaaattagccaggtgcagtgatgtgtgcttgggaggcaaaggcaggaggatagcttgagcctgggagttcaaggctgcagtgagctacagtc

SEQ ID NO: 651870 - DNA, 430 bp, Homo sapiens
tttgccatctgccttcttggcaaagtcctagtcatccttcaaatccagctcacatcactctgcccaggaagcaccccctcccctagcccaaccccacaccaagccaaccccatctcctctgctctgtgagcagtctgtgtctaggcactcgtacagctgcctttttcagcctcctgtgtgattatgaaatcagtgaggaattgggaggctgatgayctaagagaaaaatatgttgactctggcgtcaaacagagctgggtctgagttactcctagtactgttatttcctggctgtgttcttggacacacctggaggacagagcaggaacatacaagagatgaggctgcaggaggggaagactccaccatagtgggccttgtgagccatcctcagaagacatttggaatgattctgggggcagaggagagg

SEQ ID NO: 651871 - DNA, 347 bp, Homo sapiens
gctattccctttcggtcagctctcagcttaaatggcatctcrggtccacataacctaggcagccccccagttactcctatcaaatcgtatgattttctctatctctgtagcatgttatcttccatttttcctgtgatagttttggtttgcttatttcctataccaccatcccatgccccctcccgcgcacacacagagcaatcaatctacaagctctgtgactgcagggcccttctgttctgtccaccactagattcccagcacctagtacctagtgcctggcatatagtagatattcaaaaatatctgtaaggtaagtgaattagtagctacggaggactcatgac

SEQ ID NO: 651872 - DNA, 347 bp, Homo sapiens
gctattccctttcggtcagctctcagcttaaatggcatctcaggtccacataacctaggcagccccccagttactcctatcaaatcgyatgattttctctatctctgtagcatgttatcttccatttttcctgtgatagttttggtttgcttatttcctataccaccatcccatgccccctcccgcgcacacacagagcaatcaatctacaagctctgtgactgcagggcccttctgttctgtccaccactagattcccagcacctagtacctagtgcctggcatatagtagatattcaaaaatatctgtaaggtaagtgaattagtagctacggaggactcatgac

SEQ ID NO: 651873 - DNA, 347 bp, Homo sapiens
gctattccctttcggtcagctctcagcttaaatggcatctcaggtccacataacctaggcagccccccagttactcctatcaaatcgtatgattttctctatctctgtagcatgttatcttccatttttcctgtgatagttttggtttgcttatttcctataccaccatcccatgccccctcccgcgcamacacagagcaatcaatctacaagctctgtgactgcagggcccttctgttctgtccaccactagattcccagcacctagtacctagtgcctggcatatagtagatattcaaaaatatctgtaaggtaagtgaattagtagctacggaggactcatgac

SEQ ID NO: 651874 - DNA, 584 bp, Homo sapiens
actttctgcctcaaaagtatgcatttattatgtatcaaataaaattttaaatttagagaacattgaagaaatatgagatcagagaaatcaaagattattattaaattacatttcttttggtatctcctgagatttctcarttatgcattacttgtattcattcatttattcatcaaatacaatatttatctaaaacctgctatgaccaagactgggtgaggaactggagacatagctattaaaaaaatagtatttatatttataaatgatgaaacaaaaagaaaaaatagaaggtgaatcggtaggtaaaaagagacaatagactaccagccaatctcaatgtgtgaaccttgtttgtatcctgattcaagaaaagacattaaaaagattatctgaaagagataattaaaaatctgaattctgcctggatagttgatgatattaaagaggtattattcattcttaggtgtaataatgacattgtggttatgttacaaaaaggagtcatttcagaaacagactgaaatatttacaaataaaatcatatgttgtctgggacttacttcaaaataatgtgtgagtgt

SEQ ID NO: 651875 - DNA, 584 bp, Homo sapiens
actttctgcctcaaaagtatgcatttattatgtatcaaataaaattttaaatttagagaacattgaagaaatatgagatcagagaaatcaaagattattattaaattacatttcttttggtatctcctgagatttctcagttatgcattacttgtattcattcatttattcatcaaatacaatatttatctaaaacctgctatgaccaagactgggtgaggaactggagacatagctattaaaaaaatagtatttatatttataartgatgaaacaaaaagaaaaaatagaaggtgaatcggtaggtaaaaagagacaatagactaccagccaatctcaatgtgtgaaccttgtttgtatcctgattcaagaaaagacattaaaaagattatctgaaagagataattaaaaatctgaattctgcctggatagttgatgatattaaagaggtattattcattcttaggtgtaataatgacattgtggttatgttacaaaaaggagtcatttcagaaacagactgaaatatttacaaataaaatcatatgttgtctgggacttacttcaaaataatgtgtgagtgt

SEQ ID NO: 651876 - DNA, 615 bp, Homo sapiens
gttacaagtgaaccataattaatatttacatagttctcacgggttggcaggcagccccctagagtgctgatttgctggcgagctgctgggatcactctgcaggggcaccgggcaggcctagaagtaactgcagattccactttgagaactgtcactgggcctgggtatcccaatattaatgctcttgcatgagtagaagcagcasaatgtcctgggacctcaaggagggtttgggggtggcaatgccaacatggggaaaccactgtagaaggagaatggtggggttctatcttgggacagcattagcacctgacagagagtggacgttatgccagtttgctagggttgccctaacaaagtcctacaaaactgggaggctcaaaacaaaagaaacatcttctcttacagtctgaagcctggaaatctgaaatgaaggtgtcagcagggccaggctccctctgagaccgtgggtggattcctgccagcttcttccagctcctggtcctggccagccatcctggcattcctctgctcgcagctcatcactaacccctgcctctgctgtcaaggctgtcttcttcctgagtgtctctatctctgactcttgtcctctta

SEQ ID NO: 651877 - DNA, 612 bp, Homo sapiens
atagctagttgcattggctacagggactatacacagatawgggcaaaatacaaaggtcacacataaaaattgctcattattttatggccacacttcaaatatatgagcatgtctatacagaaggaaagaaaatacttttgtttgatactttgcattcattttggatgttatgtggttgctgagatctttttaatgctagcaagaatgttggattccttattcatttgtatgaaaaactgagactttctttccttatttttaaggttggacgaaatttgcccgattgacacgggctttgacaaatagccgaagtgttttgcagcagctcacgccaatgaataaaacagaggtggtccataaacattcaagactagctgaagtaagtatgagatgaattttgcttcccaagatggtggtgttggtacatttttcttccctaaaatgatttaatatagatatttctggctatgatcttataaatacttagctgataatttatgtttcccttgtagaaatatagaaatcccaaatatttctattcattctctccaacttttgaaatgggagtgtagctcatgacatcccaggtcatgtctgtagagtgtaaggttt

SEQ ID NO: 651878 - DNA, 612 bp, Homo sapiens
atagctagttgcattggctacagggactatacacagatatgggcaaaatacaaaggtcacacataaaaattgctcattattttatggccacacttcaaatatatgagcatgtctatacagaaggaaagaaaatacttttgtttgatactttgcattcattttggatgttatgtggttgctgagatctttttaatgctagcaagaatgttggattccttattcatttgtatgaaaaactgagactttctttccttatttttaaggttggacgaaatttgcccgattgacacgggctttgacaaatagccgaagtgttttgcagcagctcacgccaatgaataaaacagaggtggtccataaacattcaagactagctgaagtaagtatgagatgaaytttgcttcccaagatggtggtgttggtacatttttcttccctaaaatgatttaatatagatatttctggctatgatcttataaatacttagctgataatttatgtttcccttgtagaaatatagaaatcccaaatatttctattcattctctccaacttttgaaatgggagtgtagctcatgacatcccaggtcatgtctgtagagtgtaaggttt

SEQ ID NO: 651879 - DNA, 448 bp, Homo sapiens
aggtgatctgcctgcctcagcctcccaaagtgctgggattccaggcatgagccactgcgcccagccaaaaaaaaaaaaaaaaaaaaaattaattttattttaagttctgggatacacgtgcaggacaggcaggtctgttacagaggtaaacctgtgtcatggtggtttgctgcaccaatcaatccatcacctaggtattaagccctgcatgcrttaactgttcttcttgatgctctccctccccgtccctggcagccccccatcaggccccagtgtgtgttattcccctccctgtgtccacatgctctcattattcagctccgacttatgagtaagaacatgtggtgtttggttttctgatttttaaaatcttttcaaagaattagcttttggctttgttgatttttaaaaatttatgtcctattttcaatttcatttatttctgctt

SEQ ID NO: 651880 - DNA, 448 bp, Homo sapiens
aggtgatctgcctgcctcagcctcccaaagtgctgggattccaggcatgagccactgcgcccagccaaaaaaaaaaaaaaaaaaaaaattaattttattttaagttctgggatacacgtgcaggacaggcaggtctgttacagaggtaaacctgtgtcatggtggtttgctgcaccaatcaatccatcacctaggtattaagccctgcatgcgttaactgttcttcttgatgctctccctccccgtccctggmagccccccatcaggccccagtgtgtgttattcccctccctgtgtccacatgctctcattattcagctccgacttatgagtaagaacatgtggtgtttggttttctgatttttaaaatcttttcaaagaattagcttttggctttgttgatttttaaaaatttatgtcctattttcaatttcatttatttctgctt

SEQ ID NO: 651881 - DNA, 589 bp, Homo sapiens
ttcacatttatacacaggattacactgagttgtgaatggcctwactcaaaaactttaacagatgttgcaattgtcctggtcacagtaaattaagaggtctatatcatggaaaccagtgcaaaaattattttaccatagattacagatttttagatttgctcaattttatgttcaatatgatgctactggaattttagaatcacttcttcttgtcttcaatattgaaatctaacaagttttaaaaaagaacatctatttaatgacatcttacctatgatggcaaagaaagtaattatttttaggaaatacacagtatccatgtacagaagcctgccagtacatatggtaaacatatcactaggactgatcactagatcaattgttaaatttctgctctttagtgttatgaatgactgtgtatttggtttgacttctgaggtgtggtggtacattgagaaatatacagggatggctctcttagtccattatgtgtagctataacagaatgcctgaggctgggtaatttataaagaaaagaagcctatttagctcacagctctgcaggttaggaagttcaagagcatggccc

SEQ ID NO: 651882 - DNA, 598 bp, Homo sapiens
aatctaccattgcaggaacttatccattcctttaagaatgaatccagtcttgccagagtgagaactcacccactaccatgagaatggtatgaagacgttcataagagattcactcccatgactcaaacacctcccactaggccccatgttccaacactaccacattggggatcaaatctcaacttgagttttggtgggacaaaccacatgcaaactacagcaacgacataagaaggatttattcttctctgaatgtcatcctttaaatgaaaaaaacaaatcccttacttgattttatgcatctattcacctctctctctmtatatatatattgaggtactcctttattataagtattggggaatctggcagtgaacaagcacacaaatccttccctatcttcataaaactgttaaagagaaattgcaccagacatttgttgaaaacaaagactttattcaagaccgttgcaatagtagagagagatttttgcactaggggagagggattggactcaactttgttgaaacaagtgtagagatgttggtcaatatgattaggtcatctaatcatttgataattggtgcttatcaaagtt

SEQ ID NO: 651883 - DNA, 552 bp, Homo sapiens
gatggcagactgtggaacttctctgcctccataatcatttgagcccattcctcacaatacatctctctctcttcctaaatatcaacatctatatacagttattcccttttacccatgggtatgcattccaagacccccagtggaggcctgaaaccacagatggtactgaaccctatatatactatgctttctcctatacagacgtacctatgataaagtttaatttataaattaggcacagtaagaaataaacaatataacaacatagaagaattactataatgtactgtaataaaagttatgtgaatstgtttgctctcttccaaaacatctcattgttactatactcaccctttttcttacgatgatgtgagatgaaaaaatgcctacatgatgagatgaagtagggtgaatgatgtaggcattgtgacctagctttaggctactattgaccttctgataatatatcagaaaatgattacattcttcaggtgatcctggatcatcaagccatgaacattaatggttgaatgtcaggagcaggagcagata

SEQ ID NO: 651884 - DNA, 552 bp, Homo sapiens
gatggcagactgtggaacttctctgcctccataatcatttgagcccattcctcacaatacatctctctctcttcctaaatatcaacatctatatacagttattcccttttacccatgggtatgcattccaagacccccagtggaggcctgaaaccacagatggtactgaaccctatatatactatgctttctcctatacagacgtacctatgataaagtttaatttataaattaggcacagtaagaaataaacaatataacaacatagaagaattactataatgtactgtaataaaagttatgtgaatgtgtttgctctcttccaaaacatctcattgttactatactcaccctttttcttaygatgatgtgagatgaaaaaatgcctacatgatgagatgaagtagggtgaatgatgtaggcattgtgacctagctttaggctactattgaccttctgataatatatcagaaaatgattacattcttcaggtgatcctggatcatcaagccatgaacattaatggttgaatgtcaggagcaggagcagata

SEQ ID NO: 651885 - DNA, 579 bp, Homo sapiens
ttccataattctgtccattattgtctgtacaatttgaaacacttcagcaactttccatagtatccacattgctagttctgcttcacttcttcttcctctgtaggtgactcaacaagttcttctagtttctcatttgttagcacttctgatgaccttcaatatgttcttccacttcatcaagtatgttggcatattcttcttcactaacttgtcttgctgtgtgaattattttcttagcttctccattgatgccccaggaagcctttaaaatcattcatgacttcaatccataagttcttccagcaggtatttgcaatttctggttttaattaatccattgcagttttgatgaacgctrttgcatcagagatagtgaatgatttccagcatttttttatatctggattagggtctgcattaattgctgatcaaatgcaatcaaatatcaggcaggcgcgtgtggcactgataaaccaaatgatgtcctggtcaaagggctgaaacaaggaggttgtatttgaaggtaaaaatacaacctcaacattttcattttcatagaagattcaggatggctgggtg

SEQ ID NO: 651886 - DNA, 635 bp, Homo sapiens
cacatatcataatgtttggaaaaaaatcagggctttaggcaatacacctcttcatagggtacatattttgatcaagctttatattcactgtggacccagtggatatgaaaatgaaagtcttttctacaaaaagaagcatattaaaagttactacattatggatattgctgaaaataagtgcctattctttgtctgtctgtctggccatttatgccactgtgtttcaattagaatatgaattggctaatacaggtkttatgcacaagttatttaaattcagatcttctacagaaggatgctagctaatccatggagtaattaggattatttccccgtagagctcttggtagcttgagttggagcagtgaattctgaataggaaaaagcaatgtaacttgttatctgggttagaggttcagataacaaatgtagtttgcaattttttttctgtctttaaattgcactctacaaaaggaaatggaaatggactatgtaatcattcatgtataaaatctatttagaataagggcccaatgcttatgaaacagagcttattactgttttgtggtttctatccagttgcctgatatggtactacctgtgaaaattaagcagctattaattattgattatgg

SEQ ID NO: 651887 - DNA, 614 bp, Homo sapiens
gaaagttttggaatataacaaattttagattttgatcatgaaagtgggtgtctgaggagaagtagaaaggttgttggagatggattggtgaagaaactccaaggccaggctattggaaggctcacctccatggatatcacccaaggtgatgttaagttttaggtgagattggcttttagaaatatttataagatttatgaagtaataacttggagttctttattctcatgaagtatttgttggcgtcaatccatgcaaagcataatagcracatatttctgaatataacagataaataacacccaacaattgtatattaaatcttactttacacacccatatctttcctatttgggataatgttgtattaagatgggacctctctattaacgcgatatctatattgccccagtgttctgtcctagaaatatgaaattctgtgctcataagcatgtaacatatgcacttttcttacatttttatcagttatcttttttcctgcatgtcaaataactctaaagctttatagataatatccaccataatttattcaactcatgagtctgcagttcaattgggtggttctgctgatttaggctaggtttggcttatct

SEQ ID NO: 651888 - DNA, 614 bp, Homo sapiens
gaaagttttggaatataacaaattttagattttgatcatgaaagtgggtgtctgaggagaagtagaaaggttgttggagatggattggtgaagaaactccaaggccaggctattggaaggctcacctccatggatatcacccaaggtgatgttaagttttaggtgagattggcttttagaaatatttataagatttatgaagtaataacttggagttctttattctcatgaagtatttgttggcgtcaatccatgcaaagcataatagcaacatatttctgaatataacagataaataacacccaacaattgtatattaaatcttactttacayacccatatctttcctatttgggataatgttgtattaagatgggacctctctattaacgcgatatctatattgccccagtgttctgtcctagaaatatgaaattctgtgctcataagcatgtaacatatgcacttttcttacatttttatcagttatcttttttcctgcatgtcaaataactctaaagctttatagataatatccaccataatttattcaactcatgagtctgcagttcaattgggtggttctgctgatttaggctaggtttggcttatct

SEQ ID NO: 651889 - DNA, 464 bp, Homo sapiens
actggaattcagctgcatagtctgggcccatgttccacactcttcactgcttcataacctccacagtcaaaaatccatgtgtaacttttgactcccctaaaacttaactactaatagcctactgttgactggaagccttattaataatataaatgattaacacatattttgtataggtattatatactgtattcttataataaagtaagccagagaaaagaaaatattaagaaaatcataaggaagagaaaacatatttgttattcactaartagaagtgattatcataaggtcttcatctttgtcaccttcacattgagtaggctgagaaggaggatgaggaggaggggttggttttgctgtctcaggagtggcagaggtggaagaaaatccaagtatatgataaacctgtgcagttaaaacccatgctgggagagtgctgggaaaatggcagatagcaggca

SEQ ID NO: 651890 - DNA, 588 bp, Homo sapiens
aattgaaacaaacaaaaaataccaaaaataaatgaaacaaaaagcgggtttcttgaaaagataaatacaattgatagaccattagcaagataaaccaagaagcaagaagatccaaataaactcaattagaaatgaaatgggagatattacaaccgataccacagaaatataaaagatcattcaaggctactatgaatacttttacrtgcataaactaaatttatggaaatatacaaccctcctagattaaaccaggaagaaatagaaactctgaacagacccaatacaagcagtgagattgaaatggcaattaaaaagttaccaacacaaaaaagtccagaaccagatagattcacagatgaattatatcagacattcaaagaagaattggtaccaatcctattgacactattccacaagatagagaaagagagaatcctccctaaatcattctatgaagccagtatcatacaaataccaaaaccagtaaaagatataataaaaaaaggaaagtaaagaccaatatccctgatgaacataggatgcaaaaatcctctacaaaatactagctaacgaaatccaacagca

SEQ ID NO: 651891 - DNA, 577 bp, Homo sapiens
tgaaagctcaaaagaaaaaacccaccatgttgttaaagggttaactggagactactgcaggaaattcatattccaaaaatattgaacattagttttgacttatttcttgagctaaggttttctcatataattactttccaaaactacattgtcttaattttaaaatatgcacaagtgacatttattagtcacataacttactttcactatgtctgaaaatttaaatctcaccaagataaacactgttaaatattggtggctgaaattacaatactatctttcaacagtggaggcagcaagcagagtgaataataattttattttctgtaaattcactattgtcactgtatatattaggaaagtgcatcattgrgcttagcatactaaagagaagagattcactatgtaagcggcggcaaaacacaggaagcactgtgctagttctttctaccctgcaactgttatatatgtatatatttaaagctgtgcctgcatgggtggattaacacctggctatttctactgccattaaattaaatgaatcattattctgccacctaatacatcagaggtagac

SEQ ID NO: 651892 - DNA, 567 bp, Homo sapiens
ctccttcctttttgccttccttcttccccctcaccctccctttctccttccccttctctttyttctcactctctctttctcctccgtgttgtggcttcttctttgatatttctttcatctctccttaatcattttttgattctcagtatcattccgctttatgaagcctttcttttactcccgggctttatcttctatgtttccatccaacttggttcattgctctgtaaaaacattttttgtgtattgtggtgattcaactgcacacacacacacacacacatatataaacatgcacatatatattatatattatatgtatattatatattatacatatatacatatattatacatacatacatatttatttatttcttctccccaagcctataaactctttgtggggagaacttttcaataattctcttttgcatttccatcagttatcacagtggcatgccaaaattattgaataaattaatgaataactcaaaagcacagctctagtacttagacctgggctgaaatctcaactctacaatttaatttctgtgtaaccttaca

SEQ ID NO: 651893 - DNA, 550 bp, Homo sapiens
aacatttaaagtatagttgacccttgaacagcatgggggttagtggtgctgacacctgtataacttttgaacccccaataatttaattaccaacagtctactgttgactggaagccatacagataacataggcagttgattaacacatattttgtatgttgtatgcattatatactgtattcttacactaaagaaaatgtgataaagaaaaatcataaggtaagaaaaaaatacattgacagtactgtactgtatttatcaatgacataagtttaagccatctgtttacaagaggaatggctatctgaaatggtgggttatcgcagctgcagacctcaatctacagtatatatcaarcaatttgactttttcttgtaatatcatgacttttctctgcttattgggagcacttccagcaccactagtggcactttgtgtgggttttcttgttatcaaggtttatggtattgaatcaaatatgatgaaagatatgtgagaaccatgagatcacttttcactgagatctgcaatttactggagagaggaactg

SEQ ID NO: 651894 - DNA, 418 bp, Homo sapiens
gaaagacagaggtacactgaaatatcaaataattaaataaataatgctttccctaaatggtagattagattatactaattcttagattagaatctcttttaagactaggcttgtaaatatttcctctgattttgagactaactgtatttaagtgtttcaaagtattttccccaaatatctgacttgttatttgtttttaatttgaggttttaaactttatttcttcgttttggccaatgcctgaaacaataaaagtctaaagcagtagtgttgtatttgggtcggaaaaaatagygaatagggtctggcctaatattcttttaaatacctgtatattttttagttatataaattcataatggtaggcaatttttattcttatagattaccttcttgtattaagattatactaaaccta

SEQ ID NO: 651895 - DNA, 543 bp, Homo sapiens
taagtgggaagaagaatatttcaggcaaagagaaagcatgtgaacattcctaaggagaaaaagaaaatgaatggctaagtttgtgaagcttaaacactagcgcagctagattgccttgggtgaaaccagaagaaagacaggagataagggcgagtgacagttaggggcctggctgttcaggggaaagattttgtgttttattcctagtgcagtggaaaaacctcatagtcccaaaagctacttccgtaaaggttgaggggaggaggagaaagagtgggagaccagttaggtctggtcttgcrgtagtcgacgcaagatatgatggtggtctggcctgggatggtagtagtggaaatggggagaaatggatgtatcagatatgttttgttggtagcattattaggatctagtaatggattggatgacatggatgaggtgtgaaggatgactcccaaggttttggcccaagcatttgcgtgcagatggaggtagggaagatatccttgagatgggaaaaactggaagaaggccacgcttggaatg

SEQ ID NO: 651896 - DNA, 606 bp, Homo sapiens
ttaggtctggtcttgcggtagtcgacgcaagatatgatggtggtctggcctgggatggtagtagtggaaatggggagaaatggatgtatcagatatgttttgttggtagmattattaggatctagtaatggattggatgacatggatgaggtgtgaaggatgactcccaaggttttggcccaagcatttgcgtgcagatggaggtagggaagatatccttgagatgggaaaaactggaagaaggccacgcttggaatgaaactctaaagaccatctgcatcatcgctgtcatctagctcccttttcattcccttgaagaaaagaataatgcagccaaagacagcttagctcaatataagtgtgtacagatgtgatttctgcattccatttgcagagttcagaaaagatccgggtaattagcttggacagtctggtcattcttgtggattagaaacatgtagtttcagattttgataagaaactgatttggataagaaactaagtaaacttttgaataaaacccaaaccccaaactaaacctaactttataataaatatttgacaataagcattgttgaaaaggcctctgcagccaactccttttag

SEQ ID NO: 651897 - DNA, 606 bp, Homo sapiens
ttaggtctggtcttgcggtagtcgacgcaagatatgatggtggtctggcctgggatggtagtagtggaaatggggagaaatggatgtatcagatatgttttgttggtagcattattaggatctagtaatggattggatgacatggatgaggtgtgaaggatgactcccaaggttttggcccaagcatttgcgtgcagatggaggtagggaagatatccttgagatgggaaaaactggaagaaggccacgcttggaatgaaactctaaagaccatctgcatcatcgctgtcatctagctcccttttcattcccttgaagaaaagaataatgcagccaaagacagcttagctcaatataagtgtgtacagatgtgatttctgcattccatttgcagagttcagaaaagatccgggtaattagcttggacagtctggtcattcttgtggattagaaacatgtagtttcagattttgataagaaactgatttggataagaaactaagtaaacttttgartaaaacccaaaccccaaactaaacctaactttataataaatatttgacaataagcattgttgaaaaggcctctgcagccaactccttttag

SEQ ID NO: 651898 - DNA, 538 bp, Homo sapiens
acttaggaagagtttaaatttgcaattatttcagccaagaattagaatttaaggaacatgtgttctagttgccacttctgaccttgggaatygcggctttgtgagtctgtgacttattgcctgatgagtgatcagtgaaggaagaaatgaagttttcctgattagggataacatgtacaacatcaggcccaatacctagcatagagtaggagtccactaatggttgcttttgttattaattttgttactacacagagtaactcaagtgtaagtgaaataacatattaacagatgggtagtgatagctggaccctgctgagctggagtctgaacgttcccattgtagagctgttgaaaatggtatgatgggggcagggtaatgtttttaatggcagagttcatatgaaatagttagaatgatccaaatcctaacaaatgtcttgaaaactagtctgtttataagagagagagagagagagaggtttgtaaagcctttgcagagttgtttaaagcatgcttttaaaattgtaaggtacac

SEQ ID NO: 651899 - DNA, 538 bp, Homo sapiens
acttaggaagagtttaaatttgcaattatttcagccaagaattagaatttaaggaacatgtgttctagttgccacttctgaccttgggaatcgcggctttgtgagtctgtgacttattgcctgatgagtgatcagtraaggaagaaatgaagttttcctgattagggataacatgtacaacatcaggcccaatacctagcatagagtaggagtccactaatggttgcttttgttattaattttgttactacacagagtaactcaagtgtaagtgaaataacatattaacagatgggtagtgatagctggaccctgctgagctggagtctgaacgttcccattgtagagctgttgaaaatggtatgatgggggcagggtaatgtttttaatggcagagttcatatgaaatagttagaatgatccaaatcctaacaaatgtcttgaaaactagtctgtttataagagagagagagagagagaggtttgtaaagcctttgcagagttgtttaaagcatgcttttaaaattgtaaggtacac

SEQ ID NO: 651900 - DNA, 585 bp, Homo sapiens
catttttttttccagaataggagactgttgtctgcattataaacgtgttcagacagttatcctttttcttcaataattttcttagtggcatctgggaactctctgctgcctcttggtggacagaagctgcttgatattttaaaaaattgttaaaccatcctttgctgacattaaatcctccagctttagatacttcatcttccttttgctttaagttgtcatataatgaccactttttctcacatcatattagagtctacaggtatactttttggatagcaatcctccacccacataaaagcagcatttttaatatgattttaaaaggtaacttgcaaaaaatgcaaggttttcatggctgctggtayagctgcagcaacagcttcacacatttcccctccctcccagctcccttccttccttccttttttacaattgtccttattcaggattcatttatcttgagatagccggcaaccacagctgcagacttcaatttatgccacatttcaagcaattcaactttatttttgtaatgtcatgacttttctctgcttcttgggagcacttccagcatcactagtg

SEQ ID NO: 651901 - DNA, 649 bp, Homo sapiens
actggaggacaaactgcttacgcgaggtgttttaagcagatgctgacaacacttgagctcacagcaacagcagccagaggtggctacaaaatcattactgtagtacagtatgtactaaagttagttttatgcagttacaatttaatgctctgtctttatttacatgytcttaactgcaaacaccaccatgtatggtctctgtttacccatagattttaataaattttaactttgcatagcatatttgtgtacgttttatggtgttaaatgtccaaatagactagtatctacatatattttatacattcatgacatgcctttttcttttttttttgatatttctaggctactcagtttttctgggagtttttcaaattgttgcaaatgttcaaaaatttcccagtatattgaaaaaaaatccatgtataaggggatgtgtgaagttcaaactcattattgctcaagggccaactgtacttgcactcatttgggtaaatgtaactgactcatataaattaattctgataacatttctaaaatatgtcttacagattactctgttagtgatgaatatgttaaactgtccttgataactaaaaggtaattgtgataaacatttttttacttgtactactttctttttaaaaaa

SEQ ID NO: 651902 - DNA, 556 bp, Homo sapiens
tatttagcatacataattggcttcaggaaagcagttaattgtctggtttcactatatgaattttattccaggaattattccctgagtttgacatttgtcattatattttcttccataatccagaggagaaaatttgagcaaaatttctcctcttcggctaagtcatggcattttgctttctgacagtgaaaaagtggctaaaagcatgtatagcacagcatattatattaagcctcaagtgcatttttttgatgttgcttcacagatatgttttcctatttcgatgtgtagttgtgcatgaagacacagggataagtaaggatttgaaaggggattataatgtcaaagataacacatactatgcaaagtgaaattamctatgagaacatatggtgaagcacagatacccttatctacaaaagatagctatgctttaaaaaaaaaagtattcagaccaggcacagtggcttatacctgcaatcccagcactttgggaggccaaagcagaaagagtgcttgagcgcaggcgttcaaaaccagcctggacaacacagaa

SEQ ID NO: 651903 - DNA, 556 bp, Homo sapiens
tatttagcatacataattggcttcaggaaagcagttaattgtctggtttcactatatgaattttattccaggaattattccctgagtttgacatttgtcattatattttcttccataatccagaggagaaaatttgagcaaaatttctcctcttcggctaagtcatggcattttgctttctgacagtgaaaaagtggctaaaagcatgtatagcacagcatattatattaagcctcaagtgcatttttttgatgttgcttcacagatatgttttcctatttcgatgtgtagttgtgcatgaagacacagggataagtaaggatttgaaaggggattataatgtcaaagataacacatactatgcaaagtgaaattacctatgagaacatatggtgaagcacagatacccttatctacaaaagatagctatgctttaaaaaaaaaagtattsagaccaggcacagtggcttatacctgcaatcccagcactttgggaggccaaagcagaaagagtgcttgagcgcaggcgttcaaaaccagcctggacaacacagaa

SEQ ID NO: 651904 - DNA, 556 bp, Homo sapiens
tatttagcatacataattggcttcaggaaagcagttaattgtctggtttcactatatgaattttattccaggaattattccctgagtttgacatttgtcattatattttcttccataatccagaggagaaaatttgagcaaaatttctcctcttcggctaagtcatggcattttgctttctgacagtgaaaaagtggctaaaagcatgtatagcacagcatattatattaagcctcaagtgcatttttttgatgttgcttcacagatatgttttcctatttcgatgtgtagttgtgcatgaagacacagggataagtaaggatttgaaaggggattataatgtcaaagataacacatactatgcaaagtgaaattacctatgagaacatatggtgaagcacagatacccttatctacaaaagatagctatgctttaaaaaaaaaagtattcagaccaggcacagtggcttatacctgcaatcccagcactttgggaggccaaagcagaaagagtgcttgagygcaggcgttcaaaaccagcctggacaacacagaa

SEQ ID NO: 651905 - DNA, 565 bp, Homo sapiens
gtacatgtctgttacagaatccctaagcacccaagaaacattgtataaagtatcctttgtccacttttccatactttccataggggccctgtagyaggggatgatgtggctcttctagcactgactaagtttttctggttgaatgcctgtctttgtgggcctgtgcagcctctcttcagagatgataatttttactagaatttatgaattcatcttctaaaatgagaaaggcaggtttccattcattaaatgttaaaataaatagttaagatgatggatttgtgacactgaaattatggcattattttatgaggttttggctgattgcacctgcacagattcacaccccaattttgtatttctttggaagaatgtttaacattctggcatgtctttttttcagagaataaattcacctggtttggcatagaggcagttgcaaggaaaacatgcacgttaggtcttgaggctgagctcaaagcaattattttgaaaaggagggtgctcagacccatgggtgagttgagcccatggctgttcttgctaatggaagcccagcacgggt

SEQ ID NO: 651906 - DNA, 582 bp, Homo sapiens
agttctgtgagcctctcaacacctttttaacaaattccatctttttttttaagtaacatgagaaggtttctgttgcttacaaccaagaacactcaaatattagtggtattccctcttgccagggtcattcaacatttgtgttattgtattctcctgctaaaatagttcccttcacaagatcttttgcgctaatcttaaatcaattttatgctttatttaaggaaaaatgcctttagtctctggttaagaatatgcgctgatagtgttttctatttttttaaaatctgctttattgacttcatgtctctgtgagagaattatttatgtggtaataaatgtataaaaacctatacaaaatagatagtttaatgtacagtagggagctttgatattttacaaatcagtgcatatcagaaattattgtaataacttactcttcctaaaacttaactttgtacacaatttttgttctaagtcttcattatgtagacttttataatgtatttttacaattttccttgttataggcattatcattctttatccctttacatttyacctagttgtaggatttttaaaata

SEQ ID NO: 651907 - DNA, 561 bp, Homo sapiens
cttaatcttcactgtggaacaaatggaactaatagatatttacagaacatttcatccaatggctgcacaatacatgatttcctcctcagcacatggttcattctcaaggatagaccacatgttaggtcattaaacaagtcttaaaacattcagaaaaatgaaatagtatcaagcatcttctctgaccacaatggaataaaaataraaatcaataacaagattttgcaaactataaaaacgcatagaaattaatgttctcctgaatgaccagtgggtaaatgaagaaattaaggaagaaattggaaattgtgttgaaacaaatgataatggaaacaccacataccaaaacctatgggacacagtgaaagcagtactaggaggaaagtgtatagctataagtgcctatgttaaaaaagaaaaaaaaaaagctaaaaataacctaatgatgcatcttaactagaaaaacaagagtaaactgaacccaaaattagtagaagaaataaaaatcagagcaaaaataagtgaatttgaaatgaagaaaacataaaagatcaacaaaac

SEQ ID NO: 651908 - DNA, 561 bp, Homo sapiens
cttaatcttcactgtggaacaaatggaactaatagatatttacagaacatttcatccaatggctgcacaatacatgatttcctcctcagcacatggttcattctcaaggatagaccacatgttaggtcattaaacaagtcttaaaacattcagaaaaatgaaatagtatcaagcatcttctctgaccacaatggaataaaaatagaaatcaataacaagatwttgcaaactataaaaacgcatagaaattaatgttctcctgaatgaccagtgggtaaatgaagaaattaaggaagaaattggaaattgtgttgaaacaaatgataatggaaacaccacataccaaaacctatgggacacagtgaaagcagtactaggaggaaagtgtatagctataagtgcctatgttaaaaaagaaaaaaaaaaagctaaaaataacctaatgatgcatcttaactagaaaaacaagagtaaactgaacccaaaattagtagaagaaataaaaatcagagcaaaaataagtgaatttgaaatgaagaaaacataaaagatcaacaaaac

SEQ ID NO: 651909 - DNA, 599 bp, Homo sapiens
cactgttgcctcaggagacacagggtttatctcctcagataaaggtggaaaggctgatggcagcatgggttggggaggcaatgttgccrctactggggatggggaagctgtttcttctggcaaaaaaggttcatcagagtttataaactcagtgtcccccacttcatcagggtcctcccacatgtccccattccaagttgcagagtcccattcttttccagtcttttcatccattcttttccaattttcttcactttaacagtagacaccttgtgatgctgtgcatgcacttttcatggcaggtttgccactcacatgataagagcttgtgtgtgtttttccacaatttcagctctttctctacaggagataagactctcactcaaggtgatattagcagatttgagggtcagtatctgtttctgaagatgggagttaaaatccctgagttcatcattttcttccatcactttgtccactgaacttaggagcaaacaaccaacttcattatgttccttgcttctccacatatggtcaaaggtattatgtacagagtcactaaattccttgcctctcatgagcgataaatcaggagtgtc

SEQ ID NO: 651910 - DNA, 420 bp, Homo sapiens
gtttattaactcatatatatatatatatatatatatatatatatatatatgaggagtttattaactcacacaatcacacggtcacacaataggctgtctacaagttraggagaaagaagagccagtccaaatcccaaaactgaagaacttgaagtccaatgtttgaggacaggaagcatccagcatgagagaaagatgtagcctgggaggctagactagtctagtcttttcacatttttctccctgctttatattctagccatgctggcggctgattagatggtacccatccagattaacaatgggtctgtctttcccagcctactgactcaaatgctcatctcctttggcaacactctcacagacacacccaagatcaatactttgcctccttcaatccaatcaagctgacactcagta

SEQ ID NO: 651911 - DNA, 554 bp, Homo sapiens
cttcccagtccatctctgcaatatcatccaacatttactgaacatctactaagtgccagatgctcatttcaatggccatgaaaatgactcatccaaccagttagctccatagttcctgggctaccttaacttcaaaaactgtcatctccatgccattttagtcactcactcccaggaccataccctttgtcttgtcattgtcaaggacacctcccttcttaaattgtaatttcttcattcaactctggttacaacaccctagccctttgatctcatagagattcactcctgtattacttttctcaggccaccattaggaggaccatataatttattgtccaaaagataatattttgcaagtgaaagyggatgctgtaataattatgccaagatgatactgagcaaacagggatgtatgatcacgttagctatcatcacttctgggtaattttcctttcctattcaacttgtggttagccatctgaactgatttcttgctggccctctttcttcctcttgcattcttctgcattattgtctataaattgccaacc

SEQ ID NO: 651912 - DNA, 570 bp, Homo sapiens
gatggtcctttacaagcatcatttaatgtcacaggatgtgcagagctagggatagggttaaggtaatctcattagggaccgtgaaagaatatgagaattctgtctgtctttagtgagattgccttgcgattagatgataacaaggatgatgatggtgacaatgacaacaacgtgacagtaagctttataccagtcatgcttttactagctctaaatagagaacttttgttcttgttctttatgcatatgtgattttagtttgcctaattaatgttatttcagggacacctgctctcgtgttcytacaatatttatcattaaagaaatgaacaaattctctagcaattatgaggacttggaaagaataaaagtaccctgggtcgtgttggctaggctgacagaaaataatacctgaaatatttcaccacgttttctcaagggcaaatttactgtaatgtgaaaaaattttttatcagtgagtgtaattttacacatgaattacagttccagcattctattttcaattgctatgtttactgcatcagaaatgtatagggaatttgtgttctc

SEQ ID NO: 651913 - DNA, 609 bp, Homo sapiens
aaattgttcatgcatttagaaaaatagcatgtccaagttcttgtttaacaagttacttatttactgttttttttttttttgaaaaataaggagtgaagggaagtattgccttataattgtatattaaacaaggttgttaacaaaaaaatcaccaaagtattggcttctattgtgcctcactgtggagatttcatatataactcttaattttctctcagtggttgtcagtggacaacgggtcagtacttgctgcaraattctatgtcctcttgccttccatctttataggtattggagaaatatttaatgagaatagaaaataaattccttcagagaaaaattagtcctttttttaaaaaaataatttaatattattttaagttccaggatacatgtgcaggatgtgcaagtttgttacataagacacaggtaaacatgtgccatggtggtttgctgtacttgtcaacttatctcctaggtattgagcccagcatgcatagctatgtttcctgatgctctccctcccccagctcccgtgaaaggtcctagtgtgtgttgttcccctccctgttctcatcattcagcttccacttataactgacaacatgc

SEQ ID NO: 651914 - DNA, 518 bp, Homo sapiens
agatgtctattattaatttttaaattattcgtaagttcatcatataaatatttttatactagaatatatatcattttcatttatttaattctgtttggaaatcagctttatatttccatgtgttattttttcaaaggagtttttgccatctactggcttctagtccattggatttctgggtgactttcctgtagctgatagttctaactgaatgtataatgctataacatgactgatttagaaatttttattatattggatcaatacataagcagactggctaaatgatttgaatatgtaaagttggccagaaattctgatgacttcgatatgttcagttaggttgttgggtggcgagctcttgaattatttttccttccttatgcacattaggttcttagtgaatggttcctaaataagtgaagtcttttcagcttcttctagactaccagggagaaacttgaaggctgagcacatatgtgaaagtcatagacaraacaaaaacttttaagtttgtt

SEQ ID NO: 651915 - DNA, 556 bp, Homo sapiens
cctgttggacaaggccttttaccattatataatgtccctccttgtctcttttaactgctgttgctttaaagtttgttttgtctaagaacagctacccgtgcttgttttggtgtccatttgcatgaaaagcctttttccacccctttgctttaagtctatgtgagtccttatgtgttaggtgagtctcctaagggagcagatagttggttggtgagttcttatccattctgcagttctgtatcttttaagtggagcatttagaccatttacattcaatgttagtattgaaataagaggtaccatcrcattcatccagctctttgttgcgtgtgtactttggttttttgttttgctttttaacttgtatttttgttttataggtcctgtgtgatttattctttaaagaggttctgttttgatgtgtttccaggatttgtttcaagatttagagctcctttttgcaattcttgtagtcgtggcttggtaatagcgaattctctcaggatttgtttggctggaaaagactatctttccttcatatatgaaggttagtttt

SEQ ID NO: 651916 - DNA, 594 bp, Homo sapiens
tgaatacaaaattcttggctgataattgttttgtttgaggagattgaagataggccccaatcccttctagcttgtagcgtttctgttgagaaatctgatgttaatctgataggtttttctttataggttacctggtgcttctgtctcacagctcttaagattctttccttcatcttaactttgaataacctgatgacattgtgatcaggcaatctttttacgatgaatttcccaggtgttctttgtgcttcttgtgtttggatgrctaggtctctagcaaggctggggatgttttcctcaattattcccccaaatatgttttccaagcttttagaattctcttcttcttcaggaacaccgattattcttaggtttggtcgtttaacataatcccagactacttagaggctttgttcatgttttctttttcttttttctttgtctttgttggattgggttagtttgaagactttgtcttgagctctgaatttctttcttccacttgttcagttctattgctgagcattttccagagcatttcacatttctaagagtgtatccaaagtttctcgaatttttgctttgttctttaag

SEQ ID NO: 651917 - DNA, 591 bp, Homo sapiens
ttttcagaactaataaagtcaattttttttaattcgaaaacttttcctatttaaaacaattcamataatgaatgtaaaggatttttaacatggctctaaatttttctagaaatccccctccattttgttggaggtttgttataatagtcccaatatgcaataaacaagttacaagttacaaacaaaaggataattcttgatgccaaatataatagtaacaactagttttgtctgatgtaatattacaaataggccacgtttattattctgccctcgtttatcaaatattttgtatcttgtatgtagtattttcggaatttgtgataatggaattatgctgcaaatcctctgacaaaattataaaaagctttgttcagaacaagagtaacctctgctggattgtgattgtcttttgaaaatccagaacaaaactgagaatcttctctgtttttacagagaaagagcaactgctttgtttacttggagataatctgtgttcattttttgaactaaactaagactcctaatgaataatatgctggtgtcctgaagaacacattatctaaatgataatgtaacattttactgtca

SEQ ID NO: 651918 - DNA, 674 bp, Homo sapiens
ggaggaccaggtcaggcaaacagctggaaggttcttgagggtttggagaaggctgtggggcttgttgggctgagagtcagtctgcagcatcaatatggaccatttcctgggcattgctctagtgccccagtgcctgacacagagtgaggactcaaacatatttcttaaggaaygaaggcagaaatctacagggcaaattaacaagtggaatggggacatgttctccactctttgttttccagaaaggaggagaaagtatattgctgtggtcatcagagtttgtttatggggcttctcttacttctaacaggggagagaagatatgtcttaccaccacttagttctaaatgtgcttttaaaaataataatttaatttctgatgtatatagagtgatttcttcttaaagcaatatcagtcctttaaaacaggtgagccacagagcaggcctgaagtggctcttcaagtgcagggctcttgtgagggtcttctgttgggaggccaaggcacacctttagcaaggattcctcagatttctcagcccaaagaagggcaccgggtttacccaagtgctgcacattccaagaggcgctcagaaaaggttctgaggaaaggtggcatctcagagggcctggggttcctggggcaggaaggggtttctggggcaggaaggggt

SEQ ID NO: 651919 - DNA, 674 bp, Homo sapiens
ggaggaccaggtcaggcaaacagctggaaggttcttgagggtttggagaaggctgtggggcttgttgggctgagagtcagtctgcagcatcaatatggaccatttcctgggcattgctctagtgccccagtgcctgacacagagtgaggactcaaacatatttcttaaggaatgaaggcagaaatctacagggcaaattaacaagtggaatggggacatgttctccactctttgttttccagaaaggaggagaaagtatattgctgtggtcatcagagtttgtttatggggcttctcttacttctaacaggggagagaagatatgtcttaccaccacttagttctaaatgtgcttttaaaaataataatttaatttctgatgtatatagagtgatttcttcttaaagcaatatcagtcctttaaaacaggtgagccacagagcaggcctgaagtggctcttcaartgcagggctcttgtgagggtcttctgttgggaggccaaggcacacctttagcaaggattcctcagatttctcagcccaaagaagggcaccgggtttacccaagtgctgcacattccaagaggcgctcagaaaaggttctgaggaaaggtggcatctcagagggcctggggttcctggggcaggaaggggtttctggggcaggaaggggt

SEQ ID NO: 651920 - DNA, 431 bp, Homo sapiens
tctgagggtgtgtcaaggagagaggaacctggatcttggatggccayggggctcccttccacccacatctccacatggctgcacagcacaggctggttctgttggactgagcccatccggggaagaacagcgagaccctcgggtgagatcgggctcactggagacaaaaagcatggcaggagctggaggcgccccaggctgatttccgggacaggagtttcctgaacacagggactgagcatccccacagccccctagactggcccatgagcacgagaagccctgagagtgcgtggggatggcctgtgtgcaaggcagcgcagcgagcctctctgcacaacccacaggctctgctgggtgaggagttctccctcagcctcctctggagctgacgctgggggagagcgccgtgagtctccctgcctgaattc

SEQ ID NO: 651921 - DNA, 431 bp, Homo sapiens
tctgagggtgtgtcaaggagagaggaacctggatcttggatggccatggggctcccttccacccacatcyccacatggctgcacagcacaggctggttctgttggactgagcccatccggggaagaacagcgagaccctcgggtgagatcgggctcactggagacaaaaagcatggcaggagctggaggcgccccaggctgatttccgggacaggagtttcctgaacacagggactgagcatccccacagccccctagactggcccatgagcacgagaagccctgagagtgcgtggggatggcctgtgtgcaaggcagcgcagcgagcctctctgcacaacccacaggctctgctgggtgaggagttctccctcagcctcctctggagctgacgctgggggagagcgccgtgagtctccctgcctgaattc

SEQ ID NO: 651922 - DNA, 431 bp, Homo sapiens
tctgagggtgtgtcaaggagagaggaacctggatcttggatggccatggggctcccttccacccacatctccacatggctgcacagcacaggctggttctgttggactgagcccatccggggaagaacagcgagaccctcgggtgagatcgggctcactggagacaaaaagcatggcaggagctggaggygccccaggctgatttccgggacaggagtttcctgaacacagggactgagcatccccacagccccctagactggcccatgagcacgagaagccctgagagtgcgtggggatggcctgtgtgcaaggcagcgcagcgagcctctctgcacaacccacaggctctgctgggtgaggagttctccctcagcctcctctggagctgacgctgggggagagcgccgtgagtctccctgcctgaattc

SEQ ID NO: 651923 - DNA, 431 bp, Homo sapiens
tctgagggtgtgtcaaggagagaggaacctggatcttggatggccatggggctcccttccacccacatctccacatggctgcacagcacaggctggttctgttggactgagcccatccggggaagaacagcgagaccctcgggtgagatcgggctcactggagacaaaaagcatggcaggagctggaggcgccccaggctgatttccrggacaggagtttcctgaacacagggactgagcatccccacagccccctagactggcccatgagcacgagaagccctgagagtgcgtggggatggcctgtgtgcaaggcagcgcagcgagcctctctgcacaacccacaggctctgctgggtgaggagttctccctcagcctcctctggagctgacgctgggggagagcgccgtgagtctccctgcctgaattc

SEQ ID NO: 651924 - DNA, 431 bp, Homo sapiens
tctgagggtgtgtcaaggagagaggaacctggatcttggatggccatggggctcccttccacccacatctccacatggctgcacagcacaggctggttctgttggactgagcccatccggggaagaacagcgagaccctcgggtgagatcgggctcactggagacaaaaagcatggcaggagctggaggcgccccaggctgatttccgggacaggagkttcctgaacacagggactgagcatccccacagccccctagactggcccatgagcacgagaagccctgagagtgcgtggggatggcctgtgtgcaaggcagcgcagcgagcctctctgcacaacccacaggctctgctgggtgaggagttctccctcagcctcctctggagctgacgctgggggagagcgccgtgagtctccctgcctgaattc

SEQ ID NO: 651925 - DNA, 431 bp, Homo sapiens
tctgagggtgtgtcaaggagagaggaacctggatcttggatggccatggggctcccttccacccacatctccacatggctgcacagcacaggctggttctgttggactgagcccatccggggaagaacagcgagaccctcgggtgagatcgggctcactggagacaaaaagcatggcaggagctggaggcgccccaggctgatttccgggacaggagtttcctgracacagggactgagcatccccacagccccctagactggcccatgagcacgagaagccctgagagtgcgtggggatggcctgtgtgcaaggcagcgcagcgagcctctctgcacaacccacaggctctgctgggtgaggagttctccctcagcctcctctggagctgacgctgggggagagcgccgtgagtctccctgcctgaattc

SEQ ID NO: 651926 - DNA, 393 bp, Homo sapiens
tcacctgcccttcccactgggaaccagggaggtgsaagggttggcagagtctggccactgaaacaaaaggaggggtccaggttacaacctttagctgagacctggtcttctcatctatggtgtgtggccataatatcgccaacaccacagtactcttgagagaattaaatgtgccttagcacagcattgccccacagaaaacatatccaaatgcaaattcctctttccttcccattgtctaaagaggcagagctccaaggttctcagcagaacttttgaacttctggtttattgaatgacaggtgtcctgcaaatctgaccctcttaccctcaggttgaagccctagggtggctgctcttccactgcagaagatgttcccagtgggaggggcg

SEQ ID NO: 651927 - DNA, 393 bp, Homo sapiens
tcacctgcccttcccactgggaaccagggaggtggaagggttggcagagtctggccactgaaacaaaaggaggggtccaggttacaacctttagctgagacctggtcttctcatctatggtgtgtggccataatatygccaacaccacagtactcttgagagaattaaatgtgccttagcacagcattgccccacagaaaacatatccaaatgcaaattcctctttccttcccattgtctaaagaggcagagctccaaggttctcagcagaacttttgaacttctggtttattgaatgacaggtgtcctgcaaatctgaccctcttaccctcaggttgaagccctagggtggctgctcttccactgcagaagatgttcccagtgggaggggcg

SEQ ID NO: 651928 - DNA, 393 bp, Homo sapiens
tcacctgcccttcccactgggaaccagggaggtggaagggttggcagagtctggccactgaaacaaaaggaggggtccaggttacaacctttagctgagacctggtcttctcatctatggtgtgtggccataatatcgccaacaycacagtactcttgagagaattaaatgtgccttagcacagcattgccccacagaaaacatatccaaatgcaaattcctctttccttcccattgtctaaagaggcagagctccaaggttctcagcagaacttttgaacttctggtttattgaatgacaggtgtcctgcaaatctgaccctcttaccctcaggttgaagccctagggtggctgctcttccactgcagaagatgttcccagtgggaggggcg

SEQ ID NO: 651929 - DNA, 393 bp, Homo sapiens
tcacctgcccttcccactgggaaccagggaggtggaagggttggcagagtctggccactgaaacaaaaggaggggtccaggttacaacctttagctgagacctggtcttctcatctatggtgtgtggccataatatcgccaacaccacagtactcttgagagaattaaatgtgccttagcacagcattgccccacagaaaacayatccaaatgcaaattcctctttccttcccattgtctaaagaggcagagctccaaggttctcagcagaacttttgaacttctggtttattgaatgacaggtgtcctgcaaatctgaccctcttaccctcaggttgaagccctagggtggctgctcttccactgcagaagatgttcccagtgggaggggcg

SEQ ID NO: 651930 - DNA, 487 bp, Homo sapiens
ctgagatctctgctgcacagtcctctggaggctttagcctgggaaatgcccatgcaaatgaagagggccagcccctccacacttgtgggtaattctcgtcaggtggcatgagagactgagaaaagaaataagacacagagagaaaatatagagaaagaaaagtgggcccaggggaccrgcgctcagcatacggaggacctgcaccgacactggtctctgagttccctcagtatttattgattactattttcactatgtcagcaagaggaatgcagtaggagagcagggcgatagtggggagaaggtcagcaagagaacatgtgagcaaaggaatctgtgtcacaaataagttcaagggaaggtactatgcctggatgtgcacgtaggccagatttatgtttctgtccaccaaacatctcagtggagtaaagaataataaagcagcattgctgccaacatgtctcgcctcctaccgcagggcagtttt

SEQ ID NO: 651931 - DNA, 404 bp, Homo sapiens
cgtggcaactcagagtatgcccttgcagataagggtgacctgcttaccagcccacacttggtttctatcagcctgctttcgcttatcctggaaggaaaactgaaaacctggatgactgaagggaaacttcccttcttccacctgcatggtgagccgtgggatggctgcttccagagctaccctcggtatcactcctcattcttatgctagtggcttgagctggtaatagaacccactggggaatgtgtggaacattcttggagaatagatgtgtgggcttgygtatttcttcactacgtcttctctgtgacttggccctttccttggtcttaagtagacaaccactctgttttcccaaatttctgaaagctcagaaatgagcttttcccatccttaactatata

SEQ ID NO: 651932 - DNA, 449 bp, Homo sapiens
ctgggtttgtggggagcgccgggacaccggctgacgagggctaatgcgtgggctgtgaaggtctccccgggtgccgtggaccagtttcccatctcctcgcggctggctgccttcctgactccgataacgtcatgtgtgcacacacagccctccgggtgctcagccccttccctgcgggtttgtaacggcaatggtcccgcttccatactctgagtcctgagagcagcacaatgagcaatgggccacggttgcactacagcaaaggcagctcgtgtcctttgagtcmgacccaccgtccctccttccctcgttgcctgacaggctgtgctggcacctctatgtcacccccattaccgagggcatctctggcagcctcagtagagcccttgctcccatcagatccaaaggctcctcttctgggggccccggtgccccacacacctcggatg

SEQ ID NO: 651933 - DNA, 409 bp, Homo sapiens
tggaaacacataaaaacagaccctctttaaaacataaatcctacaggacctataaaacaaaaatacaattaaaaaagcaaggtatacaggcagcaaatagcatgatgaatggaatactacctcacatctcaatactaatgttgaatggaaatggcctaaatgctcagcttaaaagatgcagaatggcagaatggataagaattcaccaaccaagtatctgctgccttcaagagactcacctagcacacaaggactcacataaatgtaaggtaaaggggtggaaatagacattctatgcaaatagacactaaaagcaaacagaagtggctatacttatatcagacaaaacaaacyttaaagcaacagcagttaaaaaagataaagagggacattatataatgataaaagg

SEQ ID NO: 651934 - DNA, 510 bp, Homo sapiens
aaaatgacctgctcctgaaggatcactgggtcaacaatgaaatcaagatggaaatttaaacattatttgaactgaactgtaatagtaacacaacttatcaaaacctctgggatacagcaaaggcagtgctaagaggaaagttcatgaccctaaatgcctacatcaaaaactctgaaagagcacaaataatctaaggtcacacctcaaggaactagggaaacaaggacaaaccaaacaaaaacccagtagaaaaaaaaggaaataaccaagatcagagcagaactgaatgaaattgaaacaacaacaacaaaatagcaaaagataaatgaaacaaaaagctggttcttggaaaaaataaaaaaagaagaccaygagcaagattaaccaagaagagagaaaatccaaataagctcaattagaaatgaaatgaaagattttaaaaccgacaccacagaaatacaaaagatcattcaaggctactattaacacctttatgtgcataaactagaa

SEQ ID NO: 651935 - DNA, 510 bp, Homo sapiens
aaaatgacctgctcctgaaggatcactgggtcaacaatgaaatcaagatggaaatttaaacattatttgaactgaactgtaatagtaacacaacttatcaaaacctctgggatacagcaaaggcagtgctaagaggaaagttcatgaccctaaatgcctacatcaaaaactctgaaagagcacaaataatctaaggtcacacctcaaggaactagggaaacaaggacaaaccaaacaaaaacccagtagaaaaaaaaggaaataaccaagatcagagcagaactgaatgaaattgaaacaacaacaacaaaatagcaaaagataaatgaaacaaaaagctggttcttggaaaaaataaaaaaagaagaccacgagcaagattaaccaagaagagagaaaatccaaataagctcaattagaaatgaaatgaaagattttaaaaccracaccacagaaatacaaaagatcattcaaggctactattaacacctttatgtgcataaactagaa

SEQ ID NO: 651936 - DNA, 447 bp, Homo sapiens
tagggctaataatccctgtgctttgaggttctcataaggattaaattaaataagacaaagcaagtgtttctcaacaagggcactaccggtatttgggcaggaccactcttcattgaatgtgactattctgggtgyttcaagagctttcgggagcccagctgttccccaactaaactccagcagcatccctccaccaggcattgagctgatccaaaatgtcacctctatctcctttacacacagccctccccctgcctttgtcaggagccagtgttacaatgcatgtaatatcctatcacttcataaacccttaataagtgagaatattatacttcacgaatatagttcttaattttcctctgggatctttctggaagaggaattaagaaatgaattgggcatcattaccccaggcttgatagaaagggaaaaaaactgccattgagt

SEQ ID NO: 651937 - DNA, 665 bp, Homo sapiens
agcaccttgggtgtacctagcacagtgccccttgctatttgggatgggagagaaaaagtaggcctgatctttcccaaggggtgaggaagggaactcccagacgcattgctctctgagtgagacacttggcagggccagttggccaggctgatcctgggaaaggggtggaggtggcagaggcaggcttagtaggtcgttgggcagaagtccacccagtttgtagataaggcttgtggggctgggagcctagaggaacatacctggaacctgaaggctgcaggaccaggaccgaaaaaggactaggaggctgrgatcagcaacaactggggaaggccaaggaagactgacctgaggggaaaggagaaactggggaggtgaggttagtccaaggggcagtgtgtgtgtgtgtgtgtgtgtgtgtgtgtgtgtgtgtgtgtgtgttgtctgtttctctgtcttagagaagacaaccaagggccaaggtgatcactcaaatagacagacattctgcgtccttctcatgcctagccctagggctggatcaccagtctggccaagagttccatgggtctgtgctggctgccaagatgctgtggccatgctttcatttatggtctaccagaaagctatccatggaaaaagggattcagaaccagaagacctga

SEQ ID NO: 651938 - DNA, 551 bp, Homo sapiens
aatgtgcaacaccaagagtcaaccctaatgtacattatggactttgagtgactatgatgtgtcaatgcagtttcatctgttataacgaatgcaccgctctggtggtgatgttgacaatgtgggaggctatgcattggtggggccagtgagtatatgggaaatcttggtaccttcctctcaattttgctataaacctaaaactgccctaaaaaaaaaaaaaaagtcttggaataaaaaaaaacccaagatgcatatccttggaatgtaatcataaagttaaaattgatcactcaaaagatacataatttacaggatattgaatcatggcttccagattattttccaaatgagttgtatcaaatcagctgggtagccatagttgatttgaattgtaatcatttgtaaatcaaatttttatrtacacttgaatctatttcaagtgtatctattgaatctatttcaaagtgattctttgttggctagggtgtctgtggtcctgtaccttggtacctcatgtgttaataactgtaaatgtattaaaagaagtccct

SEQ ID NO: 651939 - DNA, 486 bp, Homo sapiens
tttgattcttgtgggttttgaggttaaaaaatattaaagaccaatagtttcatatagtccaatctaatacctttcacatttaggtctgtgacttctcaaattaatttttgtatgttgagtaaaatrgtcactatttatatttttcctgtatggacatccactggtgttttgttgttgttgttgttgttttcatcattcattgaaaggatcatcctttcctttgaactgtagcgatgcccttgtcacatatcaggtgacttcctgtgtggctctgttggattctctagtctgttccattggtcagcttgtctgtctctgttccaataccttaatactgtggctttacagccatcttgatacctggtggctgaatgctttaaaagacctgggaatcatcaggtgggaatcacttgctttggagtgggattctcaaccttgagtactcattaaatcccctggagagaagttcttaaaggcaccctcacc

SEQ ID NO: 651940 - DNA, 599 bp, Homo sapiens
  misc_feature 366: n = A,T,C or G
cttagccactaatttattgggactaagaacctcaaaattgtttcaataataatccatgttgcattacatgccttagtaggtaagtgcatgcatacctttcttattcttcattcattgataaaattctatattcatggactaagtttattataataattaattcataccctcaaaccacaaaaggcccwtgaacaaggtcctagactcattttccatgaagaataaagaggtgtctctttgtaatggacctcagagttgcagatgggtttaatcaagaatgttgtttcagaaaccccatgatattcatcactggtccatgatgtgcatttttttcatctattgattgacctattgactcacaaatancgatacaatcaaaaatccccaaaacaagatcattaaattttaggctaaaggcccatagagctagactacatttcttaggccatgacacgtaaaggtgcacatgtgaattggtcaatgcccctgcatgctctcagttcacattcagcattcgttctgatatagcccacttctatttaattcatacatatgtcaacgatggcctgataaaaaacaacgaaatcacctatttccat

SEQ ID NO: 651941 - DNA, 599 bp, Homo sapiens
  misc_feature 366: n = A,T,C or G
cttagccactaatttattgggactaagaacctcaaaattgtttcaataataatccatgttgcattacatgccttagtaggtaagtgcatgcatacctttcttattcttcattcattgataaaattctatattcatggactaagtttattataataattaattcataccctcaaaccacaaaaggcccatgaacaaggtyctagactcattttccatgaagaataaagaggtgtctctttgtaatggacctcagagttgcagatgggtttaatcaagaatgttgtttcagaaaccccatgatattcatcactggtccatgatgtgcatttttttcatctattgattgacctattgactcacaaatancgatacaatcaaaaatccccaaaacaagatcattaaattttaggctaaaggcccatagagctagactacatttcttaggccatgacacgtaaaggtgcacatgtgaattggtcaatgcccctgcatgctctcagttcacattcagcattcgttctgatatagcccacttctatttaattcatacatatgtcaacgatggcctgataaaaaacaacgaaatcacctatttccat

SEQ ID NO: 651942 - DNA, 679 bp, Homo sapiens
tccatatctttgaactacaaaagttcaggaacaagttttattgaattttcctaacttctattaggtaatttctacagagaatataggctggttctcattcaataacagatctcagagttacacagagggcttaatcaaaagtgttgattcagacacctccaccaatactcatcattgatccaggctaggcattctatttcttcattcatttataccttgttgaactgactcagtcattcatggtttcaggaataataattatatgatcaatatcccttaatgacacaaaactgagaacagaagtctttaatagaaccaagatctgttcattactctctttcatgcagaacaaatagactagatcatattttgtgatcaacctcaagtttacacatagagattcatcagcgactctgctgcatttaaatctcatacttatgattggtgtctaccagcttcccttccacttgatttgtctactcattaatgtgattgcaaaccatggatctaccatgtgagcccacaattaagcaaattaatatataatatctcccaaggtacctctacctcaaaaastcaacaacttcaatgtctgtccgtgaaggaatatgttaagcaactatagcaaaaacattaaatgggaatttaaattactatgacaatatatgaaatgctcttc

SEQ ID NO: 651943 - DNA, 619 bp, Homo sapiens
catcaaattaaaaaccttatgcccagcaaaggaacaattaacaaaatgaagagacaacttccaggtcaggaaaacaaatctgcaaaccatacatctcataggggttaatatgcaaaatatataaggaacacaaacaattcaatagcaagaaaacccaatttaaaaatagacacatgatttggacagatattttcccaaagaagacatactaatggccaacagatatataaaaaaattatcagtcactctaatcactagggaaacacaaattaaaatcacaatgagatatcatctcttatcttttagaatggctttcatcaaaaaaatgaaaggtaacaaatgatggcaaggatgcagagaaaagggaactcttctayattgttggtaggaatgtaatttagtacagccattgtggaagaagttatggagattatggataggaaagtccaatattgtcaagatgtcagttcttcccagcttgattcaatgcaatcccaataaaaaccccaggaagttattttgtggatattgacaaaactgtcctaaagtttacatggagaggcaaaagacccagaattgccaacacaacattgaagagaagaacaaagttggaggactg

SEQ ID NO: 651944 - DNA, 450 bp, Homo sapiens
attggataaagcactattatacaaaatacacaaaatactcttaaaactcaacaataggctgggcatggtggctcccagccctttgggaggccaaggtgggcagatcacgaggtcaagagatcaagaccatcctggccaacatggtgaaaccccgtctctactaaaaatacaaaaattagctgggcatggtgacgagcacttgtagtytcagctacttgggaggctgagggaggagaatcgcttgaacccgggaaatggcggttgcagtgagccaagatcagcctggtgacggagtgagactctgtctcaaaaacaagcaaacaaacaaaaacactcaacaataagaaagtgatcagattttaaaatgggccaaagaccttaacagacacctcaccaacaaagatataagggtggcaaataatcacatgaaaacgtgctccacatcatata

SEQ ID NO: 651945 - DNA, 619 bp, Homo sapiens
tgtttatttttcactcattgaatcactaacaacaaagccaatagacacaaatcaaaaaaaactaagaacaagatccttgaatattactgagatctataagcttattttccatagaagtgatactgcattttttcagaatggatccaagcattatacaaataattaactacacttccttgcttcataccaatctcacattaatatttcatccagactttcttttatttaatttgtccatattttaaagatagtacatgaggtagccagcctccaaatggctcccaaggcccatgctcctgttaygcatagccttgtgtagcttctttacatattaaatcatgaccgcctgtattaccaacagaatactgtggaaatgatggtgtatgacttctggagctagattataaaatacattgagggttccacctttctctgtcttagattgactgctctaggggacatcaactgccatgttgtaaggatactcaagcagtcctgaggaagagtctatttgtgaagaaactgtggcttcccgcaatcagcaccaactttccagccatgtaagtgaagcagacactctagcacagtcaagctttcagatgactgcaactcaacctga

SEQ ID NO: 651946 - DNA, 472 bp, Homo sapiens
ttatacaacatggtgattatcgttaacaacaacacattgtgtcgttgacaattgcttagaaagtagatgttaagtgttctcactacaaaaatataagtatgtgaggtaatgcatatgtggattagcttgatttagccattccacaatgtatacatatatccaagcaatatgttatacatgataaatatatccagtatttatttatcagtgaaaaacaaataagcaaaggagtgagaaggctcatctctcccggccctrgtcgggacgggaaagctctgtggaagtgggttggtttgtggatgtcgccgggcagagtgaggagttgcttcccctagagagcaggtttttttcctggtcacctctctgggctccacaaaatggggcttctgagtaagtcagatggtctgaagggaacgttaccagtctttgggcccagcattggccatatatgtttgtgatgacaactggccct

SEQ ID NO: 651947 - DNA, 547 bp, Homo sapiens
ctgtggcacatgaagaagctagtgcactgcgatggcccgttcacatacataccttgggtgggaggtgaagccaagaccccttgcctgaaggcgggacgctgtccgggaagccttccaaagcagtatttgatactgaaaaactggatgtccctgtatgattcgtcataaattaagcgaacacagcagggataaccactcttcaagtaccgaaggctgacggtgacggcccaygtcttcaccagagtctgccttccttccagctagtccgcctgaggatgaattggggacagagggttaggagagttgaggggtgcacaatgtcaatcaagcccttgctttccagccaaccatgcattcttgcccctggagagggacgaagggcaacagctccttccagaaagcttccccagcaagatccatactcaaaaaaggcactccctcatgagactgggcataaagaaagcaaacccggcaaggagaaggtcctttcaagtgccagaaaatagcatggcctaggaaaccaccaccttgtcttctgagctgatgt

SEQ ID NO: 651948 - DNA, 621 bp, Homo sapiens
agttctctgtgctctgctccattcatctgggctgggtctcaggatgtcccatcccccaagttcccctgtgtctggggttcctaggtttgggttcttgcccacctgcctctctgcctcaggaggacggagtggccgcatgaggagggggctttgattgggggtctggctgtgaccggtgctttgcttggttactgatcatgggaccgccagcctcagcctacttgtccttctgygcaggcatctcctgagcacccagtccctggcaattcagtctggtgaactggctgcagaggctgggctgaggcttctgtgcccccgtctgttttaatgacttcctctaaggaggttcaggctggctgcaggctggcttcctctgacatgaaggcgtgtccttctagcaggaggtcactggggggctgtgtcttcccggggtcttcattcccacatggggcccatccctcgaaacagttaatggaggcctgccaggtgctggtgctgggctggcgttggggccttcacacaggagggcgagcctgagaccctctgacgcactcctccttgcctcggcacagctccagccagggggactgagggaaggcttcccagaggcggtgaccctga

SEQ ID NO: 651949 - DNA, 539 bp, Homo sapiens
ttaaatataacttctgtttggaaaacataaattatwgcagaatatagaaagcttctgaccaatcaataataaggatcataagaactcattataactggagtcatagtaaagcttaggaaaaggatgaaaactaattccacaagaactagtaaaaaataaactgatctaaatataaaaaactatcaactaggccctcactttacatattttaaacatttttagtaatttgtagatgctatagtagatactatagaagctttgagttttagtatttttgtccatttttctctcagacttcaaattgtttaagattctgttatttcaattatgtctattttggctaattattctgagtttcaaaattttgtcttttctttaaatagattgctttatgctagtagatctcaacccagggtaattttgacccatcccccgggttgcctagagattttgcaatgtgtgaagatgtttttggatgttacagcatttggatgtagagaccagagatgttatggaacatcttccagtacacagaacag

SEQ ID NO: 651950 - DNA, 539 bp, Homo sapiens
ttaaatataacttctgtttggaaaacataaattatagcagaatatagaaagcttctgaccaatcaataataaggatcataagaactcattataactggagtcatagtaaagcttaggaaaaggatgaaaactaattccacaagaactagtaaaaaataaactgatctaaatataaaaaactatcaactaggccctcactttacatattttaaacatttttagtaatttgtagatgctatagtagatactatagaagctttgagttttagtatttttgtccatttttctctcagacttcaaattgtttaagattctgttatttcaattatgtctattttggctaattattctgagtttcaaaattttgtcttttctttaaatagattgctttatgctagtagatctcaacccagggtaattttgacccatcccccgggttgcctagagattttgcaatgtgtgaagaygtttttggatgttacagcatttggatgtagagaccagagatgttatggaacatcttccagtacacagaacag

SEQ ID NO: 651951 - DNA, 493 bp, Homo sapiens
aacttaactcttttcttacatcaattagcctatggtaaaattggtcttggtatatgtcattttctttaaagctgcagtttccaagaacctatctatgatgataaatgaggacttactgtataggtggttaaatatctctgaattaagacccttgcttgcattcttaccatttttcctcttttttcrtttttaagatggtcattgggttctaaataaagttgactgtccctcagaatagctttatataaatttttaacttttgatatgtcttctcacctgattttctttccatctctctccatttatatcaggcaaagtctcaagaagaaatagatggcatgttaaaaatagactatttcaaaaggggatttattacaaagggattatttatagaggtatcagtttaggggaaccacatatttgacacagcaacctagggtttaatgagtcaacatcagatgttaggccctctgggtccaaaggcgtgtggaag

SEQ ID NO: 651952 - DNA, 611 bp, Homo sapiens
tgcaatcacctgtgtcaaaagatggtgttaggtccagaaagagtattgaactgaacactacattttacaaggtcattagtaatctttgcatgatttgatgaaatagttgatgacagattcaatcaagaaaaagaagatgggacattattccatatataattgtgtgacctaatgtcttcacttaagaatactttataagcagtttctttgtgcttctatgttgtcagttttaataaaagaatagtagtcttatgtgtagatgtgtcatagtgcatgtaattaactccatatgtttagatatagatggtttccttcatttttttctgcttctaaaagcacacttaaaaacgtaaatgttgtaaaatacattttctatttatgtaattctatatttatttcattaggttaaatggctacaggaagacttcctggctcaaaaatacatgcaacatatgctatatcatagcatatgaaagcatgtgatgctatgatatttcacaaaagcaatacaaatagctaatgaaattaaatactatgtttatmtactatcaatccaataaatgcaaattaaacctgttgaggtttaatcagaattttgagagctattctaa

SEQ ID NO: 651953 - DNA, 564 bp, Homo sapiens
tggtgtttaactgatctcttgatgttagataaggaccatttataccagggattcaaatagagctttgattgagctggaaaattattttgaggttaagtagtcttgtcccttctattactcctgataattaccctaccatttatcattggatatgaatttttacattttgaggacagggtttgggggatgaatgtcagaatcataaaatgctccaacrtggagggttaggcttttatatttgttggtagttattggggattggtggggctgcaggggtgtttattaaagaaatggtttaaaacataatgtaaaccccttggacaatgtctgaaatatacaatctactcctatgagaacaaaagacaaaagaggagtaaataaaaactctccaaattctgcaaggcagatgggtttctgtcctctctgttactaaaagaatcaaatgggttaaagatggagtgtttggttcttataacaaaaacaaagataccaccacactagtgaagaaagagagaggaaaaatcatgtatggttggaagggtgcagggaataggagctgcatgt

SEQ ID NO: 651954 - DNA, 528 bp, Homo sapiens
tggtacaaaagattaatgcacctgaactgcacctgagggaactgttgagaagaccytgatgctgtttgtcactgttcccctagctatttcattgaccctcagccccttctggctagaggtccataattcagccatctcctagcagacctaggccctccaactcaccttgactttctgacactggtcttgctcaggtccctaattcagagtgcaattcttatttgtcaatcttgtggttatatcaatgttttaattataagaagacatttgtttttcatggaggcagagttttctccagctttctgtttctacatctcattggagtttgtagtcccagcctcttgcccatattctccaaaccctgttggcctggagatctattaatgctttcaacagtcacttggcatacacattgcctgaggatattattaatatgcaggtgtatcattcagtagctttggggtggggcccaggtaatgttgtgatgttaacctgcaaatcaaactttgagtagcaaggaattagact

SEQ ID NO: 651955 - DNA, 416 bp, Homo sapiens
aatgaagaaaatgaagttagtcttgcagttacaaaatatatagaaatagatatattagtttatagatatattaaaaagcacagaaataagaatatataagcacagaataartaagttaatatatatattagttaaataagcacagaaatatagaaaaaaatgtgataagacttgtattggaaaactagagtgtgctatgaaaaaaataatattaaataaaacaagaatgtgagaagacactcctgagtaagtgacattttaaggtctgatgaatgagtaaaagtaattcaggctaggaatagaaggaaaaattttcaaggcagagataattgcatttgcaaaatctgaggtaggaaatgtcttggtgtattccaggaactgaaagaaagttgatgtgtcttttagttatatatgca

SEQ ID NO: 651956 - DNA, 416 bp, Homo sapiens
aatgaagaaaatgaagttagtcttgcagttacaaaatatatagaaatagatatattagtttatagatatattaaaaagcacagaaataagaatatataagcacagaataagtaagttaatatatatattagttaaataagcacagaaatatagaaaaaaatgtgataagamttgtattggaaaactagagtgtgctatgaaaaaaataatattaaataaaacaagaatgtgagaagacactcctgagtaagtgacattttaaggtctgatgaatgagtaaaagtaattcaggctaggaatagaaggaaaaattttcaaggcagagataattgcatttgcaaaatctgaggtaggaaatgtcttggtgtattccaggaactgaaagaaagttgatgtgtcttttagttatatatgca

SEQ ID NO: 651957 - DNA, 601 bp, Homo sapiens
atggtactggtacaaaaacagacacatagaccaatggaacagaatagagagcacagaaacaaggctgtacacctacaactatctgatcrttgacaaagctgacaaaacgaagcaatggggaaagggtactctattcagtaaatgatactgggataactgcctagccaagtgcaatgattgaaactggacccctatttataccaaatacaaaaatcaactcaatatggattaaagacttatgtgtaaaccccaaaactataaaaatcctggaaagcaacctaggtaataccatcctagacatagacacaggcaatgatttcatgatgaagatgccaaaagcaattgcaacaaaagcaaaaattgacaaatggcatctaattaaagacattctgcactgcaaaagaaactgtcaacagagtaaacacacaacctacagaatgagaaactttttgcaaactgtgtattagtccacatttttgctgctgataaagatatacccaagactggacaatttataaaaagaaagaggtttaatggacttacagttccacatggctaggaaggctgcacaatcatggcagaaggtgaaaggcacttctca

SEQ ID NO: 651958 - DNA, 601 bp, Homo sapiens
atggtactggtacaaaaacagacacatagaccaatggaacagaatagagagcacagaaacaaggctgtacacctacaactatctgatcgttgacaaagctgacaaaacgaagcaatggggaaagggtactctattcagtaaatgatactgggataactgcctagccaagtgcaatgattgaaactggacccctatttataccaaatacaaaaatcaactcaatatggattaaagacttatgtgtaaaccccaaaactataaaaatcctggaaagcaacctaggtaatacyatcctagacatagacacaggcaatgatttcatgatgaagatgccaaaagcaattgcaacaaaagcaaaaattgacaaatggcatctaattaaagacattctgcactgcaaaagaaactgtcaacagagtaaacacacaacctacagaatgagaaactttttgcaaactgtgtattagtccacatttttgctgctgataaagatatacccaagactggacaatttataaaaagaaagaggtttaatggacttacagttccacatggctaggaaggctgcacaatcatggcagaaggtgaaaggcacttctca

SEQ ID NO: 651959 - DNA, 636 bp, Homo sapiens
gtggtacatatacagtatggaaaactgtgcagccataaaaagaatgagatcatgtccttcacagaaggacataaagctggaggccattatccctagcaaactaatgcaggaacagaaaaccaaacactgcatgttctcatttataagtgggagttaaatgatgagaacacatggacacatagagaggaacaacacacactggggccttttggagggagggtacaggatcaggaaaaataactaatgggtactaggcttaatacctgggtgaagaaataatctgtacaacaaactccctctgaacttaaaataaaaatgtggtgtayacacacacacacacacacacacacacacacacacacacaatgaaatactctttggccataaaaaagaatgaaatcctgttatttgtggcaacatgggtggaaatggaggtcgttacgttacagaaataagccaaccccacagaaaggcaaatattgcctgttctcactcgtatgcaacctctctagcatctgttattttttggctttttaataatagccattctgactggtgtgaaatggtatcgcattatagttttgatttgcatttctttaataatcagtgatgttgagcttttcctcatatgcttgt

SEQ ID NO: 651960 - DNA, 516 bp, Homo sapiens
ccccttaaatatataaaaatgtgtatcaattaacccacatgccaaccatataggaaaaaaaattaaaagaaaatctaaggacaatgttctaacttgttctctctctcttttttaacagaaagcttataatactgctactttgacttgctttttctaattttatctacaactaactttttaatagcttaataataattattgttacaattatcttttcacccrtctttttgtggaaagtaagaggtcaagaatatctctagaggaaaaggaaagatgaagggaattaccctgtaacagttaagcacagtctggacatagtccataaacattttccagattttaatttggatttattctctatgtctaggtgcattagtgttattttggaggattcaggattttaaaccttcttcatactttttataggaaatctcaattgattgaagggaaatgtcactctaagtgtacaggtatctatgttagtaactgaacatcatttttcaccatcatgctgga

SEQ ID NO: 651961 - DNA, 516 bp, Homo sapiens
ccccttaaatatataaaaatgtgtatcaattaacccacatgccaaccatataggaaaaaaaattaaaagaaaatctaaggacaatgttctaacttgttctctctctcttttttaacagaaagcttataatactgctactttgacttgctttttctaattttatctacaactaactttttaatagcttaataataattattgttacaattatcttttcacccatctttttgtggaaagtaagaggtcaagaatatctctagaggaaaaggaaagatgaagggaattaccctgtaacagttaagcacagtctggacatagtccataaacattttccagattttaatttggatttattctctatgtctaggtgcattagtgttattttggaggattcaggattttaaaccttcttcatactttttataggaaatctcaattgattgaagggaaatgtcmctctaagtgtacaggtatctatgttagtaactgaacatcatttttcaccatcatgctgga

SEQ ID NO: 651962 - DNA, 595 bp, Homo sapiens
ttttaggaggattttccataataaattgagaaatgttgatctctaaaatatacataaaagaggtaaacgatattcagagtaacaaacaaatacgtcatggagaactgattaaaaattgtattaattataaatccaaaataacatactcataattcaagtatcatcagtctttctaaattaccagaccactgaagtttgggtttccttttcaggagactctgagacatacatttccatcaagtatgcagattcaggcttcattttagcttgcttcattcacatttggactatggctttcttacatatgtttatttttccttagaattttaattgtcttactgacagaaaagtcatatgccttcctctttttatattaatcataatcattttaatcataaaatttatgtgatggcatcatttattgttgaacatattcttcataaagcctactgacttttggttcgaatttgtaccaacttaatttatgaatttacacctgtgtcartttcatttataaaccatgaatcatagtctaacctctgtctcttctccatgtaactcaaagaaaaggataattttctgttttgtctaaaac

SEQ ID NO: 651963 - DNA, 575 bp, Homo sapiens
ggctaaacatgaagacaaaggttttaaactagagtgactgagcaaatagaaaattagaaggagctagtttaggaggatctgttatgtcctctttctagatgctgcactcaaactattgagagctcaggttggcaaaaaaataaaaaataaataagccctccatttgacctggagggcagcaatccttccagcattcttctrtttctccattcacttatataagtgtttcatccacttatatactgtgaatagaaaactgtcttttacaaaattgttttcaagcactggtatagttcactgggtatacaagatgcaaattttacactctaatatataggaaaatgtttctaggggatttgcatgctttgtgtgtgtgtgtctgtgtgtgtgtgtgtgtgtgtgtgtgtgtgtttcttaatgcattgtagttgaatgtatcaaccccaaactctgttactaacagcacttgttcctaaggtgtattaactcagctgtagtagccttctccttgatgcctctttttattaccttgttccacctcagctaggtcaggacaggactacaaaaatacctta

SEQ ID NO: 651964 - DNA, 575 bp, Homo sapiens
ggctaaacatgaagacaaaggttttaaactagagtgactgagcaaatagaaaattagaaggagctagtttaggaggatctgttatgtcctctttctagatgctgcactcaaactattgagagctcaggttggcaaaaaaataaaaaataaataagccctccatttgacctggagggcagcaatccttccagcattcttctatttctccattcacttatataagtgtttcatccacttatatactgtgaatagaaaactgtcttttacaaaattgttttcaagcactggtatagttcactgggtatacaagrtgcaaattttacactctaatatataggaaaatgtttctaggggatttgcatgctttgtgtgtgtgtgtctgtgtgtgtgtgtgtgtgtgtgtgtgtgtgtttcttaatgcattgtagttgaatgtatcaaccccaaactctgttactaacagcacttgttcctaaggtgtattaactcagctgtagtagccttctccttgatgcctctttttattaccttgttccacctcagctaggtcaggacaggactacaaaaatacctta

SEQ ID NO: 651965 - DNA, 516 bp, Homo sapiens
gcaaattttacactctaatatataggaaaatgtttctaggggatttgcatgctttgtgtgtgtgtgtctgtgtgtgtgtgtgtgtgtgtgtgtgtgtgtttcttaatgcattgtagttgwatgtatcaaccccaaactctgttactaacagcacttgttcctaaggtgtattaactcagctgtagtagccttctccttgatgcctctttttattaccttgttccacctcagctaggtcaggacaggactacaaaaataccttaattgctacgatgatgggaactgaattaatctatagcagatgaacgaggataatgaaatcattttcttttctctcaatggtctatgcagcatcatctcttctgatacacttcagtgtctgacctttttaactgacaggatgttcactgctgaggctttttaaagacatctatctctccacagaaaaatggaagccagacatccaagaccgacttatatttgtctgtgaatcaagctgtcatttttgttctgcca

SEQ ID NO: 651966 - DNA, 575 bp, Homo sapiens
ggctaaacatgaagacaaaggttttaaactagagtgactgagcaaatagaaaattagaaggagctagtttaggaggatctgttatgtcctctttctagatgctgcactcaaactattgagagctcaggttggcaaaaaaataaaaaataaataagccctccatttgacctggagggcagcaatccttccagcattcttctatttctccattcacttatataagtgtttcatccacttatatactgtgaatagaaaactgtcttttacaaaattgttttcaagcactggtatagttcactgggtatacaagatgcaaattttacactctaatatataggaaaatgtttctaggggatttgcatgctttgtgtgtgtgtgtctgtgtgtgtgtgtgtgtgtgtgtgtgtgtgtttcttaatgcattgtagttgaatgtatcaaccccraactctgttactaacagcacttgttcctaaggtgtattaactcagctgtagtagccttctccttgatgcctctttttattaccttgttccacctcagctaggtcaggacaggactacaaaaatacctta

SEQ ID NO: 651967 - DNA, 516 bp, Homo sapiens
gcaaattttacactctaatatataggaaaatgtttctaggggatttgcatgctttgtgtgtgtgtgtctgtgtgtgtgtgtgtgtgtgtgtgtgtgtgtttcttaatgcattgtagttgaatgtatcaaccccaaactctgttactaacagcacttgttcctaaggtgtattaactcagctgtagtagccttctccttgatgcctctttttattaccttgttccacctcagctaggtcaggacaggactacaaaaataccttaattgctacgatgatgggaactgaattaatctatagcagatgaaygaggataatgaaatcattttcttttctctcaatggtctatgcagcatcatctcttctgatacacttcagtgtctgacctttttaactgacaggatgttcactgctgaggctttttaaagacatctatctctccacagaaaaatggaagccagacatccaagaccgacttatatttgtctgtgaatcaagctgtcatttttgttctgcca

SEQ ID NO: 651968 - DNA, 516 bp, Homo sapiens
gcaaattttacactctaatatataggaaaatgtttctaggggatttgcatgctttgtgtgtgtgtgtctgtgtgtgtgtgtgtgtgtgtgtgtgtgtgtttcttaatgcattgtagttgaatgtatcaaccccaaactctgttactaacagcacttgttcctaaggtgtattaactcagctgtagtagccttctccttgatgcctctttttattaccttgttccacctcagctaggtcaggacaggactacaaaaataccttaattgctacgatgatgggaactgaattaatctatagcagatgaacgaggataatgaaatcattttcttttctctcaatggtctatgcagcatcatctcttctgatacacttcagtgtctgacctttttaactgacaggatrttcactgctgaggctttttaaagacatctatctctccacagaaaaatggaagccagacatccaagaccgacttatatttgtctgtgaatcaagctgtcatttttgttctgcca

SEQ ID NO: 651969 - DNA, 649 bp, Homo sapiens
ttagctttaactacctggaggccattcatgatgatgagaagcaggaccacagtggttgtgcaggttataccttgtatgaagataaccagctaaatgggtaagtggtggtcatgtgctccctgcgtcctgctacagctattcagagagcacagctatttgtaattcatccatccagaggaggacaattttctaatttatacagasgcatagtatctgctgtctgaggccctatggacaatctttgatccaagtttccagaccaaatcttgtttggagtaagttcaaaaaagggcaggggaggaattgaagacactaagtagggacaattctaatcaataaagaatcgtagccaataaacagtacgcgaaaaatgagttggtaaatgaaaaggatgtggaataaaggacattttattattatcattgtgaaaataggaaatttaataatatatttgaatactggtgggaaagattcagtgcagaagggtgctgtgtacttgcttcctacagatgtttcttgacttatgatggggttacatcttgataaacacaatgtaaattgaaaatatcttaagtcaaaaatgtatgcaatacacctcacctgccaaacatgatagcttagcctggcctaatttaaatgtgctcagtac

SEQ ID NO: 651970 - DNA, 649 bp, Homo sapiens
ttagctttaactacctggaggccattcatgatgatgagaagcaggaccacagtggttgtgcaggttataccttgtatgaagataaccagctaaatgggtaagtggtggtcatgtgctccctgcgtcctgctacagctattcagagagcacagctatttgtaattcatccatccagaggaggacaattttctaatttatacagaggcatagtatctgctgtctgaggccctatggacaatctttgatccaagtttccagaccaaatcttgtttggagtaagttcaaaaaagggcrggggaggaattgaagacactaagtagggacaattctaatcaataaagaatcgtagccaataaacagtacgcgaaaaatgagttggtaaatgaaaaggatgtggaataaaggacattttattattatcattgtgaaaataggaaatttaataatatatttgaatactggtgggaaagattcagtgcagaagggtgctgtgtacttgcttcctacagatgtttcttgacttatgatggggttacatcttgataaacacaatgtaaattgaaaatatcttaagtcaaaaatgtatgcaatacacctcacctgccaaacatgatagcttagcctggcctaatttaaatgtgctcagtac

SEQ ID NO: 651971 - DNA, 649 bp, Homo sapiens
ttagctttaactacctggaggccattcatgatgatgagaagcaggaccacagtggttgtgcaggttataccttgtatgaagataaccagctaaatgggtaagtggtggtcatgtgctccctgcgtcctgctacagctattcagagagcacagctatttgtaattcatccatccagaggaggacaattttctaatttatacagaggcatagtatctgctgtctgaggccctatggacaatctttgatccaagtttccagaccaaatcttgtttggagtaagttcaaaaaagggcaggggaggaattgaagacactaagtagggacaattctaatcaataaagaatmgtagccaataaacagtacgcgaaaaatgagttggtaaatgaaaaggatgtggaataaaggacattttattattatcattgtgaaaataggaaatttaataatatatttgaatactggtgggaaagattcagtgcagaagggtgctgtgtacttgcttcctacagatgtttcttgacttatgatggggttacatcttgataaacacaatgtaaattgaaaatatcttaagtcaaaaatgtatgcaatacacctcacctgccaaacatgatagcttagcctggcctaatttaaatgtgctcagtac

SEQ ID NO: 651972 - DNA, 338 bp, Homo sapiens
tacatttcaaagccacttgattgtgtgagatgtatttacatttattttcattcaataaatttaaatttaaaatatttttaaaatgctgatgttttagtgattataaataataatgttcattatagaaaatgtagaaaagtagtaaagcagtttagctgtaatcttttttttttttttttttttttgagacagagtctcgctcaatcgcccaggctggagtgcagtggcgcgatctcggctcactgcaagctccgcctcccgggttcacgccattctcctgcctcagcctccggagtagctgggaccacaggcrcccaccaccacgcccggctaaattt

SEQ ID NO: 651973 - DNA, 617 bp, Homo sapiens
ttactattaccatcatttgttacactggctttaaaaaacaaaacaaaaaattcctatattcagtgtgtctcttcagaacctattttatttttaacattcagttatggctctttgctgatcttttgtactgctgctgtgttggcattagctttgctatttatgatttctgcatttccattatgatgcttacatgttctgtatttcactgcaaaaaaatatatatttgacctgttctaaaaaccctgctcatttaaatccaaatctttctgtggctgtttttgcatgtgtcttccaaatcttggtgaccaaatccagacccaggaagggaagagtttccacctcattttagtctattaaagcggagtgttcagcatgccttctcaggtctccaaaagggcagcaatcaattttggggaaatactaaaccatttttcacttttatgaaccactgaaatctatttgcatattaggtgaaatcactggagtacattcctgccccattttgtgtatgtcttcagattgtccagctgygatcatgtgtacgttggggaatacatatactcctctgcctaaagcaaaagaccaatgtctttattaagcataaagatcagggttca

SEQ ID NO: 651974 - DNA, 356 bp, Homo sapiens
agggttcaaagctcagctccactacttactaacttggacttctgttgtagagagaaaacgttcatgtttctgcattgctttgacttcacatggagccctttcttcttttactgcaggctcccgcattgcagtctttctacctgggaccactgtctacacattgamtccctctctgctagagggtaatgatgggatgatatggtaagttctactctttcctgccattgcttgtcacacctaaaaaccaatatatattcttattaatttcaagtacttttttgtgcacagatatgtttgtactaggccagtggttttcaaccaggttgatttttgctcacaaggagacattggcaatt

SEQ ID NO: 651975 - DNA, 618 bp, Homo sapiens
ttcatttctgttttcttttggaataattgagtattttaaaatataattttatctgctttgttgagttattaactatgacaatattttttattttgttatcrtagtgattgctttagggttcctggtatacatctttaacttaacacagcttaccttcaagtggtgttatacaatttcatgtacagtatacgatctttacactagcacactttcattttccttctcccagccactgtgctactgttctcatttattttacttttatgtaggttatacatacaatactacattgtgactattatctaaacagggaattatcttttaaagatctatctatctatctatctatcatctatcatctatctgtctatatttatttatttatttatttattcttcccaacttttattttaggttcagggggtatatgtgcaagtttcttacctgggtaaattacatgttgtgggggtttggtatacagattattttatcactcaggtaacaagcgtaatagccaataggtagttttttaatcctcacccttctcccaccctccaccctcaaataggccccagtggctattgttgccatttttgtgtctgtgtgtatttaatgttt

SEQ ID NO: 651976 - DNA, 618 bp, Homo sapiens
ttcatttctgttttcttttggaataattgagtattttaaaatataattttatctgctttgttgagttattaactatgacaatattttttattttgttatcgtagtgattgctttagggttcctggtatacatctttaacttaacacagcttacyttcaagtggtgttatacaatttcatgtacagtatacgatctttacactagcacactttcattttccttctcccagccactgtgctactgttctcatttattttacttttatgtaggttatacatacaatactacattgtgactattatctaaacagggaattatcttttaaagatctatctatctatctatctatcatctatcatctatctgtctatatttatttatttatttatttattcttcccaacttttattttaggttcagggggtatatgtgcaagtttcttacctgggtaaattacatgttgtgggggtttggtatacagattattttatcactcaggtaacaagcgtaatagccaataggtagttttttaatcctcacccttctcccaccctccaccctcaaataggccccagtggctattgttgccatttttgtgtctgtgtgtatttaatgttt

SEQ ID NO: 651977 - DNA, 618 bp, Homo sapiens
ttcatttctgttttcttttggaataattgagtattttaaaatataattttatctgctttgttgagttattaactatgacaatattttttattttgttatcgtagtgattgctttagggttcctggtatacatctttaacttaacacagcttaccttcaagtggtgttatacaatttcatgtacagtatacgatctttacactagcacactttcattttccttctcccagccactgtgctactgttctcatttattttacttttatgtaggttatacatacaatactacattgtgactattatctaaacagggaattatcttttaaagatctatctatctatctatctatcatctatcatctatctgtctatatttatttatttatttatttattcttcccaacttttattttaggttcagggggtatatgtgcaagtttcttacctgggtaaattacatgttgtgggggtttggtatacagattattttatcactcaggtaacaagcgtaatagccaataggtagttttttaatcctcacccttctcccaccctccaccytcaaataggccccagtggctattgttgccatttttgtgtctgtgtgtatttaatgttt

SEQ ID NO: 651978 - DNA, 270 bp, Homo sapiens
tctctaaccctttactttgagcatatgacccatctcacatgcatgccacccataggaggcatgtttgtatagcatacarttgggttttgcttctttattcagcttgccaccctgtattttaagtggggtgtatgtccaaggttaatattgatatttgtggatttgatcctgttatcatgttttaccaggttgctatgcaggcatgattgtgtagttgcttcatagtgtcaatggtctatgtacttaagagtttttgtggtggctggtaat

SEQ ID NO: 651979 - DNA, 531 bp, Homo sapiens
tttaaaccccataaaattctgtaaccaggactcttgagccgcttactggagcccactcccactctgtggagtgtacttgcatttcaataaatctctgctgtcattacttcatttattccttgctttgtgtgttttgtccaattctttgttcaaaacaccaagaacctggatgacttgtagtccaaggccctccactgrtaacagtttgatggtggtatagttgggttctgtcaactggctttgtttctggataatttcagggggccaatgctcagttcaccacttccaagctgcatgttctaaccctgggtgactgataccaggcccacggctttgttctctggccacttggggttaagtgcctgctgtgctggaggtcttttcaacctgctgaggtcttcccaaccttctggcaatcccaatctgatggaggatgctgtaaaaagcacttatttggggcagtgtcagctgggtccacacacatgagtgtgcattaggacagcaaggactgaacatgtacatgcatgccag

SEQ ID NO: 651980 - DNA, 635 bp, Homo sapiens
tggatacatgtcagaactgttggagattctcagaagtattggggtaaggaagctttgtaaaagatccaaacctccttcagcagctaggggcactgaaatttgaattcagacattaatggcagtacatctatattcacygtaaagtcccccagcaagcctaatggcaatgctcaagtattgagctatatagtttaattatataatgagatgctttaataagttagataaatcttgattgaggccggttttgtacaagtcattgtgatagatctcataaataattaatgagttaattcatggtcccatctgaaacaagtgttcataattttgtagaagggagtagatgagtgtaaaatatccatagtataaggtagaatacaaaatgaaatcaatgtatttgttttccaaggactaactatgtgcaggcatttaattacatccttaggatttggtttcaacaaggcaggtgatgcgggaagttcaaagtcttgaggaggaagctgtttaatctatttcttgattcaaaattgctttggggaggaggtaggatctgagccaggacttgaatggtagatagtattttgaatagcacagatgaggaaatgagagcatttcagggagaggaagtcatgaga

SEQ ID NO: 651981 - DNA, 585 bp, Homo sapiens
agcctaatggcaatgctcaagtattgagctatatagtttaattatataatgagatgctttaataagttagataaatcttgattgaggccggttttgtacaagtcattgtgatagatctcataaataattaatgagttaattcatggtcccatctgaaacaagtgttcataattttgtagaagggagtagatgagtgtaaaatatccatagtataaggtagaatacaaaatgaaatcaatgtatttgttttccaaggactaactatgtgcaggcatttaattacatccttaggatttggtttcaacaaggcaggtgatgcgggaagttcaaagtcttgaggaggaagctgtttaatctatttcttgattcaaaattgctttggggaggaggtaggatctgagccaggacttgaatggtagwtagtattttgaatagcacagatgaggaaatgagagcatttcagggagaggaagtcatgagagcatgaagtggaaaagtgtagacattttgcaggttgaatagattactgggttatacataggggagttgtcaaaggcaaggctaaaaaggtaggttgagggacac

SEQ ID NO: 651982 - DNA, 300 bp, Homo sapiens
gtaatatggaaatacaagcagaaggtaaaaagagtctgggccaggcatggtggctgatgcctgtaatcccagcactttgggatgccaaggcggtgtgactaacctggccaatgtggtgaaaccccatttctactaaaaatacaaaaattagccagggctggtggcacacacctgcaatccyagctgctcaggaggccgaggcaggagaatagcttgagtctgggaggcagaagttgcagtgagctgagattgcaccattgcactccagcctaggtgactgtgttagactcaataaataaa

SEQ ID NO: 651983 - DNA, 613 bp, Homo sapiens
gacacaaaattgcaatttcagtaggccaaaaattattgaacatttgaaattttgtatggttcaacctaatactacagtggttttccaatgaagacacgcacaggagatccttcaggcaagtaaacgtttttggttatcaaacctcacttgggtcgtctatgctgaaaaactgagctgaactacttgtagattctaagaacttgtttttcatgagagaacaaagcactgccctagcttaagtgtgtctttaactggctccattttttgctgtccattacacactgtcctatatttcaagacatcatgcttcttgtcttgagctctcaggtggtcagggttctagtggtatgtgtggcaaatgagggatccatacaggttgagtgtagtgtagactggacctggacgascatcactccagctggaccatctctgggaaaattattgtttggaaagaaagggaaatcttctccagatataatagaaagaactaccagcctaacacctaagtgcatgtgggggctgggtgatctgctctgttgacttagttggcttagatcccagacaacttctgaatgctcagacaatgacattcagggagctgcaatgcttccta

SEQ ID NO: 651984 - DNA, 571 bp, Homo sapiens
ttacagtacttaaaaaaattgctgggtattttttactgcaaaactgacaaaatacaagccattttgtaagtactcattctctaaagaaatgtatgggcctggggatttggactacaagggctgacagacaatttttttccatctaccaccctraatttaaatatacctaccatgatgtgtttccttagatggaggagagaaaaagtggcattttatttctggccaattatctgaaagaaaaggcaggatttctacagaggaaaataatgtctgctttgtacattacgaagaatggagatttaagcagtttagctatactgcttgttgtcttggggcaaaggaaagtagatagctaaagttttgttggaaaggaaggtggcccttatatttttctattccttctctgactcactcattcctctaaaatgcacacatacatgctaccaggccacttgtatgtttctctcagccaggtgggaggattcagtgcctgttatggagtaaatatttgtgtcttccctaaatttcatatgttgaaatttcatatggggatgtagatttcaacatcccc

SEQ ID NO: 651985 - DNA, 604 bp, Homo sapiens
actgacaaaatacaagccattttgtaagtactcattctctaaagaaatgtatgggcctggggatttggactacaagggctgacagacaatttttttccatctaccaccctgaatttaaatatacctaccatgatgtgtttccttagatggaggagagaaaaagtggcattttatttctggccaattatctgaaagaaaaggcaggatttctacagaggaaaataatgtctgctttgtacattacgaagaatggagatttaagcagtttagctatactgcttgttgtcttggggcaaaggaaagtagatagctaaagttttgttggaaaggaaggtggcccttatatttttctattccttctctgactcaytcattcctctaaaatgcacacatacatgctaccaggccacttgtatgtttctctcagccaggtgggaggattcagtgcctgttatggagtaaatatttgtgtcttccctaaatttcatatgttgaaatttcatatggggatgtagatttcaacatccccaatttgatagtattgtgaggagagacctttgagaggtaattaagctatcagggtggagacctcacaaatgggatt

SEQ ID NO: 651986 - DNA, 586 bp, Homo sapiens
ctcataagaaaactttattttttttttgagatagggtctcactctgccacttaggctgaaatgcagtggtgcacacacgggctcaggtaattctcccaactcagcctctggagtagctgggaaagcaggtacatgccaccatattttgtattttttgtagagatagggtttcaccattttgcccaggctggtctcaaactcctgaactcaagcgatctgyctgggattacaagcatgaactcctgtacccagcagtttttttttctttttaatacaagcaagtggctttttttttttttttctaacattcacatattctcatgggaagctgaattccaagtatttaacaattatcttctgagtttacaaatggaccttcctgaaaatcaactaaataatcctttagaagccaaaaaaaggagagggtagcaaaatgtaactttttgttgtaaaaagtagcttctgccaaattaaatgaatctgcacaactggaggtatgaccctacttaggggagatatattagattcattcagcttgtgtcacagccatcaagcaatagcaacctggcaacatctctgctggtgc

SEQ ID NO: 651987 - DNA, 586 bp, Homo sapiens
ctcataagaaaactttattttttttttgagatagggtctcactctgccacttaggctgaaatgcagtggtgcacacacgggctcaggtaattctcccaactcagcctctggagtagctgggaaagcaggtacatgccaccatattttgtattttttgtagagatagggtttcaccattttgcccaggctggtctcaaactcctgaactcaagcgatctgtctgggattacaagcatgaactcctgtacccagcagttttttyttctttttaatacaagcaagtggctttttttttttttttctaacattcacatattctcatgggaagctgaattccaagtatttaacaattatcttctgagtttacaaatggaccttcctgaaaatcaactaaataatcctttagaagccaaaaaaaggagagggtagcaaaatgtaactttttgttgtaaaaagtagcttctgccaaattaaatgaatctgcacaactggaggtatgaccctacttaggggagatatattagattcattcagcttgtgtcacagccatcaagcaatagcaacctggcaacatctctgctggtgc

SEQ ID NO: 651988 - DNA, 585 bp, Homo sapiens
ggcataaccccttctactgttcattttctttcttgcatcctaggttgtgaatctttatgagaaggaatactgtttcagtcatctgcacaatcacctcaacctttcttaaaacttgactcatatytggtgatcaatatgcaagttttgaataagcatacacataaataatatagaacaggtgattaacagcctgggtaatatactatgtattcttaaaatatgctgattttcttaattatacaataatatatttctagatatctttatactaacggccatttgaaaaaaaaattaatcttttccaaaatgatttgcatatacttggatcaggttcttgccttatagggttgttggaagttaaaaagctccactcctgtgagctaatatcaaatattggagatgggtatgtacttattattttttagtctgtagctaaagagtaggacattatgtaagtctcaatggtctgtcagtgaataattattgaacacttagtgtataacctaaatttcccaatttataaagaatgtcagagccatgacacaattgacttaaactctttttttttttttttgatacagatac

SEQ ID NO: 651989 - DNA, 585 bp, Homo sapiens
ggcataaccccttctactgttcattttctttcttgcatcctaggttgtgaatctttatgagaaggaatactgtttcagtcatctgcacaatcacctcaacctttcttaaaacttgactcatatttggtgatcaatatgcaagttttgaataarcatacacataaataatatagaacaggtgattaacagcctgggtaatatactatgtattcttaaaatatgctgattttcttaattatacaataatatatttctagatatctttatactaacggccatttgaaaaaaaaattaatcttttccaaaatgatttgcatatacttggatcaggttcttgccttatagggttgttggaagttaaaaagctccactcctgtgagctaatatcaaatattggagatgggtatgtacttattattttttagtctgtagctaaagagtaggacattatgtaagtctcaatggtctgtcagtgaataattattgaacacttagtgtataacctaaatttcccaatttataaagaatgtcagagccatgacacaattgacttaaactctttttttttttttttgatacagatac

SEQ ID NO: 651990 - DNA, 577 bp, Homo sapiens
tactacatgcagttgttatttccactgtatcatactcctctcacattatttacaatcaagctggggaaaatatagaaagaagtaaaatgcattaatttattgagaactaccaggaactttatgtgcaygttctcattctgtcttcaaaatagccatggaaggttggaattattaatccattttacagatacaaaaaaaaatgaggttcagaaagagtaacttgttaagggttgcaaaattattaagtggtagagtcaaattttgcactgagatttgtctgattcccaagtccaaatatgcttaatatggaaagaaagtgccaagaaggctaaggaagcatgacagtctttagactaattgagaatggcattatatccaatgagtctgatctggtatatggaagggactgaacactaggagttttctgggaagaggttgaaataagcttcatcccagaagatgggtggattgaagcagaactcctgttactagctagtggaaaaggaacagtgtctagtcttctctaaaaagggacttgttaagcaaggtcttacagattttctgtgcactaatgaaa

SEQ ID NO: 651991 - DNA, 577 bp, Homo sapiens
tactacatgcagttgttatttccactgtatcatactcctctcacattatttacaatcaagctggggaaaatatagaaagaagtaaaatgcattaatttattgagaactaccaggaactttatgtgcatgttctcattctgtcttcaaaatagccatggaaggttggaattattaatccattttacagatacaaaaaaaaatgaggttcagaaagagtaacttgttaagggttgcaaaattattaagtggtagagtcaaattttgcactgagatttgtctgattcccaagtccaaatatgcttaatatggaaagaaagtgccaagaaggctaaggaagcatgacagtctttagactaattgagaatggcattatatccaatgagtctgatctggtatatggaagggactgaacactaggagttttctgggaagaggttgaaataagcttcatcccagaagatgggtggattgaagcagaactcctgttactagctagtggaaaaggaacagtgtctagtcttctctaaaaagggacttgttaagcaaggtcttamagattttctgtgcactaatgaaa

SEQ ID NO: 651992 - DNA, 515 bp, Homo sapiens
cctgggaggtgaatctttctcaattatttataaactggatacagctgtgaagtgcacagtgcagtaatcccaatcatttatatgggattttttttcccacaggttatgcatatgatgaaataayattcataactgatcaaagctccagagacagccacatatcacaatacatgaaacatatttacttgtcagatggaagagaaaatccacccttactccatcagggtattggccttctgttttctctccaggattctctcagcaaaaacctgcttgccagcttggtattcatgagttcaaaattcctctgtgtgtctgaggtattgattgtttttcaaattgtttctcaggtttttctctctatcctcattctccttgacctttatgttaattctgaggacacttatcaaatgcttctaccaactcttccaaacaggcctttgctctcttgctctggtcaggtttctctttgtttctgctatagagtgggatatttcctttcattacatcgaata

SEQ ID NO: 651993 - DNA, 627 bp, Homo sapiens
ttttgtcattgcatttctaagattttgctaagctgttatgttatgcattccttatagcattttatagtcttttattttacaacgactctgaaggaatatttcatcattcatataattttagtatccaaattatattttcatccctttgtttgccatgaaacatactcctgcctatctttcaattgcatcatgttctctttctttctcctcatttaaatacccttaaaacaaacatagatcacttttctgaatcaytatatttttttctgtatgaaagcccattttgtaaagtatttatttaagaacgccattcagtttgcattctcttgcttttttcttttgtcacattttcagcactaatcaaggattaaagaagattaaaaagaaaactaataaatgagagaatgtggtggtactggtgttagcttatccatttgttggtgatttgcttgtattttatgtaattagtttgattccacacaatatcatttagtctatagtatggcacagtgctaatggctagattacaaaaataagtgaaccatggtccatctttttcttgtctatcaagtttgttgccactttttggctgtcatatcacaccgaattttttgtctttttacgtgg

SEQ ID NO: 651994 - DNA, 478 bp, Homo sapiens
ctgctctggtccggtctgtggcctgctaagaactgggccacacagcaggaggtgagctgtggggccagctagcattaccacctgagctccgcctcctgtcagatcagcagtggcgttagaatctcataggacggaaaccctatcatgaactgagcacgcgaaggatctaggttgcacactccttatgagaatccaactaatgcctgatgttctgaggtagaacagtttcatcccraaaccatccccccaccctgtaccatgttgtcttctgctgtaatagagcatttggaaattatattcttcaggacactggacatgttagtatattaaattcaacattggttaaagcagcagcagtaataataatagttatatgaaatttactgtgagccagagatggttaaaactacatgcttttcatgtatcagctgaattagttcacaataaatatatgaggaaaagatggcacaaagattaa

SEQ ID NO: 651995 - DNA, 324 bp, Homo sapiens
tgctccactgcctcacactgactagtcctccctccctccctccctcccttccttccttctttctttttcttccttttctttcttyttcttccttttctttctttttttttttttcacccgtgctggaatgcagtggtgcagtcttggctcagtgcagcctctgcctcccaggttgaagtaattcacctgcctcagcctcctgagcagctgggattacaggtgcatgccaccatgcccagccagttttttttgtatttgtagtagaaacggggtttcaccatgtaggccaggctgatattgaaccggggcctcaagtgatccgcc

SEQ ID NO: 651996 - DNA, 477 bp, Homo sapiens
aggctgatattgaaccggggcctcaagtgatccgcccacctcagccctgcaaagtgctgggattacagrtttgagccacctggcccggcctagtcctccttctatgaggacgggagaggagtactagctctctgatgaggtacatgtacaaaactttggtggggagcatgggggttgtttttggagtgtcataccaaccatttctgaattgtctttttctattctttctcaatttctacctctccactatattcatagcctctggctgcttgagtccccatcaactggaggctcaagtccagctactttcacattcactacactctttgcttttgcagagagggagtccaattatctgtaccttgtcttccaactccatgtcttttctccctctcttcaaataggcacagagaagggaagtgggcatgggataataagcaactctaacacacaagcagaggtccaactgagaggtga

SEQ ID NO: 651997 - DNA, 542 bp, Homo sapiens
taagtaaagggctacgttataaatttaattttggtttatcatgatgaatcagtttatttagctaacctctggatgttgaaccctaagtttaatttttatattttttgctattagaaaaaatagttatgaataactcagtatttccaactgtatacttttctaattgtttgcttgtgaattttaatttttwaaaaaaaatgattactgggtcaaaaaacgtttggtacttaattgctaagttgccctctagaaagagcatgctaacttaccattccaatagaattgtactagagtatccattcctacatttccatcccaaacttttataattatttgccaatcagagctatatggtgatatttgatggaagtttggtttgattttttaatacaattgaaaatgaatatttttgcattggatgattacattagtcttttcccagtcctttcccttcttccacttcctttggctttcattcttcctttggtgtgattgtgccagggtatgtgtgcatgtgggtgtgtgcgtgagattcagtgaaa

SEQ ID NO: 651998 - DNA, 542 bp, Homo sapiens
taagtaaagggctacgttataaatttaattttggtttatcatgatgaatcagtttatttagctaacctctggatgttgaaccctaagtttaatttttatattttttgctattagaaaaaatagttatgaataactcagtatttccaactgtatacttttctaattgtttgcttgtgaattttaatttttawaaaaaaatgattactgggtcaaaaaacgtttggtacttaattgctaagttgccctctagaaagagcatgctaacttaccattccaatagaattgtactagagtatccattcctacatttccatcccaaacttttataattatttgccaatcagagctatatggtgatatttgatggaagtttggtttgattttttaatacaattgaaaatgaatatttttgcattggatgattacattagtcttttcccagtcctttcccttcttccacttcctttggctttcattcttcctttggtgtgattgtgccagggtatgtgtgcatgtgggtgtgtgcgtgagattcagtgaaa

SEQ ID NO: 651999 - DNA, 507 bp, Homo sapiens
gatgcaagttcagttacattttacctgtacatatttcagtattcatctcagaaaagaaaaaaaaatgacactttctgtaaactgatgccataatctcacatgttraagttaacagtaattatttggtgccaaaactctgtccttgtcattgcctcaattttgtttcaagtgaaaattgtttaatttgggacccaaccaaattctgccttacatttagtcataacatattttaagtcttcttttgtctggagagtaatctcttctttattgacgaagctgcatcagttgtcttataaactatttttgtgtctttgcttccttatggtatcgtttattgttctgttttcagtattaatctatagtgctaaatgtttgattagatttaggttcaactacttttaggtacatcataattggttctgtgtgttttttattacatcacatcaagaagcatataatgtttggttttcatactcgtcatgctaatgttgatcattgaaatcagtt

SEQ ID NO: 652000 - DNA, 517 bp, Homo sapiens
ccttatcctagatttaaaaayagagtctctctttgggaggcccaggtgggaggatggcttgagcccaggagtctgaggttataataagctatgatcacacctctgcactccagcctggatgacaaaattaattaaaataacaataaagagtctctcattggatacactatgaatgcttatagatctagttccagctctattcaggtgaaatgcagtggggaaagcagaaagaagtgtaattatcatgagggcatattacatgcttagaactagtaatctgaaaggtactttgcttctttttaaactcccctggaagcagcgtctcatggaaagaaaaaatgaaaccttagattatagaaattagagggagatacctggttagagattgtgggataaatcaacactcatcttccttgaagtttaagtagtatttctggggtgtctaggtgtttttctcaatcaacatttaatgtttaacccatttctataccaaactggaagatgcttacaaagactc

SEQ ID NO: 652001 - DNA, 517 bp, Homo sapiens
ccttatcctagatttaaaaacagagtctctctttgggaggcccaggtgggaggatggcttgagcccaggagtctgaggttataataagctatgatcacacctctgcactccagcctggatgacaaaattaattaaaataacaataaagagtctctcmttggatacactatgaatgcttatagatctagttccagctctattcaggtgaaatgcagtggggaaagcagaaagaagtgtaattatcatgagggcatattacatgcttagaactagtaatctgaaaggtactttgcttctttttaaactcccctggaagcagcgtctcatggaaagaaaaaatgaaaccttagattatagaaattagagggagatacctggttagagattgtgggataaatcaacactcatcttccttgaagtttaagtagtatttctggggtgtctaggtgtttttctcaatcaacatttaatgtttaacccatttctataccaaactggaagatgcttacaaagactc

SEQ ID NO: 652002 - DNA, 618 bp, Homo sapiens
aaattatccttgtttgctgatgatatgatcttacatttgaaaaaacctaaagactctaccaaaaaattattagaacygataaacaaattcagtaaaagtgcataaaatcaacatatgaaaatcagtaacatttctgcatgccggcagtgaaaaatctgaaaaagagaaggaaaagatgtctacaatgaaaactatagatcattgatgaaataattgtaggaagacacagaaaaatggaaagatattccacgttcatgggttggaagaatcaatattgttaaaatgtccatactacccaaagcaatctgcagatgcaatgcagtccttatcaaaatgccaaataaccgtcttcccagtaatataaaaacaatcctaaaatttatatgaaaccaaaaaagacagataatggccaaagctttcctgagcaaaaagaacaaaactggagaaacaaatcacctaacttcaaattatactagaaatctatggtaaccaaaacagcacagtattgccataaaaataagcacctagaccaataaaatagaatagagaaccaagaaacaaatccatacatctattgtgaactcattttcaacaagggtgccaagaatatacattgag

SEQ ID NO: 652003 - DNA, 559 bp, Homo sapiens
gatttataatcctttgggtatatacccagttatgggattgctgggtcaaatggtatttctggttcaagatccttgaggaatcgccacactgtcttccacaatggttgaactagtttacagtctcaccaacagtgtaaaagcgttcctatttctccacatsctctccagcatctgttgtttcctgactttttaatgatcaccaatacttaaaaatggattttgtgctggaaatattttcaaattcagctttggttatactgaagcaggcatacttttctatattatatgcaagtgataattacttgcatataatactatatattataattaactctgagaagttctttgtaagatacaaatggcattaatattagtattagtattgctttccaatgaatgactactgctccagtttatttgtgtattcatatatagctctcaaactacagaaagaagaattcagtgacagaacaaatctttgtaaagagaatctaaatttggggacaaaaacaatgtttatctacatggaaaatttctgaaatgtatattattataaaag

SEQ ID NO: 652004 - DNA, 601 bp, Homo sapiens
cttgtcctttaaaagtgtgtggtgcctctcccatctctctctcttttgcttctgcttttgccatgtgatgtgcctgctccctctttgcattccgccatgattgtaagcttccagaggcctctccagaagcagatgccagtgttatgctttctgtacagcttatagaaccatgaaccaattaaatctcttttcttataaattacccagtctcagagaacagactaatacatcaaagatagataaaacagaacttgagatctttcagcttctcttcactggtcaaaagggaaagaggttggataagcaagtatggggagggggtggtatctattgaggatgggagaccaggtcttccaaacytcaaatacttgctatttgtgtgggtttatatgcatgttgtgggagaaggggccataatgatagatgatcacatcatacaaacaaggataattttgattgtcagaggggatgctaaccagtcataagactgagaaacaacagatataacttgggatagtccttggcaaattggaacatatggtcattctagggagtagaaagtagggtccagcaagaaagccctgttggtttgtaagggttg

SEQ ID NO: 652005 - DNA, 487 bp, Homo sapiens
ccctctgttttaggcactttctgatggtaagtgcttcccaaatttaggttgaaaatatgagcatctaactgtccattgacatcgttataatatcaaaatcttgatgaggctatcaatgccttggtgaaaattgwtatagtgaggacactcccccgccaatcctccatttagctcatgatgacaaaatgagccttaagtttgtaagtttggcactttcagggatacaatgactgtatattgtactcctctgttgtgttccgcaaaaagtaaagtgtgaactaatcctctggtagtctagtagcactttagtagctactggataaaatgactttctaagttaatgtactttcttattaacaaatgtcagaaattaagatatggagagagctcgaggttggaattttcctctcataggaacacatctcttagctcttatgggtttaacaaacttttaatattttaatgaaggctttttatgtgcgtatac

SEQ ID NO: 652006 - DNA, 671 bp, Homo sapiens
gcttatattgggttatcacctattaacaccttactgtaaagtttatcacatcctttacacatgataactggctgtcaatgttttgttaatgaagacgttgttcaggaatcaaaagcaacaactaaagctttgaaatgtgggccagttatctatttctgtgtaacaaactactgcacaagtcaggtctccaaagctataatcattttattatgctcatggtatgactcaattactggaggcaatttgaaggggtgaaggctgaaacagtttgggctggaggacaccctttaaaaatgatctctttattcacatctctagcaggtagagtggatggcaaaagaatggacatagttaggaatgttgatgggggaatctacatgactccaccccaagtcagcagttttacactgttgtttagggctccaagagcaagtgtaccagtaaggaaggtgaaagcctggatagatatttttatgacctagttgtggaagccacatagtatattctagcggtaaaagcagttataaacttgcccagattaaaggagaggtgctgtggacctcatatcacaatgggaagagtgtcaaagcatttgtgtttttaaaytctgtcagtgtgggatagactggagaaagacaacagtggtccaggtgaaagcccgatgagcagtg

SEQ ID NO: 652007 - DNA, 581 bp, Homo sapiens
gacattcatcgtatgctttctcagctagtatctctggttgttatttttcatttagaagtaagtgaaaaggaaaaagaatatcaaaaagacaaaatctgtttcttaaaattctgttgtcatttttgttaaataatgtcgtggggtattttttccccagctttttttgtagaaagccgggatctagtgtcttcttgacaaccagcggtaataacaagaagatgaacatttcggggagaaaaaaaggagaatatttagatcatagtgattaaaaaaattataactcaggatatcttgcctaaagattttacattgctataagcgaaaactgggcaaaatactttttctttgttgagcttgaaactttcttttcaccttrcctttccatttcttttccactataaacacaaggttataaatcttatagtaaggcaaaataaattggcatagctatttaaagagaatgagtgatgaatgggacaaaggaattgatttaattagaatgaatccttcaacctagtcaagattccttttattgcttgaatgagtttggatgtccattggcagtctgctgaactaggcag

SEQ ID NO: 652008 - DNA, 617 bp, Homo sapiens
aacataaggagcttgagactgaaagctaccttaaaaattataaatcaacaaaattctgaatactcattactatgttctggattactcttattataaatttgcaaaataattttgtcttcagtttttgaattctgtatggcaaggagcacaatggcttgtgttagcttgtctataaaattgtaattggtatgaaacagctttgataattacctcagctacaatattctgaataattttcagtttagcttaaaatattagaacaagtggctattcatgaataaatattactgatatcttgaaagaaataacaagattccttctttaagctcttaaactctttccatgctgtaaattaaacacatcagtaatagctaagagagaattctgatacaccatcgtttaccactattayagcacaaattttggatgtgacaaattttaaattagtagatgttattttcccaaataaacaaaaggagaatctaacatgaagcaaattcaaactacatctttataagacgttttatagccatgtaacataaaggctaatactaagctgtcattagttaaatgattaagtttggaaaaattattattgatgactagtattgcaaagt

SEQ ID NO: 652009 - DNA, 614 bp, Homo sapiens
attctgacaaaaactcaatgattattttacaatttcctcctttgtctagttgctcacactgcttttataaaaaataaaatgttatgttaggacagctttaaatgtacaaaattgttgtgaagatagtacagagagttcttttatacttyacacccatttttttctattattaacatcttgcatttgtacagtaaatttgttacaattaatgagccaatattgatgtactatcattaactaaactctacatttaattaaaatttcctaattttttcctaatgtatttttcatgtttcaggatattatccaagataccacattttacttcattaccatatcttcttaagcacttcttggctgtgacaatttctttgactttccttgtttttgatgaccttgacagttttgataagtactggtcagatacttcgtagaatgtccccaagtaggatttgtctgacatttttctcataattagactagggttgtggacttacgggaggaggcacagaaataaaatgtcattttcatcacatcttttcaagggtatatgctatcaatatgagttatcactgttgatcttgactttgatgacccagcagagatagtgttta

SEQ ID NO: 652010 - DNA, 614 bp, Homo sapiens
attctgacaaaaactcaatgattattttacaatttcctcctttgtctagttgctcacactgcttttataaaaaataaaatgttatgttaggacagctttaaatgtacaaaattgttgtgaagatagtacagagagttcttttatacttcacacccatttttttctattattaacrtcttgcatttgtacagtaaatttgttacaattaatgagccaatattgatgtactatcattaactaaactctacatttaattaaaatttcctaattttttcctaatgtatttttcatgtttcaggatattatccaagataccacattttacttcattaccatatcttcttaagcacttcttggctgtgacaatttctttgactttccttgtttttgatgaccttgacagttttgataagtactggtcagatacttcgtagaatgtccccaagtaggatttgtctgacatttttctcataattagactagggttgtggacttacgggaggaggcacagaaataaaatgtcattttcatcacatcttttcaagggtatatgctatcaatatgagttatcactgttgatcttgactttgatgacccagcagagatagtgttta

SEQ ID NO: 652011 - DNA, 485 bp, Homo sapiens
cattactattagtcagtaataacatatttctggcactagccatggacttattcggtgcaactcactatagttgcttgtgcaatttatgtttttaattttgtaaatagttcctagttgctatggtcaaaagaggggtgtgggttcatacataagcaaatatagtgttctggttacatcatgccatagctgcaaaatatggctttgttcatcagatgatggtgctgacagctgcattgcaatggccattgaattataaccactcacataaagggagagataaaagrcatcagtaatgtgtggcatatgacacacacacacacacacacgtacacacacagggggctcaaatgcaagcccctgacaggctcagagccatacatactgacacaaacacagtcatgcccagggccttggcttttttataccagctcatagaatcccttttattttctacatttcctgttactgacaaggttttgagcaag

SEQ ID NO: 652012 - DNA, 525 bp, Homo sapiens
tccaaagctagcataactagaaatagaataattatttctagaaaagctgcatttaattagctaagtaaatgcttattataccaaaatactaggattggagtggtttgttacagagcatttttgtaacacttgatgactgatacagtgtgtatgtgagaatgtggattttcaaaagcttgtgcaataatcagtgtctctaaaactatcaaagaggggcatcccaatgactaaaaatgaacttagaaaacaatgttatgatttttatgaaattgttcctaagataaagtaayacatcttcagattttaaaagaggaatgggaaaatttcataatccccataatgctctgtaaggtacaatttcataacccaatgttttcattatgggctgaaaaggcagatattataccttttttcaaaatagcatgtattcttgaaattttaactcattaaatagtgtggtttgggaagtggaacttctgagtttaactacagaagttattttgaagtgtcataacttgtgggtaa

SEQ ID NO: 652013 - DNA, 533 bp, Homo sapiens
tgatgggggagatgggagcagaagggagatgggcatggtgtagttattaaaggttaacatgtgggatccttgtggtgatggcactctagtatcttgactgacatggtgcatacataaatctayggcatgtaataaaattatgtaagaacgagctgaacgaaatgtacacaagcataactacaagtcacactggggaaatgtgaataagactggtggactgcatcaaggtccataatctggttatgatatcatgggatggtgttgcaaaaccctgccatcgtgggaaactgggtaacatctacaccagatccctctgtattattctgcacaactgcttatgaatctgaaattctctcaattaaaaaattaattaaaaataaataaattagaaggatgaagggatatgaaacattttcaccctcggtgaaattgatctgggttattcattagaattctgttaattttaggggtcccaaagcatcttctctattgaatctcctcttggggagagactgagaagtggtcagagttta

SEQ ID NO: 652014 - DNA, 533 bp, Homo sapiens
tgatgggggagatgggagcagaagggagatgggcatggtgtagttattaaaggttaacatgtgggatccttgtggtgatggcactctagtatcttgactgacatggtgcatacataaatctacrgcatgtaataaaattatgtaagaacgagctgaacgaaatgtacacaagcataactacaagtcacactggggaaatgtgaataagactggtggactgcatcaaggtccataatctggttatgatatcatgggatggtgttgcaaaaccctgccatcgtgggaaactgggtaacatctacaccagatccctctgtattattctgcacaactgcttatgaatctgaaattctctcaattaaaaaattaattaaaaataaataaattagaaggatgaagggatatgaaacattttcaccctcggtgaaattgatctgggttattcattagaattctgttaattttaggggtcccaaagcatcttctctattgaatctcctcttggggagagactgagaagtggtcagagttta

SEQ ID NO: 652015 - DNA, 533 bp, Homo sapiens
tgatgggggagatgggagcagaagggagatgggcatggtgtagttattaaaggttaacatgtgggatccttgtggtgatggcactctagtatcttgactgacatggtgcatacataaatctacggcatgtaataaaattatgtaagaacgagctgaacgaaatgtacacaagcataactacaagtcacactggggaaatgtgaataagactggtggactgcatcaaggtccataatctggttatgataycatgggatggtgttgcaaaaccctgccatcgtgggaaactgggtaacatctacaccagatccctctgtattattctgcacaactgcttatgaatctgaaattctctcaattaaaaaattaattaaaaataaataaattagaaggatgaagggatatgaaacattttcaccctcggtgaaattgatctgggttattcattagaattctgttaattttaggggtcccaaagcatcttctctattgaatctcctcttggggagagactgagaagtggtcagagttta

SEQ ID NO: 652016 - DNA, 533 bp, Homo sapiens
tgatgggggagatgggagcagaagggagatgggcatggtgtagttattaaaggttaacatgtgggatccttgtggtgatggcactctagtatcttgactgacatggtgcatacataaatctacggcatgtaataaaattatgtaagaacgagctgaacgaaatgtacacaagcataactacaagtcacactggggaaatgtgaataagactggtggactgcatcaaggtccataatctggttatgatatcatgggatggtgttgcaaaaccctgccatcgtgggaaactgggtaacatctacaccagatccctctgtattattcygcacaactgcttatgaatctgaaattctctcaattaaaaaattaattaaaaataaataaattagaaggatgaagggatatgaaacattttcaccctcggtgaaattgatctgggttattcattagaattctgttaattttaggggtcccaaagcatcttctctattgaatctcctcttggggagagactgagaagtggtcagagttta

SEQ ID NO: 652017 - DNA, 479 bp, Homo sapiens
gaggttactgagtttactcacctctagagtmagatgtgatggtaacaggtggatgaacacacattttggaattccttgctgaatactgttttttttgcggcacacagaagaaatagcagcattaggtgtgcaataagaacaggtattgcataaattattccaacattcaagattcaacagaaacaaaatgcatttttttcaagcactttaaacttcataaacttgggtgtacattccaaaacattcaatccaacataggatgtacttcaactgatcaaaatggttttgaagaattacttgctatctaagggactttgttacttacaaaataacttttctaaagatctgtttggccagctatagatagaaagtacgcagaaagggagagctttgcttctaaaaggttgaacttcaaaagagttcagacatatttcctatcaacatggtttccagcaaacttttcaaacatgaaggccgtg

SEQ ID NO: 652018 - DNA, 479 bp, Homo sapiens
gaggttactgagtttactcacctctagagtaagatgtgatggtaacaggtggatgaacacacattttggaattccttgctgaatactkttttttttgcggcacacagaagaaatagcagcattaggtgtgcaataagaacaggtattgcataaattattccaacattcaagattcaacagaaacaaaatgcatttttttcaagcactttaaacttcataaacttgggtgtacattccaaaacattcaatccaacataggatgtacttcaactgatcaaaatggttttgaagaattacttgctatctaagggactttgttacttacaaaataacttttctaaagatctgtttggccagctatagatagaaagtacgcagaaagggagagctttgcttctaaaaggttgaacttcaaaagagttcagacatatttcctatcaacatggtttccagcaaacttttcaaacatgaaggccgtg

SEQ ID NO: 652019 - DNA, 479 bp, Homo sapiens
gaggttactgagtttactcacctctagagtaagatgtgatggtaacaggtggatgaacacacattttggaattccttgctgaatactgttttttttgckgcacacagaagaaatagcagcattaggtgtgcaataagaacaggtattgcataaattattccaacattcaagattcaacagaaacaaaatgcatttttttcaagcactttaaacttcataaacttgggtgtacattccaaaacattcaatccaacataggatgtacttcaactgatcaaaatggttttgaagaattacttgctatctaagggactttgttacttacaaaataacttttctaaagatctgtttggccagctatagatagaaagtacgcagaaagggagagctttgcttctaaaaggttgaacttcaaaagagttcagacatatttcctatcaacatggtttccagcaaacttttcaaacatgaaggccgtg

SEQ ID NO: 652020 - DNA, 479 bp, Homo sapiens
gaggttactgagtttactcacctctagagtaagatgtgatggtaacaggtggatgaacacacattttggaattccttgctgaatactgttttttttgcggcacacagaagaaatagcagcattaggtgtgcaataagaacaggtattgcataaattattccaacattcaagattcaacagaaacaaaatgcatttttttcaagcacttyaaacttcataaacttgggtgtacattccaaaacattcaatccaacataggatgtacttcaactgatcaaaatggttttgaagaattacttgctatctaagggactttgttacttacaaaataacttttctaaagatctgtttggccagctatagatagaaagtacgcagaaagggagagctttgcttctaaaaggttgaacttcaaaagagttcagacatatttcctatcaacatggtttccagcaaacttttcaaacatgaaggccgtg

SEQ ID NO: 652021 - DNA, 613 bp, Homo sapiens
cccacccacaggctggtcacaggggtgtgagggtgggayaactcagcagtcctggtgcccgcatctcagcaggactcttcctctgtccagttctgctcccttcctcccttccacaggtgatccatggtccctactgaacctccacacaccacctatcatctctcagtcagcttactggggagcccaaaccttgataggtgagaaggaggaagtgcattttaatcagggttctgcagttccctgctcagcactccctgctttcttcctcgggcactccaacaaccttataaactggcagctttggatcctgttactaaaaagggagccaccagggcaggtggacctgcccatggtcagacacctggcatggggcagagctgggacaggaggctcctgagggactccaggaaggccatggctgggcaagacaagctggcagcttgttaaggtgcaggtctcactgatcttctggaaaagcacaacacaggacacgagggcactggctcaggaaccccagatctgaattccaattcgccactgaccagctggtaaccttgggtgacttactgaactcttctgagcctcggtttctccactgattaaaaggggctta

SEQ ID NO: 652022 - DNA, 560 bp, Homo sapiens
gacctatactgttatttctaaacttcccaacatctctctcaggtgtatgatccatgttttggaggtgaagacaatgaggatgggcaccacattctttaaatgatgggactggatttcaaacaaaagttccaccccgaagcccccaaccagtcaattttmtaatgcctctctgcatagatttcctcctttaactggatagcagaagcctcaggtaatagctaagtctaagcacatgcctgctttgtgccagagttgcactaaacactactccctgcaatgaaggttagcactgttattacccccatttaaagatagggaaactgaaacactgataaattaggttctgggagccccagacctaagaaggtgaacccaaatggtctaaccatcaaatttgtcttttaaccacagcccacccagaccctcctcccctgcaatgtaggccatgtagaccatgtataggtccaggttccacatcatccctactggatacagagttgatcagttttctgtatgatttcaaacacacacacacacacacacacacattgatcagtttt

SEQ ID NO: 652023 - DNA, 462 bp, Homo sapiens
ttgacagtttcttataaggttaaatgtacaccaatcctatgactcagaaaatgcactcttaaatattgatccaagraaaacaaaacgtgtttagatagtcttatacaagaatgttcatagcaaccttattcataataaaggaaagttgtaaacaaccccaaaatctgtcaactcttgaatagattaataaattgttatatggtaatacagcagaacactattcaactgtaaaaaagaagaaactacggatacatgcaataacatgataaatctcagatatattatatcatgtgaaagaagttggaggcaaaatcatttatgctgtttgactccatttacatgaagttcacaaacaaacaaatctagtctatcatattaaaaatcgaaagtatctctggaaataagggaacttcttagggcaataaaaatgttctcgtgtgtgtgtgtgtgttacaaaaagtt

SEQ ID NO: 652024 - DNA, 462 bp, Homo sapiens
ttgacagtttcttataaggttaaatgtacaccaatcctatgactcagaaaatgcactcttaaatattgatccaagaaaaacaaaacgtgtttagatagtcttatacaagaatgttcatagcaaccttattcataataaaggaaagttgtaaacaaccccaaaatctgtcaactcttgaatagattaataaattgttatatggtaatacagcagaacactattcaacygtaaaaaagaagaaactacggatacatgcaataacatgataaatctcagatatattatatcatgtgaaagaagttggaggcaaaatcatttatgctgtttgactccatttacatgaagttcacaaacaaacaaatctagtctatcatattaaaaatcgaaagtatctctggaaataagggaacttcttagggcaataaaaatgttctcgtgtgtgtgtgtgtgttacaaaaagtt

SEQ ID NO: 652025 - DNA, 554 bp, Homo sapiens
tctgcttccccttcctgtgtggacagggtttactctactcataattcaaagacaaacacacagtgggaaccaggggagaactcattctgagggaagcctggtgaaagaacaggagtcggggtcaccagagccaggttcaaatcttgactcttaaagaccttcaacttagaagatcacttccctgagcctcagtttccctatcttttaaataaggaaagtaatccctaatttcctaaaagcaggtggagatacagttgtaaatacagacagccacataaaagtcctagctatgtatatgtaaatgtggagaaacaggcttaaacggtggatgccagagtgagaagagaggaccctcagaaaacrgcgccatgaagaaagactgtcttggtcttgactttcataatgtcaagaaaggactaacattgtacttgtgaaattttttaaaagctaatttaagaaaaaacaaaaaaaaaaacctggaatacatttgttttaattttcttctcccccaatatactatgtatcaatgaggtgagagagatcattaattcatt

SEQ ID NO: 652026 - DNA, 431 bp, Homo sapiens
agggaattctgccaatgagatcacacttggaaatgttaacacattccatgcctctactaacttattcactgatttgacaactaataatctggttcttccatgtgccaagctctgtgttagatcctaggctacaagggtgaggaaaacagcaggtgccaatacagttcagccagtccaggtcagcagccattcaatacttcttctgttccatgcacgctgctcagtagagagattctgagaggaccaacatagagtcctgctggttggacagtccttctagtgatagagacagaggcattagcatccaagttcaatattctgagatagtaacaattttttgcygtaatccagggtctgtcccttgctagcagaagtggcagctggtgggccaggtaccacctgcttctcactgaggaaacatgactgtatca

SEQ ID NO: 652027 - DNA, 408 bp, Homo sapiens
ttagggtactttgctttccaatattgtctttttcttggtgttggtgctggtagcactggtgttattctgcttgtttcaggtaacagattgacaatgtcttgaagatacaaagtctgctctactaaggcacaggtctgatgtccactttctgaagttccattcaggcartgggttcagcacacattaaaatttgcttctttggagtccaaactctcaagacgtggtttctgttggtttcttgttccttctacaaacaacccacaatgcatgacttaaggtattgagataaaccccaaaatctcattgccttaacacaacaaaattatcattattattattttggctaatatcaaatccactgacaatgttatattcctagaagcctacccttcccaaatggtcactcca

SEQ ID NO: 652028 - DNA, 419 bp, Homo sapiens
tagggtactttgctttccaatattgtctttttcttggtgttggtgctggtagcactggtgttattctgcttgtttcaggtaacagattgacaatgtcttgaagatacaaagtctgctctactaaggcacaggtctgatgtccactttctgaagttccattcaggcagtgggttcascacacattaaaatttgcttctttggagtccaaactctcaagacgtggtttctgttggtttcttgttccttctacaaacaacccacaatgcatgacttaaggtattgagataaaccccaaaatctcattgccttaacacaacaaaattatcattattattattttggctaatatcaaatccactgacaatgttatattcctagaagcctacccttcccaaatggtcactccacctgcagtgcca

SEQ ID NO: 652029 - DNA, 408 bp, Homo sapiens
ttagggtactttgctttccaatattgtctttttcttggtgttggtgctggtagcactggtgttattctgcttgtttcaggtaacagattgacaatgtcttgaagatacaaagtctgctctactaaggcacaggtctgatgtccactttctgaagttccattcaggcagtgggttcagcacacattaaaatttgcttstttggagtccaaactctcaagacgtggtttctgttggtttcttgttccttctacaaacaacccacaatgcatgacttaaggtattgagataaaccccaaaatctcattgccttaacacaacaaaattatcattattattattttggctaatatcaaatccactgacaatgttatattcctagaagcctacccttcccaaatggtcactcca

SEQ ID NO: 652030 - DNA, 515 bp, Homo sapiens
aaagtaaatcacagatacctaaaccaataataataataaatagctagaatgggaattaaaataaaataaaaataacaaaagtccagaaggaagagtagtctacattagtatttccctgagctctgacggaaggcagcaaagagacaacrgcaactccaacagctccatcacatgctgaaaccaagtgctgtcctttacatgtggcatcccacttaatcttcccctagcattctgggaagcaattagggcatagagggtgccctagaagtatagagaggagaaatcagagggaagccagggtagacttatagggccaaacatttaggattctgttggaagacaggcatcctatgtccactgcagaactctaagtaaaagagtttctgaaacccaagcatcatggaagtctatgtcttttctctttgtggaagttgcaatctctcgtgcattcacttgtgatttcaagttcggcttgagttgggagaagaatgaaagtgggaaaaccagctggaagg

SEQ ID NO: 652031 - DNA, 515 bp, Homo sapiens
aaagtaaatcacagatacctaaaccaataataataataaatagctagaatgggaattaaaataaaataaaaataacaaaagtccagaaggaagagtagtctacattagtatttccctgagctctgacggaaggcagcaaagagacaacggcaactccaacagctccatcacatgctgaaaccaagtgctgtcctttacatgtggcatcccacttaatcttcccctagcattctgggaagcaattagggcatagagggtgccctagaagtatagagaggagaaatcagagggaagccagggtagacttatagggccaaacatttaggattctgttggaagacaggcatcctatgtccactgcagaactctaagtaaaagagtttctgaaacccaagcatcrtggaagtctatgtcttttctctttgtggaagttgcaatctctcgtgcattcacttgtgatttcaagttcggcttgagttgggagaagaatgaaagtgggaaaaccagctggaagg

SEQ ID NO: 652032 - DNA, 515 bp, Homo sapiens
aaagtaaatcacagatacctaaaccaataataataataaatagctagaatgggaattaaaataaaataaaaataacaaaagtccagaaggaagagtagtctacattagtatttccctgagctctgacggaaggcagcaaagagacaacggcaactccaacagctccatcacatgctgaaaccaagtgctgtcctttacatgtggcatcccacttaatcttcccctagcattctgggaagcaattagggcatagagggtgccctagaagtatagagaggagaaatcagagggaagccagggtagacttatagggccaaacatttaggattctgttggaagacaggcatcctatgtccactgcagaactctaagtaaaagagtttctgaaacccaagcatcatggaagtctatgtcttttctctttgtggaagttgcaatctctygtgcattcacttgtgatttcaagttcggcttgagttgggagaagaatgaaagtgggaaaaccagctggaagg

SEQ ID NO: 652033 - DNA, 502 bp, Homo sapiens
tgtcctcatctcaaaattctttttttttttacatattccaacttagtaaatgaaaagaaaacctaacactccaaacatttctgataaagtctgttaaattttaaattttcttatctttttgtagagaatatatatatttgtttgtacatgtaaataatctatatttctttaaaaataaatatgaaaaataaaaatactataaaataagttatcctacaaatcatttcactgcatcaacaatacaattcatttaggcttcctagttgacatctgaytatacctcaaaaaccaaatactatgtcattgcttatatatcatcaataaaaaataaagatgtggcaaatacaatatcaggaaaaatatcattattgaatattcaaagatgctttttatcgtaagctagcaccctagaaaataaaatataaagagaaaattgttctaagtagatcaaaatgatttttaatattgtagttttttcatcttatgcatgagtttgagttac

SEQ ID NO: 652034 - DNA, 624 bp, Homo sapiens
agtcaaactatctctgtttgccaatgatacaatcttatacctagaaaactcttctaaaagactactgcatctgataaatgaattcggtagtctcaggtcacaaaatcaatgtacacaaatcagcagcactgctatacatcaacaatgactgaactgagaatcaaatcaagaactcaattacttttatagtacctacaaaccaaataaaatacctaggaatatacttaaccaaggaggtgaaagatctctatggggagaactataaaacactgtggaaaggaatcatagatgacacaarcaaatggaaatacatttcatgttcatggattggaagaatcaatactgtgaaaatgaccatactgcccaaagcaatctacagtttcaaataaattctatgaaaataccaacatcatttttcacagaattagtaaaaacaatcctaaaattcctatggaaccaaaaagagcctgaatagccaaaacaatcttaagcataatgaacaaatctggaagcattgtcattacccaacttcaaattatactatgaggctatagtacccaaaatagtatggtactggtataaaagtagatacataaagtacaagaatgaaactggatccctctc

SEQ ID NO: 652035 - DNA, 384 bp, Homo sapiens
gaattctgccaactaccatgtatgttgattccaattacaaaactaggaaccagagaaaggactctgataacagagacacactgtgagttaaatctgggccagaactctatttattataattatctgagtctcatacacccctccccattctaacaagagtaggtcatagcactttaggtccccagatttcaatgtcatttcactctgaccaataattcttcataggtttgcagccaaaactgaatcactgaagatgactagcagagcaagcatcaagtagtaactgggctgaatagtgactcagaatcttaaaagaatcaaaacaaacccactatcaccaarttagacccagcacagatttcaaagtctgcctggcattccttc

SEQ ID NO: 652036 - DNA, 617 bp, Homo sapiens
ctctttagaaagactcttactggaaaaattatccctactcctaagtcttcctccacttgtgccacaaaacagccaaaattcttgttagaaattgatctgtcttttaaaagatcttatccatcagacaatatctcctccttaaagaggacttttttaccatccaatctaaaattgatgaccctgttattttctctcatagctaattatgccagattgtctcttggcaacttaaaaccattttcatcattctgtgctcttcccagggactagaaatctggaaactacattcattttccaaaatccctaagaccaaagctccagttttgcttctacctcttgagaacatcttgagaaacatctgaaaagctttggaaggcaaaaagacaacagaagcattactgttccttcaacagcaaaggacagcacatgggcatcagcatatgacacattaggtttcactcacagctttcaggtactcttctgtgaaccacctgcttcaaacataagagacaagtggaatcagcagcagcagtttttcaacaattcctgttctttctgactttytgaatggggcagtttctcttacattactgtctagcccttcctaacaggtttgt

SEQ ID NO: 652037 - DNA, 582 bp, Homo sapiens
cagttttcaactaatggttttctcattaaactaaatgtttagaaaagttgtttagagtttttctttttcttttacatagtcctcctgatccagtataagactatttagtaacgtgcatttgtatggtactatctaaagtaagtyagattgatgttagagatcgggtagctgcggaacaaaattagttatatcctaattaggtacagtgaatgacacaaaatcattttagcaatgcttcttaaccttttggggtcacaggcgttttgagactgatgaatcctagggacttatttacccaggaaaatgcgtatataacatacatatctccctaaagtttacaatattgtagtggttcatgggccccctggttaagagcccattctaaagtacaatagggcatcatcccttttcctgcaaagcccaaaagtatatttctagggcatgaaaataacttgagtctattttaaggaattgtttcactctagaggtagataggggacctggctagaatctgacattaaaatatactttttaaaaaatattatatttggggtggggaaagtgatttaaaggtgaaaaaaa

SEQ ID NO: 652038 - DNA, 582 bp, Homo sapiens
cagttttcaactaatggttttctcattaaactaaatgtttagaaaagttgtttagagtttttctttttcttttacatagtcctcctgatccagtataagactatttagtaacgtgcatttgtatggtactatctaaagtaagtcagattgatgtwagagatcgggtagctgcggaacaaaattagttatatcctaattaggtacagtgaatgacacaaaatcattttagcaatgcttcttaaccttttggggtcacaggcgttttgagactgatgaatcctagggacttatttacccaggaaaatgcgtatataacatacatatctccctaaagtttacaatattgtagtggttcatgggccccctggttaagagcccattctaaagtacaatagggcatcatcccttttcctgcaaagcccaaaagtatatttctagggcatgaaaataacttgagtctattttaaggaattgtttcactctagaggtagataggggacctggctagaatctgacattaaaatatactttttaaaaaatattatatttggggtggggaaagtgatttaaaggtgaaaaaaa

SEQ ID NO: 652039 - DNA, 628 bp, Homo sapiens
tagtgagaatgcatcaatgattttattttatttaagttccgggatgtgcagaatgtgcaggtttgttatgtaggtaaatgtgtgccatggtgtgcctagataatacctaggtgctgggttgataggtgtatcaaaacaaaaattaatcctccacagcaatagtagcacctctctaagaacttgaatttattcatacataaaatcaacctggactcaaaaacacagttgtgagtatgaaacaaaatattttattcctatatttccacataaaacaagaagtgtaacttatcagtgtatctccaacagatagcttaattaaacagaaatataattaacctatcaacccatcacctaggtattatgcccagtacacattagctattttttctgatgctctccttctcctcacacccccaacaggcctcagtgtgtgttgttcccstccctctgtctacgtgttcacattgttcagcatacactaataagtaggggcatgcggtgtttggttttctgttcctgcattagtttgcgtaggataatggcttccagttccatccatgcccctgcaaaggacatgatctcatttctttttatggctgcaacgtattccatggaaaatatgtacctt

SEQ ID NO: 652040 - DNA, 502 bp, Homo sapiens
tttttattccactgtggtctgagagtatggttggtataatttccaacattttgaatatattgagacttgctttatggctgaacatgtggttaatcataaagtatgttccatgtgcagaggagaagaatgtatagtctgtggttgatggacggagtattctgtagatgtctattaggccgaattggtcaagtgtcaagtttaagtccaggatatctttgttagttttctgccttgatgatctgtctaatgctgtcaggggtgttgaagtcccccaycattattgtgtggctaagtcttttcgtaagtataaaagtacattgttttgtgaatctgagtgctcaaatgttggatgcatatatatatttaggataattaaatattccttttgaattggactcattatcattatgtaatacatggtagtttttgtccatttttacggttgttggtttaaaatctgttttatctgataaaagaatagcaacccctgcttttttttttt

SEQ ID NO: 652041 - DNA, 502 bp, Homo sapiens
tttttattccactgtggtctgagagtatggttggtataatttccaacattttgaatatattgagacttgctttatggctgaacatgtggttaatcataaagtatgttccatgtgcagaggagaagaatgtatagtctgtggttgatggacggagtattctgtagatgtctattaggccgaattggtcaagtgtcaagtttaagtccaggatatctttgttagttttctgccttgatgatctgtctaatgctgtcaggggtgttgaagtcccccaccattattgtgtggctaagtcttttcgtaagtataaaagtasattgttttgtgaatctgagtgctcaaatgttggatgcatatatatatttaggataattaaatattccttttgaattggactcattatcattatgtaatacatggtagtttttgtccatttttacggttgttggtttaaaatctgttttatctgataaaagaatagcaacccctgcttttttttttt

SEQ ID NO: 652042 - DNA, 636 bp, Homo sapiens
catgccttttgtccatagcagcctgacatgttccttgggtggcagtggcaaaagaaggtgtattacttgggtagttggtgatcctctcaatgaaacaaggatgctgtacctaccattatctcttatcttgtatcattctacaacataaaggtaatattagatttaaaatcataatatgtgagtctgactattcaagcccataacaactgttgtttagtgtactatctgataaattatacattgatttatttgactattttcagtttatcccactggaacataaaccatatgagaatttttcattcttgtccactgtcaccacagcccaaaagcatacctgatataaaatataatacacrtacatatttatattaatatgttgaatgaattaatcaatcaaaggaaaaatgaagaaagaatatccaataaaaagtatcaaagagagaaaaggaaatccaaaaattacagaaaaaagatggaaataaccaattatatcagatgttgcaaagagtcttaatatgataataaatacaagatacccataatgtttgataattgggaggtcaataaccttggagaaagtaagttttaatagagtagtgagaaaagctaattgcttgaaaaagaaagaaaaga

SEQ ID NO: 652043 - DNA, 636 bp, Homo sapiens
catgccttttgtccatagcagcctgacatgttccttgggtggcagtggcaaaagaaggtgtattacttgggtagttggtgatcctctcaatgaaacaaggatgctgtacctaccattatctcttatcttgtatcattctacaacataaaggtaatattagatttaaaatcataatatgtgagtctgactattcaagcccataacaactgttgtttagtgtactatctgataaattatacattgatttatttgactattttcagtttatcccactggaacataaaccatatgagaatttttcattcttgtccactgtcaccacagcccaaaagcatacctgatataaaatataatacacgtacatatttatattaatatgttgaatgaattaatcaatcaaaggaaaaatgaagaaagaatatccaataaaaagtatcaaagagagaaaaggaaatccaaaaattacagaaaaaagatggaaataaccaattatatcagatgttgcaaagagtcttaatatgataataaatayaagatacccataatgtttgataattgggaggtcaataaccttggagaaagtaagttttaatagagtagtgagaaaagctaattgcttgaaaaagaaagaaaaga

SEQ ID NO: 652044 - DNA, 551 bp, Homo sapiens
ccaggggattccttttctgtttgaacttcaggtactgcatttctatttctgttactgagaaataagaaattatcaaaatgttaaaaatctattattaaacactgaatactggtaagcatcataagcaacagcatagaggtgagaattagcatagtagggaaatgtaggaagtagttattgaagtgacaatcctatsgagaaaggattgtatgaggtggagactaatgttaaataaagttaaataaggcataacttacttattcttcacaagaaccctatgaaataggtactattactatcatttccattttacagtagggaattttgaagcatagaaaggttaaatgatttgcttaaaagaataataagtgccaaaggtggcaggtgaatgcagcaatcacgattcaaagtccaagctcttaaccttgacactatactgtcttcaagattttgaatgccagttacaagattttagtgttgatgagaagccagccattacagtgatgtataaggaagttaaattataatatgatttgggaaaaataattaga

SEQ ID NO: 652045 - DNA, 551 bp, Homo sapiens
ccaggggattccttttctgtttgaacttcaggtactgcatttctatttctgttactgagaaataagaaattatcaaaatgttaaaaatctattattaaacactgaatactggtaagcatcataagcaacagcatagaggtgagaattagcatagtagggaaatgtaggaagtagttattgaagtgacaatcctatcsagaaaggattgtatgaggtggagactaatgttaaataaagttaaataaggcataacttacttattcttcacaagaaccctatgaaataggtactattactatcatttccattttacagtagggaattttgaagcatagaaaggttaaatgatttgcttaaaagaataataagtgccaaaggtggcaggtgaatgcagcaatcacgattcaaagtccaagctcttaaccttgacactatactgtcttcaagattttgaatgccagttacaagattttagtgttgatgagaagccagccattacagtgatgtataaggaagttaaattataatatgatttgggaaaaataattaga

SEQ ID NO: 652046 - DNA, 541 bp, Homo sapiens
ttagttcccacctgagttaaacatgcaggtcaattgcttaactcagggcctgttacacagtgagtgcgcagtaagtgatagttgttactatggagacagaagataaacccccatcccagagcctcccaggcatattcttgagtcccacccagttatgctgaatcaagaagcgttggcaaatgrcacagccagtctgtagtgattcaaatgcttttgtaaagttagggagagcaaggcaggggaaaggtccagaggggctgctgtcattccaaacagttcttaactattccccgaaggctgccctgagcagccttgggaagcgcaacgtgggactcctcctctcttcctgggaacaagaacttggggaagctttgagtggtttcacatctccagtgccctcagtcctttggtgtgtcagcaaaaccagctggcaccatactttaacagggcccgattcacatggcagtcttgggatttgtggattcagatgaactcttgctggcttctttctggcaccttcaacttcttcaaagccataaac

SEQ ID NO: 652047 - DNA, 541 bp, Homo sapiens
ttagttcccacctgagttaaacatgcaggtcaattgcttaactcagggcctgttacacagtgagtgcgcagtaagtgatagttgttactatggagacagaagataaacccccatcccagagcctcccaggcatattcttgagtcccacccagttatgctgaatcaagaagcgttggcaaatggcacagccagtctgtagtgattcaamtgcttttgtaaagttagggagagcaaggcaggggaaaggtccagaggggctgctgtcattccaaacagttcttaactattccccgaaggctgccctgagcagccttgggaagcgcaacgtgggactcctcctctcttcctgggaacaagaacttggggaagctttgagtggtttcacatctccagtgccctcagtcctttggtgtgtcagcaaaaccagctggcaccatactttaacagggcccgattcacatggcagtcttgggatttgtggattcagatgaactcttgctggcttctttctggcaccttcaacttcttcaaagccataaac

SEQ ID NO: 652048 - DNA, 616 bp, Homo sapiens
aattgtatacttagatatcaaggcaacttttccagctgtgccctaactgttctctattgtgctccttaccatgtccttggtgtcatttttctgatttgagtgaaacctatgcaagacattaattgtgtcttattaccggttcttgctcttcttttcaatcctgataggtatgaatgccccaagagaaacacaaccaataaaacaaaacagcagtatattcctctatacattgtttgtgaagcaaygaatatgtgaaaaattcatatttgccagtgtacttcagggcattttgggaggccctttaaaaaaatccattggtctgtttctaccacagtaccacttcaaatctgactattgggctgatttagccagaagggcaataattatgaatcatttcctttaaatattatagcattttgtgcatcagtgctcaatactaacaaaattaaaagtgctggtatagcaaaactagggaaaatttaaaatggaaaagtatatatgttactatagtttcagaataattattaataaagcaacattttggcttgtgttatctacagcctggattaaaagcagtgaagaaatgagtgagctagtggaacctacatccaagttg

SEQ ID NO: 652049 - DNA, 595 bp, Homo sapiens
ttacaaataactttcaaagcttaaggaattgtagatataaaaataacctaatttaatttaggcttaaattcctctgattaagcatgtgaaagtaagttttaaaatctgtcgcattgaaaagattactgttccgtgcccttctgtatttttgtctctttaggttgaatattgtatttatcaccatgtaatcattcagwaggcagattcccactagaaaactgttgaaatgtaagactaaaatacaacattgaatacaaaatcaaaattttgtgtataaaaaccagtatagtccattttgttatatttgttttttccctaacttggaaatatacatatttgtatatatagccttaaaattaatgtaaagttaggggagtattggggaaagtaatgtgaaatgtctcatatttaagtagttaaataccagcaaaatcttttcattatccctcttattttgtgaggtgattaaatgtaacttaattgtatttaatttatatcttattccagcatgaatgaggaaaaactgaagtactatttatatttagaaattcatatcagttgaaattacagaaccaattccatacttacaataaat

SEQ ID NO: 652050 - DNA, 427 bp, Homo sapiens
tatcggtgcaagatacagccacgagggtgcccaactctaaaatcgtggcagtgggctacatttaagtagctaacacttccaggtcaaaacaaacaaaggtttttttaatgttaaaagttcgcctgaatctcttcgtgacgccattttctgcccgtgacgtcaggggggaggcgccgtgcagcaacgtcacgcattggtgacgtctggtggggaccgggttttggggtttctcaccagttccgggtccccgcagggggtcccggttctctccgttcctttgagtatgttgtggggagtggagctcggatagttcctagagtctaggcaagaaaagcagcactgcaggtacagmgcctcctcttcccgcaaaatggcggcagctctgccgtcttccagaaccttccccaatctgcgcatgcgccaagac

SEQ ID NO: 652051 - DNA, 638 bp, Homo sapiens
aggatagaatagatgaaataaatcttactttcattgggcctgaaaggatagagaaaatttggatcatttagaatgaaggaaacatcccagcaaatggaagcagagacaaggggagtataaactgcattctaggtccaagaggagacaggaccaaccgaagtgaaggattttataggccagctctacgtaagactggaaagttaagcctatagtccatcctggcagttaaaaatgcagcaaaggccgggtgcggtggctcaagcctgtaatcccagcactttgggaggccgaggcaggcagatcacgaggtcaggaaatcaagaccatcttggctaacacggtgaaaccccgtctctactaaaaatacaaaaaatcagctgggcgtggtggcgggygcctgtaatcccagctactcaggaggctaagccaggagaatggcgtcaacccaggaggcggagcttgcagtgagcggagattgcaccactgcactccagcctgggcgacagagagagactccatctcaaaaaaaaaaaaaaaaaaaaaaagagtgcagtgaagtgctgggaaaaaaagtttataatcagacaccatccggtgtccttgaacaagaaagaattgtaagaaaggacctagaattc

SEQ ID NO: 652052 - DNA, 638 bp, Homo sapiens
aggatagaatagatgaaataaatcttactttcattgggcctgaaaggatagagaaaatttggatcatttagaatgaaggaaacatcccagcaaatggaagcagagacaaggggagtataaactgcattctaggtccaagaggagacaggaccaaccgaagtgaaggattttataggccagctctacgtaagactggaaagttaagcctatagtccatcctggcagttaaaaatgcagcaaaggccgggtgcggtggctcaagcctgtaatcccagcactttgggaggccgaggcaggcagatcacgaggtcaggaaatcaagaccatcttggctaacacggtgaaaccccgtctctactaaaaatacaaaaaatcagctgggcgtggtggcgggtgcctgtaatcccagckactcaggaggctaagccaggagaatggcgtcaacccaggaggcggagcttgcagtgagcggagattgcaccactgcactccagcctgggcgacagagagagactccatctcaaaaaaaaaaaaaaaaaaaaaaagagtgcagtgaagtgctgggaaaaaaagtttataatcagacaccatccggtgtccttgaacaagaaagaattgtaagaaaggacctagaattc

SEQ ID NO: 652053 - DNA, 596 bp, Homo sapiens
tctcacctgtcattcattatcctgcactcagttgacagtagctgtgccctgctgtgggctgcatcctaggccacatggagaagcacacatgtgtccaggacgtggagcagacatmgaagagggaagagggggactgatgggttccaggaaggcttcacagaggaggtgtcgcctgcactgggtcctgatggcctacactctgaggagttatggagccaacaagacagaagtttgtccccacagccccctgctgagtggtttcctctcctgatgctccagtccttgttggcggcaccagccttctcgcctctccgactcagaagctcaatgccagcatggcctcctctccctgctatgcctcactgacccattaggcatcgtgtcctgttgcatctcactctataaagtctgccagctgggctcctgctcttctccccactcagtcacagccattcacagccagacctacaggggccctgcccagccactgtcacagcccgcaatctggcctccctgcttcccatgcctccctatcacacccatcctccaggacacactgcacctgcctgaataatctcccaagcacagcagagctc

SEQ ID NO: 652054 - DNA, 413 bp, Homo sapiens
ctggttcttagattcctctcccagtcctctttcccattgttctgttgctccaccttattgtctcaaggccgtaatctcatcaggttgggacattaatcttttcaactccttgtaagatttcccagtttggtttctctacatgtcctgcagctgccccacttctcctttacgctgtgtagagaatgctctgcagtttaggcaataaaaataaattgtctcactaaccttggctcatctctttggcctagattctcctgggatttacttcaaggaatgtcaccctagatgattcttccccaaagacggggttttgaaagttacaatgrgcagtctctctcatcaccgtttcccttcttggtccttcagttgccaaaagaacttgtcacaagtttgggacatcaggttatgataaa

SEQ ID NO: 652055 - DNA, 585 bp, Homo sapiens
cgccacactgacttccacaatagttgaactagtttacagycccaccaacagtgtaaaagtgctcctatttctccacatcctctccagcacctgttgtttcctgactttaaaaaaaaaaaaaaaaacttactggtaatggtaagtatacaaaaaacacagaatattaaaacactataactgtggtgtgtaaaccactcttatcctaagtagaaagatctaaggatgaaccaatcaaaaataataacaacaacctttcaagacatagtacaataagatataaatggaaacaacaaaaagtttaaaagtgggagggggtgaagttaaggcatagagctttaattagtttactctttatttgtttgtttatgcaaacagtgttaagttgttataaggtttaaatgatgggttataagatggtattttcaagcctcatagtaacctcaggccaaaagacatacaatggatacacaaaaaataaaacaagaaaataaatcatatttccagagaaaatcaccttcactaaaggaagacacaaaagaaagaaagaaaaagaagaagactacaaaacaaccagaaaataaagtt

SEQ ID NO: 652056 - DNA, 585 bp, Homo sapiens
cgccacactgacttccacaatagttgaactagtttacagccccaccaacagtgtaaaagtgctcctatttctccacatcctctccagcacctgttgtttcctgactttaaaaaaaaaaaaaaaaacttactggtartggtaagtatacaaaaaacacagaatattaaaacactataactgtggtgtgtaaaccactcttatcctaagtagaaagatctaaggatgaaccaatcaaaaataataacaacaacctttcaagacatagtacaataagatataaatggaaacaacaaaaagtttaaaagtgggagggggtgaagttaaggcatagagctttaattagtttactctttatttgtttgtttatgcaaacagtgttaagttgttataaggtttaaatgatgggttataagatggtattttcaagcctcatagtaacctcaggccaaaagacatacaatggatacacaaaaaataaaacaagaaaataaatcatatttccagagaaaatcaccttcactaaaggaagacacaaaagaaagaaagaaaaagaagaagactacaaaacaaccagaaaataaagtt

SEQ ID NO: 652057 - DNA, 554 bp, Homo sapiens
caccccactctgaacccctgcaagaagctgagtggcatcaagagtgtggggcagggagcccagagccctgggttctggtccaacccccaccacctcacctacctgactctgagcactcagccaggccccttaccctctctggccaccagtacctcatctgtaaaatgccagtatcactcwagaagcatctctaaaggcccctccagtcctagtactcagaggctccaaggggcagcccaggatttaaggagacttaaaaggagacagaaggacctgggcctttcagtcttggtggagaacaaagaggtgtgttgcagaggccacagaaatacagcgccttgagttgctccccagatggaaaagtgggactgctgatgctggggccctggccagggaagtctcatgggggacacacaccgaggaggtgctctcagtgcacttgagggacagaggtgacacgtagggaaggggtggggcaggaaaggaaggaaccagagggaagaagcgggcatggaaggagcgcaggctgatctggcgaggcaggaggatggccc

SEQ ID NO: 652058 - DNA, 533 bp, Homo sapiens
tcatgccaatggaaaccaaaaaagagcaggaatttctatacttatatcagaaaaaatatatttcaagacaaaaactataagaaaagacaaaaatttcactacataatgataagggggtcaattcagtaagaggatataacaattctaaatacatatgcacccaacactggagcacccagatatataaagcaaatattattagagctaaagagagagacagaccccagtacaacaatagctggagacttcaacaygtcactttcagcattggacagatctgccagacagaaaatcaacaaagaaacatcaaacttaataataactgtagaacccagtggatctaatagatatttatggtacatttcatccaatgctcacaaaatacactttctttttctcagcatatggatgattctcaaggatagaccatatgttaagtcacaaaacaagtcttaaaacattcaaaaaattgaaataatatcaagcgtcttctctaaccacagtgacataaaactataaattaataacaagag

SEQ ID NO: 652059 - DNA, 389 bp, Homo sapiens
agggacctagtgaggggtaattgaaccatgggggcaggtgtttcctgtgctgttctcataatagtgaataagtctcatgagatctgattattatataagggggattttccctgcacaagatctttttgcctgccaccatccatgtaagttgtgacttgctcccccttgccttccaccatgattgtgaggcctccccagccatgtggaactgtaagtcaattaaacctctttcttttgtaaatttcccagtctcaggtatgtctttatcagcagtgtgaaaatgggsaaatagagtaaattggtaccaggaatggggtgctgatcagaagatacccaaaaatgtggaggcaactttgtaactgggtaacaggcaaaggttagaacaattt

SEQ ID NO: 652060 - DNA, 470 bp, Homo sapiens
tcagtagtatttctttatgacaacagtgaacaatctgaaaaagaaattaaaaagtaatcccatttacaatagccacacataaaattaaatacctaggaattaacttaacccaggaagtgaaggatatctgtaatagaaactataaaacattgatgaaagaaattgaaacgagttactgggttcagcacaccaacatggcacacgtatacatatgtaactaacctgcatgttgtgcacaggtactgtgaaacttaaagtataattaaaaaaaaaaaaagaaattgaaaaggacacaaaaatggaaaaatattccatgtttatagawtagaataatcagtgttgttaaaatgtccatactacccaaaggattatacagattcaatgcaatccctgtcaaaataccaaagacattcatcacagaaatagaaaaaatcaatcccaaaatttatgaagaaccaacaaagacccag

SEQ ID NO: 652061 - DNA, 522 bp, Homo sapiens
aagctatcctaagccaaaagaataaaactggaggaatcactttacctgacttcaaattagactacagtgctatagtaaccaaaacagcatggtactgrcattaaaatatgcacatagaccaatggacaagactagagaacccagaaacaaatccacacacctatagtgaactcgttttcaacaaaggtaccaagaacatgcactagagaaaagacagtctcttcaataaatggtgctgggaaaattggatatccatatgcaaaagaataaaattagacccctatctctcaccatatacaaaaataaaatcaaaatggattaaatacttaaatctaagaccttaaactatgaaactactacaagaaaacattgcggaaattatccaggacattggtcttggcaaaaatttcttgagcaataccccacaagcacaggcaaccaaagcaaaagtggacaaatgggaccatatcaagttaaaaagcttctgcacagcaagggatacaatcaacaaagtgaagagac

SEQ ID NO: 652062 - DNA, 522 bp, Homo sapiens
aagctatcctaagccaaaagaataaaactggaggaatcactttacctgacttcaaattagactacagtgctatagtaaccaaaacagcatggtactggcattaaaatatgcacatagaccaatggacaagactagagaacccagaaacaaatccacacacctatagtgaactcgttttcaacaaaggtaccaagaacatgcactagagaaaagacagtctcttcaataaatggtgctgggaaaattggatatccatatgcaaaagaataaaattagacccctatctctcaccatatacaaaaataaaatcaaaatggattaaatacttaaatctaagaccttaaactatgaaactactacaagaaaacattgcrgaaattatccaggacattggtcttggcaaaaatttcttgagcaataccccacaagcacaggcaaccaaagcaaaagtggacaaatgggaccatatcaagttaaaaagcttctgcacagcaagggatacaatcaacaaagtgaagagac

SEQ ID NO: 652063 - DNA, 522 bp, Homo sapiens
aagctatcctaagccaaaagaataaaactggaggaatcactttacctgacttcaaattagactacagtgctatagtaaccaaaacagcatggtactggcattaaaatatgcacatagaccaatggacaagactagagaacccagaaacaaatccacacacctatagtgaactcgttttcaacaaaggtaccaagaacatgcactagagaaaagacagtctcttcaataaatggtgctgggaaaattggatatccatatgcaaaagaataaaattagacccctatctctcaccatatacaaaaataaaatcaaaatggattaaatacttaaatctaagaccttaaactatgaaactactacaagaaaacattgcggaaattatccaggacattggtcttggcaaaaatttcttgagcaataccccacaagcacaggcaaccaaagcaaaagtggacaaatgggaccatatcaagttaaaaagcttctrcacagcaagggatacaatcaacaaagtgaagagac

SEQ ID NO: 652064 - DNA, 515 bp, Homo sapiens
gtttgtgtgaaataaaggatcttaacaagtattaattcatctataaaggagtagaattttatatagatggtgctctaaaaaaaaaagttggggggtatggattaggaatcacccttggggtctggttggcaaaatgaaagaacaaggtttaggcagggaaaaaaatctgtttggccattcttccattgctataaagaaatacctgagactggaaatttcctaaagaaaagaggcttaattggctcacagttctgcagactgtacaagcatgccattagcatctgctcagcttccggggaggtctcatggagcttttacttgtgatggaaggtgaagtgggagcaggcaagtcacatggggagagcaggaacaagagagagaggggagggaggtgccacacacttttaaacaaccagatcccacaagaactcactcactattgcaagaacagcamcaagccatgagggctatgctcccatgtcccagacacctcccaccaggccccacctccaaca

SEQ ID NO: 652065 - DNA, 415 bp, Homo sapiens
tgtgggcaatcccaggaagacaaaatctgcatttaaggtgatcctccaactaggtttcctctccaaaactcactgttcagggaccagaatgctcttagaaggagatggggtcagaaggttgtcagtcagtgacagggtgagcatcacaggaattgctgtcctcccgtggtccaagacagcctctgaccatccattccagtctactgcactgggggcatggggtgatgtggagaatgtgratgacggtcccaagaaaggaagaaggggcatcagaactagatgtataagtgaggagctccacctcctgcgtctgactttaggtctcactgtgactccaagctggctggcagacaggagtggaggacttcccgggctcaccttcttctctctctcctccccctacagggagactctg

SEQ ID NO: 652066 - DNA, 316 bp, Homo sapiens
ccattgcattgcagcaaccctagcttctcatggtaatcaaggccaattattctagccataaggcaactctttcctttgcctgctggtccactgttatgaggagccccaaacagctgagtgatagtcacaacttccagttcactggagcctttcccacctccactggagaaagcatttacttcctggaaacttagacctctmaactggcagaatttaagtttgcaggaacagtaagatacaaattccacaagtaagtccctgggagtgataactgaagggatcaattctacttctatcccttggttcctggactcat

SEQ ID NO: 652067 - DNA, 543 bp, Homo sapiens
tgcactcctgaccttccctgacaagggtttcaactcaatgggtgaactcatcatttacctgtgaaaaagtcttatgagcaaaacataattaaaggaaggaagttaacaacaataaaggcctatttcaagagacctattgtacaacatgctggttacggttaacaacaatgcattttaataattgaaaatcatgaagagaataaattttaagtgttctcaccataaaaaaagataagcatgtgagacaatgaatatgttcattagcttgatttagtcattccacaatgcatatgtgtatcaaaacttcatgttgtacactgtaaatatgtacaatttgtatttgtcaatttaaaaattaatattggctgggtgcagtggcttatgcctgtaatcycagcactttgggaggctgaggctggcagatatcttgaggtcaggagtttgagaccagcctagccaacaaggtgaaaccctgtctccactaaaaatacaaaacttagctgggcatggtgtcgggtgcctgtggtcccagctacttgggag

SEQ ID NO: 652068 - DNA, 581 bp, Homo sapiens
cagcctgccctgcctttgggctaaggctcccccagctggccacctggaacatggcacctttcgagtgaaaagttttctgggccacagtcctgccatcaatcaataaacaaatcctcctgagggcctacatcgtcccaggctttcaaaggtgaatacgsctggttcagtactcgccctgtcagagatcacggtctatgagacttttgtctgatgttactgtctcagaggagcacagcttgtccaagatctggttggagaaaagaaattgtaatatccttgttttgagaaaaatataagatgtgaagtggtgtcatttgtgtagaataatgcaaggtcacatatattatctcatttcatcctagaatcactgtatgattagagctgaaacactcaaacttatctttgaaatatactgtgccatagtggttaagcatgctagcattgaaaccaactgcctgggttcaaatcccagctctatcatatgatagctgtgtgactttgagcaaaatacatactgtctctgtgcctcagtttctccatatccaaaatacagataattatagtacctatctgatatagtt

SEQ ID NO: 652069 - DNA, 581 bp, Homo sapiens
cagcctgccctgcctttgggctaaggctcccccagctggccacctggaacatggcacctttcgagtgaaaagttttctgggccacagtcctgccatcaatcaataaacaaatcctcctgagggcctacatcgtcccaggctttcaaaggtgaatacgcctggttcagtactcgccctgtcagagatcacggtctatgagacttttgtctgatgttactgtctcagaggagcacagcttgtccaagatctggttggagaaaagaaattgtaatatccttsttttgagaaaaatataagatgtgaagtggtgtcatttgtgtagaataatgcaaggtcacatatattatctcatttcatcctagaatcactgtatgattagagctgaaacactcaaacttatctttgaaatatactgtgccatagtggttaagcatgctagcattgaaaccaactgcctgggttcaaatcccagctctatcatatgatagctgtgtgactttgagcaaaatacatactgtctctgtgcctcagtttctccatatccaaaatacagataattatagtacctatctgatatagtt

SEQ ID NO: 652070 - DNA, 559 bp, Homo sapiens
gagccttagatattctcaagcttttcctaaaattgtttttggtaaaaaaaaacaagcaggccaaaaagtatactgtcatgtctccatttcctggagataggaaatgctccttttttgaagccacacccctcaagagggagtcttccaatccctatgtaacagaggccaccaagggggtcggaggcattgcaggagccagggaaacatcttytgatcactccataacaattaacttctaaccctgactcctacgaacagggatgtaacctggatcccaccaccctttcagagagagggaaccctcacctatgccaggaaacatggagtgacactcatcaaagctcagctaacagtttcaggagagcaaacatttgacatctcttctaccttgtgtgttgcccctacttgtataccattttatgaatattttctttagtttctcactgccccagttgcatctgagagaactggtgactttgggtccttccactatgcttcatctgaccttcagaaaatattgttccaatcctttgccaaaggaacctacaaaatatgcagc

SEQ ID NO: 652071 - DNA, 559 bp, Homo sapiens
gagccttagatattctcaagcttttcctaaaattgtttttggtaaaaaaaaacaagcaggccaaaaagtatactgtcatgtctccatttcctggagataggaaatgctccttttttgaagccacacccctcaagagggagtcttccaatccctatgtaacagaggccaccaagggggtcggaggcattgcaggagccagggaaacatcttctgatcactccataacaattaacttctaaccctgactcctacgaacagggatgtaacctggatcccaccaccctttcagagagagggaaccctcacctatgccaggaaacatggagtgacactcatcaaagctcagctaacagtttcaggagagcaaacatttgacatctcttctaccttgtgtgttgcccctacttgtataccattttatgaatattttctttagtttctcactgccccagttgcatctgagagaactggtgactttgggtccttccaytatgcttcatctgaccttcagaaaatattgttccaatcctttgccaaaggaacctacaaaatatgcagc

SEQ ID NO: 652072 - DNA, 559 bp, Homo sapiens
gagccttagatattctcaagcttttcctaaaattgtttttggtaaaaaaaaacaagcaggccaaaaagtatactgtcatgtctccatttcctggagataggaaatgctccttttttgaagccacacccctcaagagggagtcttccaatccctatgtaacagaggccaccaagggggtcggaggcattgcaggagccagggaaacatcttctgatcactccataacaattaacttctaaccctgactcctacgaacagggatgtaacctggatcccaccaccctttcagagagagggaaccctcacctatgccaggaaacatggagtgacactcatcaaagctcagctaacagtttcaggagagcaaacatttgacatctcttctaccttgtgtgttgcccctacttgtataccattttatgaatattttctttagtttctcactgccccagttgcatctgagagaactggtgactttgggtccttccactatgcttcatctgaccttcagaaartattgttccaatcctttgccaaaggaacctacaaaatatgcagc

SEQ ID NO: 652073 - DNA, 577 bp, Homo sapiens
cacatcctcgccagcatttgttattttttgtctttttggtaatagccactctaactgcagtgagatgatacctcattgtggttttgatttacctttccctggtgattagcaatgttgagtatcttttaaatatttgttgaccatttgtttgtcttcttttcagaactgtctgtgtttggatcgtttgcccatgttttaatcattttggggtgggtttttttatgctattgagatttttagttccttgtatattctggatattaatcttctgtcagatgaattgtttacaaaaatttccccccatactgtaggttgtatttttactctgttgtcttttccttttrtgtagggtttcctttgctgtatagaagctttttagtttgatataatcccacttgtttattttgcttttgttgcctgtgcttttgaggtcttattcataaaatcttttcacagagcaatgtcctgaagtgtttccactatgttttcttctagtagttttgtagtttcatgtcttatatttagatctttgatccactgtgagttgattttcatatagggtgagaggtgggagtct

SEQ ID NO: 652074 - DNA, 429 bp, Homo sapiens
ctcttaattcaccctgtaataaggtttcaaatagcaggtttaatttccagcataaagttataatttctgggaattactggacatgaaagagctcaagagaactagttttcctgttcttccagcttttaagtcattaaaagcatccaagaaaattacattgtcaaatraaactttccatcaaagaacccccataatgcaacaaatcctggagctaagcattatcagaacgggaggatggaagcctgacctccaggaacacaccgttaaaggaggcagctacaaggcacacccaagtgccgacacacattccaaacacatggaaccactgtgggcatctggcacatccctcctgtctccccggcttgcagaatctggacacaaacactgacccagagcttaccatgtgcctggcccttggtggaaggaggg

SEQ ID NO: 652075 - DNA, 530 bp, Homo sapiens
gctgtgagaaataatgtctgttgtttaagccaccctgtctatggtatttggatataggagcctgagctaacatgtctttcaaaaagtttgtgtatttcacctaacttgttgaatttattggcataaagttatttatagtattttggtaggcattttatgtctatttttgtgagggatattgatgcatggagtcagattataaaggctcatgggagttgatgtgaatatccctttctaactctgcactcagtgacgtcacattgatagtttgaaagcagccatgatgggagcatttacaacagggaaattggcaaacactacaaatcaaatctttttctcctgccacaaagagctggcttaccagcacaacactgcttgtttttttgttttgttttttaacatctgtaggatctgtatttgtgtccccactttccttcttgaaataggtcattttttctttactactttagctagaggtttagtaattttatygattcttttcaaagaaaaagcttttagttttacttctt

SEQ ID NO: 652076 - DNA, 632 bp, Homo sapiens
ggagtctacagcagcttaggtgaggattgtcgagggtgtgacagcgtactgtcactctgctcacaggcctcattggccctgagcatcagcgttcctgtcctttctttgtcttctgagaagtgaaattcacagggaggaatttatcagatccttagcttttattagatttaatcgagcatctcttcagataactggcttgtgttctcttgggctattgtatttttctgttgctttttttttttaagtgctttctgtattttccaaaaaatggggtgatgtgaaatatactcccacaaaactgtcaagccccttttgttcttttttttttttcacccagtgttccctacaaggcctcttacctccccacagatgccgagtgctctcttcaggtgcaccctatgccctctttctgcaccttcttactggctctgctttaaacgcacaggctcccattgccacgttccactcctgagtcctccagccagggctcactgaccgcagtgatacttagattcgctctctgagctgttccagtgaatygccctcccctgcgcatgatgtagacaccggaggctgtgtgtattgctcctgaccctgtcccctactggctctactggaaattactgggtatt

SEQ ID NO: 652077 - DNA, 632 bp, Homo sapiens
ttattgacttgtctaaactatttttgtaaaatatgtatttgcatgtgtggtctctgaagtctctgtttccttagcttatggtcagcttgaaatttgaaggacttttccttgaatgcaaggaaaaaaaattgggaaaggaagcagtgaaggaaagaagaaaaacagaaagagtaaaatgagaaaaatacttaattcttggtaattggttttcttttggggcacctttttaatacttaaccaggctgtttataactctgccttagccctcacttgctgatggtgctgagtctagagatcagccagaggttaaaacttagggaatttttaggaattttctgagcatgcctcytgctctggtcatgcatggggctttctaaattccccagcatacatgggtataattgaaccctaatttctcaaaccccagattttcctataagcctttcagcaatctgttttttgcctcaactgtaatatttggccccaggtgataactcgctgtttgtttggtttacaatgtctttaagaaatttcttttgcgttttctacccagaatgagtttaagttaggtggaaccgagtcgagtgccttgtttcagtccttctggtagtttctcatagcatccagacagg

SEQ ID NO: 652078 - DNA, 620 bp, Homo sapiens
ttctcaaaccccagattttcctataagcctttcagcaatctgttttttgcctcaactgtaatatttggccccaggtgataactcgctgtttgtttggtttacaatgtctttaagaaatttcttttgcgttttctacccagaatgagtttaagttaggtggaaccgagtcgagtgccttgtttcagtccttctggtagtttctcatagcatccagacaggtaaaaatagagaacaacatttatttgaaaataaggtctgcttggcttcctccataactagagaccacacgggggaacatacgttatcatttccaygactgatggtgaaacagggtggttgatggggttaagaacatattaaaatagcaaaaggctttagttttaaacttcctttatttatgttaaaagttgtactctataaacattttactatgttccagagtacttatgaaggtgatgctgacagattttgatttatattttgatatttctgtgtagggcagacacttagagctacctagccctccattattgctgatgtcttaccctacatatgcctttataaatgagcataagacctgctaggtttgtaaaccaataatggtaacattttaaatacat

SEQ ID NO: 652079 - DNA, 620 bp, Homo sapiens
ttctcaaaccccagattttcctataagcctttcagcaatctgttttttgcctcaactgtaatatttggccccaggtgataactcgctgtttgtttggtttacaatgtctttaagaaatttcttttgcgttttctacccagaatgagtttaagttaggtggaaccgagtcgagtgccttgtttcagtccttctggtagtttctcatagcatccagacaggtaaaaatagagaacaacatttatttgaaaataaggtctgcttggcttcctccataactagagaccacacgggggaacatacgttatcatttccatgactratggtgaaacagggtggttgatggggttaagaacatattaaaatagcaaaaggctttagttttaaacttcctttatttatgttaaaagttgtactctataaacattttactatgttccagagtacttatgaaggtgatgctgacagattttgatttatattttgatatttctgtgtagggcagacacttagagctacctagccctccattattgctgatgtcttaccctacatatgcctttataaatgagcataagacctgctaggtttgtaaaccaataatggtaacattttaaatacat

SEQ ID NO: 652080 - DNA, 620 bp, Homo sapiens
ttctcaaaccccagattttcctataagcctttcagcaatctgttttttgcctcaactgtaatatttggccccaggtgataactcgctgtttgtttggtttacaatgtctttaagaaatttcttttgcgttttctacccagaatgagtttaagttaggtggaaccgagtcgagtgccttgtttcagtccttctggtagtttctcatagcatccagacaggtaaaaatagagaacaacatttatttgaaaataaggtctgcttggcttcctccataactagagaccacacgggggaacatacgttatcatttccatgactgatggtgaaacagggtggttgatggggttaagaacatattaaaatagcaaaaggctttagttttaaacttcctttatttatgttaaaagttgtactctataaacatttkactatgttccagagtacttatgaaggtgatgctgacagattttgatttatattttgatatttctgtgtagggcagacacttagagctacctagccctccattattgctgatgtcttaccctacatatgcctttataaatgagcataagacctgctaggtttgtaaaccaataatggtaacattttaaatacat

SEQ ID NO: 652081 - DNA, 532 bp, Homo sapiens
agatcttagatctaagtctttaatccatcttgacttgatttttgtaaatggtaaggaatagggtctaatttctttggcatatagatatccagttttcccagcaccatttattgaagagactgttcattccctagtgtatattctttgtagctttgtgaaaaacaaaattactgtagatgtktgggtttatctttgggttctttattctgttacactgatccatgtttctgcttttatgccagttccaagttgtcttggtcactataactctgtactatatcttaaagtcaggtagtgtgattctttcagttttgttctttttgcttaagctagctttgactattctgcatcttttgtggtttcacataaattttagggttgtgttttctatttctgtgaagattgtcattggtactttgatagaggttgcattaaatctgtagactgttttgggtagtaggaacattttaataatattaattcttccagtccataaatatggaatatcttttggtgtgtcttcttcaaggtc

SEQ ID NO: 652082 - DNA, 530 bp, Homo sapiens
ttttgtaaatggtaaggaatagggtctaatttctttggcatatagatatccagttttcccagcaccatttattgaagagactgttcattccctagtgtatattctttgtagctttgtgaaaaacaaaattactgtagatgtttgggtttatctttgggttctttattctgttacactgatccatgtttctgcttttatgccagttccaagttgtcttggtcactataactctgtactatatcttaaagtcaggtagtgtgattctttcagttttgttctttttgcttaagctagctttgactattctgcatcttttgtggtttcacatamattttagggttgtgttttctatttctgtgaagattgtcattggtactttgatagaggttgcattaaatctgtagactgttttgggtagtaggaacattttaataatattaattcttccagtccataaatatggaatatcttttggtgtgtcttcttcaaggtctttcttcagtgttttatagttttcattgtagagatct

SEQ ID NO: 652083 - DNA, 604 bp, Homo sapiens
ttttggttcttataaaggtgctcttgtgtgtgtgtgtgtgtgtgtgtgtgtgtgtttgtgtgtgtagatagttgctaaattggtgtttttgcagagggaataattggtgtagccttctattcaggcatcttgctgtgtcctgcttttcaagatacagatatttgggtggtataagtaatatatgagtgaaaaatcagtagccatcaaggatattattatacagtagggctcaactaaaaattaaacagctgatatcttttgcaatgtgagatctcacaataataagtatagactaatgatgttaacaataataatagcttatggtttgattttcactttattccagactgtgatctaagagttctatatctataaacctatttaatcatcatcaggtrtactgatagtagcccctgtttacagtgaatgcacagacatgtcacaaggtcacatagcaatgtcagagaatggccaagaagggattcagacccaggctttacagcccatgcttccaaacatttcagtgtgtcaataaacatggaatttgaaatctgattattataccaatgactaccaagactgaagtatatccaattctcaaatg

SEQ ID NO: 652084 - DNA, 635 bp, Homo sapiens
tcatcttgtaaagaattctgagatggaaaatctgtaaatgtttgaagggcatggagaatttgagatatttcctagccaagagtttagatgaaaatctaggcaattatggtggccttttatagccttcaagcatatctaaagacatattaagcacacagtgctttgatgaagcaggggaaaaatgtaaaataatttgttggaaaatgttttgtaactaatggattgtggtattaaaaagtgagaatggattaatattcattgaaatctcaaaggagtttataaaaatcctatgggacaattgagtgacagctacaagataatgacttaaagatgtgattatttcctgtgaaatcttaaacaaggggatckttggaaccaaaggattctaggactcttggtgccaacagagctactctactatttatttgaagccagttgactgaacctaccttataccacaatcaaacccccaagggcatcaaataggataaaagaaaaaagcacccatccaaaagataacagcctcaaagcctgaaggaacatcagccaacaaaaatgaggaaaaaacagcacaagaactctgacactcaaaaagtcagagtgtcttcttttctctaaacaaccacaatagttct

SEQ ID NO: 652085 - DNA, 545 bp, Homo sapiens
gggcaaccagcagctctctgggctgctctgtctatggagtagccattcttttattcccttactttctttataaacttgctttcgctttacgaactctccttgaattctttcttgtgtgagatccaagaaccctcccttgggatctagatatggactcctttcctataacacttccagcaggtgggagggaaaaaggaatctttttaaaatrttccagagcactctgctcttcttaataaggcctaccctcaggagaaattattttaccagagtctaatttgctggaatttaattacagtggaatctacctgagatgagactctagccattttgtcccacctaatggggaaaagagacagagaagcactgatgaagttcacaatacagaggcacaggcttaccaaaaaaaggatacccaatcagagtagaaaacttcaactctctccataccattaaatacctatttattggtattcaacttgtattaatacatcacgttcggatttgaaagaaaagttggaaggcatataaaaggcagaaacagt

SEQ ID NO: 652086 - DNA, 545 bp, Homo sapiens
gggcaaccagcagctctctgggctgctctgtctatggagtagccattcttttattcccttactttctttataaacttgctttcgctttacgaactctccttgaattctttcttgtgtgagatccaagaaccctcccttgggatctagatatggactcctttcctataacacttccagcaggtgggagggaaaaaggaatctttttaaaatgttccagagcactctgctcttcttaataaggcctaccctcaggagaaattattttaccagagtctaatttgctggaatttaattacagtggaatctacctgagatgagactctagccattttgtcccacctaatggggaaaagagacagagaagcactgatgaagttcacaatacagaggcacaggcttaccaaaaaamggatacccaatcagagtagaaaacttcaactctctccataccattaaatacctatttattggtattcaacttgtattaatacatcacgttcggatttgaaagaaaagttggaaggcatataaaaggcagaaacagt

SEQ ID NO: 652087 - DNA, 456 bp, Homo sapiens
cccaaaccaaaaataccagaataggatatttaagaactgggaaacaactacaaaaggtgtaacatacatacaatgagaataacagaggagaagaaataaacagaagcaatatttgatgtaataattactgagaatttctccacattaatgtcagacaccaaaccacagatctggaaatctcagagaacaccaagcaagataaatgccaaaaatgacrcatgagcatatcatattcatacttcagaaaatcgaatatataaaagaatcccaaaagaagccatagggaaaaaaataccttacctacagaggatcaaagataataattacatctgacttctccttataaaacataaaatcaagaagagagtagaatgaagtatttaaaagattgaggcaaacccccccccaccaaactaggattctgtatcctatgaaaatatccttcaaaaggaaagg

SEQ ID NO: 652088 - DNA, 456 bp, Homo sapiens
cccaaaccaaaaataccagaataggatatttaagaactgggaaacaactacaaaaggtgtaacatacatacaatgagaataacagaggagaagaaataaacagaagcaatatttgatgtaataattactgagaatttctccacattaatgtcagacaccaaaccacagatctggaaatctcagagaacaccaagcaagataaatgccaaaaatgacacatgagcatatcatattcatacttcagaaaatcgaatatataaaagaatcycaaaagaagccatagggaaaaaaataccttacctacagaggatcaaagataataattacatctgacttctccttataaaacataaaatcaagaagagagtagaatgaagtatttaaaagattgaggcaaacccccccccaccaaactaggattctgtatcctatgaaaatatccttcaaaaggaaagg

SEQ ID NO: 652089 - DNA, 456 bp, Homo sapiens
cccaaaccaaaaataccagaataggatatttaagaactgggaaacaactacaaaaggtgtaacatacatacaatgagaataacagaggagaagaaataaacagaagcaatatttgatgtaataattactgagaatttctccacattaatgtcagacaccaaaccacagatctggaaatctcagagaacaccaagcaagataaatgccaaaaatgacacatgagcatatcatattcatacttcagaaaatcgaatatataaaagaatcccaaaagaagccatagggaaaaaaataccttacctacagaggatcaaagataataattacatctgacttctccttataaaacataaaaycaagaagagagtagaatgaagtatttaaaagattgaggcaaacccccccccaccaaactaggattctgtatcctatgaaaatatccttcaaaaggaaagg

SEQ ID NO: 652090 - DNA, 493 bp, Homo sapiens
atgtggatcaacccgtggcccagtgcacatggataaatttggaaagtgacacaataaggaatgcccacaaatgccaatgggatattcaggaaaggagtctgtttttgctggtttgctctgtttcatatccctttttgagttgcattctcatttaatattttaaatttatttcttaggaaatatttgatacttataaaacaacagtataaaatacatatgaggattatgaagcataatgataaggtgaattcccatgaaaccagcaccctacataagagttagaacaatactaatagaattttttatttatgtgttactctcttgcttctctgcctccctgattgctccccacctagaaataatgaytactttagatttcgcatttttctcttaaaaagtatttaaaatcgtatatgtagattctcctcaacaattcgttgtttaattagttttgcattgtttgattttgacctttacaaaaaatgacaacagt

SEQ ID NO: 652091 - DNA, 416 bp, Homo sapiens
gatatatccatattttgtcaattaaaaataaataattttaaaaagacatgtatgtaaaaagtgagaatgcaaagatgttacttatgaatcttatytaaagaaaaagataagaatttatagcgcatattcaaattatgttcaatcttttctaagtaagaaatcctgattcagtcccatagaagctgtaataaaagctcagttttattatactctattatgttaataataccctcttgtattatttatggtctcatgatcctgtccacagaaatagaataacagggtactagatccaagttgagacaggatggccttcaagattcctggtgaggagcaagtacaaacggagatattccaggagcaaacctaaagagaaagcactgtaggaaatatagccaagacatcagtccacaggg

SEQ ID NO: 652092 - DNA, 416 bp, Homo sapiens
gatatatccatattttgtcaattaaaaataaataattttaaaaagacatgtatgtaaaaagtgagaatgcaaagatgttacttatgaatcttatctaaagaaaaagataagaatttatagcgcatattcaaattatgttcaatcttttctaagtaagaaatcctgattcagtcccatagaagytgtaataaaagctcagttttattatactctattatgttaataataccctcttgtattatttatggtctcatgatcctgtccacagaaatagaataacagggtactagatccaagttgagacaggatggccttcaagattcctggtgaggagcaagtacaaacggagatattccaggagcaaacctaaagagaaagcactgtaggaaatatagccaagacatcagtccacaggg

SEQ ID NO: 652093 - DNA, 449 bp, Homo sapiens
aggatttaaccttacctaagatttaggggggcaagtgaaatataaaagtaggagaaaaggcaggaagagccctgtaggcactcccagttcctagctcaaacccagggaagccactcctggctttatcacacaggggtccttggggaaggcagccagtggaataggggagagggccacaggatgaaggaatcttycaactgcattttgtaataattttgactgtgcatgaactttcctgagcagaatctgggagggcaaattgggagtgcagatacaagagtagaagctacagccaatggtacaggcaggcagagaggagtgaggcctgagagccctgcttggtttctcagctgggaggcttatagcctaggacaggatctcagacctgctcccagctgcttggatataaactcagtgctcttgttgggcactgggggaatgagacaggc

SEQ ID NO: 652094 - DNA, 449 bp, Homo sapiens
aggatttaaccttacctaagatttaggggggcaagtgaaatataaaagtaggagaaaaggcaggaagagccctgtaggcactcccagttcctagctcaaacccagggaagccactcctggctttatcacacaggggtccttggggaaggcagccagtggaataggggagagggccacaggatgaaggaatcttccaactgmattttgtaataattttgactgtgcatgaactttcctgagcagaatctgggagggcaaattgggagtgcagatacaagagtagaagctacagccaatggtacaggcaggcagagaggagtgaggcctgagagccctgcttggtttctcagctgggaggcttatagcctaggacaggatctcagacctgctcccagctgcttggatataaactcagtgctcttgttgggcactgggggaatgagacaggc

SEQ ID NO: 652095 - DNA, 483 bp, Homo sapiens
cggccgacaagctggtgtaaaagacagaattttgagtaagatgagaggcgggaacacgggttaraaacctgaagtagggctgtagctgtagggctggagaggggatggagtctataaatatttatgaaagaaactgactagagcagtgattattattttttagggataaaaggaactggcatttactgagtgcttactttgtgccaggcaaactcctgtgcatattactcatggtgcttcattaaatcctcctaattcttgaaaggaggtatgagccccaattcatggatgaggaaattaatgttcaggaaagaaaatattaataccatgtccaaagtcatacaaagtaacagagccaagatatgagccccctaatcctctgcaacaagctatccatcctttcatgaatgtggtgtgcaaggaagtgagaagaacccaggatgataccagaacaggaccatacctcattagctaaacaataga

SEQ ID NO: 652096 - DNA, 506 bp, Homo sapiens
ggccgacaagctggtgtaaaagacagaattttgagtaagatgagaggcgggaacacgggttagaaacctgaagtagggctgtagctgtagggctggagaggggatggagtctataaatatttatgaaagaaactgactagagcagtgattattattttttagggataaaaggaactgrcatttactgagtgcttactttgtgccaggcaaactcctgtgcatattactcatggtgcttcattaaatcctcctaattcttgaaaggaggtatgagccccaattcatggatgaggaaattaatgttcaggaaagaaaatattaataccatgtccaaagtcatacaaagtaacagagccaagatatgagccccctaatcctctgcaacaagctatccatcctttcatgaatgtggtgtgcaaggaagtgagaagaacccaggatgataccagaacaggaccatacctcattagctaaacaatagagagacaagccttatttttctgagc

SEQ ID NO: 652097 - DNA, 467 bp, Homo sapiens
ttggtgagatgtcccacaggccttggataatacagaaagtgaaaaaagggattaaaaaaagatagaagttgggtctgtagaattaattcattggagtttttaaaaaaggctttgggtctcatgaacatctgattttaatgtctagtattgctgggttatatcgatagacaaattaatttgggttatatgactaaaacctcgttgattctgaatttctgaatttggatttatactattcagcctgattggggcaggggtctttcactcagctgccgcttggtagaaagtagttaggagactggacctatggctgtcttaggctaattctgtgatcttgggcaaatcacttaatatccctggcctttaattttcctcagctaaggaatgtattagacttcatctstgagattcccttcaagtcaaagagcctagagcttttgtgcatgacaccaagatgggcttatgtc

SEQ ID NO: 652098 - DNA, 608 bp, Homo sapiens
ctttgctaaaagaaaacatggacttctctaccccacactactttagctgggctttagggttgccagaattttcacctgatggctacagaaaccatttgcctaggggtacagaacattcttctaggttctgttggttcccttggtgataacaccctatcaaagattgacctgtgcttcagtcatctccttgcccaccccatcccctcaattcgtgtcagctctagaaccccatgagtctcatggacgggtcccgactcccttggggatgcctccagcagctgctgcttaacggagaagctgggctgggctggactggagggagcaggagcaagggcagaggacaagggggaagaaaaggagactggggggaagggaacaagggacccagcaaaggtgggcctccrggggggcagcagggttaggagtttgtgagaaaggtaaatgcaaggagaaggcaggagatgaaagagaagcagatctcagattcagaagttaaataccccactcacccccttcttcctgggactgccaagatacttttggtgacactgacttttctaactcatagctggaaatgaggggctattacctgtcctgataaataccca

SEQ ID NO: 652099 - DNA, 514 bp, Homo sapiens
ggattctgctctatggtcaatatacttgctcgtggaggtgccatgttgggtgttaaggtagtaggctcagctctgagtacagttatctactgactggaaccggttcaaggtggaggattttgtctgatgacagaaggacctttgtgaaagtctgggaatatggattctatcgatgctgtacacaccactccacgacccagatgcctgagatgctagggttgaaaataggtgcactcttatgatcccctacaccaccctcacacttcctgatccttggatgcataaaccaggcccaataaacatgcaggtgtrggaggtcatcatgcaggtgcccatcctccatgtgtccactttcaagcccctgggaaatcagctgtccctggtgccaccctgtcctgggtgctcagcacaacataggctctggaaccaagggctcggatccttcagccccttctatttttatattccccagaagggagaggggctgctattttgtctatggtgttcttgttgg

SEQ ID NO: 652100 - DNA, 365 bp, Homo sapiens
ctacactactgagtgtggtagtcactagccaaacatggctgttgggtacttgaaatgtgtctagtgcaactgagacactgaatttttcatttagttaaaatttaaaatgaagggagatcaatttattttcaacaaagattccaaaacaattctttgaggaaatggtgctggatacacacatgcaaaaagatacatttagaccacaccccacactatacacaaaaataacttaaaacagttcagagacttacatgtaagatctaaaacttacaatttttggaagaaaacrtaggaaaagtctttggttaggaaacaagttcttacatacaataccaaaagcataatccacaaaagacaaaattgta

SEQ ID NO: 652101 - DNA, 567 bp, Homo sapiens
tagctccatcacattctggacttcctgtctcacatatgaggtaaaaaacaaaacaaaacaaaaaaataccctaagaaacaattcattctggacttcttatctcacatatgaggtacaaaacaaaacaaaacaaaaaaataccctaagaagcaattatgaaggttacagtctagagtcacaggtccactaaaatactgagctccaatcatgggactatagaatgctctcctacccmgtatcttgctaccacatcaacaggactcctgaatagtaaaagtggattatagctgacagggctgcaaggcttagattctatttacgaaggagtttctaaggaaactcaaagacaacagaggaggcaaacacaaggactttagaagaaattaaaatctttgacacctactgctgcagcaaactaaacacagtctaactcctggtcagataaaaataaaaataaaacttcacacacagtctacctcaattcctattaccatgtctgctttcagcaaaaaattacaaggcgtgctaaaagacaagaaaaaatacaatccaaagagacatagccag

SEQ ID NO: 652102 - DNA, 471 bp, Homo sapiens
tagaactcagaatcatctgaccttgcctggggactgagtggagagggatcaagtgggataagcctggcccagtcatgaaactttacttgttggagtggagcagttactctaagtacctaggttgtttgcctttgccccaggtgcagatttcaatggactcagttctggatcctgggagaaagagaggatggtacataaaaatcagaagacacatcttcacccaagcctctgagacttwggcgagccaggcaatattgctttggaaatacctgatggagagaataaatagaaagaggcattcttctccattgcaccataaatcactgagcagaattggcccatctgtcctctggggtattggtggcagtgccactagaacatgcagtggtggtggccagctgaggggcaagtggcctggtgctatacaggaggcagttgtttccagagaggcacagatatggtagagccctg

SEQ ID NO: 652103 - DNA, 532 bp, Homo sapiens
atgtatcttcaagtattttatttttttcttcaagtatttcaaaaatgcatgctcatataatcctatctaagcatatatatgtataaaaaaatctatatacattcccacacatagaattttggggccattttttaggaaagcagggttatattatacactcttttcccagatttttcattttcaagaggaaatacagttctacttcatttactgtatggctgtattatgatttactttgtttccggttttctgctacactgaataatgctcagattaattcccttgcacatgtgtccctgtgtactgggactttcatttttataagttagattttctgaagtataaattctgagtcaaagaaatgtgtatatttaattttaataaacgttgcccatagtgagggatagyggcacatgcctctaatcccagctactcgggaggctgaggagggaggatcacttgagcccaggaggtcaaggctgtagtgagctatgattgtaccactgcactccagcccaggcaatagagcaag

SEQ ID NO: 652104 - DNA, 492 bp, Homo sapiens
agccaccctgattacccatgttggacacatagaaggagcaagaaataaactttagttgtgttaagtcacagagattctgagcgatttgttactgcagtatcgcccagctcattctgactgatgagaatgctgtgagacttatgtcagatgacatacataaaaacacgtattcaaagtcacaaatcaacttacatatcaataaatattggccaatataattaaaattatgagcaaataacaacaataataaagctaccyttgtgtcttgagacaggacaggactttcctgccgggtggtttaatttcaggtggttaagaagatacatgtaccaaaagaaatacctgccctgcctgctcaacattgctctatactgtagttaagagtttaattcctgctaaatgcaagccacttcaccttgctaaaatgaaagtccatgaatataaggaaggaaacttaaaacacatttgaagataatgatttatattaggaat

SEQ ID NO: 652105 - DNA, 492 bp, Homo sapiens
agccaccctgattacccatgttggacacatagaaggagcaagaaataaactttagttgtgttaagtcacagagattctgagcgatttgttactgcagtatcgcccagctcattctgactgatgagaatgctgtgagacttatgtcagatgacatacataaaaacacgtattcaaagtcacaaatcaacttacatatcaataaatattggccaatataattaaaattatgagcaaataacaacaataataaagctacccttgtgtcttgagacaggacaggactttcytgccgggtggtttaatttcaggtggttaagaagatacatgtaccaaaagaaatacctgccctgcctgctcaacattgctctatactgtagttaagagtttaattcctgctaaatgcaagccacttcaccttgctaaaatgaaagtccatgaatataaggaaggaaacttaaaacacatttgaagataatgatttatattaggaat

SEQ ID NO: 652106 - DNA, 492 bp, Homo sapiens
agccaccctgattacccatgttggacacatagaaggagcaagaaataaactttagttgtgttaagtcacagagattctgagcgatttgttactgcagtatcgcccagctcattctgactgatgagaatgctgtgagacttatgtcagatgacatacataaaaacacgtattcaaagtcacaaatcaacttacatatcaataaatattggccaatataattaaaattatgagcaaataacaacaataataaagctacccttgtgtcttgagacaggacaggactttcctgccgggtggtttaatttcaggtggttaagaagatacatgtaccaaaagaaatacytgccctgcctgctcaacattgctctatactgtagttaagagtttaattcctgctaaatgcaagccacttcaccttgctaaaatgaaagtccatgaatataaggaaggaaacttaaaacacatttgaagataatgatttatattaggaat

SEQ ID NO: 652107 - DNA, 534 bp, Homo sapiens
aaccagaagagcaatttacctttcttcctcttgtatttatgtacacttgatcacccccctgcttgactactggcttcttgggagtaggattcaagtctgcacaaattccagtgccttatactttgtgagtgtacaaaaaatacttcttgaatgaataaattggtaaaatttaatgctggtcagtgatccattattacatatggtgaaaagctccaaacaaccaaggaaatacaaacattccaggaatgactttatccattctctagaacacagcattgagcttttctaatattctcataagtttccagatagcagggtgctttggatttatctggaccaaagacaaaatagctggcaactcagctgggatcttttgctacagagctgctgtgcaagcaattcaaaacatagattaacaattcttttcaaccagccctcaatcatgaatgtcacaragatggacctctgtgatcctgaacaagttatatatcttgctaagccttagtttccccagctataaactggggacaataa

SEQ ID NO: 652108 - DNA, 669 bp, Homo sapiens
tatataaactgtaccatcaggtactgcttaataacaggaatatgttctaaaaaatgcattgttatgcgatttcttcatcatgtgaacattgtagagtgcacttacacaaacttagatggtgtagcttactacacaccgaggctctatggtgtagcctattgctgctcagctataaaactgtagagcacgttactacactgaatactctgggcaattataacacaatggttaagtatttgtgtatctaaacacggaaaaaaggaatgcattgcactacaatgttacaacagctatgatatcactaggtgataggaatttttcagctccattatgagaccaccattgtatatgcattccattgctatgaagcatatgactgaatacatatttggagagagacagagaaagagaggtcgccgttttctctgctttagaattgtgaactccctgctctgtagatacttctgtccatggaaagatgccttttaatgccaagtctacacgttcctttcacccaaaccaaccatgcatcatctccatttcccccctactttggcyctctcttgccttctatctgcacctttgcagaaatggtatatgctaattgagagtatgattcagagccacatcaggattccaacttccctactcgttagctttgtgaccttg

SEQ ID NO: 652109 - DNA, 525 bp, Homo sapiens
aaaataatacactctatgacatttgtatttttcttaaatgtttaatttatagccaaatattatgcatgyttgcaatgttaattatcttctaaacttccagaagaagaactatggcaatgtgatatttcacactataaagcatatactacatgcatgatatactttacactatagactccagaagaattcgggaactatgtcttttcccactaccttgagcaacatctacaccacaggctcttggtgacatttgggagagtgttcatcactcaattttacaggcaggtcgaatggctccagaacacagtcattaggaatgaggaaaggcactgtgtttacctgcctaatttgagggctgttcctgtggagactattctatcatgactcatctgtaggatgataaaaaccactgcaaggacccaattgcattctcatttgttttattacttaatcattctagacagtcaacttatgttatgatatgggtatcagaacaatgcaaggacaaacaacagtaattcaaaa

SEQ ID NO: 652110 - DNA, 525 bp, Homo sapiens
aaaataatacactctatgacatttgtatttttcttaaatgtttaatttatagccaaatattatgcatgtttgcaatgttaattatcttctaaacttccagaagaagaactatggcaatgtgatatttcacaytataaagcatatactacatgcatgatatactttacactatagactccagaagaattcgggaactatgtcttttcccactaccttgagcaacatctacaccacaggctcttggtgacatttgggagagtgttcatcactcaattttacaggcaggtcgaatggctccagaacacagtcattaggaatgaggaaaggcactgtgtttacctgcctaatttgagggctgttcctgtggagactattctatcatgactcatctgtaggatgataaaaaccactgcaaggacccaattgcattctcatttgttttattacttaatcattctagacagtcaacttatgttatgatatgggtatcagaacaatgcaaggacaaacaacagtaattcaaaa

SEQ ID NO: 652111 - DNA, 525 bp, Homo sapiens
aaaataatacactctatgacatttgtatttttcttaaatgtttaatttatagccaaatattatgcatgtttgcaatgttaattatcttctaaacttccagaagaagaactatggcaatgtgatatttcacactataaagcatatactacatgcatgatatactttacactatagactccagaagaattygggaactatgtcttttcccactaccttgagcaacatctacaccacaggctcttggtgacatttgggagagtgttcatcactcaattttacaggcaggtcgaatggctccagaacacagtcattaggaatgaggaaaggcactgtgtttacctgcctaatttgagggctgttcctgtggagactattctatcatgactcatctgtaggatgataaaaaccactgcaaggacccaattgcattctcatttgttttattacttaatcattctagacagtcaacttatgttatgatatgggtatcagaacaatgcaaggacaaacaacagtaattcaaaa

SEQ ID NO: 652112 - DNA, 525 bp, Homo sapiens
aaaataatacactctatgacatttgtatttttcttaaatgtttaatttatagccaaatattatgcatgtttgcaatgttaattatcttctaaacttccagaagaagaactatggcaatgtgatatttcacactataaagcatatactacatgcatgatatactttacactatagactccagaagaattcgggaactatgtcttttcccactaccttgagcaacatctacaccacaggctcttggtgacatttgggagagtgttcatcactcaattttacaggcaggtcgaatggctccagaacacagtcattaggaatgaggaaaggcactgtgtttacctscctaatttgagggctgttcctgtggagactattctatcatgactcatctgtaggatgataaaaaccactgcaaggacccaattgcattctcatttgttttattacttaatcattctagacagtcaacttatgttatgatatgggtatcagaacaatgcaaggacaaacaacagtaattcaaaa

SEQ ID NO: 652113 - DNA, 576 bp, Homo sapiens
tacccaacttaagtttcacaacaaatcattattactcccttgcacataccctcaacccccattccccctcactttattgtacttgtgacaaaactataactcttgttaaatctaattctcatctactstgtacctgcactcagctactctccaatgcccctctctgacatgtctattaagcttgatcatgtggctttgctttagccaatgaaatgtgagaagtgagacacaccctttgcattcagaagctttaacggccatcttgtggttctgccatgatctctttcctctctgccacaagacggaaatgtcctatatggggaattgttccttctctttgggtcccagaatgaaatgtataataagtaaacatttaactgtaaaacaaacttcccaactattttccaaattggctataccattttgcacctgcaaccaggcagctggagaaaaatgcacgaccttattgactggtctcatgttaaagttatgaccaccaacttcaaatgggtccttaatgttggcaggtcatcatgctagttgttttcagaccattcattctcccactatgcttct

SEQ ID NO: 652114 - DNA, 576 bp, Homo sapiens
tacccaacttaagtttcacaacaaatcattattactcccttgcacataccctcaacccccattccccctcactttattgtacttgtgacaaaactataactcttgttaaatctaattctcatctactgtgtacctgcactcagctactctccaatgcccctctctgacatgtctattaagcttgatcatgtggctttgctttagccaatgaaatgtgagaagtgagacacaccctttgcattcagaagytttaacggccatcttgtggttctgccatgatctctttcctctctgccacaagacggaaatgtcctatatggggaattgttccttctctttgggtcccagaatgaaatgtataataagtaaacatttaactgtaaaacaaacttcccaactattttccaaattggctataccattttgcacctgcaaccaggcagctggagaaaaatgcacgaccttattgactggtctcatgttaaagttatgaccaccaacttcaaatgggtccttaatgttggcaggtcatcatgctagttgttttcagaccattcattctcccactatgcttct

SEQ ID NO: 652115 - DNA, 654 bp, Homo sapiens
cagattggacaatagttttatagaacttaaccaacttacagaactgaaattttataattgtcgaatagcaactcctcccctcttgttgatcttaaaatggttttctttcaccttgatttttgaaagatatattttcatgggtgtastattctgggccaacaatttattttattttatttttctgtcagcactttaaagacgttctgttgtcttctgacctgtgtggtttctggtaagtcagctgtcattttttatctttgtttctctttatgtggtgtatctctttcccctgactgctttaaaatgttttctcattattaatggatttcaataacttgattatgaagtgcctaaagaggtttagtttatatttattccgcttggggtttttggatctatgttttttttaatttcaacaaatttggattttgggggccattatttcttcaattacattttatgtccacttctcttccccaagtcttctctcctgctaggactccagttaaatgaatatgagacactttgattagtcccacaactcactaagatcttgtgccatttttttttcagtatcattttctctttgtgcttcatgttggttagtttctatagcagtgtcttcaagttcagttttctttcctggtatggcat

SEQ ID NO: 652116 - DNA, 564 bp, Homo sapiens
tcctcccctcttgttgatcttaaaatggttttctttcaccttgatttttgaaagatatattttcatgggtgtactattctgggccaacaatttattttattttatttttctgtcagcactttaaagacgttctgttgtcttctgacctgtgtggtttctggtaagtcagctgtcattttttatctttgtttctctttatgtggtgtatctctttcccctgactgctttaaaatgttttctcattattaatggatttcaataacttgattatgaagtgcctaaagaggtttartttatatttattccgcttggggtttttggatctatgttttttttaatttcaacaaatttggattttgggggccattatttcttcaattacattttatgtccacttctcttccccaagtcttctctcctgctaggactccagttaaatgaatatgagacactttgattagtcccacaactcactaagatcttgtgccatttttttttcagtatcattttctctttgtgcttcatgttggttagtttctatagcagtgtcttcaagttcagttt

SEQ ID NO: 652117 - DNA, 546 bp, Homo sapiens
caccctccgggcatggaacacaggtcctacctggaaaggtctaagattctctcatctgtcctcctatggtgtattaagcaccacagctgcaggagatcagaattttactgtttaaytatttaatgctggttttcttacagcctaccctgtatctccagttttagttcctattattataagtttttctggcctagtccctgaacctttagaacttaaatttctctctggctcttggcctgtagtatgacacgaattttcgtatttgtttttctctctacgtgtgttagcaaaattgaagttttgaataaaagtgttgccaaatgataaaatgtatggttgtcaaatatttatctataagtcttttcctttattaaaataaaaactcaattcgtgattactgtagaaagttggaagcataaaacagtccaataaccagttgtttgaaaagctaagggaaagccagttgtgttttgctggtggcaaaattgaaggtgcactgattctggaataagaaaacacgggttcaaatagaggttctgcagttgc

SEQ ID NO: 652118 - DNA, 546 bp, Homo sapiens
caccctccgggcatggaacacaggtcctacctggaaaggtctaagattctctcatctgtcctcctatggtgtattaagcaccacagctgcaggagatcagaattttactgtttaattatttaatgctggttttcttacagcctaccctgtatctccagttttagttcctattattataagtttttctggcctagtccctgaacctttagaacttaaatttctctctggctcttggcctgtastatgacacgaattttcgtatttgtttttctctctacgtgtgttagcaaaattgaagttttgaataaaagtgttgccaaatgataaaatgtatggttgtcaaatatttatctataagtcttttcctttattaaaataaaaactcaattcgtgattactgtagaaagttggaagcataaaacagtccaataaccagttgtttgaaaagctaagggaaagccagttgtgttttgctggtggcaaaattgaaggtgcactgattctggaataagaaaacacgggttcaaatagaggttctgcagttgc

SEQ ID NO: 652119 - DNA, 544 bp, Homo sapiens
tatattttctagtagccctgcttctctaattgaatcttgactaaaaaagcttttcatctgatccaygacccactttgcttcctgtacttcatttcaaagtttgagaatattggttagtttctctcaaagtctctttgatttaattctctggtaattttgttgtttctcagaaggggctttcgcttcaacatgcaatgactttgttcagtcctattgaatgtacactttatttagcagaaatttatttacttttctggcacatgttattatctttgcttagtaaattagaagtaacaatcaatccataaaagatttaggtgctggggcttatgtaaccattttctccagctgcctcctaggaaaaaaagattgtcaacccaagtccaattttgtctgttctatgctcatacaaatgtgactccattaactctagctcttggtttgaagaaaattgctgggggtaaaaataattaggtcactggtaccacttccagctattactaactagtgacaaacatctccaaccactgtaggcaagtagaaa

SEQ ID NO: 652120 - DNA, 544 bp, Homo sapiens
tatattttctagtagccctgcttctctaattgaatcttgactaaaaaagcttttcatctgatccacgacccactttgcttcctgtacttcatttcaaagtttgagaatattggttagtttctctcaaagtctctttgatttaattctctggtaattttgttgtttctcagaaggggctttcgcttcaacatgcaatgactttgttcagtcctaytgaatgtacactttatttagcagaaatttatttacttttctggcacatgttattatctttgcttagtaaattagaagtaacaatcaatccataaaagatttaggtgctggggcttatgtaaccattttctccagctgcctcctaggaaaaaaagattgtcaacccaagtccaattttgtctgttctatgctcatacaaatgtgactccattaactctagctcttggtttgaagaaaattgctgggggtaaaaataattaggtcactggtaccacttccagctattactaactagtgacaaacatctccaaccactgtaggcaagtagaaa

SEQ ID NO: 652121 - DNA, 633 bp, Homo sapiens
taagtaaaaatccattcaaagcaaaataaaaggcattgtgtggtgtatgccggctaaaactgagaacacaagagcattgcagttaattagaacaaatcaacaggatgctttgcaacatttctcacatcagtgcaccatctgatcttcataatacacatttcccacagtcttgatgcaaaaaggactggaaataaatatttgactcatcaaaaatatatgatgctttttaacagtgctttctaataattattttcaagttactgttatgaaaataagatcttgaaaatccccaaaggctgttctacttgcactttaagggggacaatcttagttacctttttttgttttgttttaattttatctgtatttgaacctgagaagaatactgatttttaagaataatattaagggcatgaatttgaattattacatgttttatatatggctgtcgtacttgtgaaagataactgagctyttcctgggtaaaccattatattatgaatgattaattagtacactataaataacgaagtactacattatagcagttttcatattaacagaacactgaactaaattaactgcattaacacctacgtcataaatgttttaaacgaatatacaatatttaac

SEQ ID NO: 652122 - DNA, 566 bp, Homo sapiens
tttatttaagaatgcattccaatatcaaatggcaaatttcaacaatgcaaaaaccgcaattactcttgcaccaacctgaagcctgtttctccaatcacctgtagggtctgattgataacttcgtacccagaggtccatgcttctttcttactcagcactgcattacacattatgtgcaaagaaataataagaacccacaagcttacaagtgtaatttctattgaccaaatgacctccctaggttaagccacctgttgcacttacattaattcctcctctaaagtagagacccatattartaaaattatacaacaggccacctgacttcaacgaactttagaacaccaaagcagaattaatctgggcactttcagggactggtttatagacctgttctctgggattcctagtggaattcagttaatcctggaaagcattcttaaattgggccttaatattcttcttttgtcatggcggcctacgtactagtaaaacttactatgtattgcataaccaaaggttgcatgagtttgactatcaaagcaagaaaggagatgcccatgatc

SEQ ID NO: 652123 - DNA, 561 bp, Homo sapiens
caatatttagacctgtgtatagaaagcttatctaacacacctggctaattttcacttcatttaaaaataaatggaagatgtttagcttgccgggttaaaacaaaaaaaaagaggtttcataaataattttctcaaaacacctttatgataataagataaytgctataaaaagtaattttcttcattaaatgtatttgatcagatttaaaatcttggcagaagtatgtgtgaagatcatcttaaggattttgaggctttttttcttgaggaaaattctttggaaactcaaaaaatcacttggaatattcaggggaaactgatttggattttgcagctttgaaagcctatcccagagtttgatttacttgttattgttttgagatgctccacttgtaatcaatccccggcatatcatgacttccacaaactcagaagaatcttgatcttaatttagtgtcttggaagattaaaacttattctagaaaaactctcctagataagctcaaggtgagccattctctctaagactcctggggagtcacttgagaaggctacaaaaga

SEQ ID NO: 652124 - DNA, 563 bp, Homo sapiens
ggatcaaacttctgggccgcgtggccttggtttgacctcccgtttaggtattgatgttttctcttaagctcagttctggcattatttcaaccctggatgttattcagtatgaggttttacaaaaaactccacctccttttatttattttttcttggctgaagcttttaaaaaatgttaatctatacatcctcctccacaattacatttgccagaggagtaggagccaaacaattaaattccccataggtgctgggtgtaataatttctcatgaatcagaagattaagcatggcaacaacaaatggaacaagatggtctaagctctgtttttcctacagaacagcaaatagttgcaaatcaaaaggcagttctccttmattaccaccgtatgaggcagtaggctaaaagcaggctcatttggtaatgttttctgtgtggctacggtatgtacacacagtgcaggcctttatgcactgtctaatagacaatattatatactagggcattgccgacattcattttatgtggagatacaactggtatgcccaggacactggcctcca

SEQ ID NO: 652125 - DNA, 590 bp, Homo sapiens
aaacgaagataaaatgatttaaggattagaatrgcaggaaacagagtaaaatggttttgccatatattcaacaaatattaatcaggagtttatcataggccaggcactcttcagaaggtttgggatatatttggggacaaaacaggtaaaaatacccccgtccttcataaaaattagctaatcaaatgtttggagtagtaatagccctattgaacaaggatgtgcatatgggctaagattgatctcaaaccctattaactccaatttcctctttaacatccattctgctaccaattttccttctcctccagacttcctgcctttaatttgctgtactatggaacagaaatgcaataggtgagctgaatatagctttttgaatgtaactcttctttctgtcagtggcaggcttgaaagatgaaaaagagccatcctatcttgatcaaaacagatgtttgctcccaggttaaaagcctggtctttatgccataggctccagggtgcttgaaatctctatgattctcacaatcacagttttggggatgacaaatactagtgaaccctccccctttcccacctttgtgcacagc

SEQ ID NO: 652126 - DNA, 590 bp, Homo sapiens
aaacgaagataaaatgatttaaggattagaatggcaggaaacagagtaaaatggttttgccrtatattcaacaaatattaatcaggagtttatcataggccaggcactcttcagaaggtttgggatatatttggggacaaaacaggtaaaaatacccccgtccttcataaaaattagctaatcaaatgtttggagtagtaatagccctattgaacaaggatgtgcatatgggctaagattgatctcaaaccctattaactccaatttcctctttaacatccattctgctaccaattttccttctcctccagacttcctgcctttaatttgctgtactatggaacagaaatgcaataggtgagctgaatatagctttttgaatgtaactcttctttctgtcagtggcaggcttgaaagatgaaaaagagccatcctatcttgatcaaaacagatgtttgctcccaggttaaaagcctggtctttatgccataggctccagggtgcttgaaatctctatgattctcacaatcacagttttggggatgacaaatactagtgaaccctccccctttcccacctttgtgcacagc

SEQ ID NO: 652127 - DNA, 590 bp, Homo sapiens
aaacgaagataaaatgatttaaggattagaatggcaggaaacagagtaaaatggttttgccatatattcaacaaatattaatcaggagtttatcataggccaggcactcttcagaaggtttgggatatatttggggacaaaacaggtaaaaatacccccgtccttcataaaaattagctaatcaaatgtttggagtagtaatagccctattgaacaaggatgtgcatatgggctaagattgatctcaaaccctattaactccaatttcctctttaacatccattctgctaccaattttccttctcctccagacttcctgcctttaatttgctgtactatggaacagaaatgcaataggtgagctgaatatagctttttgaatgtaactcttctttctgtcagtggcaggcttgaaagatgaaaaagagccatcctatcttgatcaaaasagatgtttgctcccaggttaaaagcctggtctttatgccataggctccagggtgcttgaaatctctatgattctcacaatcacagttttggggatgacaaatactagtgaaccctccccctttcccacctttgtgcacagc

SEQ ID NO: 652128 - DNA, 597 bp, Homo sapiens
ttctcaaagcctgtttgaatgttgtcaagtatatacttacatgtatacatcataatataatatacacacagatatacatacatatttactcacatttatatgtttttagattgcaaagcaaagcaaatctggggtaagcattaaagtgttttttgagcaagttgaatcaaaatataattttcttttaactcaagtctctgctgtttaaaatgggcatttttatttgccagttttaagatgtygcatctgaagaaagcctcattccctctggaggtcacaggcaataactggccccctgtgatttggaggagtttagcctctcaagcaattgcctttatagtcaaaaacaagttgagtgtctgaaataaaaagggtcattttaaagagattcttctaaacttgttgggaagtcttgatacagagcaacatttactcctctcttggggagcagagagggaggatggggacctgtctcacagctgaatcacctggacagaaccaggagacctgtctggtgacagacaccaaagcctgatctctctcacatctgcatttctctaaccagatcagggaactcattgaatctcttcttgtggc

SEQ ID NO: 652129 - DNA, 379 bp, Homo sapiens
gtctacagggggagctgaagttggctagggaaagaagtgtggaagagcacttatttaataaacccagcagccactgttttaatgctttacaaatactaactcatttaaccctcctaataactctatgatgragtactattagaaacctcattttacatttgaggggtgaaatgacccatccacaatcaccctgctaggcacagtcttagccaggatccaaacacatcagcctatggacagtatttaaagcagggaggggaagggatcacccttgcatgagtgcaggcagagcaaagaagaggccctaggctgcagcccgggcgacctcctgtgctaagggggaccgagtccaggagactgaaaacaggcattagagggg

SEQ ID NO: 652130 - DNA, 614 bp, Homo sapiens
cagagtagagaaggaggaagcgttttgctggcaggggctcagctcctcacctctggaaggctgagactgcagacccttgcagaaagagggctgcactgggcaacagcgaaaggccatggtaccccatggaacactgtcgaacagctaccccagcaggatgctgagagaccttccaggagctcattttttatcaaaccctttttccaatttatcatggtaatcagaggtaggattcacatcaggtgaatcaggtgaggatttgcaaacagaaatctgttaaaatcaaattgattttgtgaaacagggggtacctgaagctctgggggattcatcgcaaaaggcttcaygaaacaacatgactttgggtttcatatgtttggataaaaaatccagcttttgttgcactttgaaggaaggctgggtctggcagggattccagggcagctggggagacgtatgacaaagggacaaatgaaaagcgaggggtatgtgaggatgctggggaacctgcttaggggactagacagtaatgaagatccatgacatgggagagagggtaaaacccgggattagcaaggaagagctcagtaatagccaagagcttctgcaagctt

SEQ ID NO: 652131 - DNA, 573 bp, Homo sapiens
tatggtatgtgaatacttcaataaagctgttattaaaagaagattattagaccttactgtatgtatttacacctcattaagaagacagagaatgaacggtaaattgtcagaatttagaatccgaaaaatttcagaattcttcaatggaaaatgacaaaacagggaaagggcatgggttgggaataaagagagtrgatatcagtttgaacagcttctcaaagtgccaggtactttatgtccattatttcatttaattgtcaaaggactcctataacacatatattcccagtgggctccttccgcaattctcaaaggccgccaaagccaggacttggggtctgaaggtgtctctgcttcattgtcttgtgctgcccctcagatgcactcccagtggggttagggttggccttgggttgaccttgtccggcatactcacttggtggaagaggatcctgagacccagacacatgatgtgacttatgttacatcccacagccaccccgtggcagaactggattaaaccctgatgccccagtgtaggattctttggttaatagctgataaggtaaaaag

SEQ ID NO: 652132 - DNA, 573 bp, Homo sapiens
tatggtatgtgaatacttcaataaagctgttattaaaagaagattattagaccttactgtatgtatttacacctcattaagaagacagagaatgaacggtaaattgtcagaatttagaatccgaaaaatttcagaattcttcaatggaaaatgacaaaacagggaaagggcatgggttgggaataaagagagtagatatcagtttgaacagcttctcaaagtgccaggtactttatgtccatkatttcatttaattgtcaaaggactcctataacacatatattcccagtgggctccttccgcaattctcaaaggccgccaaagccaggacttggggtctgaaggtgtctctgcttcattgtcttgtgctgcccctcagatgcactcccagtggggttagggttggccttgggttgaccttgtccggcatactcacttggtggaagaggatcctgagacccagacacatgatgtgacttatgttacatcccacagccaccccgtggcagaactggattaaaccctgatgccccagtgtaggattctttggttaatagctgataaggtaaaaag

SEQ ID NO: 652133 - DNA, 510 bp, Homo sapiens
cagcacagtgagaggttgccaattctgtggctgaaatgggtcctctacggtcagagggggctgctggctgtctcagctccaggatcccagaagcaccaaagaagggctacccatagagggaaggtggagctggctggctggtgtgaatgagctggtgtccggggtcggggcgcaggcaggtgagcagatcrgcacacccttctcggccatgagaaacccatggtggaggcctgctggcgcttcctgcactacttacctgcttggggttgtctaaagcctctctctcctgacgctccaagcactttacatttatctcactcatctgcacactcagagaagtggggaagagacgggtattattatcaccactttacagatagagaaactggggcacagagcaggtgcggtgtgcgggccgggccgggttgagaacacagtctgacttcagcctgaaggacacaccgatggcaaacctcatatctattacattaaaaaattaactgtaaaaaa

SEQ ID NO: 652134 - DNA, 468 bp, Homo sapiens
tgcaacaactgggcttggttcatttgccatatggttggtcgtggtgcatttctggtgtgtaagtcaacagaacaatcatgacccagaggtgaagcaaagcctagagaaagaaaaagcaatttgtggattagccaataaaccaatttttaccaaaggcccactgtacactgagggcaggcactgtgtcttacctgcctctgtatcccctatgggacacatgaaggaatgaatgaaacaactaaatgagctcagtgcaatggaaggtaataaagacttgctactcctacagaattcagttgagaggagtcagctctgaacttcaacacattcacaatatgcacgtstatgcaaaataatcagttgattataatgcagagtgattaaaactgctagatacacatgaagttggttagaaaacacttttagaacagttatagttggtattctgaaagagagtttaaccaatgt

SEQ ID NO: 652135 - DNA, 543 bp, Homo sapiens
aaagtaaaaagtcaaattgaaaataaaaaatgttggtgaaaatgtggagcaaaagaagttcttaaccatagctggttagagtataaattggcacaacctctgcagaaagccactttggcattactagtgtagctgaacattgttaaaccctacagctcagcaatcccatttctacacatttctaggcatctcaggacattggttctcaactgggatgattttgccctgcaagggacatttggcaatttgtggagacattgttggttgtcacaattgggggtgctactaccacctaatgggctaagaggccagagatgctgctaaacatcctacaaagaacaggagggcttcccacactattgaattaatttggcccaaaacaccaagtctcaaggttgagaggtcctacccaagagaaacaatttttataactcctgtgtattataaccagttctaattcatttccctgacaacgaggttccctttaggtccattctttctaattaaatgcaagytgctttctttaaaagtacaaaaataagc

SEQ ID NO: 652136 - DNA, 569 bp, Homo sapiens
tccaccacaggtataacataaattaaaatgcatttattcaagaaaaactattaaaccttgggtaacaacagtgagagtctgtgacacgttaccatggggaaattcccaatccctctcctccagttccatgggaatagttctgtcagggctgcgtaaatgtgaaaaccagcagctttgctgccagagggggctgacttggtaaggagtggtgccagcaaaaccccatggccaaggagaaaggttgattgggaatgccaacatcacaattacctgggctgcaagactggttgagcaaacarctgattagaaagcctgctggaagtttagcagtgagatccagggaatcagatagccatagtgggctttggcgatgcgcttatggtctggaaggctgtgtcagttcaggagagtctggcaaaagccccagtcatctactcaaccctggcggaacatgaagccttgcacagaggcagaggagacacaggaaaacaaaagccagagaagccttgcagagatgcagaggagacacaagaaaacccagcaaaacaaaagtcagagcagtcttgtaa

SEQ ID NO: 652137 - DNA, 359 bp, Homo sapiens
gtgataggaccactttggaaaacattgggtatatctgctaaaattaaacagaggcctactctatgacctagcatagatttaccctatgagtcagtaattctgctcgggagaaatgaatacaagtacctacccaaagacatttatttacaaggatgttcaaagcagctttattcataataacgcaaactggaaacaactcaaatggtaataaactggtgaatggattacaaaattgtggtatagctctacaacatgatacttcacaccagtgaaaaacaagacactgcaacaccatagatgaaactcataggtataattttgccttwaaaaagccagtccaaaaagactataattctatt

SEQ ID NO: 652138 - DNA, 478 bp, Homo sapiens
tttgatcctgcattgtgtcatgtagaatactgaatgcaagaatgactaagcagtagcttgcttagaaaaacaatttctccagtgtacaataacaatggtcagttttcctccaaactttttgtttagggtttattcctggtcaaataagtcagagcctggtattaggtatttaaagtgatagctcaataaatgaatcctctgaagctttttaataacaattttatgcaaaaaattttcaaagcatggaaagcaaagcaatctacgtttgtatatggccaggtatatcctgacagaacttctaattggtcctttctcagttgaaggcagaggagactttcagagacgtgaaggcagaagtgtgaatgcttccaagactgtattctgcatcttcatcrttctctttctatcatctcttccacgcttccaaatctgctcgctttttcagaccctctcctaatcaaagcaggaggtgacccaa

SEQ ID NO: 652139 - DNA, 612 bp, Homo sapiens
tgattagactgattgtattttttaaattgcacaccattaaaaggactgcgttctgaagttctggtagagacagtatatcatggtagttagatgtatgtgctcagagccaagcytgtgcttgtatctcagctctgttacttactagctgtgtgaccttgggcaaataacttaaaccttcccagtctcagtttcttcatctgtaagatgggaatagttatagtgatctacctctcagggttgctctgaggattaaatgaatcaatgcatgaaaaacatttaaagcagtgctttgcacacatattaacagtaaacataatgtaagtgttagctattaatattgctgatgcttttgttgttgttcaactgtagctctcattttcatgaataccgattagccatggtaaatgtatcttctgcagcccttctcaccaccaaattcacttctgagtcatcacattgaggtcagatcagattgttgaattattttgcagaaattatgtggttttattgtctgctaggtgtaattctaagttttctttcttgtgtttgcttggcattttgaaatcaagttctcacgctctgagggtatttaagtcatttaaagattaccag

SEQ ID NO: 652140 - DNA, 616 bp, Homo sapiens
tccactgtgaatttaggctgggtgcggtggctcaggcctgtaatcccagcactttgggaggctgaggtgggtggatcacctgaggtcaggagttcaagaccagcctggccaacctggtgaaaccccgtctgtactaaaaacacaaaaattagcggggcgtgtggcagccgcctgtaatctcagctacttgggaagctgaggcaggagaattgcttgaacccgataggtggaggttgcagtgagcygagattgcgccattgcattccagcctatgtgacaagagtgaaactctatctaaaaaaaaaaaaacaaaaacaaaccaaaaaaaaaaaaaaaacactgaatttgaatattaagttgtatacttgtgggagagtgacaattgccccttacatcaaataccccgtagttcattgagaatggctgagagtgcctatgaagcacacattctaggttatctttcttcaaaggtgtctaggtgatgtttctaacctgaaatattgtgtgcccagtgtagcttagtgctagcaaataaaacagccactggttcccttccagaatacccaacaaacaataaaaaagagagcagtgaattggagagatgcacctctcacct

SEQ ID NO: 652141 - DNA, 571 bp, Homo sapiens
aatcttgcagtgtcttcaacagcagtagctggaagttcatatcctttttggctctagttatctctgttcctacatgtttctaaacaaatatgtgaaaatccagyatattaagaggtttgctttccttcaaagcatattctttggaatcagctcttccctgaccattgggcaattgagagagcagctctgtggtccacctggactctggttgggcggtttctcatggttaacaccatctccctcggtgctgttgtggtgatagtgagctctcttgagatctggttgtttgatgaaagtgtgtggaacctctaaccccactgccttgcttctgttctggccatgtaagatgtgactgctacccctttgcatcttctgccatgattgtaagtttactgatgctccccagaagcagaagccactatgtttcttgtacagcctgtagaactatgaatcaattaaagctcttttctttatatattacccagtctcagatatttctttatagcagtgtgagaatggactaatatgggagggaaaaagtggaggggaatggaaatggagaagagatgaa

SEQ ID NO: 652142 - DNA, 571 bp, Homo sapiens
aatcttgcagtgtcttcaacagcagtagctggaagttcatatcctttttggctctagttatctctgttcctacatgtttctaaacaaatatgtgaaaatccagtatattaagaggtttgctttccttcaaagcatattctttggaatcagctcttccctgaccattgggcarttgagagagcagctctgtggtccacctggactctggttgggcggtttctcatggttaacaccatctccctcggtgctgttgtggtgatagtgagctctcttgagatctggttgtttgatgaaagtgtgtggaacctctaaccccactgccttgcttctgttctggccatgtaagatgtgactgctacccctttgcatcttctgccatgattgtaagtttactgatgctccccagaagcagaagccactatgtttcttgtacagcctgtagaactatgaatcaattaaagctcttttctttatatattacccagtctcagatatttctttatagcagtgtgagaatggactaatatgggagggaaaaagtggaggggaatggaaatggagaagagatgaa

SEQ ID NO: 652143 - DNA, 571 bp, Homo sapiens
aatcttgcagtgtcttcaacagcagtagctggaagttcatatcctttttggctctagttatctctgttcctacatgtttctaaacaaatatgtgaaaatccagtatattaagaggtttgctttccttcaaagcatattctttggaatcagctcttccctgaccattgggcaattgagagagcagctctrtggtccacctggactctggttgggcggtttctcatggttaacaccatctccctcggtgctgttgtggtgatagtgagctctcttgagatctggttgtttgatgaaagtgtgtggaacctctaaccccactgccttgcttctgttctggccatgtaagatgtgactgctacccctttgcatcttctgccatgattgtaagtttactgatgctccccagaagcagaagccactatgtttcttgtacagcctgtagaactatgaatcaattaaagctcttttctttatatattacccagtctcagatatttctttatagcagtgtgagaatggactaatatgggagggaaaaagtggaggggaatggaaatggagaagagatgaa

SEQ ID NO: 652144 - DNA, 571 bp, Homo sapiens
aatcttgcagtgtcttcaacagcagtagctggaagttcatatcctttttggctctagttatctctgttcctacatgtttctaaacaaatatgtgaaaatccagtatattaagaggtttgctttccttcaaagcatattctttggaatcagctcttccctgaccattgggcaattgagagagcagctctgtggtccacctggactctggttgggcggtttctcatggttaacaccatctccctcggtgctgttgtggtgatagtgagctctcttgagatctggttgtttgatgaaagtgtgtggaacctctaaccccactgccttgcttctgttctggccatgtaagaygtgactgctacccctttgcatcttctgccatgattgtaagtttactgatgctccccagaagcagaagccactatgtttcttgtacagcctgtagaactatgaatcaattaaagctcttttctttatatattacccagtctcagatatttctttatagcagtgtgagaatggactaatatgggagggaaaaagtggaggggaatggaaatggagaagagatgaa

SEQ ID NO: 652145 - DNA, 408 bp, Homo sapiens
cagtccagagaccctgtgattcattctttctaggtaataaacctccagtcttctgtctgaactgggggtggaagcaactacccagcaacacagagtaaggagagacctatagttctagctgatttttaaacatttttaaaaatcaagattaatcttcttaacatatgattgtctctttatctggagttaggccaagcttgaggttaagggcacagacctccaagactaacagttctgcccaagatttctgatgccagttgcaaatttgggggtccccagggccatcctcacttcagaccaactggctrtaaagttgagagttcacacagactctctcagatttgataatacactagaacaactcatagaactcaggaaagtgctattacttatcattacagttttatt

SEQ ID NO: 652146 - DNA, 554 bp, Homo sapiens
gtatctctgcttcctgattaacagtcttctcagggagaatattatttgttttcctggaaacgtgatagcaggaaagaggcaaggtgtaggctagctagcataggctaaatgatatggctggataacrgacagaagccttgaagtggctttctggaatcagctcccccaaaacccacattaggtagattctgtcctaagccacctccacatgagatttgggtctgtatctttgattgattgtgacatgactctcaaagttagagtagtcaacagagactctgtttacaagatgttctgactgggctgtacccagactgagatgtctgggacatctgaagttaatgcacatacccagtgatcacatggggtctggagggcctactgggaaaaaggattgaatcctctccacagctgggatttggcaccatcagatggaccttatggacagaagatgttggaagtccaaggataatggggctcctaggagaggattctctgtcaccatgggacaaggagtctgccccagtgtggggaggaaaggggatggtgagttg

SEQ ID NO: 652147 - DNA, 585 bp, Homo sapiens
taagtgatcaacttgggagtcaaaccatgtattttgagcctcaagtctaatattctttctattttggtgcactggcttcatacccttgtacagatgtgagaaatttgagtggctataaagcataatagttccggctaggtacagaggcatgtgcctgtagtaccagctactggggaggctgaggcaggaggattgcttgagtccaggagtcctgggcagtagtgctctctgccaatctgatgtccacaccaagtttggcatcaatatggtgacctcctggaagcagaagaccatctggttgcctaagaaggggtgaactgaaccaggctggaaatggagcaggtcaaaactcccatgctgatcagtagtgggatcaygcctgtgaatagcccctgcactccagcctgagcaacatagcaagatcccgtctcttaaaaaaaaaaaaaaattctggttttcttacattagacagttaagaggaacggatatgagggtggggggcttattttattaagaagatccaacctgtgtgtattttaattcatcataagtaggaatgtgagtgatttgaaatggggacataga

SEQ ID NO: 652148 - DNA, 597 bp, Homo sapiens
attcacaagtatttaaaaattagtgtaattgttcatagaagctttggagttaggactcggccaaaaaagcagaattttcctggaattaacccagagcaaaatttgacatttttaaacaataagaatgagatgttgggtaaccttaattaagtttcttcaaagatagcagactctagttaatacgacctaaagtttgggtcaagttaaattttgaaaccctttgaaagtcttttattaattcaactcttcaaaattatcagtgtatcacataatcatgtttgagagaaagtagaattatgcatctccctccatcttggactagttggcaacttaatmattcatttacatccattatctgtccaaatgagaggatgtgctcactcatggccttctctctaacagctcctacagtgggagtcttggtttcaaaggttaaaacaagtacaccgacatatttaaatcagttacaaatctacccatgcacattgctttttctgtggtaaggacagcaaatgggaagaactagaaatgaaatgcactggacattttgattaatgatgccccggaccaaaggtcctttttcagggaaggaaaaac

SEQ ID NO: 652149 - DNA, 566 bp, Homo sapiens
gtggaaaaaattagtttactctattgctttatatttgcaagtggattggaatttggaaatacttatgaacaaacaaacatgtctcctactttgtgcaggtctgaaagtcagattagcctttagctagtttgcatgattcatcaagactaaattttatactggctggtatacaagaaaataagatattttgttgcttcagtaattttgatataatcaaaactcataagaagaaaacatgagcttcctaattactacatattcacttagtgagttgaataatttattatccttttttaaaaaacctgatcctactttcaatgttccagttcccattttctgcttccttccatttatttttctttctggcctgttctgcagagtttgcacaaaagatatagctttatttgtatacagctatttatttcctagtatgtggactagtatctaggaaacttgccaaattagcatarttatgccaaagtacagaaactatgtgtataaaatgtgcacttgggcctaatattgcaggcattgcagctttttagataaagctgtcgttgactaat

SEQ ID NO: 652150 - DNA, 537 bp, Homo sapiens
tggtgattattttctttgagaatacatctttgtatacttgtctaaaatatttaaaattggaattgcttagtcagactgggcacagaggcttatacctgtaattccagcacttggggaggctggtgagggagaattgcttgaggccaggagtttgtgaccagcctgggcaaaatagggagaccctgtttctacagaaaaaaaaagaargaaaaggaattgcttggtcaaaggctatgcatgttttacattttagtacatgttgttgaactgtgctccagagaccatattaataaacaattccttggttgattgtgaatattcttatgtactggggcaagtgactgaaattctctaagtctcatttaatttttctgttcaaaataggaataatagtatctaccatttaccttactaggtagctgtgagatacaaattaaataatacatgtaaatacttttaaaaaatgaaagtgctactgtcacgtatagtattcatactatgaagccatccgttgttggaaggatgaaagtcagagac

SEQ ID NO: 652151 - DNA, 593 bp, Homo sapiens
ccaggtggggctggcttatagttcacacacattaaagaaatagggattgaatcttgcaggaaactagcacttttccccaagggggatgaggatttaagtttccttcatggaatatgtttccagttcatttggtcctgcatttattttagaaattgtttgatatttgcacttcactcattttccaaaatttgttctgattccagatttctctgttaaatttctataaatttgtttatttgctatttgctttggagaataggaattatwtgaatttcttggcaaaacggatgaaaattctaacctaccattcatttgggagaggtgtacatatgttcacttccacagctgtagcacatttgttctcagttttgtacttttgagacacaggaagtatatttctttaaatgttctctctggaaatacatacgtagagctacagcctgatgaacattccttatacaaaggaatgtacatctcagtgtagtactcgtctataatttactttcaatggtttatggatgtataataatcacagtgaacctttgttcagcgcttactatatgtcagatactttgcatgcactatcatgtttt

SEQ ID NO: 652152 - DNA, 593 bp, Homo sapiens
ccaggtggggctggcttatagttcacacacattaaagaaatagggattgaatcttgcaggaaactagcacttttccccaagggggatgaggatttaagtttccttcatggaatatgtttccagttcatttggtcctgcatttattttagaaattgtttgatatttgcacttcactcattttccaaaatttgttctgattccagatttctctgttaaatttctataaatttgtttatttgctatttgctttggagaataggaattatatgaatttcttggcaaaasggatgaaaattctaacctaccattcatttgggagaggtgtacatatgttcacttccacagctgtagcacatttgttctcagttttgtacttttgagacacaggaagtatatttctttaaatgttctctctggaaatacatacgtagagctacagcctgatgaacattccttatacaaaggaatgtacatctcagtgtagtactcgtctataatttactttcaatggtttatggatgtataataatcacagtgaacctttgttcagcgcttactatatgtcagatactttgcatgcactatcatgtttt

SEQ ID NO: 652153 - DNA, 593 bp, Homo sapiens
ccaggtggggctggcttatagttcacacacattaaagaaatagggattgaatcttgcaggaaactagcacttttccccaagggggatgaggatttaagtttccttcatggaatatgtttccagttcatttggtcctgcatttattttagaaattgtttgatatttgcacttcactcattttccaaaatttgttctgattccagatttctctgttaaatttctataaatttgtttatttgctatttgctttggagaataggaattatatgaatttcttggcaaaacggatgaaaattctaaccyaccattcatttgggagaggtgtacatatgttcacttccacagctgtagcacatttgttctcagttttgtacttttgagacacaggaagtatatttctttaaatgttctctctggaaatacatacgtagagctacagcctgatgaacattccttatacaaaggaatgtacatctcagtgtagtactcgtctataatttactttcaatggtttatggatgtataataatcacagtgaacctttgttcagcgcttactatatgtcagatactttgcatgcactatcatgtttt

SEQ ID NO: 652154 - DNA, 576 bp, Homo sapiens
ctacagctgagaggcaatttagaatggaggttaagagagttgattcttggggcccaactgtctgggttcagattccagctccatttcttacagggttacataaagcagctcactgtgcctcattttcttcttctgtaaaatgatggtcatgataatagcatctacctcatggagstgcaatgagccttaagttagatagtatttgtgaaattgcttaaaatgatgcctggccatagtgagcactttataaatatagctagaatgatgagagagtcttagattctcctgtcaacaggcattgcatggctggggttgagcctccctagtgaatctttcacatagcttgacagacatagtgggcatcagccctaaatgccaaaagcaaacttgaagattcagagcaaaggcatgtgctgagcatttgccttgtatggagttttgggtgctcttattcagtgattaagagccaacattagtgaatgttgttgccaagaagtcacacacacacacacgtacgtgtgcccacaagccaagtccctgtgtgattgccatcagatgtgtcaggaagacatcatg

SEQ ID NO: 652155 - DNA, 537 bp, Homo sapiens
cagatcttttcagtaatgaagcatttttctttatagcaatcttgctacagctgagaggcaatttagaatggaggttaagagagttgattcttggggcccaactgtctgggttcagattccagctccatttcttacagggttacataaagcagctcactgtgcctcattttcttcttctgtaaaatgatggtcatgataatagcatctacctcatggaggtgcaatgagcctyaagttagatagtatttgtgaaattgcttaaaatgatgcctggccatagtgagcactttataaatatagctagaatgatgagagagtcttagattctcctgtcaacaggcattgcatggctggggttgagcctccctagtgaatctttcacatagcttgacagacatagtgggcatcagccctaaatgccaaaagcaaacttgaagattcagagcaaaggcatgtgctgagcatttgccttgtatggagttttgggtgctcttattcagtgattaagagccaacattagtgaatgttgttgccaag

SEQ ID NO: 652156 - DNA, 576 bp, Homo sapiens
ctacagctgagaggcaatttagaatggaggttaagagagttgattcttggggcccaactgtctgggttcagattccagctccatttcttacagggttacataaagcagctcactgtgcctcattttcttcttctgtaaaatgatggtcatgataatagcatctacctcatggaggtgcaatgagccttaagttagatagtatttgtgaaattgcttaaaatgatgcctggccatagtgagcactttataaatatagctagaatgatgagagagtcttagattctcctgtcaacaggcattgcatggctggggttkagcctccctagtgaatctttcacatagcttgacagacatagtgggcatcagccctaaatgccaaaagcaaacttgaagattcagagcaaaggcatgtgctgagcatttgccttgtatggagttttgggtgctcttattcagtgattaagagccaacattagtgaatgttgttgccaagaagtcacacacacacacacgtacgtgtgcccacaagccaagtccctgtgtgattgccatcagatgtgtcaggaagacatcatg

SEQ ID NO: 652157 - DNA, 448 bp, Homo sapiens
gaattccaagctccaactggagtcaagatgtgaagcagcagcagtaacactaacagcctgtgggtgacaaggatcaaagatgggctaaatgtcttccgagggaaaaccaaatgtggtaaaagacacatcagaggagacctctaccataaaaaaaacaaaaatttaattcgatgccagaaagagataatcagcaaggagaaaactagatttagcctgaaatataggtctgctcaaggctsgtcaggggaaagaaggtgaacattcaggttgattttatagagagctcctagaacacataaactacattgtgatgactaaatataaagaaagatgattatcactcttttaggcaggaaatggggatggatagagactggctgtgcagatggaggaagagaaaatggttagtgtgagataggaaatggaagagaagcataaacaggatccc

SEQ ID NO: 652158 - DNA, 583 bp, Homo sapiens
ctgcatccatatataaagatctactttatctgttcagtaktgattgatctataacccgtgattagataatccatgcaaagaaataaaattccaagatggtaaacactgaaaggacacttctccctacccctattctcctgcctcacagttcgcagatccaatgatccagaggcaatcattgctatcaatttcatatacatccttccagagcaaatacaaatggcatcattcctgtattcctgtattagtttggtcttatgctgctaataaagacatacccgggactgggtaatttataaagaaaaagaggtttaatggactcacggttctacatggctggggaggcctcacattcatgacagaaggcaaaggagaagcaaaggcacaccttacttggtggcaggcaggaaaacatgtgcaggggaattgcccttttataaaaccgtcagatcttatgagacttattcattatcacgggaacaacaggggaaaaactgcccccatgattcaattacctcccaccgggtccctcccatgacatgtggggattatgggagctacaattcaacatgagatttcggtg

SEQ ID NO: 652159 - DNA, 626 bp, Homo sapiens
actgtttccacttcctcttttctcactgtgatctcagttttcatcccatacttaaggactcattgttatgggagctatacaaytctggctcctttgttccatcttggaacaaattgaagggccttcttggtttcaaagttccttatgtgggtggactggcccattagttgagactgtattatagcacaactttcctcagccctacttccttccttccccttgcttagggggtcatcccaagataactccttaataaacttcctgcacgctaatctccatatttgaatctccttctcaggaagacaacctgtgacattatctggtggtgtcctatctgagaataaaagcctgaagttcttgcaatggctctgtgtgaactgcccctctcttcccactgccaacatttctggctacatctcctatactctcccttttgttcagttttgtttagccattctctaaatatattaagactagtcatacttttgagcttttgcacttgctcttctgacttcctgggatatacttcccccagataccctcctgtctcaaccttcatttcctttaggtctcaattcaaatgtcacttgtcagagattatttcctgaccactctatataaagcag

SEQ ID NO: 652160 - DNA, 626 bp, Homo sapiens
actgtttccacttcctcttttctcactgtgatctcagttttcatcccatacttaaggactcattgttatgggagctatacaattctggctcctttgttccatcttggaacaaattgaagggccttcttggtttcaaagttccwtatgtgggtggactggcccattagttgagactgtattatagcacaactttcctcagccctacttccttccttccccttgcttagggggtcatcccaagataactccttaataaacttcctgcacgctaatctccatatttgaatctccttctcaggaagacaacctgtgacattatctggtggtgtcctatctgagaataaaagcctgaagttcttgcaatggctctgtgtgaactgcccctctcttcccactgccaacatttctggctacatctcctatactctcccttttgttcagttttgtttagccattctctaaatatattaagactagtcatacttttgagcttttgcacttgctcttctgacttcctgggatatacttcccccagataccctcctgtctcaaccttcatttcctttaggtctcaattcaaatgtcacttgtcagagattatttcctgaccactctatataaagcag

SEQ ID NO: 652161 - DNA, 626 bp, Homo sapiens
actgtttccacttcctcttttctcactgtgatctcagttttcatcccatacttaaggactcattgttatgggagctatacaattctggctcctttgttccatcttggaacaaattgaagggccttcttggtttcaaagttccttatgtgggtggactggcccattagttgagactgtattatagcacaactttcctcagccctacttccttccttccccttgcttagggggtcatcccaagataactccttaataaacttcctgcacgctaatctccatatttgaatctccttctcaggaagacaacctgtgacattatctggtggtgtcctatctgagaataaaagcctgaagttcttgcaatggctctgtgtgaactgcccctctcttcccactgccaacatttctggctacatctyctatactctcccttttgttcagttttgtttagccattctctaaatatattaagactagtcatacttttgagcttttgcacttgctcttctgacttcctgggatatacttcccccagataccctcctgtctcaaccttcatttcctttaggtctcaattcaaatgtcacttgtcagagattatttcctgaccactctatataaagcag

SEQ ID NO: 652162 - DNA, 544 bp, Homo sapiens
agagaggcagtctggccacagcagcttttgagagctgtggtggsctccacccagtccaaacttcctggtggctttgtttacactgtgaggggaaaactgcctactcaagcctcagtaatggtggacgcccctacccccaccaagctggagcattgtccaggtggatttcagactgctgtgctggcagagagaatttcaagccagtggatcttagtttgctgggctccatgggtgtgggatttgctgagcaagatcacttggctccctggcttcagccccctttccaggggaccgaacagttctgtctcactggggttccaggcaccactgggatatgaaaagaaactcctgcagctagctaggtatctgctcaaatggccgcccagttttctgcttgaaactcagggcccgggtggtgtaggcactggagggaatctcctggtctgcaggttgcaaagacagtgggaaaagcatagtatctggaccagatagcacggtccttcactcgtggccctaggggagggagtttcctgaccccttgtgc

SEQ ID NO: 652163 - DNA, 544 bp, Homo sapiens
agagaggcagtctggccacagcagcttttgagagctgtggtggcctccacccagtccaaacttcctggtggctttgtttacactgtgaggggaaaactgcctactcaarcctcagtaatggtggacgcccctacccccaccaagctggagcattgtccaggtggatttcagactgctgtgctggcagagagaatttcaagccagtggatcttagtttgctgggctccatgggtgtgggatttgctgagcaagatcacttggctccctggcttcagccccctttccaggggaccgaacagttctgtctcactggggttccaggcaccactgggatatgaaaagaaactcctgcagctagctaggtatctgctcaaatggccgcccagttttctgcttgaaactcagggcccgggtggtgtaggcactggagggaatctcctggtctgcaggttgcaaagacagtgggaaaagcatagtatctggaccagatagcacggtccttcactcgtggccctaggggagggagtttcctgaccccttgtgc

SEQ ID NO: 652164 - DNA, 303 bp, Homo sapiens
gaattcatgacttctttctyagacttcattttatacttctgtttcatgcctattatgtcttttgatatccccttaactaaattgtagctcatcagttaactttctgattctgtttctttacctataaaaggaggataatggttcctactttgtagaggctgttgtgaggattaggacatggtagaagcttaataagtgatagccaattatatttatagacagataaaattaatttactgttattattttactatctttcagtatcagtgctgtgataacagggaaatgggtctttgtatttag

SEQ ID NO: 652165 - DNA, 418 bp, Homo sapiens
aattctgctgcctcagcctcctgactagctgggactgcaggcgtgcaccaccacgcccagctaatttttgtatttttagtagagacggggtttcaccatgttggccaggatggtctygatctcttgacctcgtgatccacccaccttggcctcccaaagtgctgggattacaggcatgaaccaccatgcccagctgactttttcttaaattgtattaattttcagaattttatacctatttctcttggcatttgcaccgtgatattaagtaaacgttctcatttagttaaagtcatccctcaaaatagtgaaagctatgaatttattccagtgatgctaccatttctttctttctttttttttttttttgagacgtttcatctttgttgcccgtccagctggagtgctatagcgtgat

SEQ ID NO: 652166 - DNA, 543 bp, Homo sapiens
aactctgggggtaagatccagtaattgtgttttaataagccctttaaatatttctgatgcatgttaaaagtttaagaatcaggttgggcacggtgggtcattaatcccagcactttgggaagccagagtgggcagataacttgaggctagaagtttgagacccacctggccaaaatgttgaaaccctgtctctagtaaaaatacaaaaaattagccagacatggtggtgcamacctgtaatcccagctacttgggaggctgaggcacgagaattgcttgagctggggaagcgaaggttgagaccctgcctaaaaaaaaaaaaaagtttgagaaacattgactagaggagtgtgatttgtaggttaaatagatgtatctatgattattataaaatttatgtttcagttttcttgatgaaccttcaagtattaggataggatgtcaattgacattcatttctttttgtttcatacagtgtttttatcatgtcagctatataggatttgattactctatatttatttgggattctttaacaattca

SEQ ID NO: 652167 - DNA, 570 bp, Homo sapiens
ctgtccccaagacctattgcctttgcactctctgaccccaggtcctaattccaaggctcagaccatccaaacctggttcaggtgcccctgtttgggtcaaacacttctgaacacaggggtcagggtagaacaggtgatgaaatgacagctcccacaggcaggcacctagggaggggcagtttctataggaagggcaggaaggaaaaactgcatgtgtcaccgcagctattgcacacacacacacattaaaatagtaaaatagggataccaagggggaggaaaaagcctcgggggaaaagcagtgaacttgctgaccataaatgtgaacgaaactgccctttgggggcacagcacatggctctctgcgtcccagcagccaaggaccacacgtagttccacagctctcagcataaatgtgtgtgagtgtcacttcctcactctatcacaggcatcagacagtgggaccatgtgtagcacagccttgcacccaggcagtgcctgtcgcagcaggragcacagtggagggtttcaaatgtgtgttttgggggctttttgccagcagcgtcttct

SEQ ID NO: 652168 - DNA, 251 bp, Homo sapiens
ctgtttgctttcaatgcaacttataggtatgacacaagcagattagcatcaattgagcgcctactatgggccaggcaggttattgtgtattatgtagattattgcagattatgtagattattgcattcaccacagccctgtggggtaggtgtttccacatrtaagtgagaaatctgaggctcagagatctgagtgacttgaaacgtcacttgctgtttggaaacagagctgagattctgaccttgttctgt

SEQ ID NO: 652169 - DNA, 509 bp, Homo sapiens
agaggtctctgttcaaatgcctccttcccagaggggacctgccatgctctgctcccttctctgggcagccactctctggctctctttggcgacctcctgttactccctttttcacctcctgcttctgttttyccacctgccattaccccagcaaatggcagcaacctggccccatgacgtgtaggtggagagagcaggggggagtaagccatctcagcctcactcaactgtgatcccatcctgccttacttagtgttacaccactgcagatcttgctggtcctcagttcccctgaagatttggaattggccagttattctccattttggggtgagcaaccccttggggaaagtagtgagagctaagggtcctctcttcagatcaagacacaatgaaaggaatcccaggtggggcagctgctgttggagcttcctctggctccaggagcaggagacaggggcacagaccagacaggggagcacagaggaaaactccaaaaacccacatca

SEQ ID NO: 652170 - DNA, 564 bp, Homo sapiens
tgggtttattcggtttttcattctttcattcaacatctagttacagagtggggtttggccatgtttgagataggagaaaacaaactttttttcaagttctcaacactacagttcacctctggtcaccaaaatgtgtgtgggatttctccaaccaccaaattgtccagcagacactaactgggtgtcctgcagttcaattcaattcaattccaacactatctacctggagataatgtyggatcccatcagttaagagctctgtcgcacaagactgcccctacttcagatgccagttgcaagtagtaggctgtcacctatactttatgaccaactggctataaagtgaggttcccacaactccctcctcaggttcagttcattagctaggagggctcacagaactcagggaaacacttacgcttactggtctattttattaataaaggatacagatgaacagccagataaaagagagtcagagggccaggtatagggtactgggcgcagagcttccatgtcctccctcagtgtaccaccctccagaagcctccgtctttcagctgc

SEQ ID NO: 652171 - DNA, 608 bp, Homo sapiens
gatgaatacaacaacaaaccttgaactcccatttgcctttttmacttggttcacacatctcctccattgggaatctcctggagaggtggtgctgtgatttggagtaggacatgagtgcttccagatccctgccatattacagtcttagtgggagactggtttttaacacatccatgaataaagacaaaatataaaccctattctacaatgttgaaagatccagaaaagagaaaacaacctatcttactaccaaagatcatctcacacaataatatatatatatttaacatatatattacatatattatatgtatatagaattagctcacaattttggaggctgacaagttcaaaatctgcagagctaatatctcaatttgagtctgacaaccagaggctatagaactaggaagagccattgctccagtctgaaggctattaggcaggaaaattatctctcacgtgggggaagatcagccttttgttctattcaggtctccaactggttggatgaggctggcctgtattacaagggtaacccgctttgcaaagtccactaatttaaagattgatgtcatccaaaaacaccctcacagaaacacctaaaa

SEQ ID NO: 652172 - DNA, 380 bp, Homo sapiens
ttgctagtcaaaataatgcccaagtcctaagacctcagagaattgttccttttctaatacactcatctgtcaactctcagttttacatacaraatgtcagccttattcaaatgaccccatcaagtgggttttagccctctttcgattgccacaaagaggggagattctcatcttctaagctggcctgtggactggcaaggctttccagcaagactggcaaagtgctctctcctctctggtcacttgaaagcagttatggtctaaaatgtttggtggaaacacttcagacatatttattaataagcataagtgttctctgcacttaagagaaagattctacgtcaaaatcaaaaatctcccttaagtttctaaagagaaag

SEQ ID NO: 652173 - DNA, 454 bp, Homo sapiens
cgttgccaaatttcacatgttattttgctagtcaaaataatgcccaagtcctaagacctcagagaattgttccttttctaatacactcatctgtcaactctcagttttacatacagaatgtcagccttattcaaatgaccccatcaagtgggttttagccctctttcrattgccacaaagaggggagattctcatcttctaagctggcctgtggactggcaaggctttccagcaagactggcaaagtgctctctcctctctggtcacttgaaagcagttatggtctaaaatgtttggtggaaacacttcagacatatttattaataagcataagtgttctctgcacttaagagaaagattctacgtcaaaatcaaaaatctcccttaagtttctaaagagaaagactgggggctggggaggacaaattacttttcaaggttacataaatgaatt

SEQ ID NO: 652174 - DNA, 455 bp, Homo sapiens
gaattcagaaaaatttctttcctaatgatccggacgttgccaaatttcacatgttattttgctagtcaaaataatgcccaagtcctaagacctcagagaattgttccttttctaatacactcatctgtcaactctcagttttacatacagaatgtcagccttattcaaatgaccccatcaagtgggttttagccctctttcgattgccacaaagaggggagattctcatcttctaagctggcctgtggactggcaaggctttccagcaagactggcaaagtgctctctcctctctggtcacttgaaagcrgttatggtctaaaatgtttggtggaaacacttcagacatatttattaataagcataagtgttctctgcacttaagagaaagattctacgtcaaaatcaaaaatctcccttaagtttctaaagagaaagactgggggctggggagg

SEQ ID NO: 652175 - DNA, 612 bp, Homo sapiens
atatctatcctgtagaactgaaaacagactattttcaaatgacttgggacacatcgaatgacaacttgtggtcctctgcaacctaacatctggcctctttttgagaacggtgaaactgaaacccagaggtctcartgaaacttttggtttcacaattactcaggatctcaaagagctttttaaaaatatggattatatctaccaatatttaccacattaaaattaaaaatgggaaaatttttaatatttattaattcatttcaatacaattgtaaatattttttaaactactttaaaccacattttcctcaaaaaaatgagtgagaaaagtggcaccattttacacttttatacatctctttaacatctggcttaatagaaagcaactggattctcaaaacccacttttgcttcaatttcctgcaacagtacaggtaatgcagattctggaaaacacggtcatgggagagggaaaaacatataatgtcttaagtattactataaaattagttttgacctcacagacccctgaaaaggtctcaggaacctttggggatccccaaagcatgctctgagaaccactaatctaggatatgaagtacacactgagaa

SEQ ID NO: 652176 - DNA, 612 bp, Homo sapiens
atatctatcctgtagaactgaaaacagactattttcaaatgacttgggacacatcgaatgacaacttgtggtcctctgcaacctaacatctggcctctttttgagaacggtgaaactgaaacccagaggtctcagtgaaacttttggtttcacaattactcaggatctcaaagagctttttaaaaatatggattatatctaccaatatttaccacattaaaattaaaaatgggaaaatttttaatatttattaattcatttcaatacaattgtaaatattttttaaactactttaaaccacattttcctcaaaaaaatgagtgagaaaagtggcaccattttacacttttatacatctctttaacatctggcttaatagaaagcaactggattctcaaaacccacttttgcttcaatttcctgcaacagtacaggtaatgcagattctgsaaaacacggtcatgggagagggaaaaacatataatgtcttaagtattactataaaattagttttgacctcacagacccctgaaaaggtctcaggaacctttggggatccccaaagcatgctctgagaaccactaatctaggatatgaagtacacactgagaa

SEQ ID NO: 652177 - DNA, 575 bp, Homo sapiens
ttgagactatagtgaactgtgattgcaccactgcactccagcctgggcaacagagctacaccttgtcttaaaaaaaagataatgtattctggtacagtttgcttgagttacctgatttattacaaatactcccacattctaatatatacaaatagaaatatctagcaatctagtacattaggagtaggtttgggatatctgttaaaataatcgatgagactttttatgcaataagaacaattctaaatttatttaaaagtgaaattcaaggagcatgctgaggatgctatatttctggttgacgtttgtgtctttctattttttctctcaattagttgaaatttttgtaccaattatacataatagatttgaaaaactctctyctaatattcctggattttttagcttgctgcaaatccaagtttgatactttcaaggttaaaagagattttcctaatgtttagccccttggttttgtgtattttccagaaaaggcagataaagacattaatcactaaaaatgatgaccttgatctccagcccatacctcctttctgaacaccagcaatctatat

SEQ ID NO: 652178 - DNA, 568 bp, Homo sapiens
cttcttggcctgttgagattttcaatgtacgaggatttctaaggatattatttcccccataacatattagctatgaagaaatgccagtcrtctgaacaatatttgaaatttactgtgctctggaaactgtcttaggtcctaggatggagttggggttagaagacaggggaggaaataaaaaaaagaataagatgccctggtccagtagcatttgcagtgatgcgtgggcactctgggatttcatggctcatcatggttctcagggcaaaggtgaaaaaactgagtcaattagaagtttattattttccatgttgtcacattctggccatattcctattgattttgtagtagaccattagagtatgccgagagccataccttgccacttattcatataattcatattcattataacatgccagtagtaaagagaagaatcccagtttccactcccctttttgaataaaccttatggaaacaattaatgtcattcatgggatctgggacctggtagatgctgagcatgtttcaccacttagagaagtgtacaggaaacctgaggtcattt

SEQ ID NO: 652179 - DNA, 568 bp, Homo sapiens
cttcttggcctgttgagattttcaatgtacgaggatttctaaggatattatttcccccataacatattagctatgaagaaatgccagtcatctgaacaatatttgaaatttactgtgctctggaaactgtcttaggtcctaggatggagttggggttagaagacaggggaggaaataaaaaaaagaataagatgccctggtccagtagcatttgcagtgawgcgtgggcactctgggatttcatggctcatcatggttctcagggcaaaggtgaaaaaactgagtcaattagaagtttattattttccatgttgtcacattctggccatattcctattgattttgtagtagaccattagagtatgccgagagccataccttgccacttattcatataattcatattcattataacatgccagtagtaaagagaagaatcccagtttccactcccctttttgaataaaccttatggaaacaattaatgtcattcatgggatctgggacctggtagatgctgagcatgtttcaccacttagagaagtgtacaggaaacctgaggtcattt

SEQ ID NO: 652180 - DNA, 568 bp, Homo sapiens
cttcttggcctgttgagattttcaatgtacgaggatttctaaggatattatttcccccataacatattagctatgaagaaatgccagtcatctgaacaatatttgaaatttactgtgctctggaaactgtcttaggtcctaggatggagttggggttagaagacaggggaggaaataaaaaaaagaataagatgccctggtccagtagcatttgcagtgatgcgtgggcactctgggatttcatggctcatcatggttctcagggcaaaggtgaaaaaactgagtcaattagaagtttattattttccatgttgtcacattctggccatattcctattgattttgtagtagaccattagagtatgccgagagccataccttgcmacttattcatataattcatattcattataacatgccagtagtaaagagaagaatcccagtttccactcccctttttgaataaaccttatggaaacaattaatgtcattcatgggatctgggacctggtagatgctgagcatgtttcaccacttagagaagtgtacaggaaacctgaggtcattt

SEQ ID NO: 652181 - DNA, 530 bp, Homo sapiens
ttactttacattaacatcctctctgcagctgctttaagtctgcattttggaaagtattcacagaagctactcaaaggagctagagtggtttgtttatggcattttacttatacaatgttcatttgtctttttattttcttccttacttgtctgtattaggaagtagctgttaactaaccataaccaaagtgaccatattctcttttgacaagttttttcctaatcagataatcacctgctgcrtatttttaagtaaactctagaggatcttcctaaacaaggcaggaaaccaagaaactctaaaatgaaagagtactgaattaggataaaaccaaattgttattgcaaataacctcccctctccatgtggctcaaaggacacaaaagcttatttttctctcatgaaacatttcagaggtgagcattccaggtggttgctgaccactggtgggggccttgtggtcgttcaggaactcaggctctttatagttgacaagtctcagtgtgctagttaacaatttattgccttt

SEQ ID NO: 652182 - DNA, 602 bp, Homo sapiens
gtaactgacctaatgtttaaatatataaattctattgcaccaaaaaagggaagaaaaaccaccagtcagacctccatcttgaaacagtccaatgtttatatgttgtcatggacctttgatgacttaaaattgtgtctccgtccaagtcatttggaactcttgaaatagtcagctagccaaaagttatttttaagtgctaattttgtgccagcttttggaaaaacaaaagtaaataggaaggaaaagatttcttgctcaagaagaacaagagttctagtttgagagttaggcaatgagcatctaaaccaaaaatgtatgtaagagtacgagagagttaggtttcaaagatggtagtctctagagcaagattatgggctagagatcttasgaagtgcagaaacgtcaaaaagaggaagaatagcagcatattcagaaggtgaaccctgtaacttgggaaatccagctgaaaccacagatgctgatttcctatttgaactgaacctgtcttttttcttttgagacaggctcttatctctgtcacccaggctggagtgcagtggcacaatcatggctcactgcagccttgatcttctgggctcaga

SEQ ID NO: 652183 - DNA, 589 bp, Homo sapiens
aaaactagaaaaaactagctgggtgtggtggcctgtgtttgcagttctagctacttgggaagctgatgcargaggattgcttgagcccaggagatcaaggctgcagtgagctatgatcctgccactgcactcccgcctgggtgacagagagagatggtgtctctaaaaattttttacaaaagattaaaatagtaaaatttatgttatttatattttatcataattaaaaataagtgatttttaaaaagtacaaggttgctttgaaaatagtctacattatctgtctctccttgattttctttttcttccatactaacttatcatccatgttttcttaagccaattggtcagtcaataccactgtacacaaagaagaagtcactcctataaaatcccagacttctctccaaaaattcattttatataaagtcaaaataaaaaagctttttgaaaacctgaatagaaagcttcatattcttttagcatcattactaaattagtctttacttgacagcagggatcttatgaaatttcaaaagaaagaaattttgcaggtaaaaaaattagatgtatcattgctctaacaacc

SEQ ID NO: 652184 - DNA, 555 bp, Homo sapiens
aaattattattatctcataacagattattaagtatctcatagccatcatttttctttatgtctaacctaatccctgctgctgagatccaaacaattctctttctgcctgattattagcagaaagacaaacttttcagtcaagggcagaaagcatattttggtcaggtgtctactaccaggctaagaggctgtggccaggacagcagggtctatagtagaaatgtagcttgtggggcctgtctgtgtttgtgtatgtgtggtggggtgtggggaagaggagagagagacagaggtgtggggagagaaaagtagtaaagtaggctatttctcagtaaacagatgcttgggccaggtagacaccataaaccttgtctattatgatttttcttatataattggtggtttcaagcctcttagaataataataaagaagaaagtcagaatattraggtatggagatattcttgaaagatgtactagtcaatctcttcatccagctaccttaaaaccattattactaaaaagttgtgtatacttattgtgagaataaaagag

SEQ ID NO: 652185 - DNA, 358 bp, Homo sapiens
tttttaaattactctttcaatcttgctgcttgttattggtctgttcagggtatctcattcttcctgatttaagctaggtgggttgtgtttttccaggaatttatccatcttttctaggatttctagtttatgtgcataaaggtgtttatagtasccttgaatgatcttttgcatttctgtggtgtcagttgtaataactcccgtttcatttcttatcgaacttgtttagattttctcccttcttttcttggttaatcttgctaatggtctatcaattttatttatcttttcaaagaaccagctttttttttttcatttatcttttgtattttttttgtttcaatttcatttaattctg

SEQ ID NO: 652186 - DNA, 430 bp, Homo sapiens
gaatttgcttttaaaaagttttaatagccataataataatttatttacagaatsaagtacaaactctaagacttcataactctaaatacattgcaatgcattttcgaataacgcaatgtggctgacaatggctgaggcgacgggcagactaatcaagtgcagaaattggtgattgttttcatagcacatgccagactgcatctccagctggaaattccataaaagaaataaataatagtatcacccttgggtgcactactgaaaatacaatatctggttttgtgagtgccagtccattctgctcagacactggtaccatactattgtttcagaggtatcatagtaccgtcacagtactgtctcagacaaaatgggatacttcagagaaaagcagccaagagaactaaagtcctatcagttaaggaagagt

SEQ ID NO: 652187 - DNA, 600 bp, Homo sapiens
tgccatgttggtgtgctgcactggttaacttgtcatttacattatactacagggctacagtaaccaaaacagcatagtactggcataaaaacagacacatagactaatgaaacasaatagagaacccagaaacaaactcatacatctacagtaaacttgttttcaacaaaggtaccgagaatatatgttggagaaaaggcagtctcttcaataagtggggcttggaaaactggatatccataggcagaagaatgaaactagacccctatctcttgccatatacaaaagtcaaattaaaattgattaaagacttaaatctaagaccacaagccatgaaattactaaaagaaaatagcctacctcagcttcccacatgctaggattataagcatgagccactgtgcccagtgatacaacatttatgactgcaaagtaactcatctcccctttgcagttaacagcactttgtggggagataatttgagaccatgttggttgtcatcaaaccttcactcagattcagcatcatttgatgctttcttcttcaatcaactactactataatagttgccaaataatgaccttccaattctacctttc

SEQ ID NO: 652188 - DNA, 558 bp, Homo sapiens
caaagtttaagcaagcatgataaagattaattaaagagttgttcctcaaatctccttgaaattagaggttgattcactgaaataattcacatttcataactcaaaataagcaaaactttgaatcttcacaagaaaatcgaagagctatatggattacccaattctttgctgtggaattgtgcaattgaatttagaatataatagaatttgtgtttccaacaaaatcaactcagaatagcttcatatcatagaactaaattagmccataactccctctaattagtttggatagtaatagttttagtccttaatcacgccttttagtgaagaattctgaagtccttagaataaagtctattgtcctacatccttgggagtagttcttgcgagaaggaagttaacaggtgcattgacaaaataggtgatctgaagagtagtttttaattgtctatgagtttttttaaaaatggaaaacttggaagtgtgatattatataattgctcacgtgtgtccatgaagcatgtttaatggtagaatatacaaacatgattaaatatt

SEQ ID NO: 652189 - DNA, 371 bp, Homo sapiens
ttatttttctaaattggaaaacatgaaaacatgaaagtgcattaaaatatttttctagtgaacagtcattagagtaataaggagattgttggtgatgaatatctagggggaacattaatcatcttcatcttttagttttcttctgataaaaacaatgtttgaagataacccaatcataattgcaatagaaagtttacagaaagtaaaatccatggacactgaggtcaacttgacctttgggtaataattccaagccccacatttcatgaaatgaagaaaaatgaactttaaatatatgattatttaaactttatccatkagttattggtctcaccagtatcttcttatgtcttttcttctttttgtggcac

SEQ ID NO: 652190 - DNA, 581 bp, Homo sapiens
tgtggcactgctggtgtaggatggggccatgagctaaggaatgacactggcctctagaagctagaaaaggcaaggaaacagattgtccctttaaggctccagaagaaacagtcttaccaacatgattttaggacttctgatccccagaactgtaagataataaattaccttgtttgaaaccaytgggtttgtgatcatttgttatagcagtgataggaaagtagtccactttccatgtagtcattcaggaagtcagtctcttttcattttatgactctgatacaaggtgttctaatcagctgcatttattttagccagtgagtggagaaagagaatgagggatggcacatgggagatttttatgaagcagggaagtaaatgacaaacacaatttctattcacattccattgttttcacccatcacaagatgtcatattgaccaaaatttttctttagatgttatgatccccttatcagtctagtacttttctctatgtccttatgacaccctgtccatgcagctcatgctagacatcttgtagttgtttttgatacttccctgtctcctggctcctcatac

SEQ ID NO: 652191 - DNA, 629 bp, Homo sapiens
tgctgcaatcttgtctcatgctcctatttcatctatcatagcttatacatatgttttaagatcctttataatactttaaaatatcgctatgttataaagtgttatgtgttcacaccaaacatttagaaaatataggtaaataaaaaggctgccatactgaactagcaactgttaactatttcgtgtatatcctttctataaatatattgatctgtccacaagaactcaactttgaaaatgttcttacccatatccaagaagccatattaagcacaagttttctttagactttatgatcttcttatcaaacacttttctccatttaattataagacactcctgtctatgtgacttctcatgctaggtatctggtagtcatttttggtacctccctctccctttaccactcacatcccttcagctcccgtattcaatcyattaccaagtcttcttgattccacctatcttcatctactttccatcatctcccctgctgccacttgcatctcggcccatgcacatatgcacatatttcttcttgctcatcaccatgttcctaataactacttgccttttggatatcattttgcccaggaaaccttttcttgctgttcagacaggatttggtg

SEQ ID NO: 652192 - DNA, 629 bp, Homo sapiens
tgctgcaatcttgtctcatgctcctatttcatctatcatagcttatacatatgttttaagatcctttataatactttaaaatatcgctatgttataaagtgttatgtgttcacaccaaacatttagaaaatataggtaaataaaaaggctgccatactgaactagcaactgttaactatttcgtgtatatcctttctataaatatattgatctgtccacaagaactcaactttgaaaatgttcttacccatatccaagaagccatattaagcacaagttttctttagactttatgatcttcttatcaaacacttttctccatttaattataagacactcctgtctatgtgacttctcatgctaggtatctggtagtcatttttggtacctccctctccctttaccactcacatcccttcagctcccgtattcaatccrttaccaagtcttcttgattccacctatcttcatctactttccatcatctcccctgctgccacttgcatctcggcccatgcacatatgcacatatttcttcttgctcatcaccatgttcctaataactacttgccttttggatatcattttgcccaggaaaccttttcttgctgttcagacaggatttggtg

SEQ ID NO: 652193 - DNA, 565 bp, Homo sapiens
agttggctcttattttactcacatactccaaactaatccaaatacttatcaacaaccaggaaaagaatatctacttcccatagctactagaaaggaaagataactctctctttcaagggccacaagtttgtgcttttgggtgctcctaaagtccatcaagcctgtacactgcattctaggaaagtcagggcatattgttacatactcatacaaagaaaatgcatgtggtatttcagggtagttcttaccttcctaagtagagttcttacacatgtgtaagagagatagctactgagaaagggagagtgggaatgtgaagagatgcgtaacatgcaacttagtaggaattttgatctgtttcgtgtttctctgggttgggcacagcttgacaggcttatatgtggatcaccacataccctcacttcccctttccctatctcttcctccttyctggctttgagggataggatataaatgacatcttcaaagcatgagaagccacttgtctgcagacttgtaggcagcagctcaccctcatgtgcaagtcttctggctctggaaacaa

SEQ ID NO: 652194 - DNA, 611 bp, Homo sapiens
aaacctagtatagcctactacacacctaggccatatgttatggcctattgctcctaagctacaaacytgtacagtatgctactgtattgaatactgtaggcaaatgtaacacaatgataagtatttgtgtgcctaaatatatttaaacatagaaaaggtacagtagaagtatgctcaaatagaaaatggtaaacctgtagagagcacttgccatgaatggagcttgcaggactggaagttgctctaggtgagtcagtgagtgagtgatcagcgaatgtgaaggcccaggacattacagtccgatcctgcaggctgtataaacactgtacacttaggctacactaagtttctaaaaaatatttttctttattcaatataaattaaccttagcttactgtaacatttttattttataaatgtgttaattttctaaactttttcactttcataataatacttcacatagaatacaaacacactgtacagctatataaatatattttttcttttctattctcattctataagctttttaatttttaattttttcaccttttaaatttttttattgaaaactaagactccaacataaaaatttgcctatacaaggt

SEQ ID NO: 652195 - DNA, 645 bp, Homo sapiens
ctaaatatatttaaacatagaaaaggtacagtagaagtatgctcaaatagaaaatggtaaacctgtagagagcacttgccatgaatggagcttgcaggactggaagttgctctaggtgagtcagtgagtgagtgatcagcgaatgtgaaggcccaggacattacagtccgatcctgcaggctgtataaacactgtacacttaggctacactaagtttctaaaaaatatttttctttattcaatataaattaaccttagcttactgtaacatttttattttataaatgtgttaattttctaaactttttcactttcataataatacttcacayagaatacaaacacactgtacagctatataaatatattttttcttttctattctcattctataagctttttaatttttaattttttcaccttttaaatttttttattgaaaactaagactccaacataaaaatttgcctatacaaggtcagaatcatcaatcactttcttccacattcatttcttatctcatgggcaataagacatatggagtggtcatcttctaaaataacaatgtctttttctggaatattttctgaagggccttccagaggctgattcatagttaactcttcttccattagcaggagaagg

SEQ ID NO: 652196 - DNA, 416 bp, Homo sapiens
tggctaacgctattctatcattrtgagtcctcctgagacaccctctcaggtgttccagaagtaactggagagacgttaagggatggtggaggtggcagacccacaatagcacagtgagggaaatccagaaaaacagatcacacagtttgtcttttctggctacccaatcacataatttaaaaaaggacctgcctgtcttcaccaatgatgtcccactcccctcacaatgagtacaacagctgcaatgtataacagcttcccaacttaaggcacttgttcttctgcatctcttcctgggggcttcctccattgaggtgtgggaaagggggcttggcagagagagatttctcagcccacagctaggatggcctgtgatttgatgccctgagaggagagataggagttaaaggatgaat

SEQ ID NO: 652197 - DNA, 592 bp, Homo sapiens
taatttttttctttatggcatctggagtttgcgttttgctttcataacacttctccctttcaaaactcatttctttttcttttcaaatttagatatttgatccatctggaatttattttggtataaggagagatataagatttagcttgcatctatcctcagatggttaaccatatgtttcaacttcatttatttgctcatccctttcccccagtgattttaaatacctcctcyagtatgtgtttaatgtcatgtgaatttgattccgaactctctattctattctactagtatctctgtttctttgtcagccaccatcagaatttaaagattactaggcccttaagaatgatacaacggattctagggactcaggggaaaagggtgggagggggataacataaaagaatacacactgggtacagggcacactgcttaggtgatggatgcaccaaaatctcagaaatcatcactaaggaaatttatctgtataaccaaacaccacctgttcccccaaatcctactgaaatagaaaaataataataataaaaattaaagaattactgtgcctttatgtgcattagtatctgtg

SEQ ID NO: 652198 - DNA, 413 bp, Homo sapiens
tctgaccccccagttacggattttaggaaaaattatcacagaggtaaagtgcccttctgtaggggccagccccacagggtctgtgagtctctccccatgtgcagcgacgagagagtgtagaaataaagacacaagacaaagagataaaagaaaaggcagctgggcccgggggaccactaccaccaatgcgcggagaccggtagtggccccgaatgtctggctgtgctgttatttattggatacaaggcaaaaggggcagggtaaagagtgtgagtcacctccaatgataggtaaggtcacgtgggtcacgtgtccactggacagggggcccttccctgcctggcagccraggcagagagagagagaggagacaaagagaaagacagcttacgccattatttctgcatatcaga

SEQ ID NO: 652199 - DNA, 371 bp, Homo sapiens
cacctaagtgtattgtgaacaaatttaattattttgcaacatctaagctttataaatgtcttggggtaacaatgtatgataaaaaagtagagctagtgaattaaccaatttgtaaattttttttgttataattgatagaaaagatacgtsttggacatagaattattaaactgcctctgagtagtgtgtgtaaggatttgttcattaggttggcatcagaagggcagaagcaaatacaaagggaaagatgtatgcagatgttttcatatttacattttgacaatagccattgaggtatgtgcatctcttgtggttgtaccataggaatacattaattaattcagtggaaacatacattcttattaatattt

SEQ ID NO: 652200 - DNA, 617 bp, Homo sapiens
tctttacaatactgggcacaggagatcctcactgaccccctatcccygcggcctccagatatgcaaagctgcatggagtctgggcagagctgccacagaggcccacatgaagccccaagggccttagacccctgagcaccctggcaccagctgatgtagctccaccaacaaggtaggccaggatctctcacataccttgaggaagggctacatccatagtgctaaggagtgggcagactacaggccttgcctccactatacctcatgaggaaaagcccactggcctgggacccttgtgcaaccaccccactcctgccttagcatttgggctggttgcagctctgcaattctctgggacagagcttccagaggtaacccacaggcctatagcttataccattgttgcagcccccaaccttactgccttcaggctggggagagagtgaggagcccaagaacaattgcggtcttccagcacactgcagctcccttatggaaaagcagccagactgttttccatgtaggtttctgcccctgatactcatcactaggcagggcttcctgacctgggcccccagcatagctgtcctaccgttacctgattatgtcagtcagtg

SEQ ID NO: 652201 - DNA, 626 bp, Homo sapiens
aagaactgagcaaagcattaatacatcaacagaggatttacacaagttggttgttttgaaagagtaataaaattgataaaattgaattgaaaataaaacaaactatgattaacagcactaaatttgaaaagagattaatggacatatttctacaatattgtatttccaaatctaactcaagaatttwaaaaaaatctatagaattcaataacaatcaaggacatattaatcaatattttaaaatatttctactaagaaaaaaataagtaagccacacaattttatcagaactcattcataaaaacacattacaaaaatttttaaagaacacagtattaagacaaaaacatttaaagattttaatacatcataacaaacaatacaacttaataactgaatacaacttaaataactgaagatcaattaatgaaactcacaagcattgacaaatgatattaaggtagtaaaggagaaaaaacttgatcatctcaatggattcagaaataacctgggatatgacttaacatccaatcattttaaagaaaaaaaatcctctaggaatgagaggaaactactttaaacctataaaagttacaataaaacaaacaaaaatcacagcatactca

SEQ ID NO: 652202 - DNA, 626 bp, Homo sapiens
aagaactgagcaaagcattaatacatcaacagaggatttacacaagttggttgttttgaaagagtaataaaattgataaaattgaattgaaaataaaacaaactatgattaacagcactaaatttgaaaagagattaatggacatatttctacaatattgtatttccaaatctaactcaagaatttaaaaaaaatctatagaattcaataacaatcaaggacatattaatcaatattttaaaatatttctactaagaaaaaaataagtaagccacacaattttatcagaactcattcataaaaacacattacaaaaatttttaaagaacacagtattaagacraaaacatttaaagattttaatacatcataacaaacaatacaacttaataactgaatacaacttaaataactgaagatcaattaatgaaactcacaagcattgacaaatgatattaaggtagtaaaggagaaaaaacttgatcatctcaatggattcagaaataacctgggatatgacttaacatccaatcattttaaagaaaaaaaatcctctaggaatgagaggaaactactttaaacctataaaagttacaataaaacaaacaaaaatcacagcatactca

SEQ ID NO: 652203 - DNA, 575 bp, Homo sapiens
acagcagcatgattgtagtacaaaaacagacacatacaccaatgaaacaggttagagaacccagaaataaggctgcacacctacaaccatctgatctttgacaaagctaccaatracaatcaatggggaaagaatacccaattcagtaagtggtggtgggataactggcttagtcatatggataagactggaattgcaccccttccttttgccatatacaagaatcaactcaagatggattaaaggcttaaatctaaagctgaaaattatttttaaaaaaccctagaagaaaacctaaggaatactattctgggtatcggccatagcaaagacttcatgatgaagactccaaaagcaattgcaacaaaaacaaaaaattgacaagtgggacctacttaaactaaggagcttctgctcaacaaaagaaactataagcagagtaaacagacaactcacagaatgggagaaaatatttgcaacctatgtatccaaaaaaggtctaatatccagaatttatgaggaacttaaacaaatcaacaagcaataaacaatgccatttagaaaatgggggaagg

SEQ ID NO: 652204 - DNA, 589 bp, Homo sapiens
atgtcacttatttcccaattaatttacagatccaatgaagttctaatataatttccaaaatctatgtatgtaatttgtcaagacgattttaaaatttgtcttgaagtgaaaggttcaagaatatctgagacatctttgaagaagaacaagttgagacacactcttattaaagcattggggtctcattcccagtagcctttagagaaaattatagctgttagccttgacggraagagttagacgaggtggcttattgaattgattcaaagccaatcaatctatgtgaaaacactggtattagtaagacatctaaagactgcaaggaagacataggctgagatactttcattaatcaggtttgcatattccagatgatctgaagtcacaaagggttccctctttctttcgtatttagaaaatatgctataggacatttagagtgaggaagaaagtcttctcttattttctcactagttagttcacattgcaacctgcttttcctatgtcatttagcttcttaacaattgctctgggtacctatagttgctattatctctctggtctcttttataactcccagtgcatatta

SEQ ID NO: 652205 - DNA, 589 bp, Homo sapiens
atgtcacttatttcccaattaatttacagatccaatgaagttctaatataatttccaaaatctatgtatgtaatttgtcaagacgattttaaaatttgtcttgaagtgaaaggttcaagaatatctgagacatctttgaagaagaacaagttgagacacactcttattaaagcattggggtctcattcccagtagcctttagagaaaattatagctgttagccttgacgggaagagttagackaggtggcttattgaattgattcaaagccaatcaatctatgtgaaaacactggtattagtaagacatctaaagactgcaaggaagacataggctgagatactttcattaatcaggtttgcatattccagatgatctgaagtcacaaagggttccctctttctttcgtatttagaaaatatgctataggacatttagagtgaggaagaaagtcttctcttattttctcactagttagttcacattgcaacctgcttttcctatgtcatttagcttcttaacaattgctctgggtacctatagttgctattatctctctggtctcttttataactcccagtgcatatta

SEQ ID NO: 652206 - DNA, 603 bp, Homo sapiens
tgacagcagctataacttgttttagcagtagctgcagcagcagctataataaaagcatccactgcccagtgttgcatgttgagtgtcagcgatgcaagccatggtgtctctgacctgtgggaaaagcttactttaccttcaccagtctggttctgctacatgaatttgggcatcgttctcgatgtgcatcctctgagacttgctctctggccctcctaaaatttatgtgagcttctgagtgtctttttaaaatayacttcttttctgtttaaattgtcatttgttatttgtaactgattgtatcattgtctttagcaagctgttagggtaaaagaatctgcatgaagtctctttcaatatctccctggagaaagccagttctgtgaggcttttatgcacaaggtgctcctcaggagggagtgagcagcaaagtaaccaaaagttattcctgacatcccactgataatcagcagtttctttgggaagcaaagttacagagcaaaaagattatgggccttgtaaccagaaactaccatttacagtgtctataacaagttgattaatctctctgggacctttttttccttatatgtatacacaaat

SEQ ID NO: 652207 - DNA, 590 bp, Homo sapiens
taatctaactagcctagatttccatgagaacgtttagagtctgaagcatgagtaggagttagccacacaaagggaagaagaatgtgtaggaaaggagtctagacagtgagaaaaagtaatgtgtaggcaagagcttgatatgatttaagaagtgaaagaatttcagtatgactagagtttggcgtgaaacagaacaagtgctaacagctaaagctaagacaatagacaatacattgctctaaagggcttagagttagaatggaaaacttctagtgcactccaatttgcctaattttgagttgtgaacactacatgccattcttcctcygaggtgtttccagatggaagtgggaggccacaaaagcaacctaaagtgcttaatcttagaaacttcttcgtgccatttggagattgaatcaaagaactaacttctgactctaaacaaaacctcttaatgtgaggttttaacatcatattaatatcatcagtatccaaccctaaaagcaaaatgagaatatctgtaccaattcagtgtatcttaataatgaatacttttaagcactacctctcaattccatctttatcacctt

SEQ ID NO: 652208 - DNA, 491 bp, Homo sapiens
aaggagattttgggctgagaccatgtctctgtttgtttgttattggtgtataagaatgcttgtgatttttgtgcattgattttgtatcctgagactttgctgaagttgcttatcagcttaaggagattttgggctgagaccatggggttttctagatatacaattatgtaatttgcaaatagggacaatttgacttcctcttttcctaattgaataccctttatttccttctcctgcctaattgtcctggccattggagaggaggagcatctcccagacagctgcgtgcctcagagaagccagcctcgctaacccctcaagcccaggggatgagaccctsctgaatcgctgctctattttggctggagccacagctccctccaccgcggggcggggctaaaatgtcctcccccttaagggagcaggcagctcctcccagccacccaccccaccaattcccatcctcccgcccccctccaccaaccccttct

SEQ ID NO: 652209 - DNA, 475 bp, Homo sapiens
tgtctcatgcttgtaatcccagtactttgggaggccaaggcaggagattgcttgagcccagttcaaaaccagactgagcaaatatagtgagaccccatctctacaaaaatctaaaaattagctgggtgtggtggtgtgcacctgtagtcccagatactcgggaggctgaggtgggaggatcacttgagcccaagaggtcaaggctgcagtgagccatgatcatgccattgcactccagcctgggcaacacagcaagacactgcctcaaaaaaaaaaaaaaaggagtaagaagtaatcacagataaatttaaacctttcgcatttttaaaagttatgtgcagacaagtaaaaataataaaagttcaatcatttattatgatgctagatgcatctgaaactggatratacgatatagttgttttttttttcttaagacagagtctcactctagcgtgatctcagcttgctgcaacct

SEQ ID NO: 652210 - DNA, 489 bp, Homo sapiens
ggccatgatgatttattcttttcatgtataattagattcaatttgccagtaatttgttgagaattttcacatctgtatttatgagggatattggcctctagttttctttttctgtaatgtttttggtcttggtgtcaggtaatgatgaccttagcaaatgaatcgggaagtgtttcttgttctttatagcctaaaagagtttgtgtagacttgatrtttttccttacgtaattggtagaatttgccagtgaagatatgtgcacctgtagtttttattgctaaaaggttttaaattataaattcaatttctataatagatacaaactaaccaggttatttaatctttgttaagctgtataatatgatttggctctgtgtcctcacccaaaactcatgttgaattgtaattcccagtgttgggggagggacctagtgggcagggatccctagagggatcacaggggcagacttcccccttgctgttctcat

SEQ ID NO: 652211 - DNA, 489 bp, Homo sapiens
ggccatgatgatttattcttttcatgtataattagattcaatttgccagtaatttgttgagaattttcacatctgtatttatgagggatattggcctctagttttctttttctgtaatgtttttggtcttggtgtcaggtaatgatgaccttagcaaatgaatcgggaagtgtttcttgttctttatagcctaaaagagtttgtgtagacttgatatttttccttacgtaattggtagaatttgccagtgaagatatgtgcacctgtagtttttattgctaaaaggttttaaattataaattcaatttctataatagatacaaactaaccaggttatttaatctttgttaarctgtataatatgatttggctctgtgtcctcacccaaaactcatgttgaattgtaattcccagtgttgggggagggacctagtgggcagggatccctagagggatcacaggggcagacttcccccttgctgttctcat

SEQ ID NO: 652212 - DNA, 489 bp, Homo sapiens
ggccatgatgatttattcttttcatgtataattagattcaatttgccagtaatttgttgagaattttcacatctgtatttatgagggatattggcctctagttttctttttctgtaatgtttttggtcttggtgtcaggtaatgatgaccttagcaaatgaatcgggaagtgtttcttgttctttatagcctaaaagagtttgtgtagacttgatatttttccttacgtaattggtagaatttgccagtgaagatatgtgcacctgtagtttttattgctaaaaggttttaaattataaattcaatttctataatagatacaaactaaccaggttatttaatctttgttaagctgtataatatgatttggctctgtgtcctcacccaaaactcatgwtgaattgtaattcccagtgttgggggagggacctagtgggcagggatccctagagggatcacaggggcagacttcccccttgctgttctcat

SEQ ID NO: 652213 - DNA, 570 bp, Homo sapiens
catcatgcctggctaatttttgtattttttgtagacagggttttgccatgttgcccaggctggtctcaaacwcctgggctcaagcaattctcttgccttggcctcccaaagtgttgggattacaggtgtgagccactgtgcccgggcaattttgctgttttaacgttgctgtttggggagagatttgccaagttcctcactcagccatttatggatgtataatcttaatcaatatattaattcccactgcatagactatgaatgactcctaaaagtagataatttacagacttgtttggactatattaatatatattaaatagctactacttattgagtacctaccattgggatagctgttttatatacacatatattccacagccctcatgttgttttgtggatattattcctatcacaaatgagaaaaccaaggctaaaggagcttgcctaagatcttattagcagagtaagaatttaaacccaggcctttctatgctcttgctattccattttgtccacttttcactgctgccttaccaggaaaagcgttcttagaatcaatttatc

SEQ ID NO: 652214 - DNA, 627 bp, Homo sapiens
taattataaatctttttcagaaactgttgagttcactctgggaggtgaaaatgttttcattttaaacactgcaaaatgaccgaaagaaccaattggtatcgttaaggtgggaaataatttttaactacattcgtgtcagttaccaagatagtatctttgattaagggtttggacttttggtcaggcatgatggctcacacctgtaatcacagcactttgggaggccaaggcaggaggaccacttgagaccaggacaacatagggagatcccgtctctacaaaaaataaccaattagctaggcatggtggtgtccctttggtcccagctacttgagaggctgagggaggaggatcagttgagtctgggaggtcaagactgcagtgagccatggtcataccactgcactccagactgggtgacagagtgaaacaaagtatggacttttgagtcaatggaactgtgtgtagtgttgtatttctagcaatttctaacagtattccttcataagatgacaagctrtttctaacctcatttctcctgttttaggaacacttgtgtcaggtttctatttcagtaaccataatcactaataactaagggaacacaaaagtccatcaatgagaagt

SEQ ID NO: 652215 - DNA, 626 bp, Homo sapiens
gagcgaatcaaactccaactgggtaaatgctaactggccacaggtacttgggttgtaacgaaccctcaaaagttgatgttttgggggccaaatcgagggtccgctggatgaggtcagtatattttctctctttgaaaaagataatcagcaggattttttttaaaggctacacatcatggggacactgcctgacacctgcatatgtgagtgggaggtgaatgcatgctggagtwaaagctgcttcctttgtctctttaatgctttcctttgttttctgttgaacaccctaagagtgcatttctgtgagctggttccatctcccattgactccaaccctgagtatctcacaggacagggagtcaaagccttaggctacagccttactcagaggtgacagcaagtagaataaggcacttcacattatgtgagactaataaagaccatgttaaagtttgccaccaactgggctaagggccaggacctgtagtcttttactatcccttattagcatggggctttgggtcaagtctctgaaattctgtttgagctttatcatcgatcaaataatgaaaatcaccactctgaacttcataaagtcattgttgagaatcaaagtcagaggcacg

SEQ ID NO: 652216 - DNA, 588 bp, Homo sapiens
gagcgcagggagcggaggaggcgggacgcagattgcgccggtgacagcccgaggctccctcccgcctccttgcacgcaccgtcgtgcgagcgctgggcggtgtgtgcgtccgtcgcgccctgtgttcgtcatcagccccgctccaggatgcacgaggggcgtggatacgtttgcggcctctgcccgcgggccccggcgcttcggcctcgcctccgcccgccgccaccttcccttgttcctgccccgtccctgcctctgcccctgcccctggcytgcggacgccgggcagcgtgggcctgggcccctacccgcttccgagagcgttttcccggggccgcctttatggctgagtcgggcgctcgggacccacccggcgccttgcggacttgagggaatgaaatggaaacgcttccggggaaggtcgcgggtgtgggcgcctaggtcggcgcagccttgggagccgccgtgggtcgcggactggcgtggccagtgtggaaacttgggactgtttgcgatttctgggcgtgggaccgagttccaagtgacaattctaaaacttcaccttacagcctaggcaagccccaagtg

SEQ ID NO: 652217 - DNA, 527 bp, Homo sapiens
aaccacagcaccatcagagcagaaatccagagacggtcccagggcagacacagcgtaagggagtgaggagtttgggccgggacgggcagatgctgaggagagatttcaaaagcaattttcagtatacgaagtactgtttcatagttactgcactgtccttgacttccacccaggataggaagagagtgaacacccttctgtctgatgggtgtggggggttaagtgagacatacagaaaaactgtaagttgtggcacctcccttttttaggtcagagaaaggggacaaatgcgtagactctcagggtcttttagtatcattgtgttggggaacagtgggtggaccagatgctctgttgggatctggaatctgggagcttgtgatgctatgtgcccaaaacagaaaagttaccccaaactataaaacgttataaataacagtacagtgttagcatccatcaaaaagagtacaaagcaagcccctcacacacgacggggatagatttagtyaaaaagcacacacatgccc

SEQ ID NO: 652218 - DNA, 473 bp, Homo sapiens
tcactgcacccctcactctcactgagccccctcactgcacttcctgggagaggcagaggctgccggagtccccgccctgagtgagtctgcaatgtagggtgggacacagagaaaacaagtcagggccaggggtgtgatgacrgcgataatgatgttaaattccagagagtcctcaaggcctcacatagcgaaaaaggaaaggtgctggggaaggagaaactgcaaggacaggacgtgtgaggcagcgggagagggagagacagtaccggagtccgctcccggaaacggcccctgggcactgggctgggcatttcccaggcaccaatcgctcactggctctctcagaatcactgcaacccagggaggggagtgcagtcatcacccccatctgacaaaagaggaacaggctaggaggggttgggccgcttgccccaggtcacaccagtgtcagggcagccctggaggacaagagg

SEQ ID NO: 652219 - DNA, 534 bp, Homo sapiens
gataccccatttagcttcatataatttttacccattggatgcctgtataaaaatatctcatgtacaccataaatacatacacatactatgtacccacaaaagttttaaatttaaaacttaaaaaagtagctaacraatacatattcaaagaacaacacaattaggaaactatcaacatgcaaccctaataaaaatttaagcctggcacagtggctcacacctgtaatcccagcacattagaaggccaagaggggaggattgtttgagcccaggagttggagaccaacatgagtgatgtagttaaacattgtctatacaaataataataataataataataataataataataataataataataattagctaggcatggtgatgcatgcctgtagtcccagctacttaggaggctgaggtggaggattgtttgagcccagaaaattgaggctgtgagctatggttgcaccactgccctctggcctggactacaaagcaagaccctgtctcaaaaaaaaaaaaaaaattattcat

SEQ ID NO: 652220 - DNA, 635 bp, Homo sapiens
agatacaattctgaaacttttgtacatgtatatcagggttaataattaaattcttaattatgagatccaaatttctcattgtcagagaagaaagttacagaaaagtgtaaaaagaaggctagaatgaactccttggtacaggattagatttggagacattagtatgaatttatggttagattaatatacattcagatggttagatacagatacctgtgtataaatagatatgtctgtatatacaggttacattatatacatttattacctatctcttcttcagagagtgattagaagcaatgatatctagtaaaatctagcacaaacagtgcccagttcatatgtttaagccaaaagtatttgactaatacatacttttgaccctgaaatcacttttttggatactttatacatagcttcaatatgtgagaattacattttacctgtagtattctaaattagcayagtgcagtaggactttctgtgatgaaaatattctatctcagtgctattcaatataggagaatataggagctactaataataacacctaactcttgaacaattgcaacgtgacttatgaaactaaaacacctaacttaattgatttcattgtaatttaatagccacaggtg

SEQ ID NO: 652221 - DNA, 520 bp, Homo sapiens
cctgctcttttttgtttaccatttgcttggtagatctttttccatctctttactttgagcctacaggtgtaattgcatgtgaaatgggtctattggagttagcatatttatttagctaactygccactgtgtgtcttttaagtggggagtttaacccattcccacttaaggttactattgacatgtgaggatttgatcctgtcatcatattgttagctggttgttatgcaggcttgttgtatagttgctctatagtgccaatgtgctgtgcacgtaagtgtgtttttttcgtggcaggtcttgtggtggtctttcatttctatgtttagcactctcttaaggaatccttgtagagtaggtctggtagtaatgtttttccttaggatttgcttgtttgaaaaggactatttctccttcacatttgaagcttagtttggctagatgtgaaagtcttcattggaatttattttcttttatgatgataaatgtagtctcccaatctcttctggcttgtaagttt

SEQ ID NO: 652222 - DNA, 520 bp, Homo sapiens
cctgctcttttttgtttaccatttgcttggtagatctttttccatctctttactttgagcctacaggtgtaattgcatgtgaaatgggtctattggagttagcatatttatttagctaacttgccactgtgtgtcttttaagtggggagtttaacccattcccacttaaggttactattgacatgtgaggatttgatcctgtcatcatattgttagctggttgttatgcaggcttgttgtatagttgctctatagtgccaatgtgctgtgcacgtaagtgtgtttttttcgtggcaggtcttgtggtggtctttcatttctatgtttagcactctcttaaggaatccttgtagagtaggtctggtagtaatgtttttccttaggatttgcttgtttgaaaaggactatttctccttcacatttgaagcttagtttggctagatgtgaaagtcttcrttggaatttattttcttttatgatgataaatgtagtctcccaatctcttctggcttgtaagttt

SEQ ID NO: 652223 - DNA, 585 bp, Homo sapiens
tactgagtcacggatagtgctgataaatcaaggcctttattcaaaatttgagtacacatcaaaaaattgcaattgaaatggaagcccaaggtctcactgcctttttttcttttttcttttttttttctttcctttttttttttcttcttcttttttgagacaagaatctcactgtcacccaggctggagtgcaatgacaccatctcggctcactgcaacctccacctcccaggttcaagcgattctcctgcctcagcctttcgagtagctgggattacaggcgtgygccacaactcctagctatttttgtatttttagtagagatggggtttcacaatgttggccaggatggtctcgaactcttgatctcaggtgattcgcctatctcagcctcccaaatttctgggattacaagcatgcgccaccgtccccagccctcactgcttttgtttcctagtagagtgaccttgagctatttgtcaaatatttcttagatttttaatctttaaaatcagttggccaaggtaaatagcatttagcattctttacaatttttaaattctatcaacttaaatttaagctcct

SEQ ID NO: 652224 - DNA, 585 bp, Homo sapiens
tactgagtcacggatagtgctgataaatcaaggcctttattcaaaatttgagtacacatcaaaaaattgcaattgaaatggaagcccaaggtctcactgcctttttttcttttttcttttttttttctttcctttttttttttcttcttcttttttgagacaagaatctcactgtcacccaggctggagtgcaatgacaccatctcggctcactgcaacctccacctcccaggttcaagcgattctcctgcctcagcctttcgagtagctgggattacaggcgtgcgccacaactcctagctatttttgtatttttagtagagatggggtttcacaatgttggccaggatggtctcgaactcttgatctcaggtgattcgcctatctcrgcctcccaaatttctgggattacaagcatgcgccaccgtccccagccctcactgcttttgtttcctagtagagtgaccttgagctatttgtcaaatatttcttagatttttaatctttaaaatcagttggccaaggtaaatagcatttagcattctttacaatttttaaattctatcaacttaaatttaagctcct

SEQ ID NO: 652225 - DNA, 585 bp, Homo sapiens
tactgagtcacggatagtgctgataaatcaaggcctttattcaaaatttgagtacacatcaaaaaattgcaattgaaatggaagcccaaggtctcactgcctttttttcttttttcttttttttttctttcctttttttttttcttcttcttttttgagacaagaatctcactgtcacccaggctggagtgcaatgacaccatctcggctcactgcaacctccacctcccaggttcaagcgattctcctgcctcagcctttcgagtagctgggattacaggcgtgcgccacaactcctagctatttttgtatttttagtagagatggggtttcacaatgttggccaggatggtctcgaactcttgatctcaggtgattcgcctatctcagcctcccaaatttctgggattacaagcatgcgccaccrtccccagccctcactgcttttgtttcctagtagagtgaccttgagctatttgtcaaatatttcttagatttttaatctttaaaatcagttggccaaggtaaatagcatttagcattctttacaatttttaaattctatcaacttaaatttaagctcct

SEQ ID NO: 652226 - DNA, 451 bp, Homo sapiens
acttaatcttacatctactattttgttttggtttctgaaatagggtctcactctgtcacccaggctkgagtgcagtagcaggatcacagctcaccgtgcaggctcaacctccttgggctcaagcaatcttcccactttagcctcccaagtagctgagactacatacaggcactttccaccagacccagctaatttttgtattttttgtaaaggtggggttttgccatactgctcaggctggtctcgaactcctaagctcaagtgatttaccttccaaggcctcccaaagcattggaattatggtcgtgagccaccgctcctgacccctacaatattctttattttattatcataacagaacatccaaaatttctataaggcatcgatatttatttagcatctttaaaattttctttcttacccttagacaggaaacctttatcactaatat

SEQ ID NO: 652227 - DNA, 338 bp, Homo sapiens
aatctaactttctgacttaatcttacatctactattttgttttggtttctgaaatagggtctcactctgtcacccaggcttgagtgcagtagcaggatcacagctcaccgtgcaggctcaacctccttgggctcaagcaatcttcccactttagcctcccaagtagctgagactacatacaggcactttccaccagacccagctaatttttgtattttttgtaaaggtggggttttgccatactgctcaggctggtctcgaactcctaagctcaagtgatttaccttccawggcctcccaaagcattggaattatggtcgtgagccaccgctcctgac

SEQ ID NO: 652228 - DNA, 633 bp, Homo sapiens
cagatagggtgagtctcctcattttaactatactataaaaaaactgtacatcattaattatttaaggttgccaaataattttaatttgaatcttaccaacacttagatataacttcctgtttctaagaaatagcaaaggcttaatgaattagcttcctgtttctaagaaatataacttcttgtttctaagaaatagtaaaggcttagtgaattaactaaatgaccgccggaagaaactatcacagaaattcaaaaatatggggcattctacaagattgtccacattaaaacagggctgttgttacaggacatttctaaattaaaagagacataaaggatgtaacaaaaagatacaatccatgattccgtattaaacaaacctactagtgtgaagaacatattgggaataactatagaaatgaaccggcttctagatgatagtaaggaattattgtaaattatacatgattatgttatttttgtctaagaaggaaatggttttatattttgtaaagtgaacattawattattcagggataaaatgctacatttgcagtaactttaaaatacctaagctaataataatgataataacaaagctactagagccagattaagtgctttcaaattgtg

SEQ ID NO: 652229 - DNA, 571 bp, Homo sapiens
caaattgtgaactttgtagctgtgtggcttcaaatatgttactgaaccactctgatattcttttgctcactgttgaaatggggcataaataatacttcctatctcaataagctttttttttttcagatttagcttatagatgtaaagcactgaaaaacagtacctgacatgtagaaagcaaaatataagcatccactattgtagtgtactctagtgctcgtctttatgaataaagggtttggtcttaagttcaataggtgcctatttcttgaaaataggacgagcagattcttattaacccatttcctgtctacccaggtcataattgagttccttaacagaacataggatttggttgtttaaatgatctttttagccatcatttgctggtaggttaggaagaagcatgtgccttctataagcggagactgtatctctactcaacttgtaaattcaccgaaacctttatgrtgggtctttttctccaaagtagagacctatactttcttgtggagttcaaagcttaacattgttttttcttttttaaggtaaatcaatcactgcactaata

SEQ ID NO: 652230 - DNA, 605 bp, Homo sapiens
acctttccttgaacttattcataatacagattcctttgctcacatgtttccttgctgaccatctccccaccatcacccttttgccctgccatactcccttcaccaagatagtaaaaatrgtgatcaataaatactgagggaactcagagaccagcaccagtgcgggtcctcgcatgatgaatgccagtcccctgggtccacttttcttcctctatactttgtctccatgtcttatttcttttctcagtctcttgtctccacctgatgagaaatacccaaaggtgtggaggggcaggcccccttcagaagcaatggctaatttaggagttgacaaatctaagaagaaccaaagagtaagccctaaagtgggaaaatgttataattgtggaaaaactggacattttaaaaaggaatgctgccagatcccaggacagaagggatcttataatgcagttccctcccaagtggaaaaaacgccagggctctgtcttcgctgtaacaaaggaaatcactgggctaatcagtgccgctaaaaatttcatcagaatggcacctggcccctcaaacaatgaaggcattcccagttcagaccacaaccctgtttc

SEQ ID NO: 652231 - DNA, 527 bp, Homo sapiens
tcatatgtattttctaaaggtaggctgaaaatgaaayacatagagctcatatatgtatctgagtcttctagaattcaaataaagacagatgtgcgtgcgtgtgatggttaacatttattatatactgggtggaactattaataacaatgagacttgagaaatattttcttttatgcatcccaattaactgacactatgtaatatagggaacaatgcattattcccatgtttttcaatgttgttatagcatgttcttctttcatctattatttctaaaatttgtaatattttaataccattttctgtaaactataagacaatatcataaccccaggttggaaaaatagctttacgtttattatatatttagcagagaaaatttggagaaaataagtataagcacctctaattttaatgctccccacaaaaaaaaacataaaaaggaatttatttataattacatagtatataaaatgtcataccttaattccttattttatgttcttttcacataatattgtaacatc

SEQ ID NO: 652232 - DNA, 606 bp, Homo sapiens
aggacttgaaattccatgtaatagtcaaacttctgaattcccatttaagattcacacttctctactccagctcttacctgcttcaggtggagaatttgcagaaggaagtgagcacagatcaacttttacttccttatggttgtaattgaggtgtactgagatgtgtgttgcaaacagagatactttagcaaggtactgatatgaatcagatcacctgggaacacctgtgaaggaatcccagttctgaaatttactaactccrtgatcttgggaaaatagttactcatattggattattgtctgggttaagtgagttagaaagagagagagtgcagcacttagaagagtccctgaaactggaatatttgttttctagcctttgcccttgtggacattatatcttcttgctagcaagccttaatacttgccccctctagaataggagctgtgtatggggaggaggaaaataaatattagggcgggaagcatctgtaatataaagcaatttggtattaatttcctctgtccatggtagatgtttaaagctgacttttgctctcatggggtcttacgggtttttcagtgagcgtataactaaggatctct

SEQ ID NO: 652233 - DNA, 460 bp, Homo sapiens
ggattattgtctgggttaagtgagttagaaagagagagagtgcagcacttagaagagtccctgaaactggaatatttgttttctagcctttgcccttgtggacattatatcttcttgctagcaagccttaatacttgycccctctagaataggagctgtgtatggggaggaggaaaataaatattagggcgggaagcatctgtaatataaagcaatttggtattaatttcctctgtccatggtagatgtttaaagctgacttttgctctcatggggtcttacgggtttttcagtgagcgtataactaaggatctctcatcctacctttcttgatacagggcaaaatgtatcttttcaacacagtccttacacagcttctgggcatccagaattaattccagtctctttccttcttgttctcattccccttcttttttcactcttttatggactaattata

SEQ ID NO: 652234 - DNA, 488 bp, Homo sapiens
gcttccattgacaaggcattcctatattgctaacctagaacaaatactgttccacagccatcagcactaacagctatcaatgctactactccacatgtaatctcataataatgcctttacatttggtatcaacaaacagaaatgttaggcacaagctcctttgacagtgaccatgagataaggttataacttttacttgatcctcttgtcatttgtattaatgatgatcaatcaactgctccgcatggtagaaaacaatagatctgagacacatacaacagctttgttgacatataaaatgcacggctaacacgtaaaatgcatggttttgtttaggggagtagacttttgcagacctgccatatgtcagtcttgttcagcagtgtcactggagtaaaagagagtcaaaactcatactaccatgtraacaccatcttatgaatgaatgtgtgtagttacttgagtaaaatacataaaatacaatttgt

SEQ ID NO: 652235 - DNA, 575 bp, Homo sapiens
tactggcagccacctttctattccctacttctattagtttgactttattagcttccacrtatatgtaaaatcatgtatcgtctttctgtgtcaaacttattacccttagtataatgtcctccagagtcgtccatgttgtcataaatgacaggatttacctctttttttaaggctaattttctactttgtgtgtatgtatatgtgtatatatatatatatatgcacatagtgtgtacatatatcgatgcatgcacacatacatatatctctatataaatatatacatacatacatacacacgtacacatatatatattctttatccattcatcagtaggcagactcctatattgtttctatatcttgattattgtgaataattctgcagtgaatctacaaatgcacggaaccttttcagatgatattatttccttcggaaatataccaagaagtgagattgcaaaattacatgtatgctctactattaaattctccatactgatttccataatggctgtccaatatacacttccaccaacagtgtatacgtgttcccttttctccacatatccacc

SEQ ID NO: 652236 - DNA, 575 bp, Homo sapiens
tactggcagccacctttctattccctacttctattagtttgactttattagcttccacatatatgtaaaatcatgtatcgtctttctgtgtcaaacttattacccttagtataatgtcctccagagtcgtccatgttgtcataaatgacaggatttacctctttttttaaggctaattttctactttgtgtgtatgtatatgtgtrtatatatatatatatgcacatagtgtgtacatatatcgatgcatgcacacatacatatatctctatataaatatatacatacatacatacacacgtacacatatatatattctttatccattcatcagtaggcagactcctatattgtttctatatcttgattattgtgaataattctgcagtgaatctacaaatgcacggaaccttttcagatgatattatttccttcggaaatataccaagaagtgagattgcaaaattacatgtatgctctactattaaattctccatactgatttccataatggctgtccaatatacacttccaccaacagtgtatacgtgttcccttttctccacatatccacc

SEQ ID NO: 652237 - DNA, 632 bp, Homo sapiens
aattcctggtggaatctttatgagacatggcaatctggtcagtaaaacagtataggcaatggcttgttggagttaggtaggcacaccacagcttaagcagtccttgctcttcaaaatggacaagttaaattcttaggttaactaatgggccctggagagakctggttagaagactagagtgaaataaaggtgagattcagataagatctaagcaagttaggactgtgaaaataaatcaacaatagcagagttgctgcaagatggcagcagttttaaagacagatgtttaagagtctgatttggaatgctggttagcaaatagttggcttcttcaaggttcatacttacgaattagccagacagctttgagttctaagtagacaacttacgagttgtgacagaaatctggctgacgatggatgactgttaaccttaattcaagcccaaattatgctgagactgaggaaattatctcagcatggattcaatcataattccactacctgtagttgaaaagaaaatactacctgataaataaaatctgaaatgagacttgctccctggggaggtaaagctctgagttaacaaactcagtcgtaattcaaggtcatctgctccagtcaggcacaaca

SEQ ID NO: 652238 - DNA, 575 bp, Homo sapiens
acctgctgcgagggaaggaggaggcctgcacgtgtcacccgtggccaaaattactggctctcccttttcgtggcttgttggcagtaaccaagtaatatttataggtgtgtagcattgttcatggtctgttgtgttcagggagaagttgttggatcaggaaggtggtaaaggcttaaggcagtttcccctgcatgccgctgtatttgctattttgtcttgggtgtaaattcattctgagtttagtcagggtatgaggatacttagcactagggaacttccacacaagagcctggtacttggcaggggatgagacataaatgatatgaggcccttgttctttggcactgaaattaggtgaggagctcatgatccttctcagagggggcctaagctgtatccaccaacggaaaccacatggagaggtagatcctttcccccctacggtctaaggtcttgggaatcatttaggaaaaaggaaaacagaatcagagctgctaagagatmgattcatattacagagtaaggatttaggaagcttgttcctgagccctttcttgtaagtgctaaaataatgc

SEQ ID NO: 652239 - DNA, 602 bp, Homo sapiens
tgtgtggtctacaactagggaaaaacccattgtgcagacactaataatttagatcaaataaaatagcataaataacattaaaagaaaattttctttctgaccaaatatttcaagcttaagttgttggctaatacatttcaagcattattaattaaacacattcctggtacagaaaacataataaaatggttggaagtctttcagaacttcttgaagtggaatttggttatatgaattatactgtaactttttttttttttttgagacagagtgagtttggccctgccacccaggctggagtgcagtggtacgatctcagctcactgcaacctctgactcccaggttcaagcaattctcctgcctcagcctcccaagtagctgggactgcaggctcatgccaccacacccagctaaytttttgtattttagtaaagacggggtttcactgtgttgcccaggctggtcttgaactcctgacctcatgatccacccaccttggcctcccaaagtgctaggattacaggcatgagctaccatgcccagcctgtaacaatatttttgtcttgctctgtcagccagattggagtgcagtggcaccatc

SEQ ID NO: 652240 - DNA, 602 bp, Homo sapiens
tgtgtggtctacaactagggaaaaacccattgtgcagacactaataatttagatcaaataaaatagcataaataacattaaaagaaaattttctttctgaccaaatatttcaagcttaagttgttggctaatacatttcaagcattattaattaaacacattcctggtacagaaaacataataaaatggttggaagtctttcagaacttcttgaagtggaatttggttatatgaattatactgtaactttttttttttttttgagacagagtgagtttggccctgccacccaggctggagtgcagtggtacgatctcagctcactgcaacctctgactcccaggttcaagcaattctcctgcctcagcctcccaagtagctgggactgcaggctcatgccaccacacccagctaactttttgtattttagtaaagacggggtttcactgtgttgcccaggctggtcttgaactcctgacctcatgatccacccaccttggcctcccaaagtgctaggattacaggcatgagctaccaygcccagcctgtaacaatatttttgtcttgctctgtcagccagattggagtgcagtggcaccatc

SEQ ID NO: 652241 - DNA, 422 bp, Homo sapiens
atttgatagttcattatgagcaaaagaaaaaggaaataatcaagaacagagggaaattagttttttttaaaagccactgaactaagaaatacaacygtggttctttaattattaagggaagggctctgaatttgctccattatcttaattatgtttctggagcaaacattatttcaatgtgataaaagatgacatgacactaaaggtaaagcctgagcagatgttacatgagtaacaagccaataggcccacattctggtaatttcttccccactagacatgttctcattaatctgtgattaataggattcaagtatagtaaatgatgatgatctattgtctgtctttgtcgagcaccatggacggagtaatttgtcagctcagcttttgtgtgactatttaatagcaaagagggagagaga

SEQ ID NO: 652242 - DNA, 584 bp, Homo sapiens
ctgagacccttgaacaaggagcttgtggccagagaaaggctaaatgcagcacccccacccctgtggctagtgccagggccccacctgaatgctctgcagttgggtccccccaggccatctccagaggagaacgcaagtgggctagggagggaacagaccagcctgaygcaaaaccctctcagcccagcacagccctcgtgtccctgggctgagggtctggggagaacatcacttgctcttgcctcccttcctttcttgctgctgctgcctcctgaggtcaggccgtgactactcaggagaggaatggaattccagggctcctgctcctaatgaaggagaggtgggaggggcacacaccaagctgctaccaggtaccaggccctcggaggtgcttgaacactacctccttgactctcaatagcaatcctatgaggtggatgttttcttgcccaacagatgggattctgagactcagagatattggtgacttgcccgaggtcacaccaatggtaggtggtgattcaaaaccaggtctgtgtgcagttcaatgaccatggagtcttgccctgttgcacagggcttct

SEQ ID NO: 652243 - DNA, 532 bp, Homo sapiens
tagatccaccccaacagaataaactccagatggattggacttacgtgtaaaaaaaataaaccaaaaaccataaaatctgggctgggcgcagtggctcatgcctgtaataccagcagtttgggaggtcaaggcgggcggatcacttgaggtcaggagtttgagaccagtgtggccaacatggtaaaacctcatctctactaaaaatacaaaaattagccaggcatggtggcgggtgcctgtaatcccagctactcagaaggctgaggcacgagaatcacttgaacctaggaggtggaggttgcgtaagctgagatagtgccactgcactacagcctgggcaactgagtgagacccaaaaaagtgagtctaaaaaaaaaaaacmaaaaaaaacccactataaaatctaaagacaaatgaaggaaaataagcaatgcagtcactagagacaagaggactttctaattatataagaaaagattgatagatttgaaaagattgatagatttgattataaaacactctgagccacatt

SEQ ID NO: 652244 - DNA, 558 bp, Homo sapiens
agcacaaatgggggagaagccctggggagcagtttcaggagaggaagagggtggggaaagggctcagcaagttgggaaccagtggaatggtgacaaggccaggtggaggctggmtgtattttgggggcatccagtgccccatcctaagagcaccctgacctccttggaggagatcgccttatgcccgcttccctcaaggagggccaaaggggtcatatccttcccagccagccccaacctgggacaggaatgtggcgtcccctggccaattggttgttcttgcctagggctttggctcctgagtgagtgagatgaggacactggtggtaagaggtcctttataaaagcaggtgcggcagcagtggctgtggccccggggtcctggccgagactggctgactggcttccgtccccagagccctcacttcctgattttcccaagcctggtttccccctgtctattgtccattctgtgagctctccccactgtggacttccattaaattccccgctgcttaaactagccagagtcagtttcctgctcccagacacaagcat

SEQ ID NO: 652245 - DNA, 558 bp, Homo sapiens
agcacaaatgggggagaagccctggggagcagtttcaggagaggaagagggtggggaaagggctcagcaagttgggaaccagtggaatggtgacaaggccaggtggaggctggctgtattttgggggcatccagtgccccatcctaagagcaccctgacctccttggaggagatcgccttatgcccrcttccctcaaggagggccaaaggggtcatatccttcccagccagccccaacctgggacaggaatgtggcgtcccctggccaattggttgttcttgcctagggctttggctcctgagtgagtgagatgaggacactggtggtaagaggtcctttataaaagcaggtgcggcagcagtggctgtggccccggggtcctggccgagactggctgactggcttccgtccccagagccctcacttcctgattttcccaagcctggtttccccctgtctattgtccattctgtgagctctccccactgtggacttccattaaattccccgctgcttaaactagccagagtcagtttcctgctcccagacacaagcat

SEQ ID NO: 652246 - DNA, 558 bp, Homo sapiens
agcacaaatgggggagaagccctggggagcagtttcaggagaggaagagggtggggaaagggctcagcaagttgggaaccagtggaatggtgacaaggccaggtggaggctggctgtattttgggggcatccagtgccccatcctaagagcaccctgacctccttggaggagatcgccttatgcccgcttccctcaaggagggccaaaggggtcatatccttcccagccagccccaacctgggacaggartgtggcgtcccctggccaattggttgttcttgcctagggctttggctcctgagtgagtgagatgaggacactggtggtaagaggtcctttataaaagcaggtgcggcagcagtggctgtggccccggggtcctggccgagactggctgactggcttccgtccccagagccctcacttcctgattttcccaagcctggtttccccctgtctattgtccattctgtgagctctccccactgtggacttccattaaattccccgctgcttaaactagccagagtcagtttcctgctcccagacacaagcat

SEQ ID NO: 652247 - DNA, 558 bp, Homo sapiens
agcacaaatgggggagaagccctggggagcagtttcaggagaggaagagggtggggaaagggctcagcaagttgggaaccagtggaatggtgacaaggccaggtggaggctggctgtattttgggggcatccagtgccccatcctaagagcaccctgacctccttggaggagatcgccttatgcccgcttccctcaaggagggccaaaggggtcatatccttcccagccagccccaacctgggacaggaatgtggcgtcccctggccaattggttgttcttgcctagggctttggctcctgagtgagtgagatgaggacactggtggtaagaggtcctttataaaagcaggtgcggcagsagtggctgtggccccggggtcctggccgagactggctgactggcttccgtccccagagccctcacttcctgattttcccaagcctggtttccccctgtctattgtccattctgtgagctctccccactgtggacttccattaaattccccgctgcttaaactagccagagtcagtttcctgctcccagacacaagcat

SEQ ID NO: 652248 - DNA, 588 bp, Homo sapiens
tgagggaaagatgctgacctacgtaactaaaaatgatggagtctgaaggctaaaggcaaaaggaattgtgcataaatattataccctagagtataacatttttcccatggggataacggttaacaattctgaaaccacaatagatgtatactggaattgaacaattaaataaatgggtggtggaaggtgggagccagatttcycactgttggagtgggaggttatagacaagcaagaggagacatgaataattcatgcagtcatggcttagagttgaagacatcagttcgaacttaatataaattcagatgggagagaaagagagagagagagagagaactatgcaaagatatatgtatatgtacacagtttttttcatttttactttatcagctgaaagggcctaaaaacaatgagtttaactagtagcaagatcttgatttctcccaccattctccaaaaacaagaaccagggttccttggaaaaatgacagatccttggactaggcaggaaatatacataaggctagaatatattgcactgccagcaagtaaagacatgtaaaacaagcaaacaaacaaacctta

SEQ ID NO: 652249 - DNA, 493 bp, Homo sapiens
cttcttctgagcctgcctgttacccagttcataagtcacttccacattttcaagcatctttagagcagtaccaccccactactttggtacmaattaactgtattagtccatcctcacactgctataaagagttgcccaagactgagtaatttataaagaaagaggtttaattgactcacagttcctcatgtctgaggagccctcaggaaacttacaatcatgatggaaggggaagaggtacatcttacatggtggcaggcaagagagagcaagtttgtgaaagataaactgtcagacacttataaaaccatcagatcttgtgagaactcacttcctgttatgaaaagagcatggaggacactgtctccatgatccaatcacctcccaccagacctctccattgacacatggggattatgaggattataagtcaagatgagattggggtgaggacacaaagcctttacaatatcagcgtgctttatccctttat

SEQ ID NO: 652250 - DNA, 421 bp, Homo sapiens
gagagcaagtttgtgaaagataaactgtcagacacttataaaaccatcagatcttgtgagaactcacttcctgttatgaaaagagcatggaggacactgtctccatgatccaatcacctcccaccagacctctccattgacacatggggattatgaggattataagtcaagatgagattggggtgaggacacaaagcctttacaatatcagcgtgctttatccctttatagccactgtagtcttttacacagcrgtattttaaagtatgtgcttggtttaaatggataccaggtcttatatactggaaatcaaaatcttcatatgattgagctaaaagagaccctagagggcatgagactaaaaacaactggaaacttttctttctaattcataagtcatcctacagtctaacctgataag

SEQ ID NO: 652251 - DNA, 543 bp, Homo sapiens
gaaactttggacttggacttttgagctamtgttgaaatgagtgaaccctttgggggactgatgggaaggcatgattggttttgacaagtgaggacataagatttggggggtgccagaaatggaatgatatagttaggctttgtgtcctcacccaaatctcttcttgaattgtaatccccacaatccccacatgtcaaagggtagacctggtgggaggtgattagatcattggagtggtgtctcccatgctgttctcatgatagtgagttctcatgagatctgatggttttataagtgtctgaaagttcctccttcagacattcactttctctcacctgccaccatgtaaaaggtacctgttccccttctgccactattgaacgtttcctgaaacctccccagctatttggaactgtgagtcaattaaacctcttttctttataaataacccagtcttgggcagttttttatagcagtgtgagaacagactaatacactaatacacatgccctttcaaatatcatactagagtgttaccagtag

SEQ ID NO: 652252 - DNA, 543 bp, Homo sapiens
gaaactttggacttggacttttgagctaatgttgaaatgagtgaaccctttgggggactgatggkaaggcatgattggttttgacaagtgaggacataagatttggggggtgccagaaatggaatgatatagttaggctttgtgtcctcacccaaatctcttcttgaattgtaatccccacaatccccacatgtcaaagggtagacctggtgggaggtgattagatcattggagtggtgtctcccatgctgttctcatgatagtgagttctcatgagatctgatggttttataagtgtctgaaagttcctccttcagacattcactttctctcacctgccaccatgtaaaaggtacctgttccccttctgccactattgaacgtttcctgaaacctccccagctatttggaactgtgagtcaattaaacctcttttctttataaataacccagtcttgggcagttttttatagcagtgtgagaacagactaatacactaatacacatgccctttcaaatatcatactagagtgttaccagtag

SEQ ID NO: 652253 - DNA, 543 bp, Homo sapiens
gaaactttggacttggacttttgagctaatgttgaaatgagtgaaccctttgggggactgatgggaaggcatgattggttttgacaagtgaggacataagatttggggggtgccagaaatggaatgatatagttaggctttgtgtcctcacccaaatctcttcttgaattgtaatccccacaatccccacatgtcaaagggtagacctggtgggaggtgattagatcattggagtggtgtctcccatgctgttctcatgatagtgagttctcatgagatctgatggttttataagtgtctgaaagttcctccttcagacattcactttctctcacctgccaccatgtaaaaggtacctgttccccttctgccactattgaacgtttcctgaaacctccccagctatttggaactgtgagtcaattaaacctcttttctttataaataacccagtcttgggcagttttttatagcagtgtgagaacaractaatacactaatacacatgccctttcaaatatcatactagagtgttaccagtag

SEQ ID NO: 652254 - DNA, 418 bp, Homo sapiens
ccccagctatttggaactgtgagtcaattaaacctcttttctttataaataacccagtcttgggcagttttttatagcagtgtgagaacagactaatacactaatacacatgccctttcaaatatcatactagagtgttaccagtagaatcttccaactcagcttcagtcatgaagttctttgagtattaggcgatttatttattttattgctggrcatatagcttagatgtattatatctgtattaatctgttctcatgctgctaataaagacctacctaagactgggtaatttattttaaaaaagagatttaattgatccacagttacacatggctggggaggcctcacaatcatggtggaaggcgaaggggaagcaagacacgtcttacacagcatcaggcaagacggtgtgtgc

SEQ ID NO: 652255 - DNA, 511 bp, Homo sapiens
tgaaagttcctccttcagacattcactttctctcacctgccaccatgtaaaaggtacctgttccccttctgccactattgaacgtttcctgaaacctccccagctatttggaactgtgagtcaattaaacctcttttctttataaataacccagtcttgggcagttttttatagcagtgtgagaacagactaatacactaatacacatgccctttcaaatatcatactagagtgttaccagtagaatcttccaactcagcttcagtcatgaagttctttgagtattaggcgatttatttattttattgctgggcatatagcttagatgtattatatctgtattaatctgttctcatgctgctaataaagacmtacctaagactgggtaatttattttaaaaaagagatttaattgatccacagttacacatggctggggaggcctcacaatcatggtggaaggcgaaggggaagcaagacacgtcttacacagcatcaggcaagacggtgt

SEQ ID NO: 652256 - DNA, 445 bp, Homo sapiens
ctccatccctgtggctctgcaggctatagccacctckccagctccctactaccagctgctttcataagctggcattgaatgtttgcagcttttccaggcacacagtacaagctgcaggtgggtctaccattctggagtctggaagatagtggccctcttctcacagctccactaggcagtgacccagtggagattctgcatggggactcacgccccatatttcccttctgcactgccctagcagaggttctccatgagggccccgccctgcagcaaacttttgcctgagcatccaagcattttcatacatcttctgaaatctaggcggaggttcccaaacctcaattctcgacttccatgcacccacatactcaacatcacaaggtagctgccaaggttgggggcttccaccttctgaagcaatagcctgagctgtacattggcc

SEQ ID NO: 652257 - DNA, 592 bp, Homo sapiens
ataaatgtgttcattttgttcaagtgtatactttatgaaatataaatacaggtcaagtatacccaatgaaaatttagtatcctaattgagagccactgtaagtagaaaatatacactggattttgaaagcttgayataaaaaaagtaaactatctcattaataattttttaatattgattacacattgaaatgctaatatttggaaaaacatgactaaataatatattttactaaaaataatttcacttgtttgttttcactttttaaaatgtagctactagaatatttaaatttacatagtgtattagtccattcttacattgctatgaagaaatatctggcacagggtaatctataaagaaaagaggtttaatcaactcaaagttccacataactggggagacctcaggaaacttacaatcatggcagaaggcagcacttcacagggcggcaggagagagaatgagtgccaagcaaataaagaagccccttataaaaccattagattttgtgggaactcactcattatcaggagaacagcatgggggaaactgcccccataattcaattatctccacctagtcctgccct

SEQ ID NO: 652258 - DNA, 592 bp, Homo sapiens
ataaatgtgttcattttgttcaagtgtatactttatgaaatataaatacaggtcaagtatacccaatgaaaatttagtatcctaattgagagccactgtaagtagaaaatatacactggattttgaaagcttgacataaaaaaagtaaactatctcattaataattttttaatattgattacacattgaaatgctaatatttggaaaaacatgactaaataatatattttactaaaaataatttcacttgtttgttttcactttttaaaatgtagctactagaatatttaaatttacatagtgtattagtccattcttacattgctatgaagaaatatctggcacagggtaatctataaagaaaagaggtttaatcaactcaaagttccacataactggggagacctcaggaaacttacaatcatggcagaaggcagcacttcacagggcggcaggagagagaatgagtgccaagcaaataaagaagccccttataaaaccattagattttgtgrgaactcactcattatcaggagaacagcatgggggaaactgcccccataattcaattatctccacctagtcctgccct

SEQ ID NO: 652259 - DNA, 397 bp, Homo sapiens
tgaaccacatcattaatacaatcatctatttctccccaattttaggcaccaaaaytggggagggaatagagcaacatggtgctctattaaatctaaatctaaattaaatcacatttccattaaggaaatgagattcagttcaatgtaacggctgtcatgaaatctaggctgggaagtggaatcaaacttacttttcctaattttaagtccaatgtgttcatcctagtattttctaaattgtatgatattaacaagaatatcagctgtgagacaggaattacaagtgagatcatgcaagctcagagcttgagaactttgaccacttggtcttcttggtttgttttacttctatacatccctaccatccatgctgcatatcccctaagaaaatcttaag

SEQ ID NO: 652260 - DNA, 563 bp, Homo sapiens
aaacataataaacttaataaatgaccggtctgggtagtgtttcatttctaaagcttcagaatasttatggaagctaagtaaaagaagaaatccactttttacttaattagtaactagggcagtcatttcatacaggaaacaggagctcagtaaatgcttctctcaagggggtgataatatatattcatactgtacacaagaaacagcgatcttgttggtaaggatacaatcttatttggtcaggaaataaactcgaagccttatttgaacctattattttctgaaatcaccaaaccatgcaatatgacttgggcttataatagtggatcatctaaatccttgcttcccacaatgggtctgcggagagtagcataagcatcacctttgagcttgtttgaaatgcaaatactcccacccacctgaggcctatggaatcagtatcttcaatataacaagattagggggatttgtacagattaaatatcagaagcccttgtctagataagtgattccccaagtgtgattctaaaccaacagcatcagcatcatctatgggtctgtaa

SEQ ID NO: 652261 - DNA, 623 bp, Homo sapiens
ttctaaatcctgactctgcatctggtcctctcagcaggaaagagacacaactagaccctaacgcgagaggatgggcaactcagtaccatggagagagacttgcatgtgccggctcctctatgcccttagccttgaatggccaatggcttgagtccatgaattaagtattgcmataagaatatctgctctaccaagtacaaacttagctgagtgaaattatttgttttgatatgattaacagtctcaacagtataagaactctatagcacattcctcttgtggctgtgagtactacataattttccttaatgcttgtcaaaacaggaaatttagataagttgctattcttttacagaagttcagtgattcttgataatcaatttgttttagaaagaaatcagaattcttgcagtacaatgatctaaaaatatgctctaggaaaaaattattttatagccttatgcagaatgcatgtcttttttgctgaataatgttctttgcttctgcagagtcatgtgcattccccactggcttggttcacatagtccaaatagttgaaatgttttgcttgctctttttaatatttgaaggatgtcagcatgcattttggcatagttggaaat

SEQ ID NO: 652262 - DNA, 545 bp, Homo sapiens
atttggaaggacttgagtacatcatagaagtgtgtgtgtgtgtgtgtgtgtgtgtgtgagagagaragagagagagagagagagagagagagagagttgggccacatgcctgagagcatctcaggaatgcctgttggttcccccgtgggttggttgtgaactggaaagaagctacctgcttctaaacctacattgcctcaaatgccctgcttactgtattgccacagtggggcctgggctgggggaggcagatttcatagtcttggtggcctatgtgagtttgtgtaactattgtggttttgggcaactgtagtgggttgccacctcaattactctcctaccccttttcacagccaaaaaagtttagccagcccaaggcgaaaaggtcattggtacatatataaagtatcatgcttataataggcactcaataaatatcaactttatctactcctacaggtgtatcagaaaagataagaattgcttgtcatagacatgcacagacacttcagacactttgcacagatacacagaaattggagctg

SEQ ID NO: 652263 - DNA, 245 bp, Homo sapiens
gtccttgtgctgaggccacaagaacttccaaaaagttcactgaacatctaggaggaacaacagagggtaattggagcataaatttagttggctcagcacattcagrtgtctgatcttggtggagttagtgtcctctggggcctgtcctattccatgaggaattccaaagagagagctcatctagggatttctcctttcttagttcttggatttatttcctcaccgttctccctgggtttccttac

SEQ ID NO: 652264 - DNA, 433 bp, Homo sapiens
ctttgcttggcacttcttcctgtgctgagccttgtgaagaaattgtcttgcttctcctttgccttctgccatgattgtaagtttcctgaggtctccccagctatgctgaaccgggagtcaattaaacctctttcctttataaattaaccagtcttggacagttctttatagcagtatgaaaatggactaatacaccagttatcmagccccagtaaatggaagggtcattgaatgcatttagcaccttccttacttataggacagagcttcaggaaacatagaggagtctctggctttttcagccccttctctctagggcctcgtggccttccagcttggcatctctcacagcctgtataccctcttgtttctgcagaccacactactccatctctcatggttctggcttagcaagacaccacccccaactaca

SEQ ID NO: 652265 - DNA, 433 bp, Homo sapiens
ctttgcttggcacttcttcctgtgctgagccttgtgaagaaattgtcttgcttctcctttgccttctgccatgattgtaagtttcctgaggtctccccagctatgctgaaccgggagtcaattaaacctctttcctttataaattaaccagtcttggacagttctttatagcagtatgaaaatggactaatacaccagttatccagccccagtaaatggaaggrtcattgaatgcatttagcaccttccttacttataggacagagcttcaggaaacatagaggagtctctggctttttcagccccttctctctagggcctcgtggccttccagcttggcatctctcacagcctgtataccctcttgtttctgcagaccacactactccatctctcatggttctggcttagcaagacaccacccccaactaca

SEQ ID NO: 652266 - DNA, 459 bp, Homo sapiens
atggttttatagggggctcctccctctttgcttggcacttcttcctgtgctgagccttgtgaagaaattgtcttgcttctcctttgccttctgccatgattgtaagtttcctgaggtctccccagctatgctgaaccgggagtcaattaaacctctttcctttataaattaaccagtcttggacagttctttatagcagtatgaaaatggactaatacaccagttatccagccccagtaaatggaagggtcattgaatgcatttagcaccttccttacttataggacagagcttcaggaaacatagaggagtctctggctttttcagccccttctctctagggcctcgtggccttccagcttggyatctctcacagcctgtataccctcttgtttctgcagaccacactactccatctctcatggttctggcttagcaagacaccacccccaactacag

SEQ ID NO: 652267 - DNA, 442 bp, Homo sapiens
atgctaatggaatgggagtggacagaagagctccaaattcacaatgggaagaaataaaatgaataygaacatcttggtcatttgacctaaactaagacaataaaagtcaaaaaaggagaaccaaatactaaacataaaacaaattgtaaaaaatagaacaaggtctaccagcagttactctgtatgttgaatggctggatttttcccacctaaagacagggactttcatattgggttaaaagatgaaatgtaaccatatgctgtgtttgaaaaaactatgcttaagacagtaataagtgcttaaaataaagggaatggcaaaaagaatttagtaaggtggaatggttataagataaaacacaaaaatcaatagcctttctctcttccagtaaataagcatctagaaatgaaaaggaggagaaatattttatttgcagtagtg

SEQ ID NO: 652268 - DNA, 442 bp, Homo sapiens
atgctaatggaatgggagtggacagaagagctccaaattcacaatgggaagaaataaaatgaatacgaacatcttggtcattygacctaaactaagacaataaaagtcaaaaaaggagaaccaaatactaaacataaaacaaattgtaaaaaatagaacaaggtctaccagcagttactctgtatgttgaatggctggatttttcccacctaaagacagggactttcatattgggttaaaagatgaaatgtaaccatatgctgtgtttgaaaaaactatgcttaagacagtaataagtgcttaaaataaagggaatggcaaaaagaatttagtaaggtggaatggttataagataaaacacaaaaatcaatagcctttctctcttccagtaaataagcatctagaaatgaaaaggaggagaaatattttatttgcagtagtg

SEQ ID NO: 652269 - DNA, 562 bp, Homo sapiens
atggggcagacagcctgtgggctggatgctggtctggtgacatgacagccacccccctctaatgtctgcatcacagaaaggaagccaggagcaaggatctcttccctgtagcgctctggatggatctgcccatgagggccacccatgtccagtcctcagtcatagtgagctgtgctgaggaagggacttggctatgccccatctcccatcacttctccccttgattcctgatgcaatggactttaatttttagcaacaccaagcagcctgcagctccctcagataccttattttggctcttattatctctgcctggaattctcttcctgcccaggcatcacctcctcttagaagccrtcttgggctctctgggttgggccaagccccagggctcttgctctgtctgccactcttgcatctgactcacactcctaatttgagcactctttgtggtcaggcccttgctttggttagctggaattaccagcttctggcacaaaggacaggaggtggtcacaactgtttgctgagtagaaacttgtattggtctcctaattcacaa

SEQ ID NO: 652270 - DNA, 538 bp, Homo sapiens
tgcacagtcctctgagaatttcagccctgggttggttggtgatgggccctggaccagcaggtcagtggggatttgaggtctggtggttgtggagattcatctggagacagagagacacaaagagacagagacacagagacagagacagggtgacacagaaaaactgtagagatggttcttagcagttccctgaggcctggctgttttgtggttcccagatattttgctctgtccctactgaactcctggctcatggcagcttgagtgagtttcagtcccttgcaaactaatgcaccctgattgaaactgatgagtggtggtgacccgggatccytactttgcattctacccactggctgttaacatctgaagggcagtcactgtttaccagtatgctgtattactccaatgactattccagcgaaagcagatacagtcctcaggcccaaccactggagactgcaaaatcaagctattagtatgatggaatggggtacagatgtttaaaatgataaatatgatgattacgcagacaagg

SEQ ID NO: 652271 - DNA, 538 bp, Homo sapiens
tgcacagtcctctgagaatttcagccctgggttggttggtgatgggccctggaccagcaggtcagtggggatttgaggtctggtggttgtggagattcatctggagacagagagacacaaagagacagagacacagagacagagacagggtgacacagaaaaactgtagagatggttcttagcagttccctgaggcctggctgttttgtggttcccagatattttgctctgtccctactgaactcctggctcatggcagcttgagtgagtttcagtcccttgcaaactaatgcaccctgattgaaactgatgagtggtggtgacccgggatccctactttgcattctacccactggctgttaacatctgaagggcagtcactgtttaccagtatgctgtattactccaatgactattccagygaaagcagatacagtcctcaggcccaaccactggagactgcaaaatcaagctattagtatgatggaatggggtacagatgtttaaaatgataaatatgatgattacgcagacaagg

SEQ ID NO: 652272 - DNA, 547 bp, Homo sapiens
agcttccttggttgtgacctgggtccaatccctggggtgcggcaaattcctgcatttgtaaagaagrttgcaacaatgagagattgtgaatgcaaagacaaagaagtagaatttgcattatttcacgcttggcattccatgtgactgcttggaatttcatgaatgcttaaaatttaaatcagtaaatcagagtgtgaactgagtgcagtactttggtttggcaaatgcagattttagttcttacataaaatactttactgaatctgcataatataattaaaatgaaaatttatccatctgttatgttaacagtttgttttaaaactaaagaagaaataaagaagtgattaatgctgattcttacatgattattactgggaataattttttcgtatagaggagggggttgtaaatagggtctgctctggaagagcgctggactctgctaaaagttgaaaatgctgatcatggacaatgaattctgcacagtctattgacatccagaaagagattaggagtcttttgtaggaaatttcactaactaaaa

SEQ ID NO: 652273 - DNA, 605 bp, Homo sapiens
aacaggggagtctccaacccaagaggccaattggagaagttgcatgtcttgcaggaatggacctgtgctcagtcactgggccacagggatgtggccttgttgtgaaggtaatgatgggcccagaggggcagcagctgagctgttagtttattatactcccttcagaaagacactggaggggtgcattttgtggccaccacaccacactacatggcttatctaggtagaatattcacatagtcatgatcatgcaaagctgctgatctaaataaaatgaccacatgaccctgttggaaggatgaaggcaggaagtgtctgtggtggatataggagctaaggaaagagggttaaattccatagtaggaagtcaatagagaaagcctccaagtcagtcaccctaataaatagattatctatagatatggtgaatctgaaamggaccaacaaaaagaataaaaaaggattacctgtggggagcagaaagtgagagaagggagcagagggtggagatggaagaaagtataatggatgtataaatgaaaactagatttagcgagtgtggtcaagcacctgacacatagtaagtactgtgtacatgtcgtcat

SEQ ID NO: 652274 - DNA, 600 bp, Homo sapiens
acaactacacagcaaggggtgtgtgattattcccgtttttcacataaaagaggactaaatgtcagaggtgaagcaacccattttcagtcgcacagttagcaagtggggaagtcagagttaaatcagatcttttgacctcagattccttgcttttttacactagataatgatgctttatattgccctggcaattcagttgtaggtttcaccctggctccctgaccaaaggccactcccacaggaacctacccttagctgtcagagccaaagacaacagtctgcaagagtctgcactggttgtctccttctgaccctacctggccattctayctaatcacctgggcttatactcacagacatagcttgccatgataatgggttatgtatctatactgtttattggtgtggcactggccagctaccagcacatacagcaggcactcaactagtatctgttgaatgagtgaataaataaatcaacaagtaagtaagtggatgaatgagtgaattgccttcaaaggatcttcctcaaaggcctggcctccagcagtttgctctccttttaatcttgcctcctgagctccagagatcctccagaga

SEQ ID NO: 652275 - DNA, 569 bp, Homo sapiens
ctcaaacatcttctacctttagtaccatgacaaaatcctactcgttcttcaagtctaactctcctaggaaggatctcatgattttccatcttgtcctaggcagaataagccatcttgggtaataggatagttatatatctgtctccttgactagactatgaattaccttcttctcatggctagagaccatgccacaggcatctctggagcctccaagcctagcatggtgcctggcacacagttggtattccatacatgttggatgaataaataaaggagccaataaaccctgttatctcagaggaagctgtcttcagtattgggggagggctcactgagggtctctatgagattccgtgggaarccactgtgtgtgttttctgggtacagtagggagcatcagctggaattctaaaattacaagtgatgaaagagatacatgcacttgtgccttagtttaggctgctataacaaaaaacaataccacagactaggtgagttaaacaattaacacttctcacagttctgaggtcttttttataagcgcagtaatctctcatgaggacccc

SEQ ID NO: 652276 - DNA, 579 bp, Homo sapiens
ctctgaaattgcaacacacacacctttgccttatgaataaatatatctctgcttgttctctttgtggatagaagatagagtttaaatcacaaatcactgatgaagagatcattgtgctcacatttcagtatgtagctacttccaagttcctaatatttagttttccaatcacatagacctctgctaccaacccaggtgaaactacacttaattttgacaataaaaggattttgaaacattattgcatctgaatcttgtatctttatgattcttcagtgaaaaaatttaaatacacatatctatctaaatatatctatctctatatattctttaatctctgctatgtatttactttttatttatctatgtatcatctctatataatttgtaatttctgtgattaactgctagcagaagaacatacttctcagttccccaartgatatataaagatgtaatccacacaacactgagagatcagaattattaaactcaaaacaagaaaatgaaggctcagcaacactgagggtgtgatccaagatcaatagccaatatgtggccgtgttgggacttgaacac

SEQ ID NO: 652277 - DNA, 565 bp, Homo sapiens
gggggagagatggacaatgcttgggatgctttaaagagcaaggctgcatggttcgtagcaaaacactgacaatgaccttaagggtcagcagtaagagaacagggtaatttgtgatggtacatctaaaccacagaacactgaacaaccatcacgagggcttgcccatatagatccattgatgtggaagygtattcataattgccaatgacaaaattatttggaggcactgctcatagcatgaggccattttttataaattacaatatccaatctattgtttataggtcaatgtctggatgggcattcaaggatatcgtctagaacatcttacgacccaagttacagaaatgtggagaactgtccactgaaagactgcaggggccacgggggcagtggctgaagagtgtgccctgccaaaagacaaagagatttcaaaattcaagaaaaaatggactcaccaaacagagtcctgctgctctataaattacacactagctctatagtgctagtgtactatacaatataatatatatagtacaagccacctgctctataaattacacac

SEQ ID NO: 652278 - DNA, 565 bp, Homo sapiens
gggggagagatggacaatgcttgggatgctttaaagagcaaggctgcatggttcgtagcaaaacactgacaatgaccttaagggtcagcagtaagagaacagggtaatttgtgatggtacatctaaaccacagaacactgaacaaccatcacgagggcttgcccatatagatccattgatgtggaagcgtattcataattgccaatgacaaaattatttggaggcactgctcatagcatgaggccattttttataaattacaatatccaatctattgtttataggtcaatgtctggatgggcattcaaggatatcrtctagaacatcttacgacccaagttacagaaatgtggagaactgtccactgaaagactgcaggggccacgggggcagtggctgaagagtgtgccctgccaaaagacaaagagatttcaaaattcaagaaaaaatggactcaccaaacagagtcctgctgctctataaattacacactagctctatagtgctagtgtactatacaatataatatatatagtacaagccacctgctctataaattacacac

SEQ ID NO: 652279 - DNA, 565 bp, Homo sapiens
gggggagagatggacaatgcttgggatgctttaaagagcaaggctgcatggttcgtagcaaaacactgacaatgaccttaagggtcagcagtaagagaacagggtaatttgtgatggtacatctaaaccacagaacactgaacaaccatcacgagggcttgcccatatagatccattgatgtggaagcgtattcataattgccaatgacaaaattatttggaggcactgctcatagcatgaggccattttttataaattacaatatccaatctattgtttataggtcaatgtctggatgggcattcaaggatatcgtcyagaacatcttacgacccaagttacagaaatgtggagaactgtccactgaaagactgcaggggccacgggggcagtggctgaagagtgtgccctgccaaaagacaaagagatttcaaaattcaagaaaaaatggactcaccaaacagagtcctgctgctctataaattacacactagctctatagtgctagtgtactatacaatataatatatatagtacaagccacctgctctataaattacacac

SEQ ID NO: 652280 - DNA, 615 bp, Homo sapiens
cctacacagtcactctcctcccagcttcagatcatccacacactggatgtgcaccctctccatacagttactcaccttccagtttttgactaggtttccagcttaataccaactagttcattagcactcttccaaggctgtcaattggttactgtttgccttctcctctggcccatatttatccaaggttgctataaagtccacctaggggctgggcacggtggctcacgccagtaatcccagcactttgggaggccaaggcgggcagatcacaaggtcaagtgatcgagatcatcctgaccaacatggtgaaaccccgtctctactataaatacaaaaattagctgggtgtggtggctggcacctgtagtcccagctactcgggaggctgaggcaggagaatcgcttgaacctgggaggcggaggttgcagggagctgagatcgtgccactgcactccagcctagtgacagagtgagactctgtctcaaaaaaaaaaagtccagtccatctaggacttagaggtctctaggttagtgaccctgctggacagaccatggctgagygatatccaagatgctgggtcctggcactttctgcagcctctatttgctgg

SEQ ID NO: 652281 - DNA, 557 bp, Homo sapiens
tgggtgatggataatccaatcagcacacttactggggcataaaaatgagaacattctgcaactgcatacaatgtggaggccatgatgttaagactaaaagctggattcaaaattgtaggctcgctgtaaaataagtaaagtgtacatgccggtgaaataaggcaggaatagaaatgagaagggaaagaaagcagcyataaagggctctaggcagtatctttggaagctgagaggctggggaaagccgaagaaggagaaggagctaggggcagggtccggggaaaagagacgtaagcccagacacaagccatcagcaggcgagtgtgggaacagggcagccatttcggctccagccggtcaagccagcttatctcagggaagagagttctccaagtatgggtgggtgcacttaccttcttcagttagaagtagaatctgactatcccttggttcttgggctggatattgtctaaatctctgggatgaatccagctcaggtgagttaagctacttgtaatgaacagagggtactgggatgagaagtcagatttgatcac

SEQ ID NO: 652282 - DNA, 557 bp, Homo sapiens
tgggtgatggataatccaatcagcacacttactggggcataaaaatgagaacattctgcaactgcatacaatgtggaggccatgatgttaagactaaaagctggattcaaaattgtaggctcgctgtaaaataagtaaagtgtacatgccggtgaaataaggcaggaatagaaatgagaagggaaagaaagcagccataaagggctctaggcagtatctttggaagctgagaggctggggaaagcmgaagaaggagaaggagctaggggcagggtccggggaaaagagacgtaagcccagacacaagccatcagcaggcgagtgtgggaacagggcagccatttcggctccagccggtcaagccagcttatctcagggaagagagttctccaagtatgggtgggtgcacttaccttcttcagttagaagtagaatctgactatcccttggttcttgggctggatattgtctaaatctctgggatgaatccagctcaggtgagttaagctacttgtaatgaacagagggtactgggatgagaagtcagatttgatcac

SEQ ID NO: 652283 - DNA, 561 bp, Homo sapiens
ctcaatgtttaacaatatttcctaaatcataggtcatttattattaacttcattctatgtatctatatagataaaatcttgatgcaacaaacccattaaaagaccagaattctttcayacaaatcccatgtaagtggaatttataaagcaaaaaaataacaaagagtcataaaataagatacaatgctctaggtcttggcttaaaacaaaaaactggtcattttaaaagtgtaaacgtatgtgtactgtatttcttactttgctctggttttgcagctcgttggtagaactttaattcagtaaaaagaggtccattgtcactgggttccttaaaatataagagttaattagtactagcagtagttaaaattactgagatattttcaatgaaccttcaaaaaagaccaacaaatctatttttctgtccaatgtaattttgatacttaagtttataactgtgttaagattaagtcaaactccttagaaatgttcagagaaatattagtctatatttcttatattgctcaagttccatttctataagtgataaattatacaaaa

SEQ ID NO: 652284 - DNA, 558 bp, Homo sapiens
ttccttctgtatcacttatagtaaagtacttatatatacagagatcaaaaaatagtatgtgtgcatcactgcccacatgcaaaagctggtcatggggctgataaatgctacaatgtaaagtctaaaatgccctgtatttgctatgcctatttacaaaagggctgttttctgcacagaagctattcagacactcaaattttaatatgcagtggttcttaactatgtctgcayaatgaaatcacctaggaagttttttaaaaatcccgacggtcccacccttatagcttttgatttacttggtctagggtgcagcacagatacttaaaagctcccaggtgaatttattataatatgcaactaaggatgccacccacagcctcacaagcacctccattaaaatgatctgaggtatttgtgtgttaatggaccagaaaaagaaactggagaagcagtgagtcctggcacctaaaaaacaagctatctggccacaaatttcactcatttctgaaatcactggaagtagatgtctgtaatgaaaattctattaaactaacagga

SEQ ID NO: 652285 - DNA, 640 bp, Homo sapiens
aacaactaaaaacggtctttacatttttacatgatttttaaaaattgaagaatattttatacccaaaatgctaacacgagccaaggcaggaacgatagaatttgctgcaatcacactgaagatgatagaaactcccattttagtgtccataagtgaggtttgattggcacatgcacagccgtgccttatttgtttatgtattttctgcagagttgagccttggcagcagagaccttctgacctgcaaagcctgaaatatttacaccctgcttctttctagaaagggtyggttgacctctgttttctaggaatgtattctaaggaaactatagaaaagcaatgcccatcactgaaggactggttaatgaatgatgaggccatttagaagtattctgcagagctatagagaaggatgtctattgctggacagagatgaccatcattgtttttacttttttggtttttactttttttggtccttctgctaaaaagtcacctgccacctacactgcttgatgttgctgattcttgcaagatgtgctttctgtattattcagaaatattcaatgctgatatcaagagcaataaaaacaaatggaatgaaagaaattcataagaagtgttaattatagatagtgag

SEQ ID NO: 652286 - DNA, 573 bp, Homo sapiens
ttggtatagacagacatggctttactcagtcattcactcaacaagtacacagcaagggcctaactctaaactggacactgcactgtgcattgagaagatggagagcaggaaagataatgtccctattctaagggagctttgttttatagaaggcacagttggatcatcacacagaattacaaattcagaaaagtgctaggaaggcaaagcacaagatgctctaagaacatagagcctgtaatcccagtgctttgggaggctgaggcaggtgaatcacttgaggccaggagttcaagaccagcctggccaacatggcaaaaccccgtctctatyaaaatacaaaaatgagctgggcatggtggcacatgcctgtaatcccagctactcgggagtagcccaagaatcacttgggcccgggcggcagaggttgcagtgagccaagatcacatcactgcactccagcctgggcaacagagcaagattctgtctcaaaaacaaaaaaaaaaacaaaacaaaaaaacatgtaatagggtaaaactgatacaccatggggattcaaagaaaaatttcctg

SEQ ID NO: 652287 - DNA, 586 bp, Homo sapiens
ttggtatagacagacatggctttactcagtcattcactcaacaagtacacagcaagggcctaactctaaactggacactgcactgtgcattgagaagatggagagcaggaaagataatgtccctattctaagggagctttgttttatagaaggcacagttggatcatcacacagaattacaaattcagaaaagtgctaggaaggcaaagcacaagatgctctaagaacatagagcctgtaatcccagtgctttgggaggctgaggcaggtgaatcacttgaggccaggagttcaagaccagcctggccaacatggcaaaaccccgtctctattaaaatacaaaaatgagctgggcatggtggcacatgcctgtaatcccagctactcgggagtagcccaagaatcacttgggcccgggcggcagaggttgcagtgagccaagatcacatcactgcactccagcctgggcaacagagcaagattctgtctcaaaaacaaaaaamaaaacaaaacaaaaaaacatgtaatagggtaaaactgatacaccatggggattcaaagaaaaatttcctgaggaagtgatggt

SEQ ID NO: 652288 - DNA, 564 bp, Homo sapiens
ggttaatatctaaattatataaggaactcaaacaactcagtagcaagaaaacaacctgatttaaaaatggacaaaaaacttcaattggcatttctcaaaagaagayataaaaatggccaacaggtatttgaaaacatatatcactaatcactaggaaaatgcatattaaaactataatgagatactattttacacttgtcacaatagctattatcaaaaaatgaaagataagtgttggagaagatgaggaaaaaaagaaactttagtacaaggttgatgggaatgtgagttagcacagccattatgaaaactgtatgggagtttctaaaaaaaataaaaatagaattaccaaataattcaataatctcatttctgagtatacatccaaaagattttacatcagtatgttaaagagatatctgcacttcttgttcattgcagcaccgttcacaatagccaaggtatggaatcaacttaagtgtccatcagtggatgactgaataaagaacatgtagtacatatacacaatggaatactattcatctttaaatggaaagaatttct

SEQ ID NO: 652289 - DNA, 564 bp, Homo sapiens
ggttaatatctaaattatataaggaactcaaacaactcagtagcaagaaaacaacctgatttaaaaatggacaaaaaacttcaattggcatttctcaaaagaagatataaaaatggccaacaggtatttgaaaacatayatcactaatcactaggaaaatgcatattaaaactataatgagatactattttacacttgtcacaatagctattatcaaaaaatgaaagataagtgttggagaagatgaggaaaaaaagaaactttagtacaaggttgatgggaatgtgagttagcacagccattatgaaaactgtatgggagtttctaaaaaaaataaaaatagaattaccaaataattcaataatctcatttctgagtatacatccaaaagattttacatcagtatgttaaagagatatctgcacttcttgttcattgcagcaccgttcacaatagccaaggtatggaatcaacttaagtgtccatcagtggatgactgaataaagaacatgtagtacatatacacaatggaatactattcatctttaaatggaaagaatttct

SEQ ID NO: 652290 - DNA, 564 bp, Homo sapiens
ggttaatatctaaattatataaggaactcaaacaactcagtagcaagaaaacaacctgatttaaaaatggacaaaaaacttcaattggcatttctcaaaagaagatataaaaatggccaacaggtatttgaaaacatatatcactaatcactaggaaaatgcatattaaaactataatgagatactattttacacttgtcacaatagctattatcaaaaaatgaaagataagtgttggagaagatgaggaaaaaaagaaactttagtacaaggttgaygggaatgtgagttagcacagccattatgaaaactgtatgggagtttctaaaaaaaataaaaatagaattaccaaataattcaataatctcatttctgagtatacatccaaaagattttacatcagtatgttaaagagatatctgcacttcttgttcattgcagcaccgttcacaatagccaaggtatggaatcaacttaagtgtccatcagtggatgactgaataaagaacatgtagtacatatacacaatggaatactattcatctttaaatggaaagaatttct

SEQ ID NO: 652291 - DNA, 576 bp, Homo sapiens
caagtgccaaaaggcataattgtcatagacatactagcagctggtggaacccccacattggctccatgattggtagagtgagggctattacgatgggagaggccaaatggaagccattagagctgcctgtacctagaaaaatagtaaatcaaaaacaatattgcatccctggagggattgcagagattagtgccaccatcaaggacttgaaagatgcaggggtggtgattctcaccacatctccatttacttcttctatttggcctgtgcagaagacagatggatcatggrgaatgacagtggattattgtaagcttaaccaagttgtgactccaattgcagctgctgtaccagacatggtttcattgcttgagaaaatcagcacatctcctggtacctggtatgcagccactgatttgacaaatgtctttcactccattcctatccataaggcacatcagaagcaatttgccttcagctgggaaggccagcaatatcctcaggggtatatcgactctctggctttctgccataatcttgtttgcaaagatcttgatcgcttttcacttccacaag

SEQ ID NO: 652292 - DNA, 648 bp, Homo sapiens
aatctaaaacaaaactccactgaccacctgttcttcataagtccctactctctctggtagacccagagagagttttatgtcactaagaatttgtattggcacaaagccattgtccattaaaaactaaacagtctgattatcagcctttcactaagtatacacacttacatgtataactgtctaggaaattgtcacaggtacatttaggaaggctagtaggaagattaacagtatamattaaggattcttactcagagtagaatgactcagactttctctgttaaacggtctttggttttatgaattggctgaagtctgtaattggctgaaaagcctcaactttatgttttaatgagtcaagtctaacttctgttaattctttccacttacacagaacaagtaagctttagaacactgcccatctatttcagttcttggaacatcatcatcaaccaaccaatgctaaagatcattgtgacttacaatattttgtgtattgcttcaaatctgctattacagtattcactcccaccttgtctttggtgataaagtgctaccacttgcagagatacaatcatgcacacagaatttagtaaactcagatataataataatgataattcttactgtaattttcagactagagag

SEQ ID NO: 652293 - DNA, 594 bp, Homo sapiens
taaacacaatgaaagcaggaatgcaagaatagtcatattcccagctccctgaattatttatcccataggatgctaccaaatcaawagggctgtatgactgcaacactaatgatcggacacactcttgccaaggagccaatgccatgccacaactaatcagtctgacagaactgtatatattttaggatgggtgaggcagatattctcacaccttatcagaaccagaaaggtgaggagaaactgtctcatgacagccttcttggtagatagagagttgaataaaaaaaggtcctgtcaatagttcttcacaagtctctctttttctcatgttccaggaggattataaaacattctgacaggactcagatcagctgtggtttcctacgtggcctatgtagatatgtgcacggttgttaagggtaccatggtggaatcatttccctagagagaaatagcatatataaaagaaaacaaagccaagaaacatgcatgatagaaatggaaatgcaattttggataataagagattaaaagacaagggtgaagaggaattgaaaaattaagtaatagagataaattttacagaattaaaaa

SEQ ID NO: 652294 - DNA, 594 bp, Homo sapiens
taaacacaatgaaagcaggaatgcaagaatagtcatattcccagctccctgaattatttatcccataggatgctaccaaatcaatagggctgtatgactgcaacactaatgatcggacacactcttgccaaggagccaatgccatgccacaactaatcagtctgacagaactgtatatattttaggatgggtgaggcagatattctcacaccttatcagaaccagaaaggtgaggagaaactgtctcatgacagccttcttggtagatagagasttgaataaaaaaaggtcctgtcaatagttcttcacaagtctctctttttctcatgttccaggaggattataaaacattctgacaggactcagatcagctgtggtttcctacgtggcctatgtagatatgtgcacggttgttaagggtaccatggtggaatcatttccctagagagaaatagcatatataaaagaaaacaaagccaagaaacatgcatgatagaaatggaaatgcaattttggataataagagattaaaagacaagggtgaagaggaattgaaaaattaagtaatagagataaattttacagaattaaaaa

SEQ ID NO: 652295 - DNA, 587 bp, Homo sapiens
tgtggtttctacactttataggaatttcaacttttattgctcaattggctagtctgcataggtccaaatttgacataatttgtatttctaattaatttctggatcagtgcccataatggagcaatgaaagtgacagtttggccaatttagaactgtgcaggcttgtatagttaatcattagaatcatagyttttggtttcagtttaattttgtggttgaatatatacattaagcttttcgtaattaccctgaaataagaagtgagggagagactggaaggatttttggctctcaaaagtattaagtgaaattatttacagattgtcacttttagtaaaggtattgtcacgtttattgactgtccaaaggaggatgttgaaagcagtatcatgtcatgatgcttctatagtctggatcagaagaaaaggcaataaaactcaaggatgggcaagtcaggtaagggttgtctttcataaatgttttgacatgccatcctgagttttataattttgaaattgatattctccaaaaattaagcaaatgtagctctttttattcctttatgttacataaaatttggtggtgtc

SEQ ID NO: 652296 - DNA, 587 bp, Homo sapiens
caccagaagaggacatggattttggcagattacttaatatgtctttcttggcgtgaaattagtgagtgatccccaaagaaaagacaaatcttgaagctaagagctgagattacaaggctgagccattctttgcagacagagattcctcaaatcttgaatacttgaagttgtttaaaacaatcaataattttccttatacaagtatttcaataaataaaaagatagggtatagtatatccaatctcaatatattcaaccttgagatagaattgtcacaggaaacaaagcctaaaagaaacttaatacactaaacaaattaatgaatgtttataaatattayagaagataactacgggaacatggaatactctaatataccttctaggggacttgagaagttcttgttgaggaaaagaacataagtataaaaagtttacgtggtgaaaagatagacaagagtatatttgtatgaggaaactatgctcaaagtagtagagataagagactgctgctacatcaaatgaaatttaaaaagcccaagatggctgcagcaaatgaagagggaatttcaggagatgagaatggtg

SEQ ID NO: 652297 - DNA, 531 bp, Homo sapiens
aataattcaagaatcaggcaaccacaaactagaagtggtttgggagcactgtcaagggaatacaagaggaaggtttttataaggcaaacagaaataaagcaacaaaaatatttgattggttacagttatacagttgccttatttgatctaccttgctgggaagtccctagttacaaaaattagttggtagcttctgatttgttagccttaagttttatttttctcaaaggcatatacaagaagtagcccaagttaagtgttgtttatacttgcaaattaagcaagactaaggtcacttatgaggcataacaggctttgtctccccaggcattctttaggccttgtctccattttaattttctttaacactctcagtagccataatttaaccatagcaaactacaacttcctccaaggcatgcacttttcattcttcatgctctgttcataccctccgcttttatctgaaatgyaccttcaacttatctacctggaagatccttatgtgttcttcagatccagactgtaagt

SEQ ID NO: 652298 - DNA, 553 bp, Homo sapiens
aaggtgtgaaatatcagggttagaataggcaatagaagagatactctgaccataattcatgcacattttagaatgaaatgattaggagggacaggtgatttgatccagtaacccaggttaaccttgaattttaaatctcctctgcaatgtcaaagttgtcatttagtctgaacttgaccakagttaacaggtaattcattacctccacaagggatactctatgttttccttaatttgagatgaactataataaaaagttgttccgatgtatatgagtgggtggtaagagaggagggatggagaaatatctggccaagaaaatcagtaataacatatacttttaagttatatggatgtgttaatgaaaagaagcccaaatgggtattgtagagactgagaaaagcgatgctatgatggcatcatacaggtgatgcataatttcgtgtagcagttcaacaatgtgctacgaaggggatacttaaccctgaagtgtgtgtattgtgttttttctaatgtcatagcataaattaacatttttaaaaagccactctaa

SEQ ID NO: 652299 - DNA, 553 bp, Homo sapiens
aaggtgtgaaatatcagggttagaataggcaatagaagagatactctgaccataattcatgcacattttagaatgaaatgattaggagggacaggtgatttgatccagtaacccaggttaaccttgaattttaaatctcctctgcaatgtcaaagttgtcatttagtctgaacttgaccatagttaacaggtaattcattacctccacaagggatactctatgttttccttaatttgagatgaactataataaaaagttgttccgatgtatatgagtgggtggtaagagaggagggatggagaaatatctggccaagaaaatcagtaataacatatacttttaagttatayggatgtgttaatgaaaagaagcccaaatgggtattgtagagactgagaaaagcgatgctatgatggcatcatacaggtgatgcataatttcgtgtagcagttcaacaatgtgctacgaaggggatacttaaccctgaagtgtgtgtattgtgttttttctaatgtcatagcataaattaacatttttaaaaagccactctaa

SEQ ID NO: 652300 - DNA, 553 bp, Homo sapiens
aaggtgtgaaatatcagggttagaataggcaatagaagagatactctgaccataattcatgcacattttagaatgaaatgattaggagggacaggtgatttgatccagtaacccaggttaaccttgaattttaaatctcctctgcaatgtcaaagttgtcatttagtctgaacttgaccatagttaacaggtaattcattacctccacaagggatactctatgttttccttaatttgagatgaactataataaaaagttgttccgatgtatatgagtgggtggtaagagaggagggatggagaaatatctggccaagaaaatcagtaataacatatacttttaagttatatggatgtgttaatgaaaagaagcccaaatgggtattgtagagactgagaaaagcgatgctatgatggcatcatacaggtgatgcataatttcgtgtagcagttcaacaatgtgctaygaaggggatacttaaccctgaagtgtgtgtattgtgttttttctaatgtcatagcataaattaacatttttaaaaagccactctaa

SEQ ID NO: 652301 - DNA, 452 bp, Homo sapiens
cattcttccaatattgctctcattcttcacaatgaagaattttgaagaaaagatcaaaaggtctaaccagtctgtctcaatttttttktgtgtgtgtgctttagagcgctaagtgctggggcatgtggctaattttgtgtcagcagtacataaattgtcttttgaagtgataaatatatggcaataaaaactatagagttaatgtttataaaataatgaaaagtaaattgttcctccatctgaagtaaattgacgaaatgcctttctataaaacctgtgcttgaaagtaagtgcttatggcacattccaactattgatttctgtaagttaataatttctagcagtggtatgccatccttagatggctggtaaaacatctgtcaacctgtgtcatgttttaaaaagtcagtcagtaggtcaataaaatttgtgaatgtctttggtgtgcagac

SEQ ID NO: 652302 - DNA, 488 bp, Homo sapiens
cattcttccaatattgctctcattcttcacaatgaagaattttgaagaaaagatcaaaaggtctaaccagtctgtctcaatttttttgtgtgtgtgtgctttaragcgctaagtgctggggcatgtggctaattttgtgtcagcagtacataaattgtcttttgaagtgataaatatatggcaataaaaactatagagttaatgtttataaaataatgaaaagtaaattgttcctccatctgaagtaaattgacgaaatgcctttctataaaacctgtgcttgaaagtaagtgcttatggcacattccaactattgatttctgtaagttaataatttctagcagtggtatgccatccttagatggctggtaaaacatctgtcaacctgtgtcatgttttaaaaagtcagtcagtaggtcaataaaatttgtgaatgtctttggtgtgcagaccattctagagggtacagtggggaaacataaaataaa

SEQ ID NO: 652303 - DNA, 633 bp, Homo sapiens
tccttggggactggagctatagggttggacatttaattcttgatgatayaactcaagccttgtggtaatatttcaaccctaccagacaacccaaaagtaatagaactactcaaattctgtggtacctgtctcctgagatgctcatcatcaggcaactggccacttggctattactgaatatgtccagtagagcacagcccttttagtcatatttctctcaccttgattcttaattttgggttctctctcacttgacagaaaagcttattcaaaaaatatttctaagataaatacagcagaccctcaaataatgttttgttcaatgccatttccttataatgttgatgagaaaaacatagattcctggccagggccatcatctgtgtggagtctgcatgttctctacatgtctgtgtgggttttccccaggtaccccagttgcctcccacatcccaaaaccgtgctcattaggtgaattggtgtgtctaaattgtcccagtgtgagtgagtgggtgagtgtgtgtgtgtgagtagtcctgcaataggatggcatcctgtccagggttagctcccgccttgtaccctgagctaccaggatgggctccagccacctgtaaccctgaattggaataa

SEQ ID NO: 652304 - DNA, 633 bp, Homo sapiens
tccttggggactggagctatagggttggacatttaattcttgatgatacaactcaagccttgtggtaatatttcaaccctaccagacaacccaaaagtaatagaactactcaaattctgtggtacctgtctcctgagatgctcatcatcaggcaactggccacttggctattactgaatatgtccagtagagcacagcccttttagtcatatttctctcaccttgattcttaattttgggttctctctcacttgacagaaaagcttattcaaaaaatatttctaagataaatacagcagaccctcaaataatgttttgttcaatgccatttccttataatgttgatgagaaaaacatagattcctggccagggccatcatctgtgtggagtctgcatgttctctacatgtctgtgtgggttttccccaggtaccccagttgcctcccacatcccaaaaccgtgctcattaggtgaattggtgtgtctaaattgtcccagtgtgagtgagtgggtgagtgtgtgtgtgtgagtagtcctgcaataggatggcatcctgtccagggttagctcccgccttgyaccctgagctaccaggatgggctccagccacctgtaaccctgaattggaataa

SEQ ID NO: 652305 - DNA, 607 bp, Homo sapiens
tctagggcatccatattcagcaatcaaaagggagaacaaaatacggacaattctaatccccctcaaatcagtttagtaaatattaatgtttattcatcawtttaaaaagagaacatttgcctgaactgctgattgtttaattttacagtctgaggtgcaaaaaaggagccccattcacatctctcagtgcaaggctcaggcactcatgtacacgtaagttccaactccctcccctttatgcttccagggattcctatgtactatatatacttattggagaatgtgcaagtgttagggggagagggtggaaaagaatgaggtggggatgatggggagagatggcacctcatgaggatgtattgaagaggaaagcctgctaagcagaagctttgtttggggttatgcctgaaatgtgattactcaacaaaacattctactctgtaaatgaaggcaatcaggttccacttgctctagtcaatggaaaagacttcccttcaaaactttgacccgtgggttaaaaactcttttgatttttggactctgccactctatatgaagctaccctggggcagggatcagaataagtttctgtttctggactgctggc

SEQ ID NO: 652306 - DNA, 567 bp, Homo sapiens
taaggcttttcacaactaccttagaacttaaggtccagcagcacatatcaggctaaagctaacctcagaaagtgttaacagcgtctgtaatcatttccatcacacgcttctcttggaaaactcatggttagccaaacacatcttgctctgactctggatacccttactgaacacacagcagctccctcaagtatccacatccacaaaatactttgggtccccctctccaccycgttaactgagcctctcactgatcatcttcctctcaaaatcttccattatgctttctggaggacttattctatggtcattatttacactttagtgaacgccgctttcaccttctggacttatatgcaacctggaagctctgcttcacagcagcattgctaagtggaagctgctcctccatatccatgactcttttgggaaatggttgtagaggctcctttctctccacctgggttcctatgcaggtccacactgaatgtgtgaccctaagaagagtcatttaatcttggccagactcggattcctgatttgtgaagtggaaaagattgtggtagc

SEQ ID NO: 652307 - DNA, 567 bp, Homo sapiens
taaggcttttcacaactaccttagaacttaaggtccagcagcacatatcaggctaaagctaacctcagaaagtgttaacagcgtctgtaatcatttccatcacacgcttctcttggaaaactcatggttagccaaacacatcttgctctgactctggatacccttactgaacacacagcagctccctcaagtatccacatccacaaaatactttgggtccccctctccacctcgttaactgagcctctcactgatcatcttcctctcaaaaycttccattatgctttctggaggacttattctatggtcattatttacactttagtgaacgccgctttcaccttctggacttatatgcaacctggaagctctgcttcacagcagcattgctaagtggaagctgctcctccatatccatgactcttttgggaaatggttgtagaggctcctttctctccacctgggttcctatgcaggtccacactgaatgtgtgaccctaagaagagtcatttaatcttggccagactcggattcctgatttgtgaagtggaaaagattgtggtagc

SEQ ID NO: 652308 - DNA, 567 bp, Homo sapiens
taaggcttttcacaactaccttagaacttaaggtccagcagcacatatcaggctaaagctaacctcagaaagtgttaacagcgtctgtaatcatttccatcacacgcttctcttggaaaactcatggttagccaaacacatcttgctctgactctggatacccttactgaacacacagcagctccctcaagtatccacatccacaaaatactttgggtccccctctccacctcgttaactgagcctctcactgatcatcttcctctcaaaatcttccattatgctttctggaggacttattctatggtcattatttacactttagtgaacgccgctttcaccttctggacttatatgcaacctggaagctctgcttcacagcagcattgctaagtggaagctgctcctccatatccatgactcttttgggaaatggttgtagaggctcctttctctccacctgggttcctatgcaggtccacactgaatgtgtgaccctaagaagagtyatttaatcttggccagactcggattcctgatttgtgaagtggaaaagattgtggtagc

SEQ ID NO: 652309 - DNA, 518 bp, Homo sapiens
aaggaatgagattatgtcctttgcagggacatggatggagctggaagctgctatcctcagcaaataaatgcaggaacagacaaccaacaccacatgttctcacttataagtgggagctgattgatgagaacacatggacacgtagggggaaacaacacacactggccacctgtggggtggcagggagactatmgggaagaataaaatggatgctgggcttaatacctgggtgatgggacaatctgtgcaataaatcaccatagcacacgtttacctgtgtaacaaatctgcacatcctgcacatgtaccccagaatgtaaaataaaagttgaaagaaaattacgtattcaccactgctcgttcttatattaaacagcatagtacaaatgctcaaaaagttatctaaactagttattgggaggtggctgaagtcagagcactgaagtagactggaatatgctggcagtgagtcttcttacattagactctcctagctcatagaatttaaaaaaatatgc

SEQ ID NO: 652310 - DNA, 518 bp, Homo sapiens
aaggaatgagattatgtcctttgcagggacatggatggagctggaagctgctatcctcagcaaataaatgcaggaacagacaaccaacaccacatgttctcacttataagtgggagctgattgatgagaacacatggacacgtagggggaaacaacacacactggccacctgtggggtggcagggagactatagggaagaataaaatggatgctgggcttaatacctgggtgatgggacaatctgtgcaataaatcaccatagcacacgtttacctgtgtaacaaatctgcacatcctgcacatgtaccccagaatgtaaaataaaagttgaaagaaaattacgtattcaccactgctygttcttatattaaacagcatagtacaaatgctcaaaaagttatctaaactagttattgggaggtggctgaagtcagagcactgaagtagactggaatatgctggcagtgagtcttcttacattagactctcctagctcatagaatttaaaaaaatatgc

SEQ ID NO: 652311 - DNA, 387 bp, Homo sapiens
atgctatgtatatttataaactttgctggtttgctagaatgcttgtatatcagagtttcaactaggcatcgccccctgccaccaacacagctttttctttgaaataaaatgttagatacattggtgaaaagttatcatcaatataggttgttgagacaataatagaggtcaatactgayatagaaatgaacctgtgtatgtgattttgtttttccaagagactacattcttcctagcacatcatctcagtttgttccagaatatgaaagatcatagtgaaaggcaaaacttgagggagtgtaaaaagtagtagagttttaatttaaaacaagtgaattttatttaccttggtttataatacctgaatctgaaagaaaaccataaaat

SEQ ID NO: 652312 - DNA, 602 bp, Homo sapiens
tctttctgtagattgaaaccctataatttttacgcttcagcaaagtacattgcactgtctacrtttatttatattcccttcacatcttccgtagcaagagatagctgagaacattacattctcctcccacttaagttgctgtgatttcacaggtgtttttatttttatttttgtttttgtttttatcttggggtgaatgtagtctctcctgaagctttgaagtaagacttccagacataagagagcagacaggaaagaataaataattttctccatttttggaggaaaatagaagggaggaggaagatgccatattatcaaaactatgtgactgccatatttaatttttttaaactgagaattactcagtggtccttcttctggcattaggatatttgttctctgcctactcctttacttcttactccagtggagatattcagaaaggattcaggaggcttcagttttatggccattcttgtatcaatgcaaggtaccaggttttttgttgttgttgctgtttttgttttttaacttggatgaaccactaaaagaagctacaccttgaagtaaagggaagctacccttaaaagaatgtggta

SEQ ID NO: 652313 - DNA, 610 bp, Homo sapiens
taacctcattcaaagtgcaaagagatgataactacttgtttaatgaacacacaatatatcagaaattgagaataatcccataactataccaaggaaatatttccttttattcaaaaataagttcacggtggttaaaacattcagactttaatcacttaaggagaagaaggaaaatccacataayacaaacccttcagataaactcagcatctgggtttttctgtacaaattaaatagaaacccactggttaaaaaaatcagacttataacaaatttatttataaaacatctacacttacatgtctgtctagtcagcaatgtctgttgagcactcaatctgttttactggggaaagtactaagaaacagaaaaaggaaaaaagatccttgctttctacagctctaaatccaaaaagaacacctcaaatattttttaagaatatattcttggtacaagcaatgtgcaaaccatatggtcaccatgcaaggacaggtaatttatttaacatgacgcatggtaggaacatgagaggaaaaggttaagttaggctagaaaatgagggccccaaaggatggaagttacagaagatgtggcaatcaactgaaccgaa

SEQ ID NO: 652314 - DNA, 619 bp, Homo sapiens
tggggcaaaacgagaatgtaagttagaaaaaagtctttctcccattctgatacacagctaatgggtcccaccctcagaatcaccgattttaataatctgaaaatctaccagacacctaccccattaatgaaagcatattgtcttttaaaaatcccactgcctgaaaaaccttyacgttttattaactgtttaattataatggagctaaaaatcaggactggttttaaagccatgaatctgacatatggaacacaaagaacagtaaacagattaagcaactgatcaggatgatcaacatgagctgcagaagcaaacattctctctaggtcacagtgctgtacggagaggactgttttgcatttcctctttttatatcttacaacttttaaccactttttcagtcacgatttaaagaacactttgaaaaagataatgcttctctatgaattggttattcctattatatttaatcaaaaaagggaaattataataaattaatcagttatctttctttctttattcttaacagatctgaactttaatactcttcatgcttacagaccccggctggcctctgtccctcaccattctgtgtctagaaaaagcagttgagaaccca

SEQ ID NO: 652315 - DNA, 472 bp, Homo sapiens
taaaaatcccactgcctgaaaaacctttacgttttattaactgtttaattataatggagctaaaaatcaggactggttttaaagccatgaatctgacatatggaacacaaagaacagtaaacagattaagcaactgatcaggatgatcaacatgagctgcagaagcaaacattctctctaggtcacagtgctgtacggagaggactgttttgcatttcctctttttatatcttacaacttttaaccactttttcagtcacgatttaaagaacactttgaaaaagataatgcttctctatgaattggttattcctattatatttaatcaaaaaagggaaattataataaattaatcagttayctttctttctttattcttaacagatctgaactttaatactcttcatgcttacagaccccggctggcctctgtccctcaccattctgtgtctagaaaaagcagttgagaacc

SEQ ID NO: 652316 - DNA, 414 bp, Homo sapiens
gtaaacagcttccacagtaccatccacccatcaagacctaaagtcctaaatcctgaaattgtccgctgtttctcgaggtccttcccaccgaatctcaacatctgaactgcaagtggtttgcttttactcattttacagatgagaaactgagatagactcagagaagagaaattattaaaattgcattgagttagggagctggaactgcaatctggttgactacaagttgctaatacatttgttaattcgactcacatggtgattccggattgtaaattggtgacagttttaccaaactagataatgtgtgcaaaaaaawaataataataataataatttttaaaagctttgtgaaacatcgtctcctggcacttgctgtttggcaagggtttacttgtgcagagtgatttcttc

SEQ ID NO: 652317 - DNA, 608 bp, Homo sapiens
ttccctgtctcacttgaagattcaagtagatccaaggaagctcactccacctctgatgagttgagggacttgtgccatggttcacttgaaagatgatcatggcttggacttgggtgatgcatatggagatggactcaagaaacagttttgagatttggaaatggaagatgacagagggagatgaatggagaaagactcccaggcttctggtctctacaaccttgtggataacagaagtatttactgagaaagaaggctactagggagaagtagtttgggggtgggtatagaatcaagagttcaatttttaatagatgaatcttgagcttcaggtggaaaggtcaagaaagttggatgtagaagtctagagcatagaggacagctctgggttgaagatccaagtktgggaatcatcagcatacgggatgcgattaaagctttaggactggataaaatcaccaagggacagagcatagacagagacaagaatgggcttttctcccatttcctagacctgttaaatttttatcctagtctctttcccctgccagtcttcctcatagttacccttaatcaaccaattaattaatgaataaacaatatatttt

SEQ ID NO: 652318 - DNA, 392 bp, Homo sapiens
gtatatatgaaggggagtttattaggagaattggctcacatgatcacaaggtgaagtcccacaataggccatmtgcaagctgagaagccaggaagccagtccgagtcccaaaacctcaaaagtagggaagcagactgtgcagccttcagtctgtggcctaagacccaagaggccctggcaaaccactggtataagtctaagagttcaaagctgaagaacctggagtctgatgttcaagggcaggaaacatccatcacgggagaaagacggaggccagaagactaaactagtctagtctttccctgattcctgcctgcttttattatggccgcactggcagctgattaaattatgcccaccaggattgagggtcagtctgcccttcccagttc

SEQ ID NO: 652319 - DNA, 392 bp, Homo sapiens
gtatatatgaaggggagtttattaggagaattggctcacatgatcacaaggtgaagtcccacaataggccatctgcaagctgagaagccaggaagccagtccgagtcccaaaacctcaaaagtagggaagcwgactgtgcagccttcagtctgtggcctaagacccaagaggccctggcaaaccactggtataagtctaagagttcaaagctgaagaacctggagtctgatgttcaagggcaggaaacatccatcacgggagaaagacggaggccagaagactaaactagtctagtctttccctgattcctgcctgcttttattatggccgcactggcagctgattaaattatgcccaccaggattgagggtcagtctgcccttcccagttc

SEQ ID NO: 652320 - DNA, 635 bp, Homo sapiens
gaggctgctgccaccagcggagaagataggaaaagaaggaaaagaagcatttgtgtgaggaaagcctccgtggatggtacacctgtccccttggcccttgactcattcttctgttccttaatgccatctggatcagctgtgggctctcttgcctaattatagttcataagggccaattttgtaatgacytggcacctaaattgagcctgcacctttttcacactgcagtttgggctttaatagcttgattaagtaggacagccaactcgggtaaatcaccttgcttgtaaagaggtgtttagggctatatgagggaaaaaatgcctttacaaggtggacggcttaaaggtagatccaaatgcagcatcttgactagaaatttcaagccagataggctgggtttaaaaatatggggcaggggtccaagctgcagcccatgttttgtggtatctcctcccttctcctcactctcagctgatggccttatttcactggaacaataggagcaattagaagaatgtcacctgcccccaaggagacatctttccgggtagcagtgcctatatctttatactcttgtctttcatcctgttgctatgggcagagctgtctacacttctatttaaaaccaaacc

SEQ ID NO: 652321 - DNA, 635 bp, Homo sapiens
gaggctgctgccaccagcggagaagataggaaaagaaggaaaagaagcatttgtgtgaggaaagcctccgtggatggtacacctgtccccttggcccttgactcattcttctgttccttaatgccatctggatcagctgtgggctctcttgcctaattatagttcataagggccaattttgtaatgacttggcacctaaattgagcctgcacctttttcacactgcagtttgggctttaatagcttgattaagtaggacagccaactcgggtaaatcaccttgcttgtaaagaggtgtttagggctatatgagggaaaaaatgcctttacaaggtggacggcttaaaggtagatccaaatgcagcatctygactagaaatttcaagccagataggctgggtttaaaaatatggggcaggggtccaagctgcagcccatgttttgtggtatctcctcccttctcctcactctcagctgatggccttatttcactggaacaataggagcaattagaagaatgtcacctgcccccaaggagacatctttccgggtagcagtgcctatatctttatactcttgtctttcatcctgttgctatgggcagagctgtctacacttctatttaaaaccaaacc

SEQ ID NO: 652322 - DNA, 610 bp, Homo sapiens
tcctctcaacgtccagcctcttgtgtctctgcccgctagagtcttggggtttttataggcacaagatggggacgtggtggccaggatggtcttgggaaatgcaacatttaggtgtgaaagcaggagtgcctgtcctcacataggtccatgggcccgggcctgagggtagagccctagccagggccccacctttctctacccagcatttccctgccctcctcccaaatcacttgcatgtatatttcttctattcatcatgcttgagattcattgtacttcttggatttccttcttgtcattctggaaaactctcactcatcatctctttagcactgccagtgacccatttttgctgctcttcttttggaagtacaactagctctcactgtattcacaatgttgctcaaagtccttgaattttctrgtcttcttcactatctgttatattttgaatatgtttactaccatatattttagttcctttgttgtattattagctatatttaattaccttgtaaacttatctacttaagttttaaaattattctgtatttaatgtcttccatttctattcactttttaatttcaaatccactgggtttgtgtgtat

SEQ ID NO: 652323 - DNA, 420 bp, Homo sapiens
tggtagttctattttcagtttcttgaggaaactccatactctttaccatagtggctgtactaatttacatttccactaacagtgtacaagagtttccctttctacccttcttctcccgcattcgttattgcctgttttttggataaaagctggagtgagaagatatatcttcgtggttttgatctgcatttctctgatgattagtcatgtcgagtattttttcatatacctgttggctattttatgtcttcttttgagaaatttctattcaaactttttgtccatctttaaatcatatyactatatttttcctgttcatttgtttgagcttcttatatattctggttattaatcccttgtgagatgaacagtttgtaaatattttctttcattctgtggagttttggtaatgtgtctttc

SEQ ID NO: 652324 - DNA, 533 bp, Homo sapiens
tgacttaagtgcagacttagtgtacacacactggaatactattcagcttctttgcttcaacacagataaacctggaggacataatgctaaatgaaataggccagaaacagaaagacacataatgcatgtgctcacttacatgtggaatccaaaacaatgaacctcatagaagcagaaagtagaacggtggttaccataggctaagggatggtgggaatggaaagatgttgttcaaagctacaaagttagagttagaaaggaggaataaatgataactatttaaggtgataggaatgataagtagcttgatttcattcagcactatctacctatatggtaaaatcactgtgtatcccataattatatacaattataaggtgtcaaaaagctttctccggattcagaaaacctcttcacaaaggtagaagagaaagaaaacaattttatcacagaatatgcattaaaccagaatgtggtatgcattccatgcaatccactaagagactgcaaaracaatctttatgataggaggt

SEQ ID NO: 652325 - DNA, 438 bp, Homo sapiens
gaattcttactgaagctcaaaaattagtaggccaggctcacactgccaaggaagtggagtaccagagacttcagctttcagtctggagagagagagtggctcatctccacctgaaaaaatcggaagrtaggagggtgaagagagcaattttcaataaaaatgcaaattcatagaaggcaatagtggtaccaagtctccttcctgagtttggtgggacaagggtatattttcaaatggatgtcatgttgcaatcctaaatgctgagaagagtagacattaggcattcaacagcagatgcaagcctgaagaaagacctcccaaaaagtcaaacagaagaggtaacactcagagaatggtgaagtttggaaattttgtggtgctggggtcctccaaagaacctattaaggtaccatcattaaagatcttacacttttatat

SEQ ID NO: 652326 - DNA, 442 bp, Homo sapiens
caaaaattagtaggccaggctcacactgccaaggaagtggagtaccagagacttcagctttcagtctggagagagagagtggctcatctccacctgaaaaaatcggaaggtaggagggtgaagagagcaattttcaataaaaatgcaaattcatagaaggcaatagtggtaccaagtctccttcctgagtttggtgggacaagggtatattttcaaatggatgtcatgttgcaatcctaaatgctgagaagagtagayattaggcattcaacagcagatgcaagcctgaagaaagacctcccaaaaagtcaaacagaagaggtaacactcagagaatggtgaagtttggaaattttgtggtgctggggtcctccaaagaacctattaaggtaccatcattaaagatcttacacttttatatctctcgtaaaagaaagaattc

SEQ ID NO: 652327 - DNA, 442 bp, Homo sapiens
caaaaattagtaggccaggctcacactgccaaggaagtggagtaccagagacttcagctttcagtctggagagagagagtggctcatctccacctgaaaaaatcggaaggtaggagggtgaagagagcaattttcaataaaaatgcaaattcatagaaggcaatagtggtaccaagtctccttcctgagtttggtgggacaagggtatattttcaaatggatgtcatgttgcaatcctaaatgctgagaagagtagacattaggcattcaacagcagatgcaagcctgaagaaagacctcccaaaaagtcaaacagaagaggtaacactcagagaatggtgaagtttggaaattttgtggtgctggggtcctccaaagaacctattaaggtaccatcattaaagaycttacacttttatatctctcgtaaaagaaagaattc

SEQ ID NO: 652328 - DNA, 610 bp, Homo sapiens
ttgcttcatatgtaggcattgtgtatctcttctggattatactttctatctgtgtatctatgctttgactcttagtagtttttcatgttataaaattgatttgcattgggaaaacacatttttaaaaaggagtaaagagcagaaacaagatcaataaactcaaccagaatatatctctgtgtataccatctggcatgaatctttcttaaaacatggtatttattaccactacgcatatttgtggttttatttaggtaaagttgtcttttttatatctttaatagatgtatgttttctttaactgttagtgttttcaataaggcactctgtgcatattctggatttcctttgtttgacactcayatgcagaacatatttgtttccttgtatgactttcaccagattgttctccatggcattggattcatgttcagtggtatcttttccagttcatgatgtttttaatgcatatctcatttttgtaatggttcaattgttttctttccttagctttattatcattcatcttcttttgttttctcagatgcaatagaggaaaataactaagagcacagattttggagccatacagcttgggatacaatccctt

SEQ ID NO: 652329 - DNA, 545 bp, Homo sapiens
aagtaaccaggactcccaattatgtctttttcaatctctaagtaaccatggcacaaaatttttgcatgcattatcaagaagaaagacttcataatactgcagggattttttgttttgttttgtttttttgagatggagttttctctgttccccaggctggagtgcagtggcgtgatctcagctcactacaacctctgcctccagggttcaagcaattctcttgcttcaatctccccagtagctgggattacaggagcatgccaccacrcctggctaattttcatatttttagtagagacagggtatcaccatgttggccaggctggtctcgaactcctgacctcagtgatccactcgcctcggcctcccaaagtgctgggattacaggcgtgagacaccatgcccagcccataatactgctttatatcatgcctaattccaccactagagtatgaagctctttcatcaaaaacagtatcttgcacatttatatgccttagcagagagccaggcacatatttgtcatgtaaaatatacttgtaatc

SEQ ID NO: 652330 - DNA, 596 bp, Homo sapiens
cataaaaataataatatattgggctaattaaaatatgcttcacagaatgagttacatctagataatgtgtgtatccacttaacacaattgtacacataaaatattttttaaatattgagttaatttttgtttttgaaacataaaaggattatgttttattggacattactgctaagagctaagctgaaatatgttttatagcacaatgattatagtgaccaagatactatttttaatctataattttaagaataacattttctcttttttgcacttttaaaccattgtttataaattttaaacatctattaaaatcattcttaactgaaaaatgtattcttcccttagaaataatattaataaacagttgatggaaaatttaatcaaatggaagttgaatcatttggagccaactataccttaaatctcatcttgatctataggcagaatttgaagactctcctcttagggaaatttatgaggytttcaggatattacagtttcctcagtatccttctgccttactgatttccacttcttccttatctccttaaaccttgagtgtttctatctgcactccaccaagcttggttgga

SEQ ID NO: 652331 - DNA, 315 bp, Homo sapiens
tcagaaataaaaccacagggtgctattttgtgtcagaattgaaacattttatcaaatgtctcttttaaggtttcagttatcatatggtcacctactaaattctgggcacaccatgaaagtcctcctgaaaataagttcactttcatatttagtctcaagtgctgtctgacaacagtacaaaccatggacagtgtaacagcaaaatttgatccacattttaacaccaaaatcacacagcaatttacaaacctaggaaacatyggaatttttaaaatattttgttttatcttaacaagaatattgagatgctggaaa

SEQ ID NO: 652332 - DNA, 468 bp, Homo sapiens
tgaaatttttcttgggttcaggagctatttcatgctcagaaaacccatgtcctgtattgtttttctatcttaaatctccccttttctaattaaattatggtgtctggttgatgagagttgactccaaaggttggggttctttgaggttgggaatctgagtgacacagtgaccctggcaggtggycttagcaggagagggaggcacttgtgaggtcaccttgagtccatctggttggctgaggacatgtgtttatctgcagagtcaaggcgggagaggatataggtcttgctctgcctggaagaagatcttagagcttgtccaggctgtactagttccgtagggccgccatgacaaatgaccacaaactgggcagcttaaaacaacagaaattcattctctcacagttctggaggctggaagtccaagaacaaggtgtcagcaggactgtgcaccacctgaagactctg

SEQ ID NO: 652333 - DNA, 325 bp, Homo sapiens
gggaccagcagcatcagcaccgcctaggagtgtgttagaaatgtacattcttggccagacacagtggctcatgtctgtaatcccagctactcaggaggctgaggtgggaggatcgcttgagccccacaggtcaaggttgcagtgagctatcgtgccactgcacctcagactgggaracagaacaagaccctgtttcaatcaatcaatagaagtgcaaattctcaagccccatcccagatatactgtgtagaaatctacattgaaacaagatccccaggcaatgtgtgcacactgaagtttgagaagccccaggtgattaggatgt

SEQ ID NO: 652334 - DNA, 325 bp, Homo sapiens
gggaccagcagcatcagcaccgcctaggagtgtgttagaaatgtacattcttggccagacacagtggctcatgtctgtaatcccagctactcaggaggctgaggtgggaggatcgcttgagccccacaggtcaaggttgcagtgagctatcgtgccactgcacctcagactgggagamagaacaagaccctgtttcaatcaatcaatagaagtgcaaattctcaagccccatcccagatatactgtgtagaaatctacattgaaacaagatccccaggcaatgtgtgcacactgaagtttgagaagccccaggtgattaggatgt

SEQ ID NO: 652335 - DNA, 612 bp, Homo sapiens
caagctttgttttcaatccttgcaatgtgctaaaagttttaaaatatgatgttttattttagtgcgccatccactgagtactttgattaaatatttccaaatgatttttaaccaaaatatatgtatttttaaccaaaatgtaaaaaaaaaaaaaagtttggtatcatcagaaagctgttgggctgattwacaaagtacttctgcaaaagctgaaacatttctaaaatctgtttaatgacttgcagcaaagaaaaaaacatatactatgttgccaaagttgttttttttttaaatactacttcagcttaatcatagttactctgagtaggtataaaaatatttgtaacatttaacaactgcagcttgtatttcacttggtagattatcacagctggtttgaataaaatagaaattacatgttcattacaaccaattccaaggtcattgctacttggtagttaaatttagcaaaacactgtttttatcatgaagctgtgatttggcaaaatatgtatttgtattaagaccacaaaaacaatcttatcttcaaggctgaacattttaactaaatttaaaatagtgtttacatttattttgaacgtttcatctttg

SEQ ID NO: 652336 - DNA, 612 bp, Homo sapiens
caagctttgttttcaatccttgcaatgtgctaaaagttttaaaatatgatgttttattttagtgcgccatccactgagtactttgattaaatatttccaaatgatttttaaccaaaatatatgtatttttaaccaaaatgtaaaaaaaaaaaaaagtttggtatcatcagaaagctgttgggctgatttacaaagtacttctgcaaaagctgaaacatttctaaaatctgtttaatgacttgcagcaaagraaaaaacatatactatgttgccaaagttgttttttttttaaatactacttcagcttaatcatagttactctgagtaggtataaaaatatttgtaacatttaacaactgcagcttgtatttcacttggtagattatcacagctggtttgaataaaatagaaattacatgttcattacaaccaattccaaggtcattgctacttggtagttaaatttagcaaaacactgtttttatcatgaagctgtgatttggcaaaatatgtatttgtattaagaccacaaaaacaatcttatcttcaaggctgaacattttaactaaatttaaaatagtgtttacatttattttgaacgtttcatctttg

SEQ ID NO: 652337 - DNA, 612 bp, Homo sapiens
caagctttgttttcaatccttgcaatgtgctaaaagttttaaaatatgatgttttattttagtgcgccatccactgagtactttgattaaatatttccaaatgatttttaaccaaaatatatgtatttttaaccaaaatgtaaaaaaaaaaaaaagtttggtatcatcagaaagctgttgggctgatttacaaagtacttctgcaaaagctgaaacatttctaaaatctgtttaatgacttgcagcaaagaaaaaaacatatactatgttgccaaagttgttttttttttaaatactacttcagcttaatcatagttactctgagtaggtataaaaatatttgtaacatttaacaactgcagcttgtatttcacttggtagattatcacagctggtttgaataaaatagaaattacatgttcattacaaccaattccaaggtcattgctacttggtagttaaatttagcaaaacrctgtttttatcatgaagctgtgatttggcaaaatatgtatttgtattaagaccacaaaaacaatcttatcttcaaggctgaacattttaactaaatttaaaatagtgtttacatttattttgaacgtttcatctttg

SEQ ID NO: 652338 - DNA, 523 bp, Homo sapiens
ggacaaggattgaaaaactacctgttgggtactatgttcattacttgggcaatgagatcattagaagcccaaacctcagcatcatgcaatatacccatgtaacaaacctgaacgtgcactcctgaatctaaaaataaaacgtaaaaaaagaaaggatttgtcattyttgaaaggacagaaaaaaattcatgtgtgtgtatttttttatgtatgaaaatatttatggaagtatggtcaacaaaggtttaaaattggttgtctaataaaatgtttgtgatttttaaatttccttatacttttttgttgattgaattatttttggtctttttagtaagcatgtattttaagaatcataaaaatcacttaagactactcttacattcagcaaaaaaaaaaaaaagaaacaaaatataagaacaggttaaaatatagaaaatgtatttttcaccaactgtcatttctagaacctagtttacaattgtataacagatgatacatttaattaaatctcttacatatagtc

SEQ ID NO: 652339 - DNA, 616 bp, Homo sapiens
tgtcttaaaaaaataaataaataaaaataaaaataaaaataaactctattgaaaartgggccaaagaccttaacaaacacctcaccaaagaagatatacagatgtcaaataagtatataaaaagatgttctacattttatgtcatcatggaaatgcaaattaaaacaacagtgaaatattactacatatctattagaatggtcataatctggaatactgacaataccaagtgctgatgaggatgtggggcaagaaactctcattaattgctggtgggaatgcaagatggcatagccactttggaggacagttcagtggttttttaacatgcattccagcagttttgccccttggtatttatccaaatgtgttgaaaatgtacatccacacaaaaatctgcacatagatttttatagaaactttataaatgacaaaacttggaagcaaccaagataaccttcagtgggtgaatggataagtaaactgtggtacatccagataatggaatattattcagtgccaaaaagaaatgagctatcaaactatgagaagataagaaggaaacttaaatgcatattactacatcaaagcagccaatctgcaaaagctacacatt

SEQ ID NO: 652340 - DNA, 633 bp, Homo sapiens
tatgcgggttttgcatttcattaatttgatctatgtttggttgaaaaaaatctgcagataagtggaaccaaggagttcaaacttgtgttgttcaagggtaaactgcattttgactgtctttacagaaaaagtttattgacccgtggtgtagataagaaatcattgtgacctgagtgagaatattagtcaatgtaactcttcaaggtaatgaaaagagtactgagctatgatttaaacttaactgcagagaagtctagcatattccagttatcagcagtgtagcatgataactaaattacttgacctttcagaatcttagttttctcaattsttaaatgaacatactgatactattctactcacttcacagtcttaaaagggatagcattaggagatatatctaatgctaaatgatgagttaatgggtgcagcacaccaacatggcacatgtatacatatgtaacaaacctgcacattgtgcacatgtaccctaaaacttaaagtataataataattaaaataaataaataaaagaaaataatttaaaaataataaaaggtaagtgatgataatattatattaaatatggtgatagaattgctggataatttaatcagggaatgctaaaaagat

SEQ ID NO: 652341 - DNA, 335 bp, Homo sapiens
caacgcaagtggatagcttgagcctaagagttcaaggctgcagtgagctatgatcacaccgctgcactcttgccttattgayggagagagatgctgtctctttgtaaaaaacagaaaaacataacctaccacattgcggtaaactataaatatcctaagagaaaatgcttttcttaaatctggaagccaaagcacaaaagagccagcaaaattttgaagaaaaggttattaaataattataatcacccttttcagtttatttagtcaaatctaattaagtcttattctgctgtatcttggcttggcaattttatgagctcatcagttgctttatt

SEQ ID NO: 652342 - DNA, 335 bp, Homo sapiens
caacgcaagtggatagcttgagcctaagagttcaaggctgcagtgagctatgatcacaccgctgcactcttgccttattgatggagagagatgctrtctctttgtaaaaaacagaaaaacataacctaccacattgcggtaaactataaatatcctaagagaaaatgcttttcttaaatctggaagccaaagcacaaaagagccagcaaaattttgaagaaaaggttattaaataattataatcacccttttcagtttatttagtcaaatctaattaagtcttattctgctgtatcttggcttggcaattttatgagctcatcagttgctttatt

SEQ ID NO: 652343 - DNA, 335 bp, Homo sapiens
caacgcaagtggatagcttgagcctaagagttcaaggctgcagtgagctatgatcacaccgctgcactcttgccttattgatggagagagatgctgtctctttgtaaaaaacagaaaarcataacctaccacattgcggtaaactataaatatcctaagagaaaatgcttttcttaaatctggaagccaaagcacaaaagagccagcaaaattttgaagaaaaggttattaaataattataatcacccttttcagtttatttagtcaaatctaattaagtcttattctgctgtatcttggcttggcaattttatgagctcatcagttgctttatt

SEQ ID NO: 652344 - DNA, 546 bp, Homo sapiens
tctggaaggggaccagcctctgtgtatttgttctctagcctatctcatttctgacagcagctccttcccaagctcctaaactcccgggccccacccctttccccacctgactggtcacacgttcaccccttctctccatcaccagcgtcactggttcagtttaagctcacttcatctcttacccaaactctacagccccctggatgggctccttccacagtttgcccccatagctgctcactgctgccagagggggcatctcaaagctccgccttccctgctcaaaggcctcctgcgacttccggcccagccagtagcacccatagcctaaaggttcctcagtctctgaagtgtggtttatccctccaaactcatctcctttgcctcggcaccaccctggccatctttcagactytgcaccacatgaggtcctcaacccttcatgacgccatgcctttgaataggcggcttcctccgcccagagtgccctcgattacactttgccaccccttctcccccgggccatctcctgctcattttttcttt

SEQ ID NO: 652345 - DNA, 590 bp, Homo sapiens
atcttgtccttctcaaaatgctattacatttctgacatgcagaactgaatgcaatgttggccatgtggaagtaccataattttgcagaagaataagcattggaatactattatctggatacagggatcaccaaaaagtaggtgcctaytgacagctctcctgtcttactcatcacccagaacatgcttgacacagagcagccacaccacaaaacttgtgaaatgagtgtctcttgatttcagccaccaggtgataaacatatatcaatacatacagccatacgtatacatatatgtaagaaacaacacaaagaagaccttccaaagttcaacactgtgttttttttcctctaagcaacattagtccgtctgctttgaaggagcttttccttcatacccattcctttgtctccattctaatcagtctaaaatctaactgcagcaatgcctcttaactggggctgctgtgtttgagatcttagccctccaatctgtcatgtatcatggatacgttctcctcccatcacttttcagctatttggtctttatcagtttaacattttgtgcacattcatctttctgccgctctga

SEQ ID NO: 652346 - DNA, 590 bp, Homo sapiens
atcttgtccttctcaaaatgctattacatttctgacatgcagaactgaatgcaatgttggccatgtggaagtaccataattttgcagaagaataagcattggaatactattatctggatacagggatcaccaaaaagtaggtgcctactgacagctctcctgtcttactcatcacccagaacatgcttgacacagagcagccacaccacaaaacttgtgaaatgagtgtctcttgatttcagccaccaggtgataaacatatatcaatacatacagccatacgtatacatatatgtaagaaacaacacaaagaagaccttccaaagttcaacactgtgttttttttcctctaagcaacattagtccgtctgctttgaaggagcttttccttcatacccattcctttgtctccattctaatcagtctaaaatctaactgcagcaatgcctcttaactggggctgctgtgtttgagatcttagccctccaatctgtcatgtatcayggatacgttctcctcccatcacttttcagctatttggtctttatcagtttaacattttgtgcacattcatctttctgccgctctga

SEQ ID NO: 652347 - DNA, 581 bp, Homo sapiens
tatttgtagtcggaaattcattaggggagactaagtccctaaatttagtagcagatgtccagatgattgcaacctcttccatcacttcaaatatagtaactagaattttttctgctaaggaggatttcaaaaacttttagtccaatcctttcttctacaaataaggaaactgagctctaaagaagctacataaaaataaaaatgccagatcagtcatttccccaattgaatcctgttctgagtgttcaaactaccagattcttttttctctaagtcagagggccatgaggcagcagctaaaagggtgcttccaagaagttcaaaagagttcttggagacagggctgctatgtctggtttaggaagaactaarcatctgaaaagcagggaagctgagcactgatggtttccatggagactactggggagcccaggtgcacggtctaatgaggccaccggccagccagcatgaaggagcaaaggctgtgggacattccagtaaaactcacacaccacagagctcctcagatgaaacccggatgagtggctagcctgcccatgagggcttctcttggagagaaa

SEQ ID NO: 652348 - DNA, 535 bp, Homo sapiens
tctcactctcaagaaatgtataatctagtgcaggattcagcaatctatagctcatgggccaaatgcagcctgctacctgtttatwcagtaaggttttatgggaacacagccacagccattcatttatgtattgtctatggctgctttcatgctacagtgacagaattgaatagttgtgacaggaacaatatggctcacaaaatcaaatatatttactttctggctgtttaaagaaaaagtttgctacctgtattagtctgttttcatgctgctcgtaaagacatccttgagactgggcaatttacaaaagaaagaggtttattgcacttgcagttccacgtggctggggaagccacacaatcatggtgcaaggtgaaagacatatctcacatggcagcagataagagaagagagcttgtgcagggaaagtcccatttttaatataaccatcagatctcgtgagacttattcactatcacaagaacagcacaggaaagccctccctgaatgattcaattacctcccaccgggtctt

SEQ ID NO: 652349 - DNA, 620 bp, Homo sapiens
catcaattatctgtttaattccagtgttctcccttagattatctattcaaagtgtgattatctacttgctattttggttcgtgtccatggaagaggcgagtatcagatgcatctaatcagccatcttgaagcccctctttctttatcactgtttaagtctagaccagggatcagtaaacttttccctaaagggacaaataggagatattttgggcttgtgggccagtttactgaataaggttttactggaacacaaccataatcattcatttgtgtattatctgtggtctctgttgtaaccactcaactttcccactgtaacatggcagtaaccaaaaacaataaacaacgtatagttatttaacataacataaacaataaataaataatacaacataataaataaataacataacataacataaacaataaataaataaaaggaagtggctgtgttccagtaagtaagacttaatttacaagaacaggtggcaggtctgcaggctacagtttgccaatccctggtctagacaatcaacaaaacaaaccaagacctaacttktaatgtttaccagtttctggggtgtaaatactcccaccaatgctacaaggatttcaaa

SEQ ID NO: 652350 - DNA, 427 bp, Homo sapiens
gtaggtgtggtggttaattttaggtgtcaactttattggattcaggaatacccagggaaatggtaaagcattatttatgggtgtgtctgtgaagatgtttctagaggagactggcatgtgggctacagaactgagcagtggaatatttgccctcattgagggccggcgccatccaatcggctggggacttagataaaacaaaaaagcagaggaaaggtgaactatgttttgtctctctttgaaagtggggacatccattttctcctytaggacatcagaactccagaccctcccgcttctggactccaggatttacaccaacagttccctggggttatcaggcttatagcctgggactgagagttatgtcttaagcttccctggttctgaagctttcaaacttaagattgagccccagtaccaaaat

SEQ ID NO: 652351 - DNA, 638 bp, Homo sapiens
tacctgacatttcacttcaaaaggaagaggaatttaatgacaaacttctcagcatttacagaactatatcctaagtgtgaatttttaaataaattaaaactgatataaaaaacagtatactttctttrtaagtgtatattaaacataacataggaaaccattttggtttcacaatggaatttgctttctttaaaaatatatgaagaaaaaatcaaaacaaaaatataattatgtattcaattaatatttattaagctcctgcctagagacaggcacaactagacactgacgaaaaagtatgagaaaacatatgcaaagtacctgcttcatgcttacatactataaaaggaaaatgaaaagttcaattgagttactatagcacatatatctcaatatctatatctggacagatagttataagttacactgtcatattacatttaaaaaataaaagaaagaaagaaaagaacaaatgttcaaatatcaatgttgggagtaaatggatagtagcaaaggctgactgtgatctctggtcggggatcatagagaaagttagcctttaggagaatttaaggcaactaccaactaaattaaagcttctaaagttataatttttggtaatcatatagaaaatggat

SEQ ID NO: 652352 - DNA, 612 bp, Homo sapiens
aggctctgcctttatggtagaatttggtacctgcatcctgcagatcctgtctacttccaagcttctgctgacagacgtgcataaagactggatcacctagcaagtgccagctcctatcttactgctccatgagacaagttgaaaagacagagtggaacctgtttctaacctttatgtgacagtaaccccacttccttataatgtggcccaaakaatgccgatgcctgaaaaatcaaattagctattcctcttctagtgggaagggtcagtgggggagatggagaggaagaagcagcagtcttcattcctatacctcccctttgaagcttgaggaatagaggactcctttttaaacatagaggaaatgggcaaagatgggaagaaaacatatcccttctctctcatcagtgttcagcttcagtaaatcatgattttatttgagagaagaaatggtaactggcaaaacaaaatacttgtctgggaatgttgagttatgtctaagcaaggagttgaaaaatacctaatggatcctaaactatttacaatgacctgaaaaaaaaaaaaactaatatgaaacatgggaagaacttgaccagatttgtaacgtgaaaa

SEQ ID NO: 652353 - DNA, 361 bp, Homo sapiens
aattgtaaccatgattaaacttgttaaaaaagagtttcgtgtgagaagggcgacagtaatttctttaaaatcatttttgctcaagtatcttttggaaggagcactcctgagacctgaggcccggagaagactgagagcrcggccctgtaactgggagctgcccagtctagcggagaagacaacggtgaggctcagactgacagagtgaatctttcccattgatttaattgtatgccattttacttccccttgttggtttctctgccttccctttctcaaacaaaccaaaaagcccacagtctacgaaagtgttcatttactaaattaaaaccaaataaaaagagttcattttgaaaatttt

SEQ ID NO: 652354 - DNA, 601 bp, Homo sapiens
gaagaagaaaacccagtcaggagattccaggaataatctaaatgagaaattatgagactatgaattggagtgttaacagaaaaaaaaagaaaaaaagaagaggaggaggaggaaagacgaggaagaaatagatgcaagagacattatggttgttgaatttgcagaatttcacagctagtagaatgtgaagagctagagagtccaaaatgaatccgtgattacagttcttagcaagctcaaaaaatacacaaatcagaaaaaaaatagctagtttggtgggggtgaggggaagagaatgtatctggttctggatatgttgagtttagaataccagtggggccatccaggtaaagatctgtacacacaacactgagaaatgggtaaagagcagtcataccttacaatcttggcataacaagcaagagtgtgaagygatgcttagggccatggcaaattgtctctaccaacattgagaccatcagataagggatcagattaaacatgtggaaaagaagccatgatagaaatcagagacactgagaggatggtaacagttgtgacagggacaggcagtaagatagataacaagattgtgtgtgtg

SEQ ID NO: 652355 - DNA, 598 bp, Homo sapiens
tttcattctttttattatttcttcttttgtcttctctgactgtgtattttcaaatagcccatcttcaggctcactaattgtttcttctgcttgatcaattctgctgttgagagactctgatgtactcttyggtatgtcaattatgttttttgctccagaatttctactttttaaagcttatttcaatggctttttaaacttgtctgatagaattctgaattctttctctgtgttactttgaattttgttgagcttccgcaaaacagctatactaaattctgtgtctgaaaggccacacatctctgtctctccaaggttggtcactggtgacttatttagttcatctcatgagctcatggattgtcctgatggttgtggatgtatgttgttgtcttgaaattgaagggttaaatatttatattcacagtctgggcttgttcgtacccatccttcttgggaagactttccaggtattcagagggaattaggcgttgtaatctgtctttggtcactgtagccatgtctgcattaggaggcaccccaagcccagtaatgctatggctcttgcagactcatagaagtactgccttgctgaact

SEQ ID NO: 652356 - DNA, 655 bp, Homo sapiens
gttccacaatcactttgctgtctctcctaaatgcaaagattctctctctacrccgtgtggccactcccagggaattggggagagttggtgtaggcaattaaagactgtcattcctgccctcttcagagcctctttccttaatatcatgttaaaggcaggtactgtggtcactcacctgatttttggttcttataaagttgcttttttatgtggatagttgttcaatgtggtgttcctgtgggaggtgcaacaatcgctggaggcttctattcagccatcttgctctgctttttctccctggagattttatttatttatttatttattttgagatggagtctcgctctgttgccaaggctagagtgcaatggcagaattgcactgcaacttctgcctcccaggttcagacgattctcctgcctcagcctcctgagcagctgggattacaggcacgtgccaccacacctggctaatttttgtatttttggtagaggtgggagttcaccatgttggccaggctggtctcgaactactgacttcaggtgatccaactgcctcagcctcccaaagtgctgggattacaggcatgagccaccgcccccagcctctccctggagattttaacagtacatcctgcaggggctttaggagagta

SEQ ID NO: 652357 - DNA, 655 bp, Homo sapiens
gttccacaatcactttgctgtctctcctaaatgcaaagattctctctctacgccgtgtggccactcccagggaattggggagagttggtgtaggcaattmaagactgtcattcctgccctcttcagagcctctttccttaatatcatgttaaaggcaggtactgtggtcactcacctgatttttggttcttataaagttgcttttttatgtggatagttgttcaatgtggtgttcctgtgggaggtgcaacaatcgctggaggcttctattcagccatcttgctctgctttttctccctggagattttatttatttatttatttattttgagatggagtctcgctctgttgccaaggctagagtgcaatggcagaattgcactgcaacttctgcctcccaggttcagacgattctcctgcctcagcctcctgagcagctgggattacaggcacgtgccaccacacctggctaatttttgtatttttggtagaggtgggagttcaccatgttggccaggctggtctcgaactactgacttcaggtgatccaactgcctcagcctcccaaagtgctgggattacaggcatgagccaccgcccccagcctctccctggagattttaacagtacatcctgcaggggctttaggagagta

SEQ ID NO: 652358 - DNA, 655 bp, Homo sapiens
gttccacaatcactttgctgtctctcctaaatgcaaagattctctctctacgccgtgtggccactcccagggaattggggagagttggtgtaggcaattaaagactgtcattcctgccctcttcagagcctctttccttaatatcatgttaaaggcaggtactgtggtcactcacctgatttttggttcttataaagttgcttttttatgtggatagttgttcaatgtggtgttcctgtgggaggtgcaacaatcgctggaggcttctattcagccatcttgctctgctttttctccctggagattttatttatttatttatttattttgagatggagtctcgctctgttgccaaggctagagtgcaatggcagaattgcactgcaacttctgcctcccaggttcagacgattctyctgcctcagcctcctgagcagctgggattacaggcacgtgccaccacacctggctaatttttgtatttttggtagaggtgggagttcaccatgttggccaggctggtctcgaactactgacttcaggtgatccaactgcctcagcctcccaaagtgctgggattacaggcatgagccaccgcccccagcctctccctggagattttaacagtacatcctgcaggggctttaggagagta

SEQ ID NO: 652359 - DNA, 655 bp, Homo sapiens
gttccacaatcactttgctgtctctcctaaatgcaaagattctctctctacgccgtgtggccactcccagggaattggggagagttggtgtaggcaattaaagactgtcattcctgccctcttcagagcctctttccttaatatcatgttaaaggcaggtactgtggtcactcacctgatttttggttcttataaagttgcttttttatgtggatagttgttcaatgtggtgttcctgtgggaggtgcaacaatcgctggaggcttctattcagccatcttgctctgctttttctccctggagattttatttatttatttatttattttgagatggagtctcgctctgttgccaaggctagagtgcaatggcagaattgcactgcaacttctgcctcccaggttcagacgattctcctgcctcagcctcctgagcagctgggattacaggcacgtgccaccacacctggctaatttttgtatttttggtagaggtgggagttcaccatgttggccaggctggtctcgaactactgacttcaggtgatccamctgcctcagcctcccaaagtgctgggattacaggcatgagccaccgcccccagcctctccctggagattttaacagtacatcctgcaggggctttaggagagta

SEQ ID NO: 652360 - DNA, 545 bp, Homo sapiens
gaattaaataagttgtggaatatttggtgagtcttatcaactttgttcaaatatttataccaggcactttgggaatacaaaaatgaatcagagtctgaaccatttttcaagatgtttacaatgaaaccatggagataaaatgtgtctgtaaataattgaaatgcaaattaaagtcataagaattaggaaaaagtcatagaaaaagtgcaatggcaggtaagaaactatagagattactgccacctaaagagatcaagaaaaccttcatgggataagaggtawcagattaggctttgaatgatgtaggatttgtacataaggagttgatgaacagagcttactctggtctaaaggaacagcaaaggcatgggagagagaaattctgaggcatttacagagaagagtaagtcagtctattatttctacagcaaagggtatgcaaagtgggaaataaaaatagaaaaatctgttgggtcaaatgtgaagaacctagaatgctagattagggtgtttgacttgtttgtggagaagagtttaaatgacag

SEQ ID NO: 652361 - DNA, 643 bp, Homo sapiens
aaaggagtggggggtgagaatacattggaaaggggaaaactgtagattcaagaaagagaggagataaatgatgaagccagtggataagagtggarcaagcacatgattttcctcacctgacatactcatcaccaaaaagaagcagataccaattcactccctttgtccttgcctagatcgtaagccatttcatttgaataaacactttctgatatgtttctgcctttcttagatcctagattctgactccttccctgtagctttgaaagctctcttgtgcaatagatgcttgatacttgtctccagtgataactttggtctccctcttggtccacacctcacagtaatcctttgaaatttggcaactcccatcttaactagcaaaactccctaccccatctagtctcactgtgagacctcacacctggtacaagcatttgagggcaaagattaaattttggatgtagaaaatttaattcttttccatagatggaaaaaaacacaaggcagatgaagactgagaaaaattcaagctggagataagggaggtttgtgtcctatggcttataattttcagtgaagtataaggcagagtcatctgcaaagcatgaagctggcaacggtggggtttcaggagaagaag

SEQ ID NO: 652362 - DNA, 643 bp, Homo sapiens
aaaggagtggggggtgagaatacattggaaaggggaaaactgtagattcaagaaagagaggagataaatgatgaagccagtggataagagtggagcaagcacatgattttcctcacctgacatactcatcaccaaaaagaagcagataccaattcactccctttgtccttgcctagatcstaagccatttcatttgaataaacactttctgatatgtttctgcctttcttagatcctagattctgactccttccctgtagctttgaaagctctcttgtgcaatagatgcttgatacttgtctccagtgataactttggtctccctcttggtccacacctcacagtaatcctttgaaatttggcaactcccatcttaactagcaaaactccctaccccatctagtctcactgtgagacctcacacctggtacaagcatttgagggcaaagattaaattttggatgtagaaaatttaattcttttccatagatggaaaaaaacacaaggcagatgaagactgagaaaaattcaagctggagataagggaggtttgtgtcctatggcttataattttcagtgaagtataaggcagagtcatctgcaaagcatgaagctggcaacggtggggtttcaggagaagaag

SEQ ID NO: 652363 - DNA, 505 bp, Homo sapiens
cagagtcatctgcaaagcatgaagctggcaacggtggggtttcaggagaagaagaaaggttgcgtgtaagtctaatgtatgtaatttgtattgctttttccaattgacttccattataacgttacagtacattcttactcagatcttctagattctaaatcttcaaatggagaattccaatatgattaaagagctttctgaatgctcttyatcctaagcattctaatgtgttctctatagaagaaaataataatgaaatgaataatcaacttgaacatatacaaaacattttaagatattctgtttctaaaagttctcagtgactccagtggagtttaatgtttaaatggccacagtagtaatcccactacttctagaccttagtacaaatcattaaccaaaacaaactgacaaagaaaaccatgtgagattgactttccagatgtatcagtattggattggttaggaattctgaagtcaggcaggatttgaaaacctgttgcac

SEQ ID NO: 652364 - DNA, 500 bp, Homo sapiens
agctggaaccacaggtgtgtgccacaatgcccagttaatatttttttattttttgcagaggcacagtctcgctatgttgcccaggctgatcttgaactcctggacttaagggatcctcctgctttggccttccaaagtgatagaattagaggcatgagccaccacgtccagtggcctgatattctttcactagggtgtttgcggctatttgcagctaagatttgccaatgcctccctactcacgcagttcaccactgcccccacctgtttctaggtggaattcaatattggtgtccatcaaaatctgygctaaatgttgaggtgggagcttaatccttatactcacggctcccccatttccctatcttacaattctgcaaggtcggtactttaattcccatttcacaaatgaggacgctgaagcttaggggagtgaagtaatttgcccaagttcacaaaaccagtcaaattggaagttagaactcacactcttgagctct

SEQ ID NO: 652365 - DNA, 563 bp, Homo sapiens
tttcaaatactaataatcataatctcaacaatctctttgctatattaaaaaacttacaggaatttagaatgcctcaaactggaaacaaatgtccatcaacaggaatgtagattcatacaatggaatattcaagcataaaaagtatgaactactaatacataaaacaacatggacaaatctcaaaaacatyatgttgaatgaaagaagccagactcataacagtactcattatataattccattcctacgaaagccaaatacaggtaaacaaatctatggagctagaaatgagatcatggttgcagaagtagggtaattttctagaaaattgcacaaggaaaatggtggagggtggaaatgttgcatatctttttaaggggtgatgttacacaggtatcaaaactcatcatgtgagcacttaaaatctgtgcattttattgtatgttacttatatatatgttaataaaagaatcttagcaaaatgtctcctacaggagttacaatttgctaaggactcttcctcagaccataagaatttagttagaactaataatagtattagt

SEQ ID NO: 652366 - DNA, 563 bp, Homo sapiens
tttcaaatactaataatcataatctcaacaatctctttgctatattaaaaaacttacaggaatttagaatgcctcaaactggaaacaaatgtccatcaacaggaatgtagattcatacaatggaatattcaagcataaaaagtatgaactactaatacataaaacaacatggacaaatctcaaaaacatcatgttgaatgaaagaagccagactcataasagtactcattatataattccattcctacgaaagccaaatacaggtaaacaaatctatggagctagaaatgagatcatggttgcagaagtagggtaattttctagaaaattgcacaaggaaaatggtggagggtggaaatgttgcatatctttttaaggggtgatgttacacaggtatcaaaactcatcatgtgagcacttaaaatctgtgcattttattgtatgttacttatatatatgttaataaaagaatcttagcaaaatgtctcctacaggagttacaatttgctaaggactcttcctcagaccataagaatttagttagaactaataatagtattagt

SEQ ID NO: 652367 - DNA, 518 bp, Homo sapiens
aggatactgcaggatttcagacaagagggatttaagtgtgtgtcatttcctcaaatgaccattgattgttcccatcttcgctgtgcaaagcacatacgtacagagaccctgagtgagsccaatcatcctgcctcctcccaacacctcctcccactaatactcctgcacagtcctccctggagggacttcccctttgcctgtcctcattctaaccttttccaaggccctgttaaagaaccagctgcccatgaagccttccctaatgactccagtcctcttcagtttctgcatttttaattcagatttgcttctacattctgcatagggcattctaaaaagttacttattacaccctgacacattttctaatactatgtactagacatattggcatatggttatataacaataatatagatgcaatctttttctctattgtgcttttcaataattgtatctatgtctcctttccaaaatagattacttgtattttatcatattagaccatcacttaacac

SEQ ID NO: 652368 - DNA, 518 bp, Homo sapiens
aggatactgcaggatttcagacaagagggatttaagtgtgtgtcatttcctcaaatgaccattgattgttcccatcttcgctgtgcaaagcacatacgtacagagaccctgagtgaggccaatcatcctgcctcctcccaacacctcctcccactaatactcctgcacagtcctccctggagggacttcccctttgcctgtcctcattctaaccttttccaaggccctgttaaagaaccagctgcccatgaagccttccctaatgactccagtcctcttcagtttctgcatttttaattcagatttgcttctacattctgcatagggcattctaaaaagttacttattacaccctgayacattttctaatactatgtactagacatattggcatatggttatataacaataatatagatgcaatctttttctctattgtgcttttcaataattgtatctatgtctcctttccaaaatagattacttgtattttatcatattagaccatcacttaacac

SEQ ID NO: 652369 - DNA, 623 bp, Homo sapiens
ttttttatcttttaatctgacatcttgtgctctcaatgttagtccttcttatgtacaggtcttcaacctcgtaaaaggctaatctttattactcacagcagtcattgaaaagaccacaagcattaataaaatctataaagaataaatattcacacttacttttaccaaataattctgatttttcagtctgtgagctgttactaaagtacaaaataagtagccaaatgcatttatttaagagtcttctttggaacttcctttctactcatgggtttgctaaattgctacctggggcaaaacaggaattagagcacttatttaaacaggacaaattttaataggaagagaagcaatgaatttggattattcatcatcaaaaattgtgagagccaatgtcctgaagattagctattcacatatgaatgtttcaattgaagattaagaacatacctttatatagtggattattagtgtggtctactcctcttttccttgattttgctttttttaaaataaatattttaatctactgctgaaggaaataatttctataaacccttttctccacatgtgaacagtgagtggcacttctgaacttargcaagatttaataatcccagaac

SEQ ID NO: 652370 - DNA, 303 bp, Homo sapiens
cactgagccaagactgtgccactgcactccagcctgggcaacagastgagactccatctcaaaaaaaaaatacatatatatataatatatcatatataaatatacatgatatatattatattatattgagtgtatatatatataatatatatacactcaacattggaacacataaatgtataaagcaaatattaatagatctgaagggaaagatagaagcaatacaataatagtaggggatttcaacaccctacttccagcagtggacagatcatccagacagatgataaggaaatgttagac

SEQ ID NO: 652371 - DNA, 303 bp, Homo sapiens
cactgagccaagactgtgccactgcactccagcctgggcaacagagtgagactccrtctcaaaaaaaaaatacatatatatataatatatcatatataaatatacatgatatatattatattatattgagtgtatatatatataatatatatacactcaacattggaacacataaatgtataaagcaaatattaatagatctgaagggaaagatagaagcaatacaataatagtaggggatttcaacaccctacttccagcagtggacagatcatccagacagatgataaggaaatgttagac

SEQ ID NO: 652372 - DNA, 430 bp, Homo sapiens
ttaataactgtaatttggtcatttaaacagcacttccatagattagaaaacagtagcacaatacgtgcgaggtatttattcagtgcattcacagggtctgttgtgtgttctagagccacagatccctgtaatctatttccacggtccccaattttggaaccaccccatacttcagactggaacaatgccaggctgctctggaatcctgctttgttgtatcaaggccttttgactctttcttggagaatcttagcctctgagcttgcagcacgttccctttaagaataacgtgtagcatcttattcctagaaagagcctcttccctctgatagactctactaatgctgttctacaacaaaagagtggggcttcagggcgggcsggggaagcagaaactgagacggtgaggtgggggtgcagagtggaattc

SEQ ID NO: 652373 - DNA, 536 bp, Homo sapiens
aattcagggaggtgtcagactaaaagccggatctctgggcttctaatgcaatgctcccacctttaaactaagtaagcaaagaaagcattaaaagagtgactgggcctaagcgtctccaggatttttccatcaccattattccccttgtccaccaatccacaagcacaaaaatttattccactcctggtgagattaatagagtattttayttttttatttgcgcaaatttgtggggtagatcagacatcttgttacacataatgggtagtgagtgactcagggtatttagggtgtccgtcacctgagtactatacatgtttgttaagtataatcatcctactctgctatcaaacattgaatttattccttctctcttactgtatgtttgtgccttttagcccacttctcttcataacagcatattttaaagatagaatacaccatagttgtaactcctggaaactgactctggcttcttctggtatatttttagcatgtttaagtaaaaccaaattgtaatatcactctcgacttca

SEQ ID NO: 652374 - DNA, 491 bp, Homo sapiens
cgtattaggcagaacccttttaattgcaagtaacagaaactatacaaattagcttaagcataaagggactttattggcttgtgttcctggatagagctggcctccagaactcaaagyacatcatccagtcatccttgttctctctcccccttctcctttcctctttctgcagctctcagtgaattggcttccttgcctcctcctgaagccaggcttctcctaggtatatgagttgggagcaggagaaccaaattccagataagaatcatatctagtcaaatctggatcacatgacaaccactcctatgcagaaggtagaaggaatgtgatgtggaaggtactgtctctggcaaccccacacccaagcaggatgaggaaggtaaggagtcctgccactcccagcaggccgcacaccagcagcattagtagctggttagaaatgcagaatctggagctgcatcccagacccaccaaatcagaatccagagttc

SEQ ID NO: 652375 - DNA, 592 bp, Homo sapiens
tatgctaccacaagccaaggaacttccagaggctaggagtcaggcctagaacagaaccttccttagtgcccttggaaggagccaactatgttgacacttttgtcatggacttatagcctccagaaccccctgacgccaatttgyggtacttcgttatggcagcctaacacacccaccctgagctgcactgcacagctctggaagttgaagttccccacttcactatgaaccaccaggtcatctccccggccacctgagcttgggtcacctttgatttgcacttttccctccaccatctcatctgtcttgcactaaatcctttcaactctgctcaggaaataactgtctttttcccttcctgcagacatggacagagtctgcctcatcatctctcatcaggtgacaacataattggttttctgacctcactgtacttagtccactttaatcctgcttccacactgccaccagagtcactttttgaaatcaccgatcacagattgtaatggtccttacgatttaaccccaatctatcttttggttccatcttacaatgttctctttcaacctctcctctcaccctagagtccct

SEQ ID NO: 652376 - DNA, 542 bp, Homo sapiens
tagtcccggttacttgggaggctgtggcaggagaatagcctgagcccaggagttcaaggctgcagtgggctgtgactgtgccactgcactccaccctgggcaacggagtgagacactatttctttaaaaataaattaattaattaaaagtaaaataaaatcagcaaaggtaaaagactcctagggtggagtcgaagaggaactaggaacaagtctctagttgtctctctgagcagagttgcatggacagcacttaactctcccatcagtgatgtgaggcaacacaagagaagcattgccaaccatggaagttcacctaatttttggcatctagggtgtgtctattgccagccgstcagatagctaggcagcacctgtgtgaccactacttcgctacccagtgtccagcccccagagatcacaccggtacaacatgacacaaggcctcaggagtacaaaaacactcgtctcaagcaggatgttccaagggctcagaggctgtctcccaggaacctgtcaagggccagtcctcctaaagacagg

SEQ ID NO: 652377 - DNA, 565 bp, Homo sapiens
ggaacaagtctctagttgtctctctgagcagagttgcatggacagcacttaactctcccatcagtgatgtgaggcaacacaagagaagcattgccaaccatggaagttcacctaatttttggcatctagggtgtgtctattgccagccgctcagatagctaggcagcacctgtgtgaccactacttcgctacccagtgtccagcccccagagatcacaccggtacaacatgacacaaggcctcaggagtacaaaaacactcgtctcaagcaggatgttccaagggctcagaggctgtctcccaggaacctgtcaagggccagtcctcctaaagacaggcctttctttggaatgttcagggcttgagcaatctgcacctgctgggttaacccttgactgcacaaaatccaataaagatcctggctttaattagctagaattgatttctgttgtttgcagccaaaaacctgtgcaatcaaayggctaataactatagaagcagaaagttcaggtcttcctgattctaaaatctatgtcacgaaaaattggttgttatgaaacatcat

SEQ ID NO: 652378 - DNA, 598 bp, Homo sapiens
gtccaataatgacatatttgcctgggtcacctgccagccaaccaggagcrctcattcagctggggtgtggatacagagaaattctagtgccatccaacagagggcagtagtgcacagacacataaccaccctgctcagctctctcctatcagaaaaaagggggtgggggacacaggtgcatattcttactgctctgactctgtcctgagagtggagccaaacatttttcagatgccaaaatcaatcttaaaagtcaatgatctgacaaggacaaatattaatcgctaattcctgtttccccccacttcatgacgctcagcttcatactctgcccctgagcctcccaaaccaaagttcttttatcacgtgacagagacacaagccttggatccatctgaaaacaaagctgacaagtttctcaccacctagcaacacaaaaaactctaaacacaatccaaagaatccccaagggaaacagcttcaagaatcttgaaaatcatacctatttttgtttgtaatgtgtgaaattattacaagtatgttcaccaagaggactattgatggatgactcacaatttagctaaattcaatgaaccac

SEQ ID NO: 652379 - DNA, 501 bp, Homo sapiens
agatcttgtgtttggaacctcagtgtctcaaaacaagttgcttcccaatttggggaccaggctgtgaagtgagactagtgacgtttcagctgrggaaatgtcagacctggatctacagggacccagactctgagagagacttgttctaagagatgtaaagtttcaaaggtcagaaatatatttctgccataaaagctgtttttattgctattactgttgtttaaaccataggtatatatttctgtttccctaatttgttttctttttacagtcaacaacattccttacaaagtctaaaattaataggagaaataaaaaaatatatgtcactgcccttcctcatggatttcttatgaaactgtagcttcatggtcagagtacctcagaaaagacaaaaacagaagggagtttaaggaaggcgcctaataatttgttgcacagcaatcactgagccatgcacaacccgcagagtctcagttgggatttttctttaagacatgc

SEQ ID NO: 652380 - DNA, 542 bp, Homo sapiens
taatttttaatcttggatccaagctagttggctcagtgtgtttgtaaatacttctccacatcaaatttgtagaacatctttttttttcgcccattgaggtcagcatagtctgtgacatggcatgttgttttcctgccaactcacagaagtgaagaaatccattcaacacccgagaaaagttttgtaggactttacagtgttccctgctttgatctgaaacaagaagaagctgacattagtcacgtattttactttagacagctacttccagatttgtcrgatcaaaatatcttataaatgactcaaatgttataacaaatggttcaaacctcatggcatttgtggaaaacaatttaatggggtccctgagcagctacaggataaagaaatttgagttatgaactctagcagcattttgatgtggggtttgcattctggtgtgcctctgtgtgtactaagtatttctctctttgtagaacttctggtttcttctgtggcaaggtcagaaacaaacatgcctgcattttccatagcctctgtgg

SEQ ID NO: 652381 - DNA, 605 bp, Homo sapiens
cctggaggtaaacagctagaggagaggtaactcatggtgggggtgggagagataggagtcagttcctctagttggatggcaaggtaaggaggattttcaatttcagggtgaataattgaatctgataatagaawtggagctgcttgtgtaagtgtgcatcaagataacccttgagcctgacttaccctcattgttccattcctttgagatcaaccaagagttccaactccaagagaaaaaggcaaagagagctgtctgctttattgcaatgcctcatcactctgcaatatatctgttctctctttctactcacaccaacataaacagacatcaaggattttttttttttttttttggcatgttaccatgcctttgcaaaaaatgaaatttccttgacctggaatacatcctccttcctccaccctttcatctcactagttaactcctacatattagtcagggctcaagtcaagtctctgaccagcctcaccctaacagagttgggggcctctctttagtgttccccaaatacttctccttcttagaacaatcagttaaggattgaacagttgtccatgcactctaccacagtggaatcaacagga

SEQ ID NO: 652382 - DNA, 633 bp, Homo sapiens
gtagtgttggtttttctactagagaaacttcttcagagagtttaatgaatttgtgaagggtcatatgaagagttattatcattgttttgcatttcataatcagcagatactttaaaataatattagttctgtcagtgcctcagtgacaatggaaaataaatattatcatttatttttggcagttgatgaaaatatcagaagcatarctgttaattttgagggtgtttatccagaatgaaccattaactatataaagattattactacatcatagttcaagttttttttttaccttggtaaataaattctttgtaaatatcaccacttgggatacatttgttacagcctgataaaaagttaatatactaaatataaacatgaattatctatctgaagtatgcatacatatgtgcacgtatacatacatacatatatgcgtgtatacatacatacatgtatatattatgtatatgtacagatagataattcatgtttatatttagtatattaaatacaaattttaagcctgttcataaaagcttaacccagttccactatttcaatagctccctccttgttctgtcaggtcccctggggtggcctaaacctcagacattttggcatttattatat

SEQ ID NO: 652383 - DNA, 566 bp, Homo sapiens
cagcataacacacatatgccaaattgtcactggcaccttccagcctaaggcacccgggaagacttcaggaggagctgatgtttgaagtcctaatggccatgagtatatggtctggattcaaaacctagctctacacaccaccagcagtgtgaccttatgctagttgcttagcctctgaattttcattcccttgtatgaaaatggagatattaccactggttatcttattgagctgataaaagggtgaggataaaatgagatcttacatgtaatacattttagaaaacaactggcagacagaaaggtaagtaggtaataaatggtcattcttgtttttctggttttaacattctgtgagttaacgatttccttatctttttatatttcttattgagctcactgcgaggactgaggaagtttataagaaatatggcaataggtaatggcttaggaagaaagtggaaggagtagtaccttagcccctrtaagccagctgcttctaatgggaatcagtttctattagtgtatgagcattacatcttggccggcccatttccaaaaataag

SEQ ID NO: 652384 - DNA, 495 bp, Homo sapiens
gatttgttttaacctcttaacaaatattcacataatggaagtagccatcaccagtttggttatcaagtaaatactatcagcattagatcaccgttgttcatctagcaattgtatgccttttgagaagacgtgggaagactgaagagtttgtttactccttgtattagtcagttctcacattgctgtaaagaaatacctgagaccgagtaatttataaagagaataggtttaattggctcacagtgctacaggccatacagaaagcatagtagcttctgctcctggggaggcctcaggaaatttacaatcgtggtggaaggcaaagagggagagaggcrtctcacatgatgggagcaggaggaagagagggaggtggaggaggtgccacacacttttaaacaaccagatcttccaagaactcactcactatacactaccaagggagatgctgctaaaccattcatgagaactccaccccatgatccagtcacctcc

SEQ ID NO: 652385 - DNA, 542 bp, Homo sapiens
catcactgttgtcattactctctgcaaatctcactttattttccatgatgtttagaaagttattgtgcagattagagaaagtgagggctttttttttcttgaaacataattctgttttgggagtctaagggtccactgaagactgagtgggaaatcaagtgatcatattcttttgattttgtcctagaactaccttcaagctgctatgatasaaatgaggaaaaatgaccttgtctcaaacaagtcatgtcacattatcccactcttttttaaattttctctctctctttttttttttaacttttacgttaagtataagggtatctgcgaaggtttgttacatgagtaaacctgtgttgtaggagtttgttgtgcagattatttcatcaaccagatactaagcctaataccccattagctatttttcctgatctctctcttctcccaccctccaccctctgataggccctagtgtgtcttgttcccctctatgtgtccatgaatatgccactcctgagactaaatccagatgttttcctaag

SEQ ID NO: 652386 - DNA, 542 bp, Homo sapiens
catcactgttgtcattactctctgcaaatctcactttattttccatgatgtttagaaagttattgtgcagattagagaaagtgagggctttttttttcttgaaacataattctgttttgggagtctaagggtccactgaagactgagtgggaaatcaagtgatcatattcttttgattttgtcctagaactaccttcaagctgctatgatacaaatgaggaaaaatgaccttgtctcaaacaagtcatgtcacattatcccactcttttttaaattttctctctctctttttttttttaacttttacgttaagtataagggtatctgcgaaggtttgttacatgagtaaacctgtgttgtaggagtttgttgtgcagattatttcatcaaccagrtactaagcctaataccccattagctatttttcctgatctctctcttctcccaccctccaccctctgataggccctagtgtgtcttgttcccctctatgtgtccatgaatatgccactcctgagactaaatccagatgttttcctaag

SEQ ID NO: 652387 - DNA, 595 bp, Homo sapiens
ttgacttcactaggagcttgcccagcaagagaaagaaaaaaaaaatctgtcaaataagccctagaatttactcagaactcggtcagagaagtgttctccgggaaagagtgggaaaaaagctatttctcctcttcctctgcatcccacagagatcatctgagcctggagcctgctttgatgtcagkaagaacttggcaacctgatcagtttcatggggagcagaataagacaagcaagaagcatagagaggagcccctgccaactataaaaatttctaaaacgtaaccaaaacacacacagagattcaatacacaacactcatatatacactttgcagatgagaaatgagatcaatatagtatcaataactttgcctcttgcaatgcacaaattccatcagaagatatagcagagtgcagagttagaaatgaatccattctgcttaactagaagacaaaaaaaaaattcgtcttcagatagccaaagtgaaaaaggagtaaggatgagagatattgtaaacccattaagaatgcattgcttgctttcattcctgtttaatatttcttaaaactatgcattgtatgatgttaaggtt

SEQ ID NO: 652388 - DNA, 595 bp, Homo sapiens
ttgacttcactaggagcttgcccagcaagagaaagaaaaaaaaaatctgtcaaataagccctagaatttactcagaactcggtcagagaagtgttctccgggaaagagtgggaaaaaagctatttctcctcttcctctgcatcccacagagatcatctgagcctggagcctgctttgatgtcaggaagaacttggcaacctgatcagtttcatggggagcagaataagacaagcaagaagcatagagaggagcccctgccaactataaaaatttctaaaacktaaccaaaacacacacagagattcaatacacaacactcatatatacactttgcagatgagaaatgagatcaatatagtatcaataactttgcctcttgcaatgcacaaattccatcagaagatatagcagagtgcagagttagaaatgaatccattctgcttaactagaagacaaaaaaaaaattcgtcttcagatagccaaagtgaaaaaggagtaaggatgagagatattgtaaacccattaagaatgcattgcttgctttcattcctgtttaatatttcttaaaactatgcattgtatgatgttaaggtt

SEQ ID NO: 652389 - DNA, 430 bp, Homo sapiens
tggttaaatcttactcaaaaaatgctttactactgggtsagcagtatcaacttggatgaattctccattgaaaagtcttgttcttgtcttgtttaatattttaattggatggagacatccatatctaatttacatagcagctaatacaaatgacccattattccaaaatcccccaaaagactggaattaaggcagaaaatcaattaaatgaattttagcaggaatcaaacaaattcaggtgggaggggggaaacaattccaagtatggaataaagtaggcttctgttcagcgaaactcctgtgggagtacccaaggaggctgaggggatttactctgcataagagaaaatcaacaagacccaaaatagcaacttctaagggctggttatgtttggagtaactataactccatatgacaaatggtaaacag

SEQ ID NO: 652390 - DNA, 441 bp, Homo sapiens
atggtggttaaatcttactcaaaaaatgctttactactgggtcagcagtatcaacttggatgaattctccattgaaaagtcttgttcttgtcttgtttaatattttaattggatggagacatccatatctaatttacatagcagctaatacaaatgacccattattccaaaatcccccaaaagactggaattaaggcagaaaatcaattaaatgaattttagcaggaatcaaacaaattcaggtgggrggggggaaacaattccaagtatggaataaagtaggcttctgttcagcgaaactcctgtgggagtacccaaggaggctgaggggatttactctgcataagagaaaatcaacaagacccaaaatagcaacttctaagggctggttatgtttggagtaactataactccatatgacaaatggtaaacagtgttgta

SEQ ID NO: 652391 - DNA, 431 bp, Homo sapiens
gtggttaaatcttactcaaaaaatgctttactactgggtcagcagtatcaacttggatgaattctccattgaaaagtcttgttcttgtcttgtttaatattttaattggatggagacatccatatctaatttacatagcagctaatacaaatgacccattattccaaaatcccccaaaagactggaattaaggcagaaaatcaattaaatgaattttagcaggaatcaaacaaattcaggtgggaggggggraacaattccaagtatggaataaagtaggcttctgttcagcgaaactcctgtgggagtacccaaggaggctgaggggatttactctgcataagagaaaatcaacaagacccaaaatagcaacttctaagggctggttatgtttggagtaactataactccatatgacaaatggtaaacag

SEQ ID NO: 652392 - DNA, 271 bp, Homo sapiens
ccttctgccctctcccgactcagctccctggaacatgggcattcygtgcttgcctaggccaagtgataagactaaatatattggtatcaagagcaccacaaagaaataacagtgtgtcccactgttgtattcaagatccatccaaatgcacaaaacttccaatcagccttaaacaaacagaaaaataagcaagactcaaaatagcattctctctctccaaatcggagtgtcagatgctatataagacagaaaacaaaattctgaggaaaaa

SEQ ID NO: 652393 - DNA, 460 bp, Homo sapiens
cctgaaacaagaagatctatcagtctgttaaataacagacccccgggtctcctctcccactcaggcaaaaaactggaggttctttagaaagggcaaaatggaaagtctctgggcttggggacacagggcacaactgagggcagggacactgaaaacaagcagagaaagcagaaagccacagatctttccttctgccctctcccgactcagctccctggaacatgggcattccgtgcttgcctaggccaagtgataagactaaatatattggtatcaagagcaccacaaagaaataacagtgtgtcccactgttgtattcaagatccatccaaatgcacaaaacttccaatcagccttaaayaaacagaaaaataagcaagactcaaaatagcattctctctctccaaatcggagtgtcagatgctatataagacagaaaacaaaattctgaggaaaaagg

SEQ ID NO: 652394 - DNA, 568 bp, Homo sapiens
gattaaattatcaaacagctatccagcaaacaagcggcatttttgaagatcaaaatgaaagcattaactccactaggccacaacatctcaggacattactgaaagcatgaaaacactcaaagcaaggaagcattccctaagagaagacatttcgtgccagcaattacctcataacacttttaatgaaaggccagtgaagtttctttacaaattatttactagatgttttacagmatatagtcaacaactagattgaaacacttttgaacccagtgttagaggagaacagagttagaaaacgaacagagtcaaacgtttcttcaatggaatttctactacaagttctcattctctagcaatgctgttcctggcattttgtagtttcacatgaacaaaatcaaaggttccttttataaaaccatagcctgtgagcgctgaaagggacctaagagctcatctaagccaatctctttttaggaaggaggacagcgaagcccccagcgggtgtccctcagctaggcagtgagtggcagagcagagcttcactatacatctgcttttcaaaatg

SEQ ID NO: 652395 - DNA, 615 bp, Homo sapiens
gatgacatataacatatattttgtaacataaatgggcacttgtttcagagttactgggtgccattataggaaactgcaggtagttacgttcctaaatatgacagaacagataaactgttcatatracttgtgcttaactttccattattcacattttaggcacagacatgagtcaaaacagaaatatgttacttagacaaaaacacatgaacatgcaggcatggagtgattacctattcttttttggtctgagatgtctagctctggttcaacaaatggtttgagttcatcttcttcatgccctgcattgatccacctgtccttcatgatttgctaaaaaaggtaaactgttcattagcagagtaaaatgaaatattctgataaccgtaatatttacaaaaatttattttcaacatttcattgactatcgttcaaagcataaactcaaaaaatattttttaatgtttcaattcttgcttaaaaagccgcaggatatatccagtatggcatacaaatcaagcaaagatctaaggtcactctaaagactctccaaagttactgcttgtttccacctacatgattacctctagagtgccgcgtttaattggatttagc

SEQ ID NO: 652396 - DNA, 519 bp, Homo sapiens
tagaaaaactcataatatttatgtttgtcatttgaagaatttaaggggttattaatattcagaaacatgtactaatttcctttgaagggagataacttactggctgtaaaataaatattggccttggaactggacaaactgagcttaaatcctggctccttcacttatttgctatgtgactttagataaatgatttaatcttgattttttaaatctgaaaaatagggttaatgatacctgatgctttagtagtacaatgaggtattccacaaagatagtggaaaacagggaaattaggttgcatgtaactactatcttaggagctttaacaaaataataaaatacctgggttctcaacccccagaattctgatataattagacttgaatgaggttgaggcacagtatttttgtcaaaatccagacagacatggtccctatctctcatgaattgcacaatacagtakaagttactgacgttataggtgaagaactaaattgaatatgagttttagagcca

SEQ ID NO: 652397 - DNA, 503 bp, Homo sapiens
agataaaacattaattgttacctataggaagtccttggccgactatattttcmtaagtcctaaagaggcggatcatccgaggctaggagttcgagactagcttggctaacagagtgaaaccccatctctactaaaaaaagaaaaaaaaaatacaaaaattagccaggtgtggtggcatgcacctgtaatcccagctactcgggaggctgaggcggaagaatcgcttgaacctgggaggtggaggttgcagtgagctgagattgcgccattgcactccagcctggatgacaagagtgaaactccatcacaaaaaaaaaaaaaaaaaaaaaaggaagaaacgctctattaaaacaataccttttggcccacatcataaaaacaaagtagagatatccaagatggagatggtagtaacagacaaagtatccctgcatagaaatctaactcatacaaatccgtggcttgaccagtattattggttgctggtttttaacaattctcac

SEQ ID NO: 652398 - DNA, 542 bp, Homo sapiens
aattgttacctataggaagtccttggccgactatattttcataagtcctaaagaggcggatcatccgaggctaggagttcgagactagcttggctaacagagtgaaaccccatctctactaaaaaaagaaaaaaaaaatacaaaaattagccaggygtggtggcatgcacctgtaatcccagctactcgggaggctgaggcggaagaatcgcttgaacctgggaggtggaggttgcagtgagctgagattgcgccattgcactccagcctggatgacaagagtgaaactccatcacaaaaaaaaaaaaaaaaaaaaaaggaagaaacgctctattaaaacaataccttttggcccacatcataaaaacaaagtagagatatccaagatggagatggtagtaacagacaaagtatccctgcatagaaatctaactcatacaaatccgtggcttgaccagtattattggttgctggtttttaacaattctcacagcccggatcttcaaaatatgggtcctctatttttctttcttattccagat

SEQ ID NO: 652399 - DNA, 534 bp, Homo sapiens
agatcttcaggtagattagataaaacattaattgttacctataggaagtccttggccgactatattttcataagtcctaaagaggcggatcatccgaggctaggagttcgagactagcttggctaacagagtgaaaccccatctctactaaaaaaagaaaaaaaaaatacaaaaattagccaggtgtggtggcatgcacctgtaatcccagctactcggraggctgaggcggaagaatcgcttgaacctgggaggtggaggttgcagtgagctgagattgcgccattgcactccagcctggatgacaagagtgaaactccatcacaaaaaaaaaaaaaaaaaaaaaaggaagaaacgctctattaaaacaataccttttggcccacatcataaaaacaaagtagagatatccaagatggagatggtagtaacagacaaagtatccctgcatagaaatctaactcatacaaatccgtggcttgaccagtattattggttgctggtttttaacaattctcacagcccggatcttca

SEQ ID NO: 652400 - DNA, 503 bp, Homo sapiens
agataaaacattaattgttacctataggaagtccttggccgactatattttcataagtcctaaagaggcggatcatccgaggctaggagttcgagactagcttggctaacagagtgaaaccccatctctactaaaaaaagaaaaaaaaaatacaaaaattagccaggtgtggtggcatgcacctgtaatcccagctactcgggaggctgargcggaagaatcgcttgaacctgggaggtggaggttgcagtgagctgagattgcgccattgcactccagcctggatgacaagagtgaaactccatcacaaaaaaaaaaaaaaaaaaaaaaggaagaaacgctctattaaaacaataccttttggcccacatcataaaaacaaagtagagatatccaagatggagatggtagtaacagacaaagtatccctgcatagaaatctaactcatacaaatccgtggcttgaccagtattattggttgctggtttttaacaattctcac

SEQ ID NO: 652401 - DNA, 542 bp, Homo sapiens
aattgttacctataggaagtccttggccgactatattttcataagtcctaaagaggcggatcatccgaggctaggagttcgagactagcttggctaacagagtgaaaccccatctctactaaaaaaagaaaaaaaaaatacaaaaattagccaggtgtggtggcatgcacctgtaatcccagctactcgggaggctgaggcggaagaatcgcttgaacctgggaggtggaggttgcagtgagctgagattgcgccattgcactccagcctggrtgacaagagtgaaactccatcacaaaaaaaaaaaaaaaaaaaaaaggaagaaacgctctattaaaacaataccttttggcccacatcataaaaacaaagtagagatatccaagatggagatggtagtaacagacaaagtatccctgcatagaaatctaactcatacaaatccgtggcttgaccagtattattggttgctggtttttaacaattctcacagcccggatcttcaaaatatgggtcctctatttttctttcttattccagat

SEQ ID NO: 652402 - DNA, 559 bp, Homo sapiens
aatgccatcatcatggcctcttgagccattcacagatggttcaagagtgttaatcacaaacccttggacaaagactctggaaagcaccttattcttgggcaataccccacaggcattcatacaacagtcttaaaaattcatccgccaggtcagtggctcacacctgtaatccctgtactttgggaggccaaggcaggtggatcacctgaggtcaggagtttgagaccagcctggccaacatgatgaaaccccatttcaactaaaaatacagaaaactagctgggcatgttggtgagtgcctgtaaccccagctactcgggaggctgaggcggaagaatcccttgaatctgggaggcagaggttgcagtgagtcaaaggttkcagtgagccaaatgttgcagtgagccgagatcactccactgcactccacctgggcaacaagagtgaaactccgtctcaattaaaaaaaaaaatcatcaatggcaatataattgttgcaaggtcttgtgattcatgttgatgaatatctaataggtgtttcatgcatatttgtggaatg

SEQ ID NO: 652403 - DNA, 573 bp, Homo sapiens
tttactacatttctaaaaggatacagtttgtgcagtcggtaactgtcacattctgtatagacactggtgaaatatattcrcaaagcaaatcagctattcctctcctttgcccagagatggaaaatcattcgatctcataaaaccttcttatttgattttatatttttatagctaaaaatatgaagccaaatagtgacttgggtggtaattgttgcttttaaaatgtcctttctctaattttaatgtcagcatagcaaatggagaaccactattgtttgttgcttgatcataatcactttcctgaactaggaaaaccacagagaatgtgtgtgtgtgtgagtctgtgtgtgtgtgtgtgtgtttgggtgggtgggtgagtcggtctgtacaaaataaaaatacagcatttaatttacacgaggtttgggctataaatggtgaagaggcaaaaatttttgttattttttctaaattaatgtcactgaagaactgtgattattaatactttaagtggatggtgctttccaattataattaataataaaacctacctggattttaaaaataattgtt

SEQ ID NO: 652404 - DNA, 597 bp, Homo sapiens
atctgtcaccttatgctgtctcaatgtaagtctctttcctttccttttattgtattgtacttttctgcatattttgttgtgtacttgtcacatatgttaaattacctcatctcttttgctttcattatttccaggatgatctcagctgcataagatatgtctgggaccatccggcttatcagtctctctctctcactcttttgtttgtttgtttgtttgtttgttttttcatctttacatttactttctttcaaatcgaacatgttttttctttggaaaaaatctgaaggtgtcatatrcaagtacataacaaacagcttcacctcagtcccttatcattttaatttatttttcatattcctatggtgatggctctagacctgacatataacacattcgtatgtgttcccaacttatctaacaaaccatctccttgcaagtttttcttgacctaaatggtataaaatagccttagctatgttctttgtcatgataccagaatacgatccactaaatagcttagtggccgaggactgcatgggccacatcctgccccttgtcagactagcatcttttcctggaaaaccagttttatca

SEQ ID NO: 652405 - DNA, 582 bp, Homo sapiens
ccttacaggctggcttcactatcctctccttattttatcctcctctatatcccactttatattttagccatattagactgccccctgttcctagacatgtatgagctgggggtttcaagtacagatggactcagactgtttggtgtcaaatttccatctttgttagctctgttatcttggataaactacctgacctctctgtggcttgggtatttcatttctatactggagatgttggttcctaccttctacagttatgataatgatttaagagagttaatacataggaaacttttagcacttaataaatgctcagtaagttttaggtattgttaatttcccgccaaatattttactcatgaagttccatcagttgagcataacttttttgttttgttttttkgcctggtgcacttctacctctttaatattcaacttaagtgttacatttgggaaatgttttccatttcccccatcagaattaattactccttttgtttatgtaagtactcatagcctaatttggttatacctcttttatggatttgccatatctcccactggattttcagcaacttcagg

SEQ ID NO: 652406 - DNA, 524 bp, Homo sapiens
attaattcccagtagaacttttctatgtgtgctctargctatttttttccactttctgttacaaatttagtttgccactacacccaatttttttcttttcctgctgtgggcactatttcaatacctaaaaactctcaatttaagtagaggtttgtagtttctcccaaaactaagagccagcatatgacagcaagaggagatatttcaacagtagctgatcacaaaatcttgaagtgttcttgtgcacataggttaagaaaatgcatccatgtagggtggttagattcgaaagcctagaaggtataagtttagagaaactgtgagtactaaaaaatttaaaagaaattggaacctcaaggtttgagtgtaaagccaatattttttttttttttttttttttttttttgcggaaggcaggggaaggtggcaggggtttgggaatgctttttattttcagcctcagatgctctcataagaaagtaaacccaagactaggtgagaattgtgtggtttcattttgtcaa

SEQ ID NO: 652407 - DNA, 524 bp, Homo sapiens
attaattcccagtagaacttttctatgtgtgctctaggctatttttttccactttctgttacaaatttagtttgccactacacccaatttttttcttttcctgctgtgggcactatttcaatacctaaaaactctcaatttaagtagaggtttgtagtttctcccaaaactaagagccagcatatgacagcaagaggagatatttcaacagtagctgatcacaaaatcttgaagtgttcttgtgcacataggttaagaaaatgcatccatgtagggtggttagattcgaaagcctagaaggtataagtttagagaaactgtgagtactaaaaaatttaaaagaaattggaacctcaaggtttgagtgtaaagccaatattttttttttttttttttttttttttttgcggaargcaggggaaggtggcaggggtttgggaatgctttttattttcagcctcagatgctctcataagaaagtaaacccaagactaggtgagaattgtgtggtttcattttgtcaa

SEQ ID NO: 652408 - DNA, 524 bp, Homo sapiens
attaattcccagtagaacttttctatgtgtgctctaggctatttttttccactttctgttacaaatttagtttgccactacacccaatttttttcttttcctgctgtgggcactatttcaatacctaaaaactctcaatttaagtagaggtttgtagtttctcccaaaactaagagccagcatatgacagcaagaggagatatttcaacagtagctgatcacaaaatcttgaagtgttcttgtgcacataggttaagaaaatgcatccatgtagggtggttagattcgaaagcctagaaggtataagtttagagaaactgtgagtactaaaaaatttaaaagaaattggaacctcaaggtttgagtgtaaagccaatattttttttttttttttttttttttttttgcggaaggcaggggaargtggcaggggtttgggaatgctttttattttcagcctcagatgctctcataagaaagtaaacccaagactaggtgagaattgtgtggtttcattttgtcaa

SEQ ID NO: 652409 - DNA, 583 bp, Homo sapiens
tttctattctttggtactgtggatgattaagaagttaaaaggtgtttttaaataaaaaattagttaaatttaattcaacaaatgtcttttaaatgcctaatataggccacatcctttgctaggtaccagggattttacagtagaaaaaatagtcaaaatctctgccttcaggaagattacctgaagtttatggatacttatttaagtagtaattgaaacatatataattagactgtatgttacaaaacactctgacatcagaaattgtatctattatagataatcttggggttattctacttacttagtcttgtaaatatcctaattttaccttgaataaaattaaatcaatagaaaatcatacatagggacaatgttagtgatgcccctgattctcttgtttgtgcttcagtataatagccttggccattatcaacaattgatcctgagacaaccgaatgagactcacttttgtakttcctataaaactagcgttagtaataaacctatgttgttaacgctgccttctgtttataattccatataataaaattatttccaacaatttttttaaatacaaggt

SEQ ID NO: 652410 - DNA, 612 bp, Homo sapiens
atgttttttttatactgatgtatcattaagttgataagtgctgaaagacttgatactttcaaaccatgtgtgatccatacattggtatgtaggcaatagagagctcactttagcacttgattagcatgtgctatggcttgaatgtgttccccaaagttcakgtgttggaaacttaatccccaatgtgacagtgttgacaggtggaatctttaagaggtgattagaatggattaatgttattatcacagaggtaggtttattgagaaaatgggattgttataaaagctagttcatcccccctctttctcttgtgctctcttgtccttccaccttccaccatgggaggacatagcaagaagaccctcaccagatgccaccccttgatcttgtacgtctcagccatcagaactgtaagaaataagccactgttccttataaattacccagtgtatagtatcatgttacaaaacacaaaatagacttagcaggcttgtggcctcagcacagctcacactcagagaaaaaggtaagaggaaagacagctgccaaacattttatatctgtttttcctattatcttttcataagcccatattacaaccaaatttttaca

SEQ ID NO: 652411 - DNA, 432 bp, Homo sapiens
tcattaatttcacacatcttttactggttttgtttctttgcttctcaaatttccctaggccaatggatatcaactataggcccgttgggggaaattttgcaaaaaagaagctatccttcctctggggttcctcagaaaataggatattcttgctaagcagcaggtagccatcatgtcaccaggaggaaagagcctctggaaatgaagtcagtaaacaagagggcctagtgttagaaaaaataagtctgaytctatatcagattgcttgaacccctggatctagctgtatctgtagctacaacttgtacttttcacttacatgagccagtatgttaccttgtttggcttaagtaagttgatttatcatttgtaaataagtgttgagactgattctttaccatcttgtctctaaaaaagttacatcttcaccac

SEQ ID NO: 652412 - DNA, 578 bp, Homo sapiens
gggcagagtgctaaagaggaagagctatgcagagaagagctcaggaaatctacacagggttccccttgagactatgactgaaaattaagctgcacatacatagagtaaattccataagaacaaacaaagtaccatgaatgttaatctaaataattcccagtactcatataagactgtgagacattttgacaaggtaaaggagagagacctcattgaatatctagagcactgcacagagactccagaagggttacatcctagtagtaaggctgaactagctccagagtagtggttcttgatccttttcccatctgcccagagaatactcaccagtggcacttgcggctgcagcgtttaccctgagataactttgccatgtaatatctcattttaattattactttcacattgctctagtatatcaactttggaaacaaaatacatcattctatttgtaccattctgtttttggtagtgatatatccatttacaaaatgtagtaattctcaatcaccaaaaatgtcaaatcctagaaaacatascattcctacacatgatgttaacacagttctcaaaca

SEQ ID NO: 652413 - DNA, 527 bp, Homo sapiens
caagaattggggtttgggaacctccacttagatttcagaggatgtatggaaacacttggatgtccaggcagaagtctaatgtagaggtggagccctcataaagaacctctgctagggcagtgcagaagggaaatgtcgggttggagccccctcagagagtccctactggggcactgcctggtggagctgtgagaagagggccactgtcctccagacctgagaaaggcagatccactgacagcttgcaccgtgcacctggaaaagccacagacactcaacaccagcctgtgaaaacacctgggagggaggctgtaccctgtaaagccacaggggtggagctgcccaaggccatggaagcccacctcttgcatcagtgtgacctagacatgagacayggagtcaaaggagatcatttcggaactttaagatttgactgtcttactggattttggacttgcatggggcctgtagcccctttattttagccaatttctcccatctggaatgggtgtatttacccaatgcct

SEQ ID NO: 652414 - DNA, 615 bp, Homo sapiens
cacattaaccaaagtgctctgccactgctcacaaatattgaagttcagcttgcaagcacagtcatttgcattgatgaagccccagttctaagcaatatcagattaagttcacattcagatgaacacagggcactgagaattacacagccagctacttatgaacgactgcgtgtgcttttccattgcagtttttcttccagctctcatggaaacaagcactgccacagccccttgatgagccagcagagtccagtcatctggcaacaatgacaggtatctggcatctgagaggaatatcaactraagacaatgagagaattaaaaaagaagtaaacacaagacaatcttttttcacccccttagattctgcatttccacttgcttgattcagtaattgttttgttttgaatgttgtgtaaatgaatgctacagccctatgcaatttttaaaccactttgctgtgtgtctcatatggagctcaacaatgttactgctggcatgagtgcaccataaagcatatgactccctgatgtaacattttaaataaggatacatttctcatccaatgtgacattatgcaggaaaatttcacttcgtcacctgtttctcatgaga

SEQ ID NO: 652415 - DNA, 444 bp, Homo sapiens
caggttcagtgaaggatggacagccatgtagcaatgtaattggacaaaaagggtatgagttgatagtaataggctgagggaggaacccagcacggcctgtctgtttagatttttcttggmctctctgtataggaattctccctcccagctatacagcaagaccccctctggaatcagtcttatgacctactatcagacaaggtaggtcaggtaatttctttatggccagctcctacacagaatggcagagggaagactagagtaatatttctagattttatgggtgatttggggagaggggagcaagagactggaagacaggagaaggtcagagagaccttggttctggaggctacttcacggaaagttaagcctgttggggagaaatgtcttactccaagtgcaaagcttccctcatgaccactgttgatggggtggaagagt

SEQ ID NO: 652416 - DNA, 444 bp, Homo sapiens
caggttcagtgaaggatggacagccatgtagcaatgtaattggacaaaaagggtatgagttgatagtaataggctgagggaggaacccagcacggcctgtctgtttagatttttcttggactctctgtataggaattctccctcccagctatacagcaagaccccctctggaatcagtcttatgacctactatcagacaaggtaggtcaggtaatttctttatggccagctcctacacagaatggcagagggaagactagagtaatatttctagrttttatgggtgatttggggagaggggagcaagagactggaagacaggagaaggtcagagagaccttggttctggaggctacttcacggaaagttaagcctgttggggagaaatgtcttactccaagtgcaaagcttccctcatgaccactgttgatggggtggaagagt

SEQ ID NO: 652417 - DNA, 454 bp, Homo sapiens
gatggacagccatgtagcaatgtaattggacaaaaagggtatgagttgatagtaataggctgagggaggaacccagcacggcctgtctgtttagatttttcttggactctctgtataggaattctccctcccagctatacagcaagaccccctctggaatcagtcttatgacctactatcagacaaggtaggtcaggtaatttctttatggccagctcctacacagaatggcagagggaagactagagtaatatttctagattttatgggtgatttgkggagaggggagcaagagactggaagacaggagaaggtcagagagaccttggttctggaggctacttcacggaaagttaagcctgttggggagaaatgtcttactccaagtgcaaagcttccctcatgaccactgttgatggggtggaagagtctggggaattcattgaagagatat

SEQ ID NO: 652418 - DNA, 444 bp, Homo sapiens
caggttcagtgaaggatggacagccatgtagcaatgtaattggacaaaaagggtatgagttgatagtaataggctgagggaggaacccagcacggcctgtctgtttagatttttcttggactctctgtataggaattctccctcccagctatacagcaagaccccctctggaatcagtcttatgacctactatcagacaaggtaggtcaggtaatttctttatggccagctcctacacagaatggcagagggaagactagagtaatatttctagattttatgggtgatttggggagaggggagcaagagactggaagrcaggagaaggtcagagagaccttggttctggaggctacttcacggaaagttaagcctgttggggagaaatgtcttactccaagtgcaaagcttccctcatgaccactgttgatggggtggaagagt

SEQ ID NO: 652419 - DNA, 535 bp, Homo sapiens
ggacaaaaagggtatgagttgatagtaataggctgagggaggaacccagcacggcctgtctgtttagatttttcttggactctctgtataggaattctccctcccagctatacagcaagaccccctctggaatcagtcttatgacctactatcagacaaggtaggtcaggtaatttctttatggccagctcctacacagaatggcagagggaagactagagtaatatttctagattttatgggtgatttggggagaggggagcaagagactggaagacaggagaaggtcagagagaccttggttctggaggctacttcacggaaagttaagcctgttggggagaaatgtcttactccaagtgcaaagcttccctcatgaccactgttgatggggtggaagagtctgrggaattcattgaagagatatccacattactggatctagagaaagaaaatcttgtcctggaggtgaacaggaagagggtccacatctgtgtcacgttttcatctcagtggagggaataaggagaaggag

SEQ ID NO: 652420 - DNA, 610 bp, Homo sapiens
aatttacaaataaaacttgtatatatttaagttttacaacttcatgttttgatatacaaaagcactgtgagataatcatcacaatcaagctaattgacatatctgtcatctcacatagttaccattttcttttctttttcttttttttcgtggtgagaacacttgtggtctatccttttagtaaatttcaaatgtgcaatacaaaattgctaactctattcatcttgctaaacactgcatctcctgacccatctcagttttgaattgtactaatagaatacacatagtactaatataattctcaaagcaaaaatatattttctttttttttctttttctttytttttttttttttttatgagactgagtctctctttatcacccaggctggagtccaagggcgcgatctcggctcactgcaacctccacctcccgagttcaagcaattctcgtgcctcagcctctcgagtagctgggattacaggcacccaccaccatgcccggctaatttttgtattattagtagggaagggtttcaatatgttggccaggctggtctcaaactcttgacctcaagtgaacacctacctcggcctctgaaagtgctgag

SEQ ID NO: 652421 - DNA, 618 bp, Homo sapiens
tggtcaaaaacagacaaaaccctgatttctagttctaatgccttcactctggggagtaaggaaaggaaacaagcatactctattattgcaaacaccacagaggggatagtgcagtaacggatactacactaacactttgatgcttaagactgattgtccttatcaagatttctttttccttttgcaatattttatgctacatgtttcsttatttcgtgcacacacacacaaattaccacattaaatttcccctacaaaccaatgtatgtgttgttgtattttacagattatgaaacagaggcatagagagaatgaataaccgtccagttctttttttttttttttttttttttttttttgagacggagtcttgctctgtatcccaggctggagggcagtggtgtgatatcggctcactgcagcctctgactcccgggttcaagcaatcctcctacttcagcctcctgaatagctgggattacaggtgcacaccacaatgcctggctaatttttgtgtttttggtagagatgggtttttgccatgttggccaggctggcctcaaactcctcacctaaagtgatccctccgcctctgcctcccaaagtgctgggattaca

SEQ ID NO: 652422 - DNA, 527 bp, Homo sapiens
agggcatctcaaaaaacaaaaacaaataaacaaacaaaaaatacagcaggctgtcatctgtgaggactgaattctgacctttttttctctcttgcccaaattcctgtctaagggggttggagcatcacactctgaaaaccataaaatattattaggtgggttttatttaactctgtacaattcatgtcttatacccagtcagttckgccaataccccaaaatctgagtggaactaaagcacgtcaccactgtgaaaataagtaatttaatgtggcttaccttccaacccaactctgccataacatcaaatgacaaataaatcaaaatattttatcccaaaatattttttgccttattttgaaaaatggccctgcaaagccatcttctgtggggaagagttgcatccgtaaggaatctctattaacataaccagatctttccccttctaggccctcccaatcctgaaggattaactaagagtctagcaccttttaaaggtctgaatagggaacgtttgccatctattg

SEQ ID NO: 652423 - DNA, 527 bp, Homo sapiens
agggcatctcaaaaaacaaaaacaaataaacaaacaaaaaatacagcaggctgtcatctgtgaggactgaattctgacctttttttctctcttgcccaaattcctgtctaagggggttggagcatcacactctgaaaaccataaaatattattaggtgggttttatttaactctgtacaattcatgtcttatacccagtcagttctgccaataccccaaaatctgagtggaactaaagcacgtcaccactgtgaaaataagtaatttaatgtggcttaccttccaacccaactctgccataacatcaaatgacaaataaatcaaaatattttatcccaaaatattttttgccttattttgaaaaatggccctgcaaagccatcttctgtggggaagagttgcatccgtaaggaatckctattaacataaccagatctttccccttctaggccctcccaatcctgaaggattaactaagagtctagcaccttttaaaggtctgaatagggaacgtttgccatctattg

SEQ ID NO: 652424 - DNA, 424 bp, Homo sapiens
agatacagcagtgaaactccaaggagccaacctttgggttcatgtttcacaactgaagaagagattcaaaattccacacagttggaaggccacttcgattttgtctgcaccattgccagtgcttcttgtgatacttaggtcaaggacacaggcaaggttaaaaaaaaaaaagactatattgcttcawaaaaaaacctattaatatttggatctctaaggtcctcatggcttatgggatttgttttcttggcctaggttaagcaattggagttcctggttctaaagcatctcagagggactatcaattgtttcttatttttctgatagtggtcatgatgctagtctgttccgttttatccagagttttaaatgcttctagcagccactctgtcatcagatgattgccataatgatacaatagaaa

SEQ ID NO: 652425 - DNA, 562 bp, Homo sapiens
gagagagaaccagagcccgccccccggaggggaatgtaatcactggcaaaaccccaaattgttaataaagtttcggtgccgcaaaagaaatagcactcgaatgtaaaattttttttttaattctcagcaaggcaatgtactttctacagaagggtgcacccttacagatggagcaatagtgagtgcacatttggacaagggaggggaaggggttcttgtcccagacacacgtggcccctgctgctgtgtctttcccctattggctagggttagacggcacaggctaaactaattctgactggctaatttaaagagagtgacagggtgagtggtttggtgggaaaaaatggttatggcaaagcaggaaattggaatgagtcagggtggagaatgagcaggtaatcwgaatgagtcagggtggagaatgagcaggtaatctgaatgagtcagggtggagaatgagcaggtaatctgaatgagtcagggtggagaatgagcaggtaatctgaatgagtcagggtggagcaggtaattggaatgagtcagggtggagcagttaatc

SEQ ID NO: 652426 - DNA, 562 bp, Homo sapiens
gagagagaaccagagcccgccccccggaggggaatgtaatcactggcaaaaccccaaattgttaataaagtttcggtgccgcaaaagaaatagcactcgaatgtaaaattttttttttaattctcagcaaggcaatgtactttctacagaagggtgcacccttacagatggagcaatagtgagtgcacatttggacaagggaggggaaggggttcttgtcccagacacacgtggcccctgctgctgtgtctttcccctattggctagggttagacggcacaggctaaactaattctgactggctaatttaaagagagtgacagggtgagtggtttggtgggaaaaaatggttatggcaaagcaggaaattggaatgagtcagggtggagaatgagcaggtaatctgaatgagtcagggtggagaatgagcaggtaatctgaatgagtcarggtggagaatgagcaggtaatctgaatgagtcagggtggagaatgagcaggtaatctgaatgagtcagggtggagcaggtaattggaatgagtcagggtggagcagttaatc

SEQ ID NO: 652427 - DNA, 555 bp, Homo sapiens
atttgaattaatagactttcaaatactttttaaaattgatattaatgatcgtatttatttatggggtagagtgtgatgtttcaaaacatgtttacattgtataataaccaaatcagggtatttagcatatttatcaactcatacatttatcatttctttggggggagaacaagttattctgaaatatataatattgttaaccatagccaccctattatgcaatataaaacatgagaacttatttctcctgtctaactgtaactttgttccaaaaattattcctctcctctaactgcaacttgtctccattggccaatcattctctactcccctaactctggtaactactattctactctgcacttctgagatcaccttgcttagattccacatatgagtaagattatgtagtatttgtctttctgttctggcttatttcacttaacataatgtccttcaagtacatccatgtcaccacaaattccaagatttcatttctttttatggcagaatagcactccattgtatataratacccatattttctttatccat

SEQ ID NO: 652428 - DNA, 502 bp, Homo sapiens
tttttttcagggaaagtttttttcaaaaatgtttcatgcaaccccagaatcatcaaacatatgtgatataaaaaagcatcaaaaggaaaagagactaaaaactggttttacracaaaatggttccaacgacttttccaagctctaaagatttctatgtccttggattctcagcccttcagtcactttagagctataaaaagaagtagaataaatgtcctgacagcatagtttattcaatcaaatagagcagattaaaatcaagtttatccacgtaaagaagtattctttatagtgttaggaccccccttgttctctcaatgagtaagaaggatctctcctcactgtaagggagttgccttctaaacacgtgtttgatgttgtcaaacatcttgatgattatagtcttcttcacaataatgtaacactatgatatcaaccttgaacatttaagaggggagatgaagactgaggacagaagaaaagtgctattgctgttaggaa

SEQ ID NO: 652429 - DNA, 502 bp, Homo sapiens
tttttttcagggaaagtttttttcaaaaatgtttcatgcaaccccagaatcatcaaacatatgtgatataaaaaagcatcaaaaggaaaagagactaaaaactggttttacgacaaaatggttccaacgacttttccaagctctaaagatttctatgtccttggattctcagcccttcagtcactttagagctataaaaagaagtagaataaatgtcctgacagcatagtttattcaatcaaatagagcagattaaaatcaagtttatccacgtaaagaagtattctttatagtgttaggascccccttgttctctcaatgagtaagaaggatctctcctcactgtaagggagttgccttctaaacacgtgtttgatgttgtcaaacatcttgatgattatagtcttcttcacaataatgtaacactatgatatcaaccttgaacatttaagaggggagatgaagactgaggacagaagaaaagtgctattgctgttaggaa

SEQ ID NO: 652430 - DNA, 486 bp, Homo sapiens
caaaagacacagaatggctgaatggacaaaaaagcaagacccattgatctgtggctacaaggagcacacttcatctataaatatacacatagactgaaaataacgggatggaaaacgatattccatgccaaaggaaaccaaaaaagagcaggagtagctacacttgtattagacaaaatagatttcaagccaaaacctgcaagaagagaccaaaagctcattayataatgataaaggggtcaattcaccaagagaatataacaattataaatacaaaaatatgtataacctccagtgctcccaacactggggcacccagatgtataaagcaaacattagagctaaagagagagataaaccttaatacaataatagctggagacttcaataccccactttcagcattggacagatctttcaaacagaatatcaataaagaaacatcagacttaatctgcaccatagaccaaatggacctaatagata

SEQ ID NO: 652431 - DNA, 475 bp, Homo sapiens
taaactcttttacactttctattcgttattcggtatagtttgacttccctttgagtataatcaaagaatagcaggaatagctttaacgcagtccccaaactgacaagaagctatagttgatagcatgagtgaaagcagaaagattggttttagaaagaaaacataaatggtgtttgaattgaactttgaggctgaaagagaaagaatttagagaacaagtgccagtattaatatcttccaaggaaggcagctttaatytgcatttaggtaccagtcagggataagaattgctagctggtctgaaacaacggatataatcatattttataccaagggtgcccattgtcatcctgacacaaaacctcaggtttttctcctaattgactgaaagtgccgtcatgtttctttatggtcttctttcttttttttctatgaattttcttctcattaggatctaactggagacccttgtttt

SEQ ID NO: 652432 - DNA, 597 bp, Homo sapiens
acatttgttttacaacagttgttttcatgttcagcccacaccagctgttccccaaacacaagagttttcaaaactaatatgctttgcaccaacaattctccataaaatgtttaattcattgtaatctttgtcttattactgctcttgttctaactacatccagcccatcccaaatctcaatagatatttttgggaagtagacatttttggaatggaaaaaatggtttacatatttcaaaactataaggtggctgatagacaagatttgtttaaaaagtatgtatgtatgaggactgtgtttggtttttaaatgtcattgtgaatgttgagctagatacattattaataaatgtcatcttttcaagtgagttcagtattaatattgatacagactttcttcctgttcttaattttgcatctcaataaagatatgaatgttggcaagcactgctattgacaattgataaaattatgcaaacacaatgtttttgcagcctttgagtaaatactgcatgctaatgaatttcaragtgttttctgtgttcctgtaggagctgaatttgtgtaggtggactgcaccatagatgtgcttttcta

SEQ ID NO: 652433 - DNA, 570 bp, Homo sapiens
tataggctttactctatcagaaaaataaaggcaaagacaatgtaaaacaaaagcatgaatcagatgcagtttttcaacaactaggacagattaaaaaaagtatgtttatttttataagcattttcacagctcaagcaacctaaatttaaagagatcataggaccttcttacaaaataaaaattcagcctctaaatgacaactactttttggaaacctaaataaggaaattaaaaccaaataagttatggggccagtaagttatggctcaaggagaggaaattagcctgatgtttttctgstggatgaaacaatattatatacatacatatatatgtgtatatatacagatatatgtttatataagtaaatatacataaatacattttcttcttcttttgtagtttataagactttgaatttttacataaaaaagaggaagactgagatatcatgcaatgccagcatcattatatatcttgaactcagacaaaatgacagagactgcatgtctcccctacctcgtgtcaaactctaacttcctggtaatgaaatgaatgaactgtggccac

SEQ ID NO: 652434 - DNA, 422 bp, Homo sapiens
acacatataactatatgagaggcttcttgaaccttagactttagaaaaatacatactaaaaccacaataagataaatattagtatatatatacttttatgcccacctagtatgtatatattgtgtatagtgttttatatactgctggatactatttgctaatattatggtaaaaatttttgtggctatatttatgaggggtattggtctactgtatttctcttgttttgacatcatggtaataatagtgtattagtcagggttctccagagaatcagaaccaataggatctcattcttaaaaaaaaatcaaaacrattgaattcatggagagagagagtacaggaatggttagtaggttctgggaagggtagtgggggtcgagtggcaggtggggatagttaatggatacaaaaaatagaaa

SEQ ID NO: 652435 - DNA, 595 bp, Homo sapiens
ggttgttttggatagctataactgctaagctcttttagctgattaaggaattttctcatgtggtaacattcctatcttttgggatgttacatacactgcttaagggcaagaagcatttggttgtacttttgcatgtaaaagcataagggctgtgatgcatgaacagtgttacckgtaggtggctgaactgagatgagcttgggactccaaggaagcctgggatacacggtcaatacttatatcaatccacacttaaagagagccacacaaaagcaacttgatttcagattgtcgtaccaagactctaggggcaaaagtttcctgtgagtcagaaaaagaaaaaaaaaatcacaggaagtcaaaagatttggactactgattctttgtatctaggtaatcagaattcaaagtcaggatttcacagaaaatcctgtgtctagtctgtgcaattaaccaaggtggccctatattggctgtgggtgagtggtacaattggatgaaactttcctcctcctccctcacaaaaaggctctgtcccttgtcctttgtcagcttttaagacacaacttatccctcacaaaaaagaacatattct

SEQ ID NO: 652436 - DNA, 503 bp, Homo sapiens
taaaatagacaattaaagaaatctgatgtcctctaatcttgtagtagccaagctagaggcaattttcagtaacttcttcctctcaaaacaaaacccaaaacaaaaaaagtacattcatagcacctaaatattattaargattctccatttaactcataaccagagtttttcaaggagttcatacattagccaaatagaaaaataaagctccattcctatctccttacagaaagtaaaattccaggtgtattactgcagaatgtgaaaaaacaaaaccataaatttgtgaaagtaaaacatgaagagaatttttgcaatctttggataaataagacatttttaagtcagatataaaacacagaaaccattaaggaatatcaataacatacagtttaaaaagaaaagattgaaagataaacagaaaactagggataattttgtaacatgtgtaataatacaatgggttaataatcttataagacaaaaaataacttttatcaatt

SEQ ID NO: 652437 - DNA, 531 bp, Homo sapiens
agatcttgccattgcactccagcctgggtgacagagcaagaccctgtctcaaaaaaaccccaaaaaacaaaaaagaaatatgtacaagtctcttctatcctaaaaaagcctacctttgatcctttaactaccactatatctcttttcttccctcataaccaagttgctttaactaatacattagaatgtaaatacccttcatccccattcactcccagtgtgatgcagcaacatacctgccaacacacatcaataaatggacttttaccaaacctactgaggtttttttcagtcttatcctccttgagcctctagaagatgcagcattgtcaacccctcctccaacttctgtaacacctcttttctaattctctggcaacttattttcagttacctcctcctccattccccacagtctgcccacccttaatgttggagttcctcaaagttcaatcytcaactatgttccttattattttttaaaatccatacctattattgccaactctcaagcaatgcctcttacccaga

SEQ ID NO: 652438 - DNA, 508 bp, Homo sapiens
tataagccaaaactgttattaatactgtctttcatgttatcccaaaaaggtattgtggaaactgacaaattaacatttgcaatattctttagaaaggactggaataaacagtgccagtattacttaatgcacaggttcacccttgaagaacctatagaaaatctacaagtgatagcttcctgatccaacctaatattaggctcatcccagactcttagtcacttaaagcacatgccaaatgattatgaatctgtatctatttttccatctaaastcagggttccattctacccacaccatgtagaaaggtgaagtaatatgaagtttcattttttcaaaacttagatctagttatttgtaaattgtaaaccttccctttgtttcactgttgattcttgaaatgttcctgatgcattataattccattttctaacagactggattttaacatgacggcatcctctgaggttttggatttatttttcagaggattgcttaatgtttaatg

SEQ ID NO: 652439 - DNA, 616 bp, Homo sapiens
ttataatggctgctctgaagtctatctaataaaaccaaaatataagcctactcaaaagtttctatttactgctttttcctcccaagtattggtcacactttcttatttctttacatgtcttctatttttgttaaacactggatattttagatgatatactgtagcaactctggattctgctttttttctgacttttccasttaagagttttcttctcctcccaccccttacacttctctttttctctttcttttcttcttctttcttctctttctttctataattgattggacttatacgtagaagttttgtcctctgccatgtgtcaccactaatgtctctgttaaaatttttaaaattcttatatttttactttttagtttggctttctagcatcatctgcataacttaatggtcagccaatgactggtcaaagattgtgttcaaacaccttaagcccataaaacctaccttctaccattggatctgtgtgtgatttgaagatgacatccaaagtttatacagtttccatatctgcccagattttattttcctgacagtcttcttgggtgtacagagagtccctagttagtcagagatgcatggagaatgtata

SEQ ID NO: 652440 - DNA, 506 bp, Homo sapiens
gtaattgggttacatataactgggtacaggatgggattgggttagaggctcaacttaggggagttagagtatctcctaaggcagtgtgagttagaggcccttcttaataaaaggcaagaacgcttgaccaaccttgtattagatgcccaacttaggagggttagagacccttctaagatttaaggggttagagcccctctcagtaaagtccttctcrgcaaagtcccttttggctaagaatgggttggggctatgggatattaactgctattctctttgttgttgttgttgttgtttgtttcttttccatacattattggggttcaggtggtgtttggttatgtgagttagttctttagtggtgatttgagattttggtgcacccatcacccaagcagtatacaccataccctatttgtagtctttcatccctggcccccttcccaccctttcccccaagtccccaaagtccattgtctcatttttatgcctttgcatactcatag

SEQ ID NO: 652441 - DNA, 506 bp, Homo sapiens
gtaattgggttacatataactgggtacaggatgggattgggttagaggctcaacttaggggagttagagtatctcctaaggcagtgtgagttagaggcccttcttaataaaaggcaagaacgcttgaccaaccttgtattagatgcccaacttaggagggttagagacccttctaagatttaaggggttagagcccctctcagtaaagtccttctcagcaaagtcccttttggctaagaatgggttggggctatgggatattaactgctattctctttgttgttgttgttgttgtttgtttcttttccatacattattggggttcaggtggtgtttggttatgtgagttagttctttagtggtgatttgagattttggtgcacccatcacccaagcagtatacaccataccctatttgtagtctttyatccctggcccccttcccaccctttcccccaagtccccaaagtccattgtctcatttttatgcctttgcatactcatag

SEQ ID NO: 652442 - DNA, 398 bp, Homo sapiens
cccttttcaacaaatgatgctgggataattggctagctacatgtaggagaatgaaactgcatcctcatctctcaccttatacaaaaatcaactcaaggtggattaagggcttaaatcwaagacctgaaactataaaaattttaggagatgacattggaaaaacccttctagacattggcttaggcaaagatttcatgaccaagatcccaaaagctaatgcaataaaaacaaagataaatagctgggacttaattaaattgctactctgtttgaaataatctgccttgcactctttgctgacagctgtaggtgatagaattggcatgaacaggatcatgggacatagggagctttttcctcaccaaaaaggggaaacttgaatgctgatgggactgctg

SEQ ID NO: 652443 - DNA, 398 bp, Homo sapiens
cccttttcaacaaatgatgctgggataattggctagctacatgtaggagaatgaaactgcatcctcatctctcaccttatacaaaaatcaactcaaggtggattaagggcttaaatctaagacctgaaactataaaaattttaggagatgacattggaaaaacccttctagacattggcttaggcaaagatttcatgaccaagatcccaaaagctaatgcaataaaaacaaagataaatagctgggacttaattaaattgctactctgtttgaaataatctgccttgcactctttgctgacagctgtaggtgayagaattggcatgaacaggatcatgggacatagggagctttttcctcaccaaaaaggggaaacttgaatgctgatgggactgctg

SEQ ID NO: 652444 - DNA, 622 bp, Homo sapiens
cgcactcccctctccatgaggggcccgcccctgcagcaaacttttgcctgggcaaccaggcatttccatacatctgaagtcttctgaaatctgaggtttccaaacctcagttattgacttctgttcacccacaggctcaacaacatgtggaaactgccaaggcttgaggcttccacttggagtggctgggacacagggtactaagtccctaggctgcacacagcatgaggaccctggggccagcccacaaaataactttttcctcctgggtctctggcctgctatgggagaggctgccgtgaaagtctctgacatggcctggagacattttccccatggtcttggggagtcacattaggttccttgccacttatgcaaatttctgcagctgtttgaatttttccttaaaaaatgggtttttctattctaatacatggtcaggctgcaaatttttgaacttttatgctgtttcccttttaaaatggaatrcgtttcacagcacccaagtcaccttttgaatgctttgctgcttagaaatttcttctgccagataccctaaatcatatctctcaagttcaaagtttcacaaatttctagggcaggggcaaagtgtcaccagtct

SEQ ID NO: 652445 - DNA, 622 bp, Homo sapiens
cgcactcccctctccatgaggggcccgcccctgcagcaaacttttgcctgggcaaccaggcatttccatacatctgaagtcttctgaaatctgaggtttccaaacctcagttattgacttctgttcacccacaggctcaacaacatgtggaaactgccaaggcttgaggcttccacttggagtggctgggacacagggtactaagtccctaggctgcacacagcatgaggaccctggggccagcccacaaaataactttttcctcctgggtctctggcctgctatgggagaggctgccgtgaaagtctctgacatggcctggagacattttccccatggtcttggggagtcacattaggttccttgccacttatgcaaatttctgcagctgtttgaatttttccttaaaaaatgggtttttctattctaatacatggtcaggctgcaaatttttgaacttttatgctgtttcccttttaaaatggaatacgtttcacagcacccaagtcacctyttgaatgctttgctgcttagaaatttcttctgccagataccctaaatcatatctctcaagttcaaagtttcacaaatttctagggcaggggcaaagtgtcaccagtct

SEQ ID NO: 652446 - DNA, 234 bp, Homo sapiens
agggacttatggaggttaggtaattaacagagttttagctcaggtccaacttacagtggatccagtgggtccttggactcatcctgtggtcatttccctagtgccagaatgcataactggcatagacacacttagcagcagctggaagwatccctacattggctccctgactggtagggtgagggctgttatggtgggaaaggccaaatagaagccattagagctgcctctacc

SEQ ID NO: 652447 - DNA, 607 bp, Homo sapiens
agcagcttaatttttcagtattttctttaaagataacactgtaacgttagtacaaataggcagataaatgaatgttcactgcagtattattcacaacagtgaaaatttgggtacaacttttaaatgttcagtagtatagtagaaaagtagactatctcaagtatggtatatccataagttggagactataggacagtgtagaagaatgtgctgatccacatgagctaacataaaatgatctgagatayattgttgcgtgacaaatgtaacttatagaaaaacaggtacaatatgatacaagttcgagcctattgttcaaggtgcccttccttagacacctaactacctccctgctcaccagtaatgtttgcagggcccaaagcaagagtgaaaattgaggtccacataccatatgctttggatcatggattgtgttatgccagcaatgagtgctgcatcctgagtaacagaagcacctatgtgtattcagtatgtttcctgtatgtgtttgtaatattcaggcccagtaagcaagcagtccagggcaaagttacttcctgtccaagtctaaaagcctttctgtcctccctaccataaaaatgaaatc

SEQ ID NO: 652448 - DNA, 349 bp, Homo sapiens
ttgtttcttcccctacttcagtgaacagattctgtagtgacatggagtctggaaaaggctttccagggacttaacaaaaactaacatgcattttcctaattcaggagtctcagggccctacttccacctcttagtttaaatgaaggtgtctttacaaggtatgatattaaagtttttygacttctgttacatcagtatcaagacacttctctgtatttcctaataggaatgggaagatacagtgcagtcggaagtgttactgagagaattttcacattatactatgatcacttgggattcctacataagctgactctgggtcgctttgaagctagtggaccacccacag

SEQ ID NO: 652449 - DNA, 468 bp, Homo sapiens
tgtgagcaggagggtagaactaactaaaaaaaagcatttacstcatttttcaccaacttcacaatttgtagaaagtttcttagttcccttatgtgaaagtttaaattattaaaagaaaaaaaaaccctacaggtatttgtatacttaggacaagtttgacgaagccatactcagcaatatcacttccctctccacaaactatgcatgcattctctctggataaaaataatcgctggctcttattacagtattggagctctcaatctttataacgacgatttattcctatttcacttatgaagaaagcgaggcacagacaggctggttagttattgggattagacatctatcccaggcaactggctccggggcctgtgctcttagccacctgctgcctttcattggacttgcatacactttccctaggatacacttgccactcccaggctacagtgtcatacagaattc

SEQ ID NO: 652450 - DNA, 468 bp, Homo sapiens
tgtgagcaggagggtagaactaactaaaaaaaagcatttacctcatttttcaccaacttcacaatttgtagaaagtttcttagttcccttatgtgaaagtttaaattattaaaagaaaaaaaaaccctacaggtatttgtatacttaggacaagtttgacgaagccatactcagcaatatcacttccctctccacaaactatgcatgcattctctctggataaaaataatcgctggctcttattacagtrttggagctctcaatctttataacgacgatttattcctatttcacttatgaagaaagcgaggcacagacaggctggttagttattgggattagacatctatcccaggcaactggctccggggcctgtgctcttagccacctgctgcctttcattggacttgcatacactttccctaggatacacttgccactcccaggctacagtgtcatacagaattc

SEQ ID NO: 652451 - DNA, 468 bp, Homo sapiens
tgtgagcaggagggtagaactaactaaaaaaaagcatttacctcatttttcaccaacttcacaatttgtagaaagtttcttagttcccttatgtgaaagtttaaattattaaaagaaaaaaaaaccctacaggtatttgtatacttaggacaagtttgacgaagccatactcagcaatatcacttccctctccacaaactatgcatgcattctctctggataaaaataatcgctggctcttattacagtattggagctctcaatctttataacgacgatttattcctatttcacttatgaagaaagcgaggcacagacaggctggttagttattgggattagacatctatcccaggcaactggctccggggcctgtgctcttagccacctgctgcctttcaytggacttgcatacactttccctaggatacacttgccactcccaggctacagtgtcatacagaattc

SEQ ID NO: 652452 - DNA, 657 bp, Homo sapiens
tctggctgggtgccatggctcacacctgtaatcccagaactttgggaggccaaggccagcagatcagttgagaccaggagttggagaccagtctgaccaacatggtgaaactccatctctactaaaaataaaaaaaattagccaggtgtggtggctcacatctgtaatcccagctactgggaagaccgaggcacaatagttgcgtgaacccaggaggccgaggttgcagcgagccaagattgtgccattgccrttgcactccagcctgagtgagagagtgagactctgtctcaaaaaaaaaagaatatgaattatataacccccaaatctaccaactaaaaaagaaacaatttcaacaatttcagattaccagaaactcactgctgtggtctaaatatctgttttccccaaaaattcatatgtggaaatcctaaccctcaaggtggtagtattaggaggtggggcccttggtaggtgactaggtcatgaggactctgccctcatgaatggaattagtgtccttatgaaagagaccccagagagctagctaggcccttccaccacgaaggactgaaggacagagccagctaggcccttccaccatggaaggacacacgtagaagacaccatctataaaccagaaagtggaccctcacc

SEQ ID NO: 652453 - DNA, 677 bp, Homo sapiens
ggaatgtatcatcaacacacaaaggtttcagtaaagctcttcattcattcaatgaatatttgagtgcctattacatatcaagtcttgtgctaggcactgggaatatagtggtaaacaagatagacaagactcttccctgcatggagatgacattctaataaacagatacaggtgataaacaggtaaaccaaaacaaattcatatctaacatgtgctttgaagaaagtaaatatggtgacagagggagtragaagggtaagcaaagacccaagaatgaagagcaaagagccaatgaaagagctttccaggctaaagaagttgcatacagtgaggcaagaaaaattgggatgtgtttaataaacatgaagaaagccagtatagatgatgcacagtgatggtgtcgtggaaaggccagcaaggaggtcagctagtgccagatcatagacggtattataggatgcaggaagagtgtaaattttcttcttggtgtcagcagaaaccattggagaatgttattggattatttttaaataatccaatttacatttttgaaaggatcactctgattgctgtgaaaagtgtgggacagggtgtgagtagaagctgccaagccccttagaaagttattaaagtaatacaggtgacagattatggtgctggagcaggtgcagttgagt

SEQ ID NO: 652454 - DNA, 522 bp, Homo sapiens
ccatttttccagctatttatttattacaaaagtaatacaaaaattgttaaagatgctagcgaaatagcacaatggaaaaaataaaacaaaaaattttagtaaataactgagataggaagagaggaaggaaagatggaagggagggagtaggggagaaagggcaaggaaaagaagaaaattgtgccaccagaaatgaaaagggaacttcaaaccaaagaaattagctaatgtatgactccctggaggatgtgaggcccagatactgaycataaggcagtgagacaacttttaatgaccaattgttgacagaaagtttgactttgggccttactactttgtggaaggaagttggaatggagaccattaaagaaagctgggaccatcaaatcatgaagagagaattaggaaaactctgtccaccagagttttcctaaagcagcagcatgggcttagaatggggagaaggaatttcccgtaaaaaatcaaaacttcaagactgtatcacattcagagactgaattc

SEQ ID NO: 652455 - DNA, 384 bp, Homo sapiens
gaggaaggaaagatggaagggagggagtaggggagaaagggcaaggaaaagaagaaaattgtgccaccagaaatgaaaagggaacttcaaaccaaagaaattagctaatgtatgactccctggaggatgtgaggcccagatactgatcataaggcagtgagacaacttttaatgaccaattgttgacagaaagtttgactttgggccttactactttgtggaaggaagttggaatggagaccattaaagaaagctgggaccatcaaatcatgaagagagaattaggaaaactctgtccaccagagttttcctaaagcagcagcatgggcttrgaatggggagaaggaatttcccgtaaaaaatcaaaacttcaagactgtatca

SEQ ID NO: 652456 - DNA, 384 bp, Homo sapiens
gaggaaggaaagatggaagggagggagtaggggagaaagggcaaggaaaagaagaaaattgtgccaccagaaatgaaaagggaacttcaaaccaaagaaattagctaatgtatgactccctggaggatgtgaggcccagatactgatcataaggcagtgagacaacttttaatgaccaattgttgacagaaagtttgactttgggccttactactttgtggaaggaagttggaatggagaccattaaagaaagctgggaccatcaaatcatgaagagagaattaggaaaactctgtccaccagagttttcctaaagcagcagcatgggcttagaatggggagaaggaatttcccgtaaaaawtcaaaacttcaagactgtatca

SEQ ID NO: 652457 - DNA, 602 bp, Homo sapiens
tggtcaaatatttttctacttctgtcatgtctttttgtatttcttttctttttctatattttttagttttctatattcttcactatattagtttgctatggctgccacaacaaaataccactgacttggtggcttggtgactcaaacaatggaaatttattttcttacagttctagtggctacaagttcaagagcaagatatcagcagggttrgtttcctctgcagcccccctacttggcttgtgtatggccatcttcttgctgtgtcctcatatggttgcccctcagtttctgtgttgtctatatcctaatctcctcttcttataagatgacaccagtgacactggattggggcccacccaaatgacctcattttaccttaattacctccttaaaggccctatctccaaatacagccacattttgagatactggaggttggggtttcaacatgtgatttttggttggacacagttcagtccataacagttactttaaataaccttcatttatttggttatttccagggttcaacttcactggcatttattatgtggtcagcctctactgagtgctttgttacgacaatggtgccaacactg

SEQ ID NO: 652458 - DNA, 659 bp, Homo sapiens
taaaccagtgccactgaagacaggagaaggtgaataatatatgctggctttgaaacaggagttgagagaaacaatgaaaagaatgccctattttattgaaacaccctcatgaagaaagacaagatattgaaaggtatagtaaaagatacatgaaggtatacaaggaaragtggataccagattggagaagacttccaagagagatgatgccaagaaataaatgtaaaaaagcaggcccaaaacccaaaaaggcaaaagacacaggcaaaggcacatcactcactaatactgcagatgtgttgaaaaaaattgaggaattggaaaagagaggtgatgatgaaaaatcagatgagaaaagaagagaaagaaggaagcaaagagaaaagtagagaaggtgatgatgatgatgacaatgatgctgcagaacaggagggatatgatgaagaagagcaagaagagggaaatgactacattaattcatactttgaagatggagatgattttggtgcagacagtgatgacaacatggatgaagcaacctagtaggcatgaaatttttcaaaaaatgtttttatgatgcagcttctgaacatttggacagatttgttttatattttatttctgataaggaataagtatttttatttttgttttttttt

SEQ ID NO: 652459 - DNA, 589 bp, Homo sapiens
gatccacctgcctccacctcccaaagtgctgggatttataagcgtgagccattgtgtctagccagcattctgtaaattatgagggctgtttttatatacccccttgctgaaccaaaataatgtttcatgagcacttactatctactaaatgctactctaagccttctcygtgatttatctcatttaattcgagccacagagaagtcaggcaatttgtcaaagatcgcattattaacatgcattggggctggctttgagttctgacgccagagcccaagtttacagattgtgcccgcaagactgactggctgaaagagtggcaaaaggagggtgagcaatctatgcacagcctcctgggatatgatttagccaaaaaaagtttgagtgacatcatagtaaattcctgtgaaaagggcctatagaagtgatgagttttgttaccacaatgtatatactgcctttggagttcacattgattctgctctaagacattttcatgactgaaaaggcagaaacccctcaggagcacatgtcattgaacagccaaactattggcaatatatcttttcgttttttaccaggaaatgaa

SEQ ID NO: 652460 - DNA, 557 bp, Homo sapiens
atgcatttttgaaatgaaaaatccagcaaaataaagctactaaatattttgcattaactgacatccccattttctgtggtrtgctggaaactgttcttaccagttttagagtcctgatcattaaacatttaaacattttacaagctagatgttaaaccatttgtagcttgaaattagtcagggtgagagtatttacactatggaaattggaaattacaatcacagctgtttcttttcctttagattctgtgtacctttataccactgcaacgtctaacccctacactagctatctagttttagaaaggatgacaagaaaggcaggaaaatagtcaagtaatctcattgtaaaactttactgccaccttattataaatcgtttacctatcactaaggaggtcctgagatgaccttactgccaaaaacacgaagcacgtgcaggtcaggactgatcctgagcatggggctggaaggaaaaggtcagcatgaagctgatcagaagtcttgaacttcttgaggatgcccttgaaggcaatgtgagatattgggcctaactc

SEQ ID NO: 652461 - DNA, 557 bp, Homo sapiens
atgcatttttgaaatgaaaaatccagcaaaataaagctactaaatattttgcattaactgacatccccattttctgtggtatgctggaaactgttcttaccagttttagagtcctgatcattaaayatttaaacattttacaagctagatgttaaaccatttgtagcttgaaattagtcagggtgagagtatttacactatggaaattggaaattacaatcacagctgtttcttttcctttagattctgtgtacctttataccactgcaacgtctaacccctacactagctatctagttttagaaaggatgacaagaaaggcaggaaaatagtcaagtaatctcattgtaaaactttactgccaccttattataaatcgtttacctatcactaaggaggtcctgagatgaccttactgccaaaaacacgaagcacgtgcaggtcaggactgatcctgagcatggggctggaaggaaaaggtcagcatgaagctgatcagaagtcttgaacttcttgaggatgcccttgaaggcaatgtgagatattgggcctaactc

SEQ ID NO: 652462 - DNA, 559 bp, Homo sapiens
ttttactgtgttgagtttagataaaacatgtatgtctaaactaagattggttttaattctaaagtataggtaaccaggaatggtgggaataacatctttaaagtatatacctttaaagtatatgaagagggtttatttttttctccatttcccttggtgttattatttccaaagttttgagcagataggcaagccatattatctagcaaagtggagaagaaagagtgtttccraaagtgaaagggaagaaatgggctcagtattattcacctggatatggacgagcacatcttctggttccagctgcccataaaaatacatgaagttggtataatacagataattgtgaaaaccaatcagaattagggaacatcttgaagccacaaatacgaggattagcccaaagtatttatcaaggccaggtttagtttttagtttttgtctcctcattctaaaaaaaaaaaaaaaaaaaaaaaaaaaagtatcagctattgaatccctccacttcaatccatctttttattttgatgcatgatgtgtatgtccgagagccttagga

SEQ ID NO: 652463 - DNA, 620 bp, Homo sapiens
tataatgacatgtgctgcctgtgaggcatgggaagaaataaggatttgataaaaatcaattaatgagtcattgtcaaatgctgatgttacattaacattctgtctctctctctctctctctctctttctctctctctctctctctctctcctgttccggcccagctctaaggccagctccaataatggctctgcactactacagtggtgggtggccattgcagcagtgcaaacctctaaaaccctgagagaaaaattcaacccactagataaagaaactaggaaaagaagcatctgtcacatgaggagtgtgaaggaaaatccttgttatttttttctctcttttctcatctctttggcccaagagcagccctggttgtggggaacagcacaatagcacagagggctaaaattctcatagaagctccactttctttccagagaacaagggaaaggacctctaagagtggaaagcatggggggacatctctatgagaagagggctggagaaagggagtcctgattctttatrtaaactagcaccaggaagaagctgcatatgaccagggcacacctgaagaaaacagcaaagcctttgaaatgaaactacaaagtaaacat

SEQ ID NO: 652464 - DNA, 620 bp, Homo sapiens
tataatgacatgtgctgcctgtgaggcatgggaagaaataaggatttgataaaaatcaattaatgagtcattgtcaaatgctgatgttacattaacattctgtctctctctctctctctctctctttctctctctctctctctctctctcctgttccggcccagctctaaggccagctccaataatggctctgcactactacagtggtgggtggccattgcagcagtgcaaacctctaaaaccctgagagaaaaattcaacccactagataaagaaactaggaaaagaagcatctgtcacatgaggagtgtgaaggaaaatccttgttatttttttctctcttttctcatctctttggcccaagagcagccctggttgtggggaacagcacaatagcacagagggctaaaattctcatagaagctccactttctttccagagaacaagggaaaggacctctaagagtggaaagcatggggggacatctctatgagaagagggctggagaaagggagtcctgattctttatgtaaactagcaccaggaagaagctgcatatgaccagggcacacctgaagaaaasagcaaagcctttgaaatgaaactacaaagtaaacat

SEQ ID NO: 652465 - DNA, 510 bp, Homo sapiens
aaaagtataaaatgataaccaactcgacatggaacaggtgttctgtgttgttcagctcttagtgcctggagcccattctgtggggtcagaacccctgagctctgctccttccagatagagtttgagtagagtgcagttatgccagggtgagataggagtgaagacagcggatcagcagcagtgttttcagagccttgtgggaatgaaagaggaagccattcaagtttctttgggcaacttcaaaaccagattgtagtacctaaagagagaaatgtgaccccatcattagggtgttagaagaacgyggtgtctgagcagggtattggtttataaacctacatgcagcatggagaattccaaaagctatatctctgtgtgctctcaaagtaaatgtccccagatagtcagaagatgaccataacattcagagatcagagcctcatgctccctggaaaagctcagaaggggagcacagttttgacaacataaggaaaggaaggcatccaatcc

SEQ ID NO: 652466 - DNA, 510 bp, Homo sapiens
aaaagtataaaatgataaccaactcgacatggaacaggtgttctgtgttgttcagctcttagtgcctggagcccattctgtggggtcagaacccctgagctctgctccttccagatagagtttgagtagagtgcagttatgccagggtgagataggagtgaagacagcggatcagcagcagtgttttcagagccttgtgggaatgaaagaggaagccattcaagtttctttgggcaacttcaaaaccagattgtagtacctaaagagagaaatgtgaccccatcattagggtgttagaagaacgcggtgtctgagcagggtattggtttataaacctacatgcagcatggagaattccaaaagctatatctctgtgtgctctcaaagtaaatgtccccagatagtcagaagatgaccataacattcagagatcagagcctcatgctccctggaaaagctcagaaggggagcacagttttgacaacawaaggaaaggaaggcatccaatcc

SEQ ID NO: 652467 - DNA, 562 bp, Homo sapiens
tttttccttatgtggatatcctttgttgttgttgttgttgttgttgttgttgttgtkgctgctgctgctgtcatctaatcaacagcagatcttgtaagtttgctctgtggaaatactgtttttccagttgaggcggtctttgggctgctttccccagccttcagtgccatcttgaaatgtaatttgtgatatttctttactcattggtcccagactctatgaatattcctgataagatagctttttttccctccaatcttttttttactacagatttagagtaacacatttcatttattaaatgagacatacttgtttctcatgggtaatttgttactagaggatgctgtaaattgcactaggcaacttaaagacattgctactttttgatgacatgatagagggaaaaatactttggttgagtcatttaaaagagtgttttaaaaagtatgatgacttagtcatcatttgtcattttattcttttaagtgtttggaaagtatccgtattaaaataatacctttaaaagcatgtattcattaaattgtcaaaattgtcattc

SEQ ID NO: 652468 - DNA, 575 bp, Homo sapiens
gaaacattgtagaagcagtcattatgtagactgggcttgtgtttttcctcagagacagaaagtactcaagtaatttttaaattaggacaattcaggtacatcatgaagccacccttccttgtcctgttatattcaggtcctacactagtttaagatagagattgaaatgctgattatggagcatagaaaagaaaggagagaattgaagggaaaaggaaggatgaaggatgacatttctaaaggggcaggcagcaaggtggaggtaacaggtgggtgaggccgtgagaataaattatggtaagatgtaagaaaaaaagagatcaggaaaagggcagatccagcccagagcagaaaccagacctgccaggtgaagggagatggttcaagggtaggaatcttagggagactgaatgaaaaacgtgtgagaacaagcagggaaagaaacctttggtawtggggggttgaggggcagggctgcagcacaatggagaggaaggggaacgaggtgcagtcaagtaggcactcaaactgaggtagcagaacagacacttggacttcttttcatggaattattg

SEQ ID NO: 652469 - DNA, 608 bp, Homo sapiens
gatttgtatttcgtaaggtgactttgcatagatctcatttcatcttctgaggtgtgtttttggccaagctgactgctgaggcattctattgttgctccagggtactgcttctctggtacttccttcagagaccatttgtgttggtgagaaagcctatggtttgtttttttcctgcccttgacaccttaacatatccttctctctgttcttgaattcttgagtcycttctgtcccggatcccattatttatcactgcctgaagaacctgctcccttaggaaccaccctcccatctctactttttctagcctttcctacattccattttcccatgggttttctctgtcatctgtcttaagttggaaaaaagtttcatatgattctttcccatttcccctgtattccttttcattataccctcattccttgaacagaattgttattgttttgtttttccatccacacccctataatgcaaccttcctgtgtaaattttaggcttaagcttttctattcacatacttttatgctgaggcttggatttttatttgggctgttagatgcccattttgacattgacattaggggtttcaaaccatccttaaaagg

SEQ ID NO: 652470 - DNA, 608 bp, Homo sapiens
gatttgtatttcgtaaggtgactttgcatagatctcatttcatcttctgaggtgtgtttttggccaagctgactgctgaggcattctattgttgctccagggtactgcttctctggtacttccttcagagaccatttgtgttggtgagaaagcctatggtttgtttttttcctgcccttgacaccttaacatatccttctctctgttcttgaattcttgagtcccttctgtcccggatcccattatttatcactgcstgaagaacctgctcccttaggaaccaccctcccatctctactttttctagcctttcctacattccattttcccatgggttttctctgtcatctgtcttaagttggaaaaaagtttcatatgattctttcccatttcccctgtattccttttcattataccctcattccttgaacagaattgttattgttttgtttttccatccacacccctataatgcaaccttcctgtgtaaattttaggcttaagcttttctattcacatacttttatgctgaggcttggatttttatttgggctgttagatgcccattttgacattgacattaggggtttcaaaccatccttaaaagg

SEQ ID NO: 652471 - DNA, 509 bp, Homo sapiens
tttgtgaaatagaactgatattcaaaggaagaaatctggtaccttgtcccatctactgttatataagcatgaaaatgaaaaaaaatgtacagatattaggttggtgcaaaaataattgccatttttgccgttacttttaatgtcaaaaactgcaatcacttttgtaccaatccaatagaggatctacaacatatatcattctaggtataawcatatagtgatggttttaacacacatagaaagaaatgccaagttgccaggtcttcattaatagaaagtgtatttaattaatataatcatttataattattttgactacaggtgataaactcatgggtatggctgagagcatgtagagatcaaatataaaacaagagaacctaattcaagcaggtgttctaatattttctgccatggtgcagataggattggcatggagatagaaacataaggtcatcttgtaactgcattttctatggaagcaatgtggcatccagggaagcatggga

SEQ ID NO: 652472 - DNA, 509 bp, Homo sapiens
tttgtgaaatagaactgatattcaaaggaagaaatctggtaccttgtcccatctactgttatataagcatgaaaatgaaaaaaaatgtacagatattaggttggtgcaaaaataattgccatttttgccgttacttttaatgtcaaaaactgcaatcacttttgtaccaatccaatagaggatctacaacatatatcattctaggtataaacatatagtgatggttttaacacacatagaaagaaatgccaagttgccaggtcttcattaatagaaagtgtatttaattaatataatcatttataattattttgactacaggtgataaactcatgggtatggstgagagcatgtagagatcaaatataaaacaagagaacctaattcaagcaggtgttctaatattttctgccatggtgcagataggattggcatggagatagaaacataaggtcatcttgtaactgcattttctatggaagcaatgtggcatccagggaagcatggga

SEQ ID NO: 652473 - DNA, 509 bp, Homo sapiens
tttgtgaaatagaactgatattcaaaggaagaaatctggtaccttgtcccatctactgttatataagcatgaaaatgaaaaaaaatgtacagatattaggttggtgcaaaaataattgccatttttgccgttacttttaatgtcaaaaactgcaatcacttttgtaccaatccaatagaggatctacaacatatatcattctaggtataaacatatagtgatggttttaacacacatagaaagaaatgccaagttgccaggtcttcattaatagaaagtgtatttaattaatataatcatttataattattttgactacaggtgataaactcatgggtatggctgagagcatgtagagatcaaatataaaacaagagaacytaattcaagcaggtgttctaatattttctgccatggtgcagataggattggcatggagatagaaacataaggtcatcttgtaactgcattttctatggaagcaatgtggcatccagggaagcatggga

SEQ ID NO: 652474 - DNA, 509 bp, Homo sapiens
tttgtgaaatagaactgatattcaaaggaagaaatctggtaccttgtcccatctactgttatataagcatgaaaatgaaaaaaaatgtacagatattaggttggtgcaaaaataattgccatttttgccgttacttttaatgtcaaaaactgcaatcacttttgtaccaatccaatagaggatctacaacatatatcattctaggtataaacatatagtgatggttttaacacacatagaaagaaatgccaagttgccaggtcttcattaatagaaagtgtatttaattaatataatcatttataattattttgactacaggtgataaactcatgggtatggctgagagcatgtagagatcaaatataaaacaagagaacctaattcaagcaggtgttctaatattttctgccatkgtgcagataggattggcatggagatagaaacataaggtcatcttgtaactgcattttctatggaagcaatgtggcatccagggaagcatggga

SEQ ID NO: 652475 - DNA, 288 bp, Homo sapiens
acttgggaagggaaggtttgggagagccagcgctctaaaacatgaaaggatttccttatggactgaagagaacgcttattctaattmttacacaggtggacatgggctttcgggctgcagtgaacatagcagttcagagatccctttgacatactgatttcatttcttttggatctatatccagatgtgggattactggattctatggtaattctatttttaggtttttttttttttttttgaggaatcaccatactgttcttcataacggccataataatttttatt

SEQ ID NO: 652476 - DNA, 552 bp, Homo sapiens
gaaaatgaaaacaccacttatcaaaatttgtaagatgtggtaaaagaagtgcttagttagtaatttatagcactgaatacatacattagaaaagaataaaaatctgaaatccataatctaagcttccaccttagaaaaaagaaaaacacagcaaattaaacccaaagtaggcaaaagaaaagaaataataaaatcaaagyagaaatcaatgaaactgagaacagaacatcaataaggaaaatcaatgaaaccaaaagctgtttatttttaaatatcaataaaattctttagcccttagaataagaacaaacaaagaggacacaaatttataatatcagaaatgaaagatgaaacatcactgcagatcccttagacattaaaataagaaaatctgactgaaactaatccttgacaaaagagtaaaggcaacacaatgaagaaaagagtgttttcaacaaatggtgctaacacaactggccattcatttaaaaaaaaaaaaacaaacatgaagctagagacagaccttatacctgtcacaaaaattaactcaga

SEQ ID NO: 652477 - DNA, 552 bp, Homo sapiens
gaaaatgaaaacaccacttatcaaaatttgtaagatgtggtaaaagaagtgcttagttagtaatttatagcactgaatacatacattagaaaagaataaaaatctgaaatccataatctaagcttccaccttagaaaaaagaaaaacacagcaaattaaacccaaagtaggcaaaagaaaagaaataataaaatcaaagcagaaatcaatgaaactgagaacagaacatcaataaggaaaatcaatgaaaccaaaagctgtttatttttaaatatcaataaaattctttagcccttrgaataagaacaaacaaagaggacacaaatttataatatcagaaatgaaagatgaaacatcactgcagatcccttagacattaaaataagaaaatctgactgaaactaatccttgacaaaagagtaaaggcaacacaatgaagaaaagagtgttttcaacaaatggtgctaacacaactggccattcatttaaaaaaaaaaaaacaaacatgaagctagagacagaccttatacctgtcacaaaaattaactcaga

SEQ ID NO: 652478 - DNA, 581 bp, Homo sapiens
ctgcttaatgggaatatactgtcccttcacttcttcatgtacacctacaaacctacttgggataaaaacacaaaagtgaagcaaggccaactgagaccatgcagaaaaggacaacacactagaggataacagaacaagttggaatttaactgtgtttctaagaaaaatcctatggaaccaagttgtctatccatcttggactgcctaccaatttctagacttttataaaagaaacaaacttctattttatttgagacacaatatttggaggtcaaattacttaccatagaagcttattttatatgcagtaattacagcactatgtttttaatggataaaaaaggcattttagaaaggtttgggcactcatatgtttggtcaactggatcagaaagactggaaatgaggtmacattacctgggatgatgttgctgccatgccagttggatattgttgtttataaagtcccttacgacaatcaggaattgcatctttatataggatgctgaaatattttcaatatgaaaagcaaaggaatatcagagaaatatacttagaggtggttatataattttaccaca

SEQ ID NO: 652479 - DNA, 564 bp, Homo sapiens
atcgccagtggggattggtgcgtgtgcggaaacggggacagaagtgaaggttcatcgcctataacgaagatgaggtaggcatataggggcttctggaaagctagaggctgggctgagccaggagtcctctcccagaagttggggggcggtgcagaggtgtgggtcgagcccgcatgcgtgcctgctggggagggggtgagtggtgaggaccaggcccgctgggtcctgggggcgcggtggctggcgcgcaggtcccggagggggcggctggcgcgcactacacgcttgggracaaggaaaacatccgccggaggcccggccgggcggcgctccagcctcggggcaggtgcgcggagaggaagtgagagcattccggcccccccaccccaaccccggccgctggccctctggtgagtcacagccgacccccgccgccggagggagaggggagctgcgggccagagccccggagggtctggaggagccaggagggtttctgggagcagagggtcacttagtgggcttctgtcgtggtgtcgctacgggcgcgaaacggacactgaa

SEQ ID NO: 652480 - DNA, 564 bp, Homo sapiens
atcgccagtggggattggtgcgtgtgcggaaacggggacagaagtgaaggttcatcgcctataacgaagatgaggtaggcatataggggcttctggaaagctagaggctgggctgagccaggagtcctctcccagaagttggggggcggtgcagaggtgtgggtcgagcccgcatgcgtgcctgctggggagggggtgagtggtgaggaccaggcccgctgggtcctgggggcgcggtggctggcgcgcaggtcccggagggggcggctggcgcgcactacacgcttgggaacaaggaaaacatccgccggaggcccggccgggcggcgctccagcctcggggcaggtgcgcggagaggaagtgagagcattccggcccccccaccccaaccccggccgctggccctcyggtgagtcacagccgacccccgccgccggagggagaggggagctgcgggccagagccccggagggtctggaggagccaggagggtttctgggagcagagggtcacttagtgggcttctgtcgtggtgtcgctacgggcgcgaaacggacactgaa

SEQ ID NO: 652481 - DNA, 541 bp, Homo sapiens
atggagacctaataacctgcatcagtaaagtagaagaagactcagaattgcacartgtcatccaagctaaaaaaggagtgtttgaggaagaatggagcatggttcttggagcctcctactggagctcttgcatagcctgccttctataagcagctcccacattcttctttctcctaggaattaaaattcatattcctcagagctttcttcttagattgctggatggggtatgctgatagactgatctattctaaggttcaataatagaaaacggaccaacagggatccttctcagaggcattttgatattaaggacctctctgtaaatgcctgtccattcaaccaccgacttttcataggctttcatctcacaggcctgtcctgataaaccagctgcctatagggctgcacggtaatcctgtgtaaatacctgtccattcaaccaaccttgagattctgggagggtcaccagttcatgagaaaaggctgggttgcttgaccctatgttgttctctgcaaaaatgtccacctggtatgctgt

SEQ ID NO: 652482 - DNA, 541 bp, Homo sapiens
atggagacctaataacctgcatcagtaaagtagaagaagactcagaattgcacagtgtcatccaagctaaaaaaggagtgtttgaggaagaatggagcatggttcttggagcctcctactggagctcttgcatagcytgccttctataagcagctcccacattcttctttctcctaggaattaaaattcatattcctcagagctttcttcttagattgctggatggggtatgctgatagactgatctattctaaggttcaataatagaaaacggaccaacagggatccttctcagaggcattttgatattaaggacctctctgtaaatgcctgtccattcaaccaccgacttttcataggctttcatctcacaggcctgtcctgataaaccagctgcctatagggctgcacggtaatcctgtgtaaatacctgtccattcaaccaaccttgagattctgggagggtcaccagttcatgagaaaaggctgggttgcttgaccctatgttgttctctgcaaaaatgtccacctggtatgctgt

SEQ ID NO: 652483 - DNA, 605 bp, Homo sapiens
ttcaggcatccgctgatatccattcacaaaggacatgccctccacctcatgtctaccctgtgttgttttatgtgagtaatcttacagtatyaaaatctagtaggagtctctttactcagcacttgctcaaagttctcagctgaggcttttgttgtagggagacaccatgtctttgcgggatgggtccttccttcagccctgggcaccaaggtgtgatagtagccatagaaacgtggaaagcgaggagaatcttctgagcacagggagggaggggcagttccacatcctcctctctaaggcggcgcctccttctccccaaggtggtcaggacaagcccttgctgtctgcctggcccagccttgtggtgcctctaggacatgtcattcttcggtgtcactcttatcttgggtttaacaacttcagtctgtacaaggaaggtggggtgcctgtccctgagctctacaacagaatattctggaacagccttttcatgggccctgtgacccccgcacaacagggacatacagatgtcggggttcacacacacactcccccagtgggtggtcagcacccagcaaccccctggtgatcgtggtcataggtca

SEQ ID NO: 652484 - DNA, 605 bp, Homo sapiens
ttcaggcatccgctgatatccattcacaaaggacatgccctccacctcatgtctaccctgtgttgttttatgtgagtaatcttacagtatcaaaatctagtaggagtctctttactcagcacttgctcaaagttctcagctgaggcttttgttgtagggagacaccatgtctttgcgggatgggtccttccttcagccctgggcaccaaggtgtgatagtagccatagaaacgtggaaagcgaggagaatcttctgagcacagggagggargggcagttccacatcctcctctctaaggcggcgcctccttctccccaaggtggtcaggacaagcccttgctgtctgcctggcccagccttgtggtgcctctaggacatgtcattcttcggtgtcactcttatcttgggtttaacaacttcagtctgtacaaggaaggtggggtgcctgtccctgagctctacaacagaatattctggaacagccttttcatgggccctgtgacccccgcacaacagggacatacagatgtcggggttcacacacacactcccccagtgggtggtcagcacccagcaaccccctggtgatcgtggtcataggtca

SEQ ID NO: 652485 - DNA, 605 bp, Homo sapiens
ttcaggcatccgctgatatccattcacaaaggacatgccctccacctcatgtctaccctgtgttgttttatgtgagtaatcttacagtatcaaaatctagtaggagtctctttactcagcacttgctcaaagttctcagctgaggcttttgttgtagggagacaccatgtctttgcgggatgggtccttccttcagccctgggcaccaaggtgtgatagtagccatagaaacgtggaaagcgaggagaatcttctgagcacagggagggaggggcagttccacatcctcctctctaaggcggcgcctccttctccccaaggtggtcaggacaagcccttgctgtctgcctggcccagccttgtggtgcctctaggacatgtcattcttcggtgtcactcttatcttgggtttaacaacttcagtctgtamaaggaaggtggggtgcctgtccctgagctctacaacagaatattctggaacagccttttcatgggccctgtgacccccgcacaacagggacatacagatgtcggggttcacacacacactcccccagtgggtggtcagcacccagcaaccccctggtgatcgtggtcataggtca

SEQ ID NO: 652486 - DNA, 629 bp, Homo sapiens
cttctaaaatggcaaacagttttttacctgtgccatcatagtctaggaactataaaatgaatcacgaagaccaaaaagaaaaaawtgaataagcattttccctgcaattttttcaccaacttgttatcaaaaagcaaatagcttagctggcattcaccacaagggttatggcatgattttagagaagagatatatctggaaatgaattttttctgaatgttttacacctaaatttatgagggatattgacaagcagggcaatcggtcaggaataagtgaaacaaaggatactttgctgaattcaaggatttactaaataacttcactgaggcttgctatgccctttctcatcaaagaacaacattcagatccaaatattgtggaacaaagaatgggagtgtgggtttgtttgcagggaaagtaagaggagccatctgcttcacctttgtttaaaaatcatgaggtttgggaactggaagggaccctggagtcatctagctctgagcttcccaacactgaaggaatgaggtgctaatgccagtgagggtagaaatcaaaggcaaacgtggctcagcttccaggacaattctatccatatatagcattactatatgttaaagcaaacacag

SEQ ID NO: 652487 - DNA, 541 bp, Homo sapiens
cctcccattccactggctctgagtgcagttcagcactaggaattgcctaggagttgcattccttgtgacctagaccacctttcaagtttatttactgcctgaagacactttagcccacagtggtgaggcttgccagaattcaagttcagaccactgggatggacaattcccatcttgctagggctagtttaatgcattggcaggcatcagctgagttcagcctggttttgcttcctgctrtgacagagcaccactgagctcaatgcattgtctcaccattgctgtaatctccctctcccaagagcacagattatctttctgcaccatatggccactgccagggaatgagagaggaatggtcaatgattcaaaactgtcttctatcctcctcagtgcctctttcagctatttgaagttaaaatcaggtactgtgagtgctcacctgactttggttctatgaagatgattttttgtgtagacagttgttaaattggtgtccttggaggcgggataattggtggagccttctattaggccatct

SEQ ID NO: 652488 - DNA, 455 bp, Homo sapiens
ctcctgggatctttgcctcccaaattcttgctggcggctctgctctycaccccagtggggctgaactaacaagttccccttttgcttttctcaccagaacctgtggtttgccaaccccgggggcagcaatagcatgccaagccgcacccacagctcagtccagaggacccgctcgctgcccgtgcacacttccccacagaacatgctgatgttccagcagccaggtagggcccggcgcttcatgtccccttgacacagaggggaggccaaaatagatgccctagcaaacccagccagaaagtgcttagcctcgactgtcaccgtgcattctttggagcttatagaagcctttccttttttaaactgtgccttgccagcatgaatagcggcggcttggctgagagccagcatgtggagccccagagttggttgcaatcggatggggatatttttga

SEQ ID NO: 652489 - DNA, 455 bp, Homo sapiens
ctcctgggatctttgcctcccaaattcttgctggcggctctgctctccaccccagtggggctgaactaacaagttccccttttgcttttctcaccagaacctgtggtttgccaacccygggggcagcaatagcatgccaagccgcacccacagctcagtccagaggacccgctcgctgcccgtgcacacttccccacagaacatgctgatgttccagcagccaggtagggcccggcgcttcatgtccccttgacacagaggggaggccaaaatagatgccctagcaaacccagccagaaagtgcttagcctcgactgtcaccgtgcattctttggagcttatagaagcctttccttttttaaactgtgccttgccagcatgaatagcggcggcttggctgagagccagcatgtggagccccagagttggttgcaatcggatggggatatttttga

SEQ ID NO: 652490 - DNA, 452 bp, Homo sapiens
ctttgcctcccaaattcttgctggcggctctgctctccaccccagtggggctgaactaacaagttccccttttgcttttctcaccagaacctgtggtttgccaaccccgggggcagcaatagcatgccaagccgcacccacagctcagtccagaggacccgctcrctgcccgtgcacacttccccacagaacatgctgatgttccagcagccaggtagggcccggcgcttcatgtccccttgacacagaggggaggccaaaatagatgccctagcaaacccagccagaaagtgcttagcctcgactgtcaccgtgcattctttggagcttatagaagcctttccttttttaaactgtgccttgccagcatgaatagcggcggcttggctgagagccagcatgtggagccccagagttggttgcaatcggatggggatatttttgatactagt

SEQ ID NO: 652491 - DNA, 586 bp, Homo sapiens
ggtaggatcaggcctatgtaatgaggtgactagaccatgaaacagggtggtcagggtagacccctttgagaaagtggggtgtgagcagagagttgaaggagtggaagttagccaagtgggcatctggagcaaagagtattccaagcagagataaagctggagcaaagatcccaagacaaaacagtgcctgacttgctagggggaaaaacaggaaggcagacttgctaggggaaaaagcaagaaggctggtgtctgaaagggattgaacgaggtagacagtggtcggagaggctggagacagaatgggcattgtaggtcattgcaaggacttggacttttgctgtcaataaaccagaaagctattggaggatttccaacagaaaagtgacatgatccaactcacattttaaaaggttctctttggctgctgtcttaagaatagatagggcaaggacagaaacaggaaaaccagttaagagkctgttgcagtaatcaggcaagagaagatggctcaaaccaggatggctacagtagaagggtgagaagaagtcaggctctagatatattttgaaaatagaaccaacag

SEQ ID NO: 652492 - DNA, 529 bp, Homo sapiens
ctagtatactgaatggcagaatcaaagtccagaacggtcttgggcaatatcaagctgtggttcagagcacacatggtggcgtgagactgacctgggtttgagtcccagttccactgattactacctgtgtgaccttggagaaatagcttaacctctcttggccttgatttcatcaacttaaaaaggagtactaagtgccacccataagcggttgtgaaagtcctctctgggtttacatacagtctttttcttgaagacatccttctattctcctactcccatctgtgttagttaccctcagtctagctttcctagtctaaaatatttgcttctgcagctctagaaaattttcttgaattttcaaaataatttcctctcattaattttcttcctcgctctttaaagaatttcagattagataatagctcctctctattgatcttctaatctccttaatgtttcttctcctattttgttttacttttaatctttctgttctactcacyaggtgattcatataacttgatct

SEQ ID NO: 652493 - DNA, 241 bp, Homo sapiens
atgctctcaccagctgaatttccagactaaragaaaatgtgcctggagctttctgcagctgattcacattcaaatggggcctgaggctgacccctgaccctctctttcctacttacaagggtgaaaatgaccacaacaagaggcaagcactattgcccaggagtcaaaatatttttctggggagtctttaggaattcctgcccaggtatcatttggattggaaccctggttcaaaatatca

SEQ ID NO: 652494 - DNA, 566 bp, Homo sapiens
gctggagttgtgggaacgattgcaacactcaccccttgagggggttttgcttaccatgaaatcacactacaaggacatactgtctcccttgaaatagccttagcaaaaactggtgcaagtctatcagcaatagaaaagtctttagactcgctagcaggaatggtgtttgataacagatgagctctggattatctaatagctgaacaaggaggagtctgtgctgtcatcaacaaaacctgttgcacctacattaatgtgtatggagaagtggaacttccaatgtccaaaaaattttttaataagccaagtggctacacacaccttcccaaagtagccaagactgggccagaacctttactgattgctctccaaaaatcacttggcttctcccattctggacctttattccttgtcattcttttaatatttggtccctgcctttttaatgctctcgttaagtttacatctttgatattaaaacaattccacctacagatggctatgcaatcccaataccagcctgyaacagcaacttccattcacatggggtctcttgatggaattca

SEQ ID NO: 652495 - DNA, 545 bp, Homo sapiens
gatggcccaagcaatatatgaaggatttgcccccatgattcaaatacctcccatctggccccacctccaacattggagattacaattcaacatgagatttaggtggggacagatatccaaactacatcaagcatagtacagactaagagaaaaacttggtcctgtgaagggaagccattgttatgacatctgaaaatgtggaaggggtcttggaactgggtaatgggcagaggcttgaagaatttggaggcctaggctacaaaagcctgtcttgccatgaatgcagcattatggccaattctggtgaaaaactcagaagaaaaggctagggaaagtctagacatttttagagawgacttaagtgcttgtaatcagagtgttgatagaaaatgaacagtaaaggccattctgattaggtcttagacagaaatgaggaatatcatactgaaaactgaagtaaaggccatccttgctataaagtagcaaagaacttgactgaactgtttttgcaccaaaggccttcatggttgataaactaggatacc

SEQ ID NO: 652496 - DNA, 529 bp, Homo sapiens
caagcaaaattattccggaactttaagacctaatgttgtttttctcattgggttgtggacttacctgggggcagttacttttttctttttgtctatcccctgcttcttaaatgggagtgtttgtcctaggccagtcttgtcattttggtcatagataacttgttttaatttcaaaggctcacagctggaataaatttacctcaggacgaattgttccttcagtctcagaggrgactgcacttttgagctggcagtggagcaagttaagacttttggggctattgagatggagtaagtgtattttgcactgtgagagggacataaattttgggggccaaatgtgtaatattatggttttaatatttcccccaaaagtttataagttggaaagttaattgccaatgtaatatgggaccttttagacgtgatgggggtatgagggcagagcccttttgagtggttcaatatcattattgtcagaatgacttagttctgatgggagtgagttagtttatacaatagtgggttg

SEQ ID NO: 652497 - DNA, 588 bp, Homo sapiens
cctgttggcagtctcttggggatgcaagggtttggcccagggctttggcccagtcttgccagatcaagtgggggtaatctcctgtccccatttatatgcagtactcagaggtttccagctgcttccttgccatttactcctggcttcatccctgtgaggttgatgggtaattagcatggattttatagccaccataggagagaaaaggaactaacccagcaaatatgaatttggtagaaaatttaatttgatgcttccttcttagcaacccacatacaatgcaaataattttcatctcctaacctgtggtggaattcaagttctttctgtttcaaataatggtttatcccaagggaagttttcctcattaacaacaaaaaatacaraaatttgctggtgatctatgatgatatttattctatttcatttatttaaatagttatagttggagagaagaacaaaaagtatcaaatcttggatttctgtatgtcaagctactttatagattccatctgactttttgagagagaaagttaacagtgttcatcgagctaactatataattaaatgcttacccactcctttctc

SEQ ID NO: 652498 - DNA, 528 bp, Homo sapiens
tttgatactggttcagaggcaaagctttgtctaaayatttgagatcaactgaaaagaatattagttcttgcccagggcatgatctcctccaggcccctcaggaagaaacaaagaacagtgtattagtccattttcatgctgctgataatgacatacctaagactgggcaatttacaaaagaaagaggtttaattggacttacagatccacgtggctggggaagactcacaataatggcagaaggcaagggcaagcaagtcatgtcttacatggatggcagctggcaaagaggataacttgtgcagaggaactccactttgtaaaaccctcagatcttgtgagactttttcactatcatgagaacagcatgggaaagacttgcccctatgattcaactacctcccactgggtctatcccacaacacatgggaattcaagatgagattttggtggggacaccatcaaaccatatcactctactcctggcccctcccaaatctcatgttctcacattacaaaaccaatcat

SEQ ID NO: 652499 - DNA, 528 bp, Homo sapiens
tttgatactggttcagaggcaaagctttgtctaaacatttgagatcaactgaaaagaatattagttcttgcccagggcatgatctcctccaggcccctcaggaagaaacaaagaacagtgtattagtccattttcatgctgctgatratgacatacctaagactgggcaatttacaaaagaaagaggtttaattggacttacagatccacgtggctggggaagactcacaataatggcagaaggcaagggcaagcaagtcatgtcttacatggatggcagctggcaaagaggataacttgtgcagaggaactccactttgtaaaaccctcagatcttgtgagactttttcactatcatgagaacagcatgggaaagacttgcccctatgattcaactacctcccactgggtctatcccacaacacatgggaattcaagatgagattttggtggggacaccatcaaaccatatcactctactcctggcccctcccaaatctcatgttctcacattacaaaaccaatcat

SEQ ID NO: 652500 - DNA, 528 bp, Homo sapiens
tttgatactggttcagaggcaaagctttgtctaaacatttgagatcaactgaaaagaatattagttcttgcccagggcatgatctcctccaggcccctcaggaagaaacaaagaacagtgtattagtccattttcatgctgctgataatgacatacctragactgggcaatttacaaaagaaagaggtttaattggacttacagatccacgtggctggggaagactcacaataatggcagaaggcaagggcaagcaagtcatgtcttacatggatggcagctggcaaagaggataacttgtgcagaggaactccactttgtaaaaccctcagatcttgtgagactttttcactatcatgagaacagcatgggaaagacttgcccctatgattcaactacctcccactgggtctatcccacaacacatgggaattcaagatgagattttggtggggacaccatcaaaccatatcactctactcctggcccctcccaaatctcatgttctcacattacaaaaccaatcat

SEQ ID NO: 652501 - DNA, 623 bp, Homo sapiens
ttttacccaatagtgtttaattaaataaacctttatttattttttgcaaataagtaacttgtttgcaatataaattacattgttaaggtatctcrtgttaactataacaagttgttcattcactcatttagcaaatattttagtgcttataaggtgccaagcactgaagatgcatgaatgaacaaaacaaaaaaatcttcgtatgcagtgaattatgttagtaggcattcaaattatgtttaacttgggcaaacttagagtttcttccatgtctctgtgaaaagaaagtagaaacttgggaccccaattcactatgccaaaaggggaaaaaaaaagctgaaacctgagtcatggaagaaactgcctttccttttatttctacgcagatagctacagatacaaggttaaatacctccacagatagctactctatattcaccctatcttatgtaaagtgctgatttactgagcatgagaggaatacataattgactattcccctacctgttcttttccccctgcaacatgtgggttatcatacattccttctttcttctccagcccacttttcccctttaaatgttgaaacccttgaaatcatctttggagaaaggcacagacca

SEQ ID NO: 652502 - DNA, 623 bp, Homo sapiens
ttttacccaatagtgtttaattaaataaacctttatttattttttgcaaataagtaacttgtttgcaatataaattacattgttaaggtatctcgtgttaaytataacaagttgttcattcactcatttagcaaatattttagtgcttataaggtgccaagcactgaagatgcatgaatgaacaaaacaaaaaaatcttcgtatgcagtgaattatgttagtaggcattcaaattatgtttaacttgggcaaacttagagtttcttccatgtctctgtgaaaagaaagtagaaacttgggaccccaattcactatgccaaaaggggaaaaaaaaagctgaaacctgagtcatggaagaaactgcctttccttttatttctacgcagatagctacagatacaaggttaaatacctccacagatagctactctatattcaccctatcttatgtaaagtgctgatttactgagcatgagaggaatacataattgactattcccctacctgttcttttccccctgcaacatgtgggttatcatacattccttctttcttctccagcccacttttcccctttaaatgttgaaacccttgaaatcatctttggagaaaggcacagacca

SEQ ID NO: 652503 - DNA, 623 bp, Homo sapiens
ttttacccaatagtgtttaattaaataaacctttatttattttttgcaaataagtaacttgtttgcaatataaattacattgttaaggtatctcgtgttaactataacaagttgttcattcactcatttagcaaatattttagtgcttataaggtgccaagcactgaagatgcatgaatgaacaaaacaaaaaaatcttcgtatgcagtgaattatgttagtaggcattcaaattatgtttaacttgggcaaacttagagtttcttccatgtctctgtgaaargaaagtagaaacttgggaccccaattcactatgccaaaaggggaaaaaaaaagctgaaacctgagtcatggaagaaactgcctttccttttatttctacgcagatagctacagatacaaggttaaatacctccacagatagctactctatattcaccctatcttatgtaaagtgctgatttactgagcatgagaggaatacataattgactattcccctacctgttcttttccccctgcaacatgtgggttatcatacattccttctttcttctccagcccacttttcccctttaaatgttgaaacccttgaaatcatctttggagaaaggcacagacca

SEQ ID NO: 652504 - DNA, 623 bp, Homo sapiens
ttttacccaatagtgtttaattaaataaacctttatttattttttgcaaataagtaacttgtttgcaatataaattacattgttaaggtatctcgtgttaactataacaagttgttcattcactcatttagcaaatattttagtgcttataaggtgccaagcactgaagatgcatgaatgaacaaaacaaaaaaatcttcgtatgcagtgaattatgttagtaggcattcaaattatgtttaacttgggcaaacttagagtttcttccatgtctctgtgaaaagaaagtagaaacttgggaccccaattcactatrccaaaaggggaaaaaaaaagctgaaacctgagtcatggaagaaactgcctttccttttatttctacgcagatagctacagatacaaggttaaatacctccacagatagctactctatattcaccctatcttatgtaaagtgctgatttactgagcatgagaggaatacataattgactattcccctacctgttcttttccccctgcaacatgtgggttatcatacattccttctttcttctccagcccacttttcccctttaaatgttgaaacccttgaaatcatctttggagaaaggcacagacca

SEQ ID NO: 652505 - DNA, 489 bp, Homo sapiens
tgcctttccttttatttctacgcagatagctacagatacaaggttaaatacctccacagatagctactctatattcaccctatcttatgtaaagtgctgatttactgagcatgagaggaatacataattgactattcccctacctgttcttttccccctgcarcatgtgggttatcatacattccttctttcttctccagcccacttttcccctttaaatgttgaaacccttgaaatcatctttggagaaaggcacagaccacagattttttctctgattccatgcttctttccttttttttttttccttccaggcatgccctaagcttgccaaaataaacttctaaattgattgagacctacctcagatggtttttggtttgcaacttctaccacatttcctaccttgtaaacctaccatggcaagtttaaatgcaagcatctgtggcttttaaagcatggaataggctatttgaatagttaaattaa

SEQ ID NO: 652506 - DNA, 540 bp, Homo sapiens
actaatttttaactcatgatcatgtcctgttagctatattctataatatacttggaatctattaatagcagataattgtgtttaagcctactataatccaaatgtgatttaagcacctggttatgcttctataatgcattggaacatgttctgcaaatctgggatggtagctgacctttattttttttctcatccagctcaactccctgtcacacccattatcccaagacctgtaattttatggattatccctctcaccctgtaccgattcttktcttcacatgatccttttaaatgccttcactgaaatctagctcttctcagatgacatctcatgtcttttgtgggaaaaatgatcagcctattttatacttcccaatactacttactaatattataccatcatcatctctgaaatctgtgccatctgattagatcatcattggctgtaataataacttccaccttcctggatgaatcagcactttcttccttcttccctggtttcctgtgatatatgatctttctcaaaacccttat

SEQ ID NO: 652507 - DNA, 450 bp, Homo sapiens
ttatttctgcctagatgtaatacattttaaatataacaatacatttcgtgacctggcttttaagttttttgtcagtggtgccctcattctatcaattgtttagattcaaaacctgagaatatagtttagtcagctcaagttcaacagtcttttaactggaattctttgccccaccgtaatgcattttctacactgtcacttaagaaatcattcaaacgtagaatcatattacagagtttatagccagcccaattcttcagcattttatacaaagcctccatgatttgatgactgcttgcctccagcttcaacttctgctgtttcccacactatcccacacaccaccaccacacgaaaacactttmtttgaccttaattcactgctcatttattcaaacactgtctgaaaacctactgtgaactaggcattatggtaggtattgggctcta

SEQ ID NO: 652508 - DNA, 512 bp, Homo sapiens
tctttctgtgcctggcttatttcacttaacataatgaactccaggtccatccacgttgtttcaaatgacaggatttcattctttttatgcccatgtaatagtccattgtatacatgtaccacatttttttattcattcatctgttgatggacacttaggttgattccatatcttggctattatgaatagtgctacaataaatatgggagtgcacctgtctctttgacatagtaatttcctttctcttggatatctacccagcagtgagatttctggatcatatggtagttctayttttagtttttcaaggaacttccatactgctttttggggttgtttgtttgtttttgagatggagtcttgctctttcgctgaggctggagtacaagtggcgcactcttggttcgctgcaacttctgcctcccaggttcaagtaattctcctgcctcagcctcccgagtagctgggattacaggtgcctgacaccacgcctggctaaattttttttgtgt

SEQ ID NO: 652509 - DNA, 492 bp, Homo sapiens
atgttctgggcatctttgtcaaaaataagttggctataagtgtgtggatttatttctgagttctgtgttctattccactggtctgtgtgtctgtttttatgccagtaccatgctgttttggatactatagctttgcagtataatttaaaatcaaatattgtgatgcytccaacttcattctttttacttaggattgctttagctattcagggtcttttgtggttccatataattttaggacttttcttctatttctttgaagaatgtaattgctattttgacagatatttcattgaatctgtagatcactttgggtagtatagaaattttcacaatattgattctttcaattagtgagcatgggatgtctttccattttttgtgtcctcttcaatttctttcttcactatttcatggttttcattatagagatcttttacttcttaggtttaatttattcctggatattttttggtagctcttgtaaatgag

SEQ ID NO: 652510 - DNA, 492 bp, Homo sapiens
atgttctgggcatctttgtcaaaaataagttggctataagtgtgtggatttatttctgagttctgtgttctattccactggtctgtgtgtctgtttttatgccagtaccatgctgttttggatactatagctttgcagtataatttaaaatcaaatattgtgatgcctccaacttcattctttttacttaggattgctttagctattcagggtcttttgtggttccatataattttaggacttttcttctatttctttgaagaatgtaattgctattttgacagatatttcattgaatctgtagatcactttgggtagtatagaaattttcacaatattgattctttcaattartgagcatgggatgtctttccattttttgtgtcctcttcaatttctttcttcactatttcatggttttcattatagagatcttttacttcttaggtttaatttattcctggatattttttggtagctcttgtaaatgag

SEQ ID NO: 652511 - DNA, 492 bp, Homo sapiens
atgttctgggcatctttgtcaaaaataagttggctataagtgtgtggatttatttctgagttctgtgttctattccactggtctgtgtgtctgtttttatgccagtaccatgctgttttggatactatagctttgcagtataatttaaaatcaaatattgtgatgcctccaacttcattctttttacttaggattgctttagctattcagggtcttttgtggttccatataattttaggacttttcttctatttctttgaagaatgtaattgctattttgacagatatttcattgaatctgtagatcactttgggtagtatagaaattttcacaatattgattctttcaattagtgagcatgggatgtctttccattttttgtgtcctcttcaatttctttcttcactatttcatgkttttcattatagagatcttttacttcttaggtttaatttattcctggatattttttggtagctcttgtaaatgag

SEQ ID NO: 652512 - DNA, 464 bp, Homo sapiens
tgggaaacataattccagtttagcccagttgacacagtacaaacccaccacagaaggtatacagctctttcacccttatgattaaatcttcagcctgatttttggcataatctgtcctatagtcacaagcaatggggatctttccaaatgctgccataggccctcttttcacagtgtaccctgcattgataactggctgatctcttgtcctcaagrtttcaaaagctaaaagaggtccattaactccaaatccttattgatttccaccatccccataccattcaagtcctagagctatcaattaacccaactcttcaccttccattcaattctagtcccaatcccctgaaggtaagagtcttattaactgtgctgtgatgcatgcagggggctattagtacccactaccaccagcaatggggtccttgttgcagtctcaccagtaagtcatccactctgagatc

SEQ ID NO: 652513 - DNA, 594 bp, Homo sapiens
aacacattcacaattgttaatctcaattgttacctattctaaacctttatattccatttgaatttccacagtagtttcctacctggtttcccttcatataatctctatacccactctcctcacagaaataggagtcatcttgttacaaagcaaaactaatctcatcattcttcaactggaaatctttcaatggcttcacatgacactcaatgtctaaactctagaaacccctgcatgaaatggccctggctcccttctcagccccatttcctgtgactctcctgcttgaatgtcacactcaagccagacaccttccttccagtaactccagtgtgccaagccatttcccattgtgttggaagaccatctgtgttgcttcctttgatagaaaggctttgtytccccgctcttcaccccacaacaaccagggcctcagcttcaacacgactgcttcccagaagcttgccatcatcccttttgggttctctcacagaactgtgtatttcttaactgagttcatcataatcgcaatcatagggttagttatttagtgattatgtatttaaggtctctctcttaggtattatacaataa

SEQ ID NO: 652514 - DNA, 594 bp, Homo sapiens
aacacattcacaattgttaatctcaattgttacctattctaaacctttatattccatttgaatttccacagtagtttcctacctggtttcccttcatataatctctatacccactctcctcacagaaataggagtcatcttgttacaaagcaaaactaatctcatcattcttcaactggaaatctttcaatggcttcacatgacactcaatgtctaaactctagaaacccctgcatgaaatggccctggctcccttctcagccccatttcctgtgactctcctgcttgaatgtcacactcaagccagacaccttccttccagtaactccagtgtgccaagccatttcccattgtgttggaagaccatctgtgttgcttcctttgatagaaaggctttgttyccccgctcttcaccccacaacaaccagggcctcagcttcaacacgactgcttcccagaagcttgccatcatcccttttgggttctctcacagaactgtgtatttcttaactgagttcatcataatcgcaatcatagggttagttatttagtgattatgtatttaaggtctctctcttaggtattatacaataa

SEQ ID NO: 652515 - DNA, 490 bp, Homo sapiens
gctgctcgtctttgcacatctgatttgacttaacgttgaactcagaaatctctccattgttctgcagttcayacacttttattagcagatggagaaagtgaaattcacagagacattgggttacataagctttaaagtattactaaaaactacagcctaaatagcccattttccatttaagatgcaaaaggataaccacagaaagggctagcaagcttattttaaggctatgtcttgctcgtgcaattgcatggaagtcagcttgtaggaggggaagtcgtagagttaacagaaatcctacatctcctgctttcaaggaaagattctgttctgctttcactctccaaacacccaaacacctacttatttccagtaatactctggctgacctctagacatctaagctttctatttcaaattctcctacttagaatttctctctctcatatttcttcttaaatggtggcaccttccaaagagctgttattaa

SEQ ID NO: 652516 - DNA, 596 bp, Homo sapiens
agagaaaaagcctgcaaccttgctatggtatcacctgtagtcatcaggtgtgcatattttaagaccaaaaacccatctccatctcccttaagtaatggcctcccagcgcacacaccacccactagcccgcccccagggacagactgtggtgtctgactgttcatctaccacaggggaagtgtctccctggggaatgataaatccagacayacctttccgttgtgaatgtaaaaccaatgaatggcaaatgtaatccagaaaagcctgtgtgagaaccaggaggtaatatttcctgcataagaacatatacaacacaaatgaaatctacattcaaacaaacaggtaaaaagaggaaagatggttacagtcatggtgacaggaggcactgggcagaacatgtggccttggagaatgcggattccatggtgtcctctgcaggggagatgagtatagcagatctgtctttctcaagcctggccctgtacgctgtatgtacaataaagctcacaggagacacactctgatttcgatgatgacagtggcacaggccgtcaccaggttagtgattttcaaagacttcttaaagccacagaatt

SEQ ID NO: 652517 - DNA, 659 bp, Homo sapiens
ggcccaggtgttggcacacttgttctctaaaaggccatatagtgaatattttaggctttgcaggccataactactccaccttgccattgcatggagaagacagccatagacgatgcctaagagtgtgtgtgtgggtgtggctgtgactgtcccctggtctgttgccacaacaatgagtctaggtgggactgggaaggttgggttctgtccttgttcagctgtcagtgggacctgcccagctgtatgttctatattctggagcctgtatattcacccgtggttttttccttagttaagaaatgttttcccagcctgcattatgcttacatatctattaatatttcctttctccattatcatgagttgtttatacaaatgaatagatataagttggttaataggttaactttctagtttacaagtagtttaaacagaagtagaaatgagtcgtttcttacaacactttgtgaacccggggctgggagtctgagactccatgggcygtcctgtctgcccttctgttttcacttcatgatctggcttcaggtggcacagtgttaaagtgtgtcacaccatgtcgagtttgatgttagaaacttaacgttctataccgtcatatgaaaacataagaagggatcgtttccaaattatacatttta

SEQ ID NO: 652518 - DNA, 392 bp, Homo sapiens
tccatgccttgtcctgggtacctccttgcagctgcaggcatttcccccaccccaccatgcaagcttctagctaaccttagtgtgtccctgtccaaaaaaggggaaaggaatgtgctcattaaagcctactgtttttactgggacccatttatgtaagtttggtgactacccaagaaactctccctctgtrccggagatgcttatctacattatacagtccaatcttccaggctgctctttgttaaaagagaagtgatttatttggactgcctgtggttagaatggaagtaatttctgagctgttttttgtcagaagaaaagcttttgtcagggactctttcaccctatctacctacctaaattatttctatctcctgtattgcctctaccca

SEQ ID NO: 652519 - DNA, 572 bp, Homo sapiens
gtttcagctgggcatatggctgcttggttagaaacaaatttccccatgtactcaggggaataatgtgaatatatgcgtataaagggtatgtgagcaaatgtgatgtgtgcaaattctgagtcactttcatggaaaaaaattatgttccttctgtttattgtcattacttgaaaacctgacaaggaagctttggcatgcagacaagggccacaccctgagagatggaggagcaacaagttagcaataatctgggcacctagaagacctcatgaaacaaaaccacctacacacaatccatatccttttggtctgtgatgagagggaaataaactctaccatttgagattccacctctgagatgtctgttagagaagctaagcctatatcctatatcccatgtaatctacccactctgtgcagggcagttggtcccattgcagatatatttagcaactttcagttctgatgaatattgtcacatcctctctctagttgcagcagctccattagcacacaatgagccacagaaccagcaacccaagccartaacagtggcagcacaactccaaaca

SEQ ID NO: 652520 - DNA, 602 bp, Homo sapiens
tgagtcatttaaacctcttttcttcataaactatccagtgatatggtttggctctgtgaccccacccaaatctcatgttgaattgtaattcccagtgttgggggagggacctggtgggaggtgattggatcatgcagatatcccccttgctgttctcatgatagtgagtgagttctcatgagatatggttgtttaaaagtgagtagcactacctccttcactctcgctcattcccactatgtcatatgaagaaggtccttacttcmccttcacccttctgccatgatggtaaatgtcctgaggcttgcccagtcatgcttcctgttaagcctgcagaaatgtgagtcaattaagcctcttttcttcatagcttacccagtctcaggtagttctttgtagcagtttgagaatggactaatacaaaaaattggtaccagagaggtaagacattactataaagatactgaaaatgtggaagtgactttggaactgggtaacaggcagagtttggaacagcttgaaggctcaaaagaagacaggaagatgtgggaaaatttggaactcctagagacttgttgaatggttttatatactgaatgtac

SEQ ID NO: 652521 - DNA, 321 bp, Homo sapiens
ggggtccaggaagcagagatggctgcatgagcacccagtcagtctctgccaactacccaatccacaagacaggaaagaaaggcagcagaagaggctctgggtggaaycaaagtgggcggtcatggggagaggtccttctcactcccccactgtcttccacattgtactatagtgctaagctggaccccattttccttgtctataaattggggtaagtccacctgtccaaactacccattgtccagtgcttttgctgtcccaagcatcccctcagcactttccatatctgttcaaaccagcccaactttcaagcagcagctc

SEQ ID NO: 652522 - DNA, 579 bp, Homo sapiens
cttctacactttcctggctcatcccctcactgttggatcctttcgcccaccttggatggcttctcctttgctgcttgactcccagtgggggagtcccttggtgctgrgtcccggttcccttggtgacactctcctgttgagtccatctcatccatggcattatatccccaccatgcaccaagagtccctcagtctctatcccttgctctgccccctctttggaactgtagacatgtacactcaacagaataagtgacagctgcacctgggaacctaacaatactcaaattccacaagtgcctgacagaacgttccattccagctgccaccttgagaccagctccttcttcatccttccctctggaaccatgaagcccccaaacctaggactttgccttgatttctccctttccctcacccacctctcacatccaagaccttatcaactcttgccttcaaaatgtatccccaagcaaccagcttctctcatttccttcctcagctctgtgtccaagcctttatctggtctcactgaatggctgcagatgcctcctcactgctctgcctgcctccacgctt

SEQ ID NO: 652523 - DNA, 579 bp, Homo sapiens
cttctacactttcctggctcatcccctcactgttggatcctttcgcccaccttggatggcttctcctttgctgcttgactcccagtgggggagtcccttggtgctgggtccyggttcccttggtgacactctcctgttgagtccatctcatccatggcattatatccccaccatgcaccaagagtccctcagtctctatcccttgctctgccccctctttggaactgtagacatgtacactcaacagaataagtgacagctgcacctgggaacctaacaatactcaaattccacaagtgcctgacagaacgttccattccagctgccaccttgagaccagctccttcttcatccttccctctggaaccatgaagcccccaaacctaggactttgccttgatttctccctttccctcacccacctctcacatccaagaccttatcaactcttgccttcaaaatgtatccccaagcaaccagcttctctcatttccttcctcagctctgtgtccaagcctttatctggtctcactgaatggctgcagatgcctcctcactgctctgcctgcctccacgctt

SEQ ID NO: 652524 - DNA, 420 bp, Homo sapiens
gcattatatccccaccatgcaccaagagtccctcagtctctatcccttgctctgccccctctttggaactgtagacatgtacactcaacagaataagtgacagctgcacctgggaacctaacaatactcaaattccacaagtgcctgacagracgttccattccagctgccaccttgagaccagctccttcttcatccttccctctggaaccatgaagcccccaaacctaggactttgccttgatttctccctttccctcacccacctctcacatccaagaccttatcaactcttgccttcaaaatgtatccccaagcaaccagcttctctcatttccttcctcagctctgtgtccaagcctttatctggtctcactgaatggctgcagatgcctcctcactgctctgcctgcctccacg

SEQ ID NO: 652525 - DNA, 420 bp, Homo sapiens
gcattatatccccaccatgcaccaagagtccctcagtctctatcccttgctctgccccctctttggaactgtagacatgtacactcaacagaataagtgacagctgcacctgggaacctaacaatactcaaattccacaagtgcctgacagaacgttccattccagctgccaccttgagaccagctccttcttcatccttccctctggaaycatgaagcccccaaacctaggactttgccttgatttctccctttccctcacccacctctcacatccaagaccttatcaactcttgccttcaaaatgtatccccaagcaaccagcttctctcatttccttcctcagctctgtgtccaagcctttatctggtctcactgaatggctgcagatgcctcctcactgctctgcctgcctccacg

SEQ ID NO: 652526 - DNA, 420 bp, Homo sapiens
gcattatatccccaccatgcaccaagagtccctcagtctctatcccttgctctgccccctctttggaactgtagacatgtacactcaacagaataagtgacagctgcacctgggaacctaacaatactcaaattccacaagtgcctgacagaacgttccattccagctgccaccttgagaccagctccttcttcatccttccctctggaaccatgaagcccccaaacctaggactttgccttgatytctccctttccctcacccacctctcacatccaagaccttatcaactcttgccttcaaaatgtatccccaagcaaccagcttctctcatttccttcctcagctctgtgtccaagcctttatctggtctcactgaatggctgcagatgcctcctcactgctctgcctgcctccacg

SEQ ID NO: 652527 - DNA, 420 bp, Homo sapiens
gcattatatccccaccatgcaccaagagtccctcagtctctatcccttgctctgccccctctttggaactgtagacatgtacactcaacagaataagtgacagctgcacctgggaacctaacaatactcaaattccacaagtgcctgacagaacgttccattccagctgccaccttgagaccagctccttcttcatccttccctctggaaccatgaagcccccaaacctaggactttgccttgatttctccctttccctcacccacctctcacatccaagaccttatcaactcttgccttcaaaatgtatccccaagcaaccagcttctctcatttccttccycagctctgtgtccaagcctttatctggtctcactgaatggctgcagatgcctcctcactgctctgcctgcctccacg

SEQ ID NO: 652528 - DNA, 539 bp, Homo sapiens
aaaacctccccaagaactctatcaaggagttttgcaataaaaagaacaaagaaatggggccacagtgggagagaagtgtagggttgaatggctcattttcaaaatggaagggagtcactccatgttgatcttggatgtatgtgatgtatgtatcatgtatcatggctataaagtatgactaccatgtatatcatgggtagaaagagccctggcccatactcagaaaccctgagtcttctcacttacagactggagaccacaagaagatggggggctgcaagggttcctagaggacacttaattacatgtcttttttagagatggataaactgagggctcagtgggtcatgacctgcccagagtcatggagggagtgagaggcagagccaggatgagctcccaggccctgaaacttctgrgccagtggcctacacacagagcttcccacccttcctcattgggtttctgcaagccctccccaccccagcactctgcagggcctgggaagtgaaccaggtaagctgcagacctaaggcctt

SEQ ID NO: 652529 - DNA, 512 bp, Homo sapiens
tggttccttaggaaaaaacgtagacaaagaaaaatrttgtattatttgtggaaatcaagttcgtattgcaggtgtaagaaatgtctttgtgggttgacagcatttattgaacatgagcctttatttttggagctcctccaacgtaccatgcactgtcaccttaacagttcctcacagtgaccccatagagtcaagagtcaactgcatttttgcagaagcgaggctcagagaggttgagggttgtcctaggtatccaggtagcgagcaacagagcaagaatttgaactcgggttgtaactcttcattgtatgtgtcaacttgactgtgcaaagtgatgcccagatagctggtaaagcactctttctgggtgtgtctgtaagagtgtttctggaagagattagcatttgcatgggtagactgagtaaagaagacctgttctcaccaagtaagtgggcatcatccaatccactgagagcccagattgaacaaaaacacagaggaaagtcgaattc

SEQ ID NO: 652530 - DNA, 512 bp, Homo sapiens
tggttccttaggaaaaaacgtagacaaagaaaaatattgtattatttgtggaaatcaagttcgtattgcaggtgtaagaaatgtctttgtgggttgacagcatttattgaacatgagcctttatttttggagctcctccaacrtaccatgcactgtcaccttaacagttcctcacagtgaccccatagagtcaagagtcaactgcatttttgcagaagcgaggctcagagaggttgagggttgtcctaggtatccaggtagcgagcaacagagcaagaatttgaactcgggttgtaactcttcattgtatgtgtcaacttgactgtgcaaagtgatgcccagatagctggtaaagcactctttctgggtgtgtctgtaagagtgtttctggaagagattagcatttgcatgggtagactgagtaaagaagacctgttctcaccaagtaagtgggcatcatccaatccactgagagcccagattgaacaaaaacacagaggaaagtcgaattc

SEQ ID NO: 652531 - DNA, 530 bp, Homo sapiens
ctggtccattatcctagaaaattctatactagtcctttcagcaaactgtgacacaatctggatagccagctttactgatgggcaaaggtttccaaatgctaagaatcgtgtctccatcaaggctttccctctggcatttatcctacttacagtcatttagggggcctttgccactaagctgagttccccccacactgtcacagttgttctgctgaaaccatctccccacatcctccaagcactatctgaatcattgctggactgggtcccaccttcccagggcctcacggtgtgaattactacatcagttaaaagacaataggaggccgggcacagtggttcatggctgtaatgccagcactttgagaggccaaggagggaggatcacttgagcccaggagttcgagatcrgcctgaacaacatagcaagactccacctctatctaaaaaaaaagaaaaaagaaaaaagaaaaaagacaataggagcctcacacaatcactcacaaaagaaaggctcaccggccaactct

SEQ ID NO: 652532 - DNA, 428 bp, Homo sapiens
cttcttggcttccacaattgcatgagccaatcctttataataaatgtatatccatctgtatatgtcttgtgtctgtctctctacctatcaatctatccatccatccatccatccatccatccatccatccatccatctatccatccatctatctattttattgtttctgtttttctggagaaccctgactaatacagaaggtgagcccaacttctcactgaggattctcaagcctcagcctcttgaagtgctgagattacaggcatgagccaccgcattcagcctctgattgtcattgacagtgatgtgctctactgtgagtctcttttacccactgtgctgggtattcactggccctttcaacttggaaacgcgtgtcctttggctttgcaaaaatatctgtarcattgattgcctgatttctctcc

SEQ ID NO: 652533 - DNA, 482 bp, Homo sapiens
atattgggccttagaggtcatctagttccgcttcttcacagtgtggccatttgtgcattacggtcatgattttgactatatctgccatgcagacacatctacatcttttctaattaatattctttaatttgacccatttaaacttgtttattttaaaagaagttttttttttctttttacctttttcttttttttcttatagctagattaagaaatatatttttaccttaaataaaaaaacagggtcaggatcaattgccatatatyataagataatgaacataaacaatgtttaactctatctggataatggtgctggtttacacctggggcctgctcatggttagagacagagagaggctagtgttggagagctgttaaaaacagattagcatgtcactgagatgttcacctagacaagatccagaggttctcaaccatccctgtgcatcaggatcacctggggagctttaaaaagctac

SEQ ID NO: 652534 - DNA, 618 bp, Homo sapiens
tctgctgtggagactcagtttccccatatgtaaaagtataagcgtaaatcatctctgaggctcaggctggctccactgcagctgtgactcctaaatacttctccagcgcccacacacaatctctctgggcatgtacatgagcgtttgtttcctagtctctgaaagctgccttacccatgtaaagttctctcttattaggtccttactaagccctgccccatggggaggtatcaccaaccctgttagatgggaaacaaatggattcacagtgcagcaactgaccaggaaatggattcacagagcagagggtagagagcaagggctgagacctgggcccaggtctccactgcccaggggagcatccatactgggacacagcaaccgtgcattaggaaaaccaccatctgaagccaagcagtcctggaacacaggtctctttgagccctgttgtctgtgacaggcacttctgcagagggaaggcaggaagaatatctttgatgagagaagaagatggccaagaatcaaaatgtgcagcacttggycgggtttggtggctcatgcctgtaatcctagccgaggccggtggatcgcctgaggttgggagttgagaccaagctg

SEQ ID NO: 652535 - DNA, 625 bp, Homo sapiens
ttcgttgcttatttaatctccttgagttcctctcgagaatactctaaaaacagacttcctccatgaggtcaggctagaactgatggagttgcccctgctccccttccccagaggttttggaaggggaaggaaagctgtagccccacgcccccaycctggggactgccccatcagattagagcactgctcctcagcagtcacccacctcaccgtgttagagaaaagaaaaatagattattctcagaaaaaggttattacattaattgtctgctacatcccatgatacctttatgtcttctgtaagctaagggaccttaggatctaagaggaggttaaaacacatccatttgagccatttggtttagaaatgagggaagcaggagcactagaaggatctaccttgccctgtagacagagtcaccatgaataagtcacttcatactgcctctggatggatacaggccgtggaccagaggccgggtctgcaaaattgtcccttgccatcacatctagtgaggagtgtgatacgttttcacaattttgcttcttttggcttttccttgaatctgcctgtgtgcccttaggtttcatctgaaaagcgaaatgatgagaaacttattgatgg

SEQ ID NO: 652536 - DNA, 493 bp, Homo sapiens
tgaccacacgttgcacaaccaacgttcaaaagttgaatgaactgggctatgaagttttgcctcatctgccatattcacctgacctctcaccaactgactactacttcttcaagcattttgacaactttttgcgggaaaatgcttgcacaaccagcaggatgcagaaaatgctttccaagagttcgtttaatcccaaagcacaaatctttatgctgygggaataaacaaacatttctcattggcaaaaatgtgtaatggttcctattttgattaatgaagatgtgtttgagcctagttataatcatttaaaattcacagtccaaaaccacaattacttttgtaccaacatatatatatatatcatatattttatatctatatatcatttttaatacatattctgcaactttgctaaacttgtttgttagctctaatagtttattttttgcatggcttctttggggttttctacatattaagatcatgtaatttt

SEQ ID NO: 652537 - DNA, 626 bp, Homo sapiens
tcacagtgcaggggtgaggatccagtgagaggctgcctgggaccctgcagaggaatacactatgcatgatacagtattgcagttataatcctttccatggcatygcgcagtgctttctcacacagaaaggactgcctcttgtttaactcagagggaagagtggactagtgatgacggactcacctttctgacacttattcccagagaaaggagccaggcagctgcatgtgaaggtgctcccatggacgaggcagtccccaccgtgttcacaggggttgggctggcatggatctaagacacacaggaagaaggcaatgttggtaaggaaaggcaggtgagaagcgcccccctccaaatttttcatcaaatttcagtctcctgccccaaatgagagagtaactactgagccagaaactggggaaaggaggaaaacatatgttgtccctaaacagcaaggaaaactgcagtcacctgaccagagagagggattcaggttagtgagaggagaggcgagaaggaaccacgactgtctcccctcggcctggctttggacggggcctttctcattgagaaactccccttttccctcatcagtgtttttctcctcccagtcttgctgggagtgc

SEQ ID NO: 652538 - DNA, 469 bp, Homo sapiens
ggagcttgcagtcagccgagattgcgccactgcactccagcctgggtgacagagtgagactccgtctcaaaaaaaaaaaaaaaaaaaaaaaaaagctttctagacaggaatcaaaacgacgaaattaacaacagaaacctggacatcctataagaataggaacacttagaattcygaatccaatgcttcagtttcatcatgattgtactttgcttattgaaagtagagtgaggagtctctacggtctaaggattgaatctaaaatgttaaatctgtatggctgtttgaagccatctttgaaagcagagtcctatgacaatagtgctgaaatcaagaagaaaaaatagtgcttttagtgtttacagactattatctgtgtaatgtgaccagtttttgtagaggggctttggagtaatagtcccatcaatggacagtggtcatttcccagcctttaattatttctgttcat

SEQ ID NO: 652539 - DNA, 591 bp, Homo sapiens
ggtggaagtgtttttaaaggagcttatgaagatttggaaaagattttatttttaatatcccagattgcatcctctgcattgggttggttttgttacatgtgctccatctgtctcagagatatgaaaactcagtagaggaaaaatggaaagggcaaaattgtttgccttgttttataaaatttctgaaaattatttcatatgtaagctctagtgcatggattccttcacttctaacttccacaacactacccaggtgcctgtcaatctgccaaacgaggtgcattggctccaggcgcttgtgcctttcaaagcagggaaaggggatattgcttagttgtctcctggttggaaagttcacaggatggaaagccttttacccagccactrctttgaaagagatcagtaaggcttcttatcacttcaggtgaatttaatgaaatgcacatattagttcttttattatgaatttcctcaaaggagaatataatcaatttacttgcaggctacagttgatttgggatttatgatctctttcttcaatgtttcaagctaagtactggattttttaaaatatgaaaaaaaatttctctc

SEQ ID NO: 652540 - DNA, 591 bp, Homo sapiens
ggtggaagtgtttttaaaggagcttatgaagatttggaaaagattttatttttaatatcccagattgcatcctctgcattgggttggttttgttacatgtgctccatctgtctcagagatatgaaaactcagtagaggaaaaatggaaagggcaaaattgtttgccttgttttataaaatttctgaaaattatttcatatgtaagctctagtgcatggattccttcacttctaacttccacaacactacccaggtgcctgtcaatctgccaaacgaggtgcattggctccaggcgcttgtgcctttcaaagcagggaaaggggatattgcttagttgtctcctggttggaaagttcacaggatggaaagccttttacccagccactactttgaaagagwtcagtaaggcttcttatcacttcaggtgaatttaatgaaatgcacatattagttcttttattatgaatttcctcaaaggagaatataatcaatttacttgcaggctacagttgatttgggatttatgatctctttcttcaatgtttcaagctaagtactggattttttaaaatatgaaaaaaaatttctctc

SEQ ID NO: 652541 - DNA, 399 bp, Homo sapiens
gaattcttaaaaaatagagttatcttgactgaagttggaaagaacctgagttttatttaagtaaatagtcagaactaggatattactttgttgaaaaggtaaaagcattttctttatggccaaggatattctataacttagatgtatgtaatctcaccttgggatttcttctcatcacaattctagtttgataatgtggcacctattgacatakaacccccatgtaaatacaaaactggtaaatttgtagtttgttctgctatgggatgggtctgtttggatgtcattacaaaacactgcctagaggtttaatataggtgacagataaacttccaaatcaaatttacaaaagcagcaaacttcattagttattgaaacagtggacaaaaaatcatatca

SEQ ID NO: 652542 - DNA, 593 bp, Homo sapiens
attcaagtgaactaattgttagcgccagcagactgcatggtcagagcttccatgctagctggcaagctttagacaacctgccccgatggtgcaatcggtcagcgtggccaagctgattcgttctacttcattcagcttagatggcccccatcatagctagactggagggctgcagcaagaggcactaaatgaacacgaygtctgctacaaaaccacctccctgttttacatgaaactaaatgccttttacacgagttcctcaaaaagcaactcaattaacttcactggtgcaattacatgaggtgtgacgggaagaatattcccagaagcttgctttagtcccagcgagttttaggtaatgcttagttgcctagagaaaggggaagacactatttcaacctttcagacagtgaggtttaaaggagccactgactggtttatatgaatcatacagcatctcagggaacctccactcactaaagcatctcatctctttatgcctggttaacctgtgttccgtctctctcacctacccatactccaggctttccattttgccactgtccttaggatcagtaaaaacttggagacgt

SEQ ID NO: 652543 - DNA, 576 bp, Homo sapiens
aaatatgactctgttctgcccggccctgcaggcagtcaggccttatggttatctccttgttccctgaaaatcactgttatcctcttcttttaggatgcccagatttcatgttgttcaaacacacatattttacaaacaatttgtacagataacacaatcatcacaggatcctgaggcgacatacatcctcagcttacgaagatgacaggattaagagattaaagacaggcataggaaattataaaagtatcaatttggggaactaataaatgtccatgaaatcttcacaatttatgttcttctgccrtagcttcagcctgtccctccgtccggggtccctgacttcccgcaacaaggaaggaaggaaagaaggaaggaaggaaggaaggaacggagggagggagggagcgaggggtttaattgactcaaagttctgcatggctgaggaggcctcaggaaacttataatcatggcagaaggggaagggggcacatcttacagggcagcaggtgagacagaagtgagagcacaggaataaaccaccatttacaaaaccatcacatctcgtgagaattc

SEQ ID NO: 652544 - DNA, 553 bp, Homo sapiens
taacaatcactgaaattgtacatcctgtatcatacttttattgacacattaacaactcaagttatctttaatttttcaggtacaaagtatctcatggacttagggtcctaggaaagggacatgatggaattatttacttttggaatgctccatatgagagctctattgtagaaagtgtagcataatggttaagagcatgagccctagagctacatgcccagctgtatcagctgtgtgatttttttcaagcatacttaacttccccatgactcagtttcttcatctgtaaaatggataaatagttgtttcataaaaagttgtctggattaaataagtcaattcaaataaaatgctttcrgaagtgtcttgaataaacacagaacacatagtacccattgttatagttaacctatccctcatgcctaagattactccctggaagcaaattaagtgattttgaggggacaggatctcttgtgccatactttcattctttcaccctataaattacccttactctcaatacaatcattgatttcaaaggagatcataa

SEQ ID NO: 652545 - DNA, 544 bp, Homo sapiens
acagtatttcccccaagattgggaaggggatataatattgagatttctttgagaggcaggaatctgcaggggcagagtaggccaatatattttcaaagtagccactacttagagagagagagagagatttgacataccacactcaaaagtaggaactgggaaaatcaagccatctcctatgtatctcctaataatttgagactctttaataaaagaattccatttctttgaattcaagctagcttcagtatgccttttgtacctattagtatgaacttaaatgggaaaacacaatacactttataaagtcacatgatataaatcatagatgcccccacctccccagcccacttcacttttagttgtaaccaaaatactagttataataggcattacagacrtagttactattaataccaccaggcctcccatatcaccccaacctcagctcacatgtaattgaactataaataactatttcatcaactttcaagctgtctaggaatgggccatatctctgaatcatttatactctaatatgtca

SEQ ID NO: 652546 - DNA, 519 bp, Homo sapiens
aactgtacttgcatgtttgttacagcattattcacaatagccaagatttagaatccacctggggttcaacaacaaatgaatggataaagaaaatgtggtatatacaaatggaatactattaaactataaaaaaagaatgaaatcttgtcatttgcaacaacatagatggagctggaggacattatgttaagaaaaataagccaggaacaaaacattaaacatcacacgttctcacttatatgtggaagctaaaaaatttsatctcatagaagtaaaaagtagaatacaggatactagaggctgggaatgatagggagaagggagggataaggagagatttgttaaaggttataaaattacagctagataagaataagaagttctagttttctatatcactgtaggatgacaatagttactaagaatataatttcaggccacacatggtggctcacacttgtaatcccagcactctgggaggctgaggagggtggatcgctggagcctggaaattagaga

SEQ ID NO: 652547 - DNA, 559 bp, Homo sapiens
gttctagttttctatatcactgtaggatgacaatagttactaagaatataatttcaggccacacatggtggctcacacttgtaatcccagcactctgggaggctgaggagggtggatcgctggagcctrgaaattagagaccagcctaggcaacatgatgaaatcccatctctaccaaaaaatacaaaatttacctgggcatgatggtatgtgcctgttgtcccagctaatcctgaggctgagatggaaggatcctttgagcctgggaggcagagactgtagtgagccaagattgtgctaccacactctagcttgggcgacagagaccctgtctcaaaaagaaaaaagaaaaaagaaaaaaaaataaatataatttcaaacagcaaaaaaaagacactgaatgtttccaacaccagaagaagataaatgtttgagatcatggatatgctaattaaccagatctgatcaccaagcattacatgtataaaaacatcaccatgtaccccatgaacatgtacaataactatttgtcaattaaaaaatttaaaagaggaaatgt

SEQ ID NO: 652548 - DNA, 536 bp, Homo sapiens
caacatagtaagactctgtctttacaaaaattaaaaaaaaaaaagttagctgggtatagtggtatgtgtctgtagtttgagctactcgggaggctgaggtggaaaggcctcttgagcccaggagttcataaggcagtgagtcataattctgcctgtcagcctgggtgacagaaccagactctgtctcaaaaaacaaaaaagaaaaaagaaaaaaaatgaagaataattattggagtctttaaaaatctatgggaataatcaagagtaccaccatacacattacaggagtcccagaggagaagaaaaataaaacagtggaaaaagatgttgaagaaataaccaaaagctgcccagatttggtaaaagacaggaacctatgcacccaagaatctcaacaaactccaagaaggataaatatraacagttccacactgagacacattataatcaaattgtcaaaagacaaagacaaaaaaaaatcttaaaagtagggagaggaaagatttgtcacatacaagtgattctcaataataaga

SEQ ID NO: 652549 - DNA, 488 bp, Homo sapiens
cctgcctgaaattgtttttactcaatatatgattttcaatatatgatttcatggacctggaatgatgaaccttctaaagaaataactcagtgataatataggtaacataaggttgtatttgacagcatgaatagtgaagccaaaatttatttagccaaactacataaaagacattctcaagaaactcactagaagagacacaattcacattcaaattacctactttcaaatccttgctccaccatataagggcctagtcactttagacaagctacytaaattctttgtgctttagttttctcatctataaggctaacataacaatagtgactacatgattgtgctactgtgaaaattagttaatccacatgcagtgattaaagaagtgcatggaacgtgataaatgcttaataaatcttggccactatttctggctattgattaaatttcttcctttagtttaaagaaatctcgttagttcaaaaaag

SEQ ID NO: 652550 - DNA, 439 bp, Homo sapiens
tgcaggttgaggagagcacttaggatgtaagctttcgagtcattcattcattcgttcattcagtgaatacctgttgaatgcctgtatgtgtcaggcactgtgctgagctctgggtctgagtctcagctctccccctttctcactgtgtggatgggctaagtgatttcctctcttctcccccagtctcgacctttgcaacctgaggattaatcctgactcacagcgtggttgtgaagattaaatgacaaaacaaatataagatcattagcatagtgtctggcacatactagttgcacaataaatgatagccactgttgcaggatttaggtggctgagatggtacaaaagaaaatcaccaatgtcagtgggaggaacaggttgttttagtgttttaaagtgaaatgatggktagagtctaaaagaggaaagattatagtta

SEQ ID NO: 652551 - DNA, 520 bp, Homo sapiens
ccgctccccaacttccaagaaaaaaaactaaaggaaggggaaattgtatttttactattggttgaaaatggttcggagtatcacttgacttttaatgaaatctggaaattcacttaactccaactgctttgtcttcccacacatttcgaatgaatgttaaaaggaaaatacctctgtagaaacagggctatttttagatttcactcatatatttgggtttcatcactcagattcttttccctcagggccagagagtcgtatttgtgtgttctgtgcttgatggctttttcttattctccactcagaaccacctggaggccagcacactcagtccacatgtccayttataatctgaataaatcatgtattttccttgcctaccttttccctctgcctttcccccaagtgttgtagatcaaaaggttactttgttttggacttagctatggttttaaataatttatttcacctggattctagtggcagtccattggtagaatggatactctgtttccgtctt

SEQ ID NO: 652552 - DNA, 444 bp, Homo sapiens
tttctgtcacgtgaacagcacaaacttcctaactcgagaaccttgttatattggctttagggatttataccctaaacccatggttatggtattacgtgacacagaacagttgttgccagctttttaggatcaaaacttggaggtcctcttctttgctgcttacatgcagagttgggcatagtgtttctggcagggcttggagaaagcctgttaattacatgctggttgaggcctggtttggcctgagggtatgcatggacttcacctgggtgccctcctcccttatctagggagaaagtgggcagttctggcttccactctgtgtcccctgcctatgctgaggcagagagagcagacagaagtagaaagtgttttcaggrtgctaatggcttttttgaacatttgcatattggtttccctgtgcatagatgctctcattatttt

SEQ ID NO: 652553 - DNA, 618 bp, Homo sapiens
tatatgtatgtatgtatgtatgtatgtaggagagagggagggagggggagagatcttcctttgacagtgtagcattttttgataacttgatgctgtaggaaaatgctcagaacagtgtgaagatatgcaatatatcacaaagaatagttggaatgtagatatgggcttaaatgtgtgcagtgctaaaattcctatggagtaaatgtgaactgctgccaagatacagtcaatttaaaggtgacagaagatgatctcayatccaggacttgatcagttattttggccctgagaacaactgatggtttatgatataggctgatattgacataagtggttttgcttgctgatatctgctgtacttctgaatagaacattgctttgttcctaaaacagtagggttggcagtagactctcatttcagtggcattatacatttctttgtactggttgaagtcctgtctgcttagagacagtaagatggtcaaaatgatttcttaagtttccttctaatcctctgattcattaaacacatccaataaagcttaagatacgaccataaaaccattttgttccttctaattctgaatgtatattgtatcttaccaagatcattccaaa

SEQ ID NO: 652554 - DNA, 549 bp, Homo sapiens
gaggtgaatgacataggcatcacgaggtagtgttagctactatgaccttgagatgaatgtcaggaggaagaatatctgctgcgggtgacctggctcatggaaccatgaggatgctgattgttagatattcatgactaatgatcaaggaatgtatacagcctgaatatgctggacaaagggtgattcatggcctgcacaggactaagtgagatttcattgcaatacccagaatgacacacaattttaaacttaggaattttttatttctggaatttattcttttagaattcttaatttatacttttggaccacagttggctagaggtaactgaaatggcagaaagtgaattcagaattcagagaataagaggacactactatacttttctgtagagtcagtattagggggaaaaacaaactgaaaaggttcttaaggacttcttgttaatattaacatatcacttaattacaaagggaccttggggraaacattgcctgttgcttggcctaaatggaatacacactaatataatttatgtaactttcaaa

SEQ ID NO: 652555 - DNA, 599 bp, Homo sapiens
tttgtctaatctgtgtttaagtgaaatttgtagtagttgatggattaactccatttaacaagggtttgtgttgcaaaatagttgrcctccttgaaaaattaaaaacagagtcagggttttaaatgctgagtcacacactcagctggggtggcagaagttgtgtgtcagccttctgatattaaagacagttaggaagcctgacccagggagggtcagggaagattcttgcaagatgggcttttgctgtgaactctgcacaaacatgttcctttgactgaaaagaaatgacgggaccaggtaagtttaaaaagaaaaaaggtggctacttgaatagacggtacttttagtaagaacaagcaaacacttgatactttactcaaaagttgagaataagcccttagatggagtctaagtcatggaagatttgattgaagcaactcatagattagaatggaatcagcaacctaatagggaaacagtttttgcaaaaattacattggcaagggaaatctgacttaactgactccatcttgcttctacttggctaaattgctcttgctcattcttgtgcagaggccatagtggtcctttccttgaat

SEQ ID NO: 652556 - DNA, 489 bp, Homo sapiens
gacttgctatgtacaaagtagcctcatcggtttgaatgcttaggaatttttctagggaacaaaacattatcaaagacagcaaaattaagggaaactgagtgagattattaaaatagatcatattaatgccaaaatctcttgtacaaagagaccacttatatatttattcactgagcaaatattcattgttacctattmtgcacagctagagaatgttagctcaaagttttcaaaccatttttttaaaacaaagatgtttatatatcctctacagattcctaaagttggatcttattttcttggttaattgtatgtattgatggggaaaattttttaaagtcatattcaaatagatttctttgattcgctggagaataagaattggacatttgctccaggccaattgttcatcttatcgataaatacaaaatgatgtcactcaagttgtgggataaccccccaacccaccctcaaagtttaagaaaacag

SEQ ID NO: 652557 - DNA, 552 bp, Homo sapiens
ctagttgggtgtaatagggtccattaatatttgtcaagtatgaactacagaatagctcaacttacttgctttatttaaaatatagacaataattgtactgtttacatatggtcagaatgaagccccatagtacctgtttcaatgaaaagataacttgtttttaactgtctgcatatactattattttggtaagagaattttgttttctagtgctaaagatgaaatagttgtgcaagtgtgtgtttctcattttgggaacagtcaggttaattcatttaacttcttgagattaagataacaataattcagaaggagaaaccagaagcatcttctgtcagtccagtaatgtcatcatttccagtagtggagaatgaaaataatcagcattattattgcccaaatcaaatagcgtgaaggtacagagatactagttccttctaattcaaattctaaatgaatatctaaagaattactgaaattgtaaaacccgcaatctgatgaggtttgggrattggagttttttttattcctgtggcatgagtttgcaaactg

SEQ ID NO: 652558 - DNA, 581 bp, Homo sapiens
acatctttgcagcacctgctctgtgccaggcctgtgctcatgagcacagcgaggagagacaggggcatcaggctgccctagctgggcagaggaggctcttgccagctgttcgcgtgtgtctctggggcatgctcaggttgggtgtcgcctccctgtgaaactgcacgccatgtcctctcctcctaagatttttgcctggtgtcttgatttgccaggatgcataggttcctggctgatgaacgtgatcaatacccctgccctgtttgcttcttccaacagcccagtgagtgggctacgtggttcccatctgtgtgcaaagtggtttgctcaaggccacacacctgggacatgtctgtagccccaggtctagtgcctgcaggcccagcgcctgtcccagaaggtggctttgaggaaaactgcctcaatcccaccgttggtccgcagggtgccaaggcttagctctgggccaggcagctgccccactaccccctagagattttgtcttctgcctctgcttgtcctgcamagtcaacgaattcaagttaatgcaacaaatcttttggagtagaacaaaatataat

SEQ ID NO: 652559 - DNA, 540 bp, Homo sapiens
aagagcaaaactctgtctgaaaaaaaaaaagcgacaccacatgggaggatgtttcttgggggaggtgtgctatgcccgagcaggctccagcaccaggggcgctggtgtgtcaggagcgcgcctccaggccggtgtgaactctgcaacttcacattgtgcctcctgccgccgctgctgcttccccgagccccaagctcaacctggagcatgagctcccaccctgaggaggaggctgtcaatactgtgtttctttccagggaggcaacgggtgggtgcgatgttgtcacttaagttgccacctctgcataagagctctctgatcagaaagcagtttctttgttgaccccagccagccttggctctcgggttgggaaatacagtcacggtatccatggagacctcttgaggtggagacgggcgttaaayccttctcaggcagtctgaggtggccagagtctgaagcaagcagcctctatggagcgaggggagcaggtgggcccagcctgagcggggcctctgcacagccagctttcccccaca

SEQ ID NO: 652560 - DNA, 559 bp, Homo sapiens
aagcaccccacatctgggtttgggttctatttctaccttgttttgttcatcytcctgaaaaaggaggcaaagagaaatatgaataaattgcctaattttatgatgttattttagcaaatatttgaaatatttgcaaaaattattactgtgttccagattctgctctaggtgctggtaaaacagaagtgaaaactaatgtctctgccttccaagggcttagactctagtggggaagacaagttagttaataattgcaataaagtatgataagacctatgaagaaggttatcagatacaaacacttaatcgtttatgattcagcaacaagaagtaagctttaatttgacattgcatagggtgggatgggaagatactgtgacatccataacgtttcagccataagtccagtgtaatctacagccataaactagtgttgtggatttttataacattgataaaaatgtacctatcacaatgagttgtagcagttactttgagaaaatatatttatatattgaatatatatgtacatatgtgtgtgtgtatactgccactctca

SEQ ID NO: 652561 - DNA, 559 bp, Homo sapiens
aagcaccccacatctgggtttgggttctatttctaccttgttttgttcatcttcctgaaaaaggaggcaaagagaaatatgaataaattgcctaattttatgatgttattttagcaaatatttgaaatatttgcaaaaattattactgtgttccagattctgctctaggtgctggtaaaacagaagtgaaaactaatgtctctgccttccaagggcttagactctagtggggaagacaagttagttaataattgcaataaagtatgataagacctatgaagaaggttatcagatacaaacacttaatcgtttatgattcagcaacaagaagtaagctttaatttgacattgcatagggtgggatgggaagatactgtgacatccataaygtttcagccataagtccagtgtaatctacagccataaactagtgttgtggatttttataacattgataaaaatgtacctatcacaatgagttgtagcagttactttgagaaaatatatttatatattgaatatatatgtacatatgtgtgtgtgtatactgccactctca

SEQ ID NO: 652562 - DNA, 580 bp, Homo sapiens
agcttgctgagtcatattaaaacatagtacaaagagccaaaagacacatcagatgacaaaataatgttaggaaaaaggcaactctctctctctttctctgaacygatacagtgaaaggcgtaaaaacacctattcatatttattaccaggcactattcctcagtctctatagtcttattttttttttatccctggggccacatgatctaatatttatgagatgagtctcacaccatttccatgattaattgtagccatatgtggaagacatttgttatatctcgctgaaaagcataggatttgatttaagtggagctgagtctatttatccaactctcagatttgcttttctgcctacttgtcctgagctaaaatgttttctggtctccaagcctttctacaatgtggatgtgcctcacactaaataaatgcttcccctgcaatccagactgaattctgggcctgaaccttaaccctgtgtggagccctgaggctggtcttccttcatgccattggtgaaatcacctgctgctcatctaacttcacacaaaacagtaaactgggttggaatctctgatac

SEQ ID NO: 652563 - DNA, 569 bp, Homo sapiens
gaattcagagactgtaacaaaggataagatttaaaaggatattgtacactgtaygtgaaagaagaaaaaaaacactcaaactaaagaacagcaaaagtctgcaaacaacaggaagacagaaatcggggagtggaagaaatacaaccttatgaatgaagagaagctaagagtttttgacatctggctgttttaagcaaatttctaaaatggactcctaagatttcttgccctaattcccaggagtataaacatgatgagatgtcatgtcctgattaagttacgtggcaatagggattctgcagatataattaaggttactaatcagttgactttgagtacaatcagaagggagattgcccatgtgggcctaattgaatctcagcagctctttaaaagcacatagttttctctagctggtaacagaagagagaggcagagggatcccaggcataatgagctgttattggctatgaagatggaaagggccacttggtgagaaatacaggcagcttctaggatctgagagcagccctggctgacagtcagcaagaaaaggggcacctcggtcc

SEQ ID NO: 652564 - DNA, 569 bp, Homo sapiens
gaattcagagactgtaacaaaggataagatttaaaaggatattgtacactgtatgtgaaagaagaaaaaaaacactcaaactaaagaacagcaaaagtctgcaaacaacaggaagacagaaatcggggagtggaagaaatacaaccttatgaatgaagagaagctaagagtttttgacatctggctgttttaagcaaatttctaaaatggactcctaagatttcttgccctaattcccaggagtataaacatgatgagatgtcatgtcctgattaagttacgtggcaatagggattctgcagatataattaaggttactaatcagttgactttgagtacaatcagaagggagattgcccatgtgggcctarttgaatctcagcagctctttaaaagcacatagttttctctagctggtaacagaagagagaggcagagggatcccaggcataatgagctgttattggctatgaagatggaaagggccacttggtgagaaatacaggcagcttctaggatctgagagcagccctggctgacagtcagcaagaaaaggggcacctcggtcc

SEQ ID NO: 652565 - DNA, 461 bp, Homo sapiens
agcattatacctgacacataagtgctcagtaagtgttttttgattgattacaaaagctgaacacacagtttcacccttcccaccaccttactccaaattccatagccaaaggcagttaccattccacctgtctcatctggattttgctctgttcactccaggtctttgctttcaatggttttgaaatttgagaaagaaaacaaacaaacaaaaattargagagttttggttagagaataataccttttgttctaataaattaccaataaattaattgctaaatcatgtcttcattctgtgcccaccagaggaaagattctgcctaagacatggatgactcaacaagaaggacatgccctaatatcatccaatttaacacctccttgttctctaggaaatgacctataaacttagcagtttgttacttcattcctggaagtttagcaacagcctcctgactt

SEQ ID NO: 652566 - DNA, 461 bp, Homo sapiens
agcattatacctgacacataagtgctcagtaagtgttttttgattgattacaaaagctgaacacacagtttcacccttcccaccaccttactccaaattccatagccaaaggcagttaccattccacctgtctcatctggattttgctctgttcactccaggtctttgctttcaatggttttgaaatttgagaaagaaaacaaacaaacaaaaattaggagagttttggttagagaataataccttttgttctaataaattaccaataaattaattgctaaatcatgtcttcattctgtgcccaccagaggaaagattctgcctaagacatggatgactcaacaagaaggacrtgccctaatatcatccaatttaacacctccttgttctctaggaaatgacctataaacttagcagtttgttacttcattcctggaagtttagcaacagcctcctgactt

SEQ ID NO: 652567 - DNA, 412 bp, Homo sapiens
acctcagcctcccatgtagctgggactacaggtgtgtgccaccatgcccagctaattaaaaaaaatttttttagagacagtcttgccatgttgctcaggctggtcttaaactcctgggttcaagtgatcctcctgcctcagccttccaaagtgctgggattacaagtgtgagccactactcttggccaaggaaggatttttaaaaatatatatgataaggartttatgttacatgttggactatagatagccctttatttgcttagaataaattctgatttttcaaattgctcgcagtacctttttcctctgaattctatgcaagaagtttactacatcaagggaagaagaaaatacagataggacaagatctgataaaggattcaatagttacttatcaaaagattaaaat

SEQ ID NO: 652568 - DNA, 656 bp, Homo sapiens
gagggtcatttttgcttgttttttgagacagggtctcttttttttgagacagtcactcaggctgcaatgcagtagcatgaacmtggctcactgcagcctcaaccttccagccttaagtgatcctcccacctcagccccctgagtagccgggactacaggcatgcaccaccatgcctggctaattttttgttgttgctgtttcttagagacagggtttcaatatgttgcctcaaacttctggactcaagcaatccttctgcctcagcctcccaaagtagtgggattacaggcataagccgccatgcctggccttcatttttcatttcctgttaagtgtgatcttgctgtctgaaccctctccccagaatttgctttgtaatttttatatggcatttaacaaatgctgccttatattagaatcatttgtttccttctcctatctccaccccactagagtgaatgcagcctgaggacaaagaccatatggtcctcatctccgatctccgccttgcacatggggcattcaataatttttctaaaatttcctgactatattgaaaagaggttgtgggttgcccttaaataactctgccattgcttaccatttctcaagatgttcttatcctttcctatcaagacacatgcttttttttttc

SEQ ID NO: 652569 - DNA, 453 bp, Homo sapiens
ttcccacttgatagttaacctatcttataatttgttctgcattttttgatgtttatttgagtaataaatatagttatcaaggttaattaggcaaccttaggaaactcaaataattaaagcacaatagtaaagaaaacaaagttataagatcaatcctgtcataaaatggttagggtttgctatggtttgaatgtgttccccaaagttcatgtgttggagacttaatccccaatgcagcagtgttgacaggtggtttttttttttttttttttcgagacagagtcttactctgttgcccaggtgggagtgcagtggtgtgatctcggcttgctgcagcctyggcctcccaggctcaggtgatcctcccaccccagcctcctgagtagctgggactacaggcatgtacaaccatgcccagctaatttttaatttttttttgtagagactgggttt

SEQ ID NO: 652570 - DNA, 301 bp, Homo sapiens
tacccgccgcgcccaccctatggcctaaatgtcttttcatatattttaaaaactgaactgtgtgcagtggggatgcagggcgggaaaggctggagggctcattttcgccaccaggcttgcctctccgggcgcacgaattaggcccgagctagagtccaaccccmttcccgcctcagggggctcggggtggcgcggggttaggggcaatgaacgacgatggaggcgccccaggctcagcggcgggcggggaggcagaggcgggttccaggagccgggctgaggcccggcaggtgcccccagg

SEQ ID NO: 652571 - DNA, 301 bp, Homo sapiens
tacccgccgcgcccaccctatggcctaaatgtcttttcatatattttaaaaactgaactgtgtgcagtggggatgcagggcgggaaaggctggagggctcattttcgccaccaggcttgcctctccgggcgcacgaattaggcccgagctagagtccaacccccttcccgyctcagggggctcggggtggcgcggggttaggggcaatgaacgacgatggaggcgccccaggctcagcggcgggcggggaggcagaggcgggttccaggagccgggctgaggcccggcaggtgcccccagg

SEQ ID NO: 652572 - DNA, 301 bp, Homo sapiens
tacccgccgcgcccaccctatggcctaaatgtcttttcatatattttaaaaactgaactgtgtgcagtggggatgcagggcgggaaaggctggagggctcattttcgccaccaggcttgcctctccgggcgcacgaattaggcccgagctagagtccaacccccttcccgcctcagggggctcggggtggcgcggggttaggggcaatgaacgacgatggaggcgycccaggctcagcggcgggcggggaggcagaggcgggttccaggagccgggctgaggcccggcaggtgcccccagg

SEQ ID NO: 652573 - DNA, 301 bp, Homo sapiens
tacccgccgcgcccaccctatggcctaaatgtcttttcatatattttaaaaactgaactgtgtgcagtggggatgcagggcgggaaaggctggagggctcattttcgccaccaggcttgcctctccgggcgcacgaattaggcccgagctagagtccaacccccttcccgcctcagggggctcggggtggcgcggggttaggggcaatgaacgacgatggaggcgccccaggctcagcggcgggcggggaggcagaggcgggttccaggagcckggctgaggcccggcaggtgcccccagg

SEQ ID NO: 652574 - DNA, 472 bp, Homo sapiens
ctggggctgtttccaggtcttctcagtggagtaattgaatattctgggccttctggttgagaccgyggttgctttttttcttcagcagaatattccacataagttcattggttctggagagaagacacttgttaatggtattaccctttaccatagccacagaacctcaagaatggccctccagagtatgcacagatgctgttccaaagcatgaattaatggattctcagtagcatgccatagataaatgaagggttcatctgcccgttaattgatgttttgggtttttcattcctttaccccaaatttactgggcattattgtgcttatgcttcattttggacttcagcagcctctttttgtccagtgatcttgagggccttgatttgtatgtcagtcttcaacaaatatttactgagttctcatttaatttgccagacatgctgtaggcccagggaatgtaacagtgaat

SEQ ID NO: 652575 - DNA, 498 bp, Homo sapiens
caccctatttgaacataatcacaaattcttttattaactttctttgtatatgtgtattatttgctcaaatatatgtgacataaattttaccattttaaccatttttaagtgtacatacagttcagtggcataagcacattcacattgctgtgcagccatcaccatcatccctccccatcatcatgaaaaagatggamgtttttcatcttccaaaacacaagcactgtgtccactaaacactaactctccattccctctccctccatctgtctatggacacttgggttgcttctactcttgcctattgtgaataatgctgctgtgaacatgggtgggcagatatctccttgagaccttgctttcacttcttttggacatatacctagatgtgaaattgctggatcacatagtaattctatttataatcttttaaggaacccgtccatgcaattttaatatttccccttggtatttaacatctccaaagggaagggcaaa

SEQ ID NO: 652576 - DNA, 522 bp, Homo sapiens
ggtgccttaacatttattattatccttaaaattttccttgtggattcctctgtaaaacttacatgttgccttctctttgtaaccttgcctgacagcccctcttccttaccaggtcctggggtagcgctgattgcttcctcctttgtatttttacagtacccttttcactcctttcttacaggtggatcatcttgttttgtaattgtcaacttgccttctacactgttagttcaagcttcttgcaatggggaactgagtctcatgcttaaaaacaaaacaaaacaaaacctctgcacctagagccatgttttatacrtggaggggagtggctcagaaatatttgttgattaaaaaattaggctggaaacatcagctcatgcctataatcccagcactttaggaggctgaggtgggcagatcgcttgagcccaggagtttgagaccagcctggacaacatagcaagacctgtctctacaaaaattaaaaagaaaaaaaaaaaagcagggcatcgtggcacgtgc

SEQ ID NO: 652577 - DNA, 522 bp, Homo sapiens
ggtgccttaacatttattattatccttaaaattttccttgtggattcctctgtaaaacttacatgttgccttctctttgtaaccttgcctgacagcccctcttccttaccaggtcctggggtagcgctgattgcttcctcctttgtatttttacagtacccttttcactcctttcttacaggtggatcatcttgttttgtaattgtcaacttgccttctacactgttagttcaagcttcttgcaatggggaactgagtctcatgcttaaaaacaaaacaaaacaaaacctctgcacctagagccatgttttatacatggaggggagtggctcagaaatatttgttgattaaaaaattaggctggaaacatcagctcatgcctataatcccagcactttaggaggctgaggtgggcagatmgcttgagcccaggagtttgagaccagcctggacaacatagcaagacctgtctctacaaaaattaaaaagaaaaaaaaaaaagcagggcatcgtggcacgtgc

SEQ ID NO: 652578 - DNA, 577 bp, Homo sapiens
tactcttatagctaaattttaaaaagtaacgttccagacgcagtggcacgtgcctgtaatgcaagcactttggaaggctgaggtgggaggattgcttgagtctaggagtttgagatcacctgggcaacagagtgagacccccccatctctacaaaaaattttaaaaaattagtcaggtgtggcagcacacacctgcattcccagctactcaggaggctgagatgggaggattgcttgaaccccagagattgaggctacagtgagccgtgattgctctactgcactccagcctgggtacagagtgagaccctgtggggaaaaaaagagtaaaaygttaaaagttcaagattcaaacttcttttaaaatagaagtaaaattttccttaaaaaatggtattggctggaagacagttttaaaggacaagtttgtatctgaggctggtaccatccaagagtattgtttgcatgagcattctccaacattgccatttcagtaagaaaaatatcagattttgaataatattttctgaattcaccctattagattgtaacacctctctctagcagaaggcaaaag

SEQ ID NO: 652579 - DNA, 541 bp, Homo sapiens
tagggacccatccttatggattaggtggggagatggtcatggatttgatgatataatcagtcatctatcttctcaagttttgcaagagggcagaagtaaaaagtgtggccagtggaaaagctttaatcattattgaatattcgtgttaaatagttgwatgatatagaatggaattagcatcctatgttaaccttaatcttttgtgtaaatggacataaaacctccgactcccccaggcagatgcctctctaccatgaatttataagcctaatgtgtattcctctgctggagcccttggctatgtggtcttctgtgctctcacccagtcctgtaatcacctcttaatatttctatatcttcagggacagcaggatacctgtcacaaagatggaattggtcattcgttggtggcatgagtaaatggattgatgaatgatggtacccatattcctgggaattatattaagcaattattgactttgagaaaaaagaaccccaaacattgctactatggtaaattattttcactttctattttgca

SEQ ID NO: 652580 - DNA, 541 bp, Homo sapiens
tagggacccatccttatggattaggtggggagatggtcatggatttgatgatataatcagtcatctatcttctcaagttttgcaagagggcagaagtaaaaagtgtggccagtggaaaagctttaatcattattgaatattcgtgttaaatagttgtatgatatagaatggaattagcatcctatgttaaccttaatcttttgtgtaaatggacataaaacctccgactcccccaggcagatgcctctctaccatgaatttataagcctaatgtgtattcctctgctggagcccttggctatgtggtcttctgtgctctcacccagtcctgtaatcacctcttaatatttctatatcttcagggacagcaggatacctgtcacaaagatggaattggtcattcgttggtggcatgagtaaatggattgatgaatgatggtacccatattcctgggaattatattaagcaattattgactttgagaaaaaagaaccccaaacattgctactatrgtaaattattttcactttctattttgca

SEQ ID NO: 652581 - DNA, 634 bp, Homo sapiens
atatacagtaccttattgcttacttttaagcaaatgccaaatcaatagtaggttatagaagtatacattgaatgtgtgtataaaggtataatccagaatacatgacatggtcataatgggaacttgtagaaatgctcaatttagatgatgtttttaatgggtaagagcaaagacatgaacagaatgatcttacgtttcatcctcaatgcccaatacttaagtcatttctgtaatttaactttcaaatagagaagactggaggcaattgtgttttttcaagttttgttatggatagtggccatggtcaaattttgagagaggaagttattaatattaatcactagtcctgaccttgatatcgacttgtttctttatgaaggttatttaatctttctaacttttaagatgtaaaatagaaaggtatatatttctacccacttaatgacatataatctaaatcaaataagacaaatgcttkgaaaatgtaagatgtataggaacaaaaatatttattatctttttcagtgttttaacttatttggagaggaaaacaacagttcctaatgaagagaaatatttaaccttatttattggctttgtgtgtgtgtatgtgtgtgtgtgtgtgtgtgtgttt

SEQ ID NO: 652582 - DNA, 513 bp, Homo sapiens
ctaggcacttcttgccacctctaccccattgttctagtccaggccactgtacattctgccctggagactttccaactgctctttcagacgcacttttatcatcctccatagatgagtcttaacaactatagtgacgacaaaatgcatcaggtcttcaccctccatgtgatccttcagtggctttctatctgtcactcgtagagtgtggctctcatctctgttatgcctacaaagccctgcacaatcttatccctgstgtctgtacatcctcaggcagatctgtgttccttcttgctcatttcccaaccaagttgttttctttctatccttccaaaatgcaagactaaatgtgatggttaatttttctgtcaacttggatgggccacagtgctcagatgtttgatgaagcattatgctggctgtttctgtcaaggtgtttttttgtatgagattaacatttaaattagtagaattagagtaaagcagattgctctccataatgtgggagagcat

SEQ ID NO: 652583 - DNA, 544 bp, Homo sapiens
ttggctgggcgcgatggctcacacctgtaatcccagtgctttgggaggccaaggcgagtrgatcacgtgaagtcaggagttcgaaaccagcctggcaaacatggtgaaacccctgtctctactaaaaaaaaaaaaagaaatgcaaaaattagccgggcatggtggcatgtgcctgtactcccagctactcaggaggctgaggcacgagaatcacttgaaaccaggaggtggaggttgcagtgagctgagatcgcaccactgcactccagcctgggtgacagagcgagactctgtctcaaaaaaaaaaaaaaaaaaaaaagaaaaaaatagatattactgtaaagatattttgtatttgcatgttttactgacatgtactttgagactatcaaaaaatctacaaaattagggggaagaggaaattcaaaatttacaaaaatatctatttcttaaagaaaattttgcataggagaggattaataattttctgttaaagaaatatataaatatattaattagtgaatctcagttatctggctctgtg

SEQ ID NO: 652584 - DNA, 575 bp, Homo sapiens
tctgtcttgtgggataagactgaagttcacgggtgtggagtaggctagtgcagctgcaaagaagagagtaatttacagactagggaggggacaaggatgtttaaaaataagtgaagggatctaggaatatttggagctaactcaaaaggaaatgtaattagaggtrtatgggggtgacagaaaaaaaggggtgaaggaatgaaggaagaccccaagcttttggcttgagcaagggggtagaagtcgggatgtttactgaaggagggactgaagcaggtttaaggctttataaggacatgttctgttgaggtccagtggagtgtttgtggctgtgggaaaacctcatgggcgtctaatggatgagtctggtactcaggagaattctccagactggtataagaattggggatgagtgagcttctgggtgattattcagactttgaagtacatgaagtgtcagtgcttgggttatgggatcacattaaaattgctgagctcatatctgaatctcagaaataagttcaccaaatattatagttcattttctttggaaaaaattcaacaatattctacat

SEQ ID NO: 652585 - DNA, 550 bp, Homo sapiens
tatttatttagagatagggtcaaactctgtcacccagactggaagaatgcagtgtcaggatcatagctcactatagcctcaaattcttgggctccagtgatcctccagactcagccttctgagtagctgaaaatacaggtgtgcaccaccacacctgcctaatttttgtatttttttgtaaagacagggtcttgctctgttgcccaggctggtcttaaacccctggcttcaagcgatcctcttacctcaagctcccaatgtgctgggattacaggtgtgagacgtggtgcccagtaatcttccattatttctttgattatgtatctcccctccatttcctctgttttctcttcttaaaattatattgaatggaaattggtcttctgtatcccgggcttttctgtcatgttatctttctctttgtcctttttctctatgtcctgattttttcttgcctcttcatttttaattttaccagtgaaagatytttatccctgtttgctcctttttcataccaacctgttccatggatgtagcatcttcaaaaatc

SEQ ID NO: 652586 - DNA, 651 bp, Homo sapiens
gatgcatgctatattatgaatgaattttaaaatgttatgctaatgaaagaagcckaacattatggagcgcatattctatgatttaagttatgaaaaacagctagaaaaagtagacctataaagacagtaggcattgtcagtgatttcctggagttgagagaataagtagaagttgaaaccaggaccaaggaaattttaggggatgatggcaacattttaagactggattttgctgatggttgcacaactgtgtacatttattaaaaagctccttaaattgggtgaaatttgtgtcatgtaaactacacactaacaaagctcttataagaagcaaaaaattatttttctgctccaacctggagcaaaggcttttattacttaattttttttaaatgtagggctaggttatgggggagtaacattgaggaaactttgctggaaaccatttccgacagagtatcaataaattgatttgaaaacatgctagtcaatttattaatacaccaagtattcactcagtggaacaccaccaaaatgtcagctttttcacctgatgatagcaaattctaacagtagaaaaataatggaagaaaatggccctaaatgatatgtcattgaaagacatatatgtatatgaggaggaaggagcac

SEQ ID NO: 652587 - DNA, 438 bp, Homo sapiens
aagaagtgtattaaaagtgttcacgtatattatctccaaccaagttaacattttcattttgaaaggtatctaatgattgaattcaagaaaatggccaaaatggcagatctttgcactcctgtcaggggagagaagatgcatttattggctggaaaatatgatagagctcctcaagtcacagctggtgatctatcattattttacctgcaacaagatatttattakaagacctacaaaatatgagtcagatgccctagattatagtatcttttataaactataatcttcagccatcaattaaattctgagctttagtttcctcatcaataaaagaaatatcatcagtagacccttatggatagttgtagagattagatctgatgacctatttgtaatttgaaatgatccatatatatcttagttatgctggtgcttgtt

SEQ ID NO: 652588 - DNA, 438 bp, Homo sapiens
aagaagtgtattaaaagtgttcacgtatattatctccaaccaagttaacattttcattttgaaaggtatctaatgattgaattcaagaaaatggccaaaatggcagatctttgcactcctgtcaggggagagaagatgcatttattggctggaaaatatgatagagctcctcaagtcacagctggtgatctatcattattttacctgcaacaagatatttattagaagacctacaaaatatgagtcagatgccctagattatagtatcttttataaactataatcttcagccatcaattaaattctgagctttagtttcctcatcaataaaagaaatatcatcagtagacccttatggatagttgtakagattagatctgatgacctatttgtaatttgaaatgatccatatatatcttagttatgctggtgcttgtt

SEQ ID NO: 652589 - DNA, 466 bp, Homo sapiens
aatgtgttttcctagagctatttttttaaagaaaaaattctgatgggacttgttttttcatcatttttctgttctggtaactgtgagcatattaaaaatattgactttaagtcaagttggtgaagtaggttttacaatttgwtgtgctcttctgctctaaacacagagaaccaataggaaaatacagagatccgaaaaactcacagggagacttgaaaatgtgttaaacagctctgtggctcagacacaaagcaggagtataaatggtggaaatcctgggaagctggttcctggggctggaagcaggtaatcatgacagataatccgctgctgtgttttcaaaagaatttaaaattttcctcttaagataggaccagatttccatttacctcttgaacctgaaagatggtatgggatgatttccccctctgatattaaagaaccccaagaaaaggaactgctgatg

SEQ ID NO: 652590 - DNA, 446 bp, Homo sapiens
ctagagctatttttttaaagaaaaaattctgatgggacttgttttttcatcatttttctgttctggtaactgtgagcatattaaaaatattgactttaagtcaagttggtgaagtaggttttacaatttgatgtgctcttctgctctaaacacagagaaccaataggaaaatacagagatccgaaaaactcacagggagacttgaaaatgtgttaaacagctctgtggctcagacacaaagcaggagtataaatggtggaaatcctgggaagctggttcctggggctggaagcaggtaatcatgacagataatccrctgctgtgttttcaaaagaatttaaaattttcctcttaagataggaccagatttccatttacctcttgaacctgaaagatggtatgggatgatttccccctctgatattaaagaaccccaagaaaaggaa

SEQ ID NO: 652591 - DNA, 436 bp, Homo sapiens
ggatacaaggctcatgcaagttttaaatccagtggttcagtcacattttaaagttccaaaatgatctcctttgactctaggtctcatgtccaggtcatgccaatacaagaggtgggttcccatggtcttggagcagctccatctctgtgcctttkcagggtacaacctccctcctggttgctttcatgggctggtgttgagttcctgtggctttttcaggtgcatggtgcaagctttctgtggatctaccattctggggtctggaggatagtggcccttttctcacagctccactagactgtgccccattagagactctgttgtgggggctctgaccccacatttccctttcatgctgccctagcagaggttctccatgagggccccacacctgctgcaaacttttgcctgggcatccagacatttgcatacatct

SEQ ID NO: 652592 - DNA, 445 bp, Homo sapiens
aagaaggtgctagatttaagtgaaacatacccaaaagcaccataaatagaaacatatctacttatcgatatggtttggctcccatatcaaatctttatccccacccaaatctcatcttgaattcccatgtgttgtgggagggacccggtgggaggtaattgaatcatgggggcaactttttcccatgctgttctcctgatattgaataagtctcatgagatctgatggttttaaaaagaggagttccctgcacaagctctctctttgtctgctgctatccatgtaagacaggacttgctcttccttsccttccaccatgatagtgaagcttccccagccacgtggaactgtaagtccaattaatcctctttcttttgtaaatcaggtatgtctttatcagcagtgtgaaaaccgactaatacacttataaattaaaagaaaataa

SEQ ID NO: 652593 - DNA, 590 bp, Homo sapiens
gccccagcacagacacacagccaatgctcagaagttgatgacctgcaaaaccaaacccaaagcccagactttttgaagcctccttgcatgctgcaacaactggaagtcagtcagcacgacatgaagcatgttctacacatgttacctcaataaatccttagctctagtttttgcccttgggcatgttgtttagcttctctgtgcctcagttcccacatctgtaaaatggcatgataacggaaccaccacataaggatgttctaagcaaagtgaagtgcgagtgaagacacatgaagaatttagaattgggcctggcacgggttgagtactcagttaatgtgaaccaytgttgtcatcatcatcatcatcaccacatccaggttttcacagcaacctataagcaatcctgggcaaattaactgaggttcagagaggtcaagtgacttcctcaaggtcaccatgtaaagaagtgctaaaacatggctttcaatgaggtctgctgactccaacatacttttcaccattccacacccaattatggctctttggagcctatgtgccatttggctacaacagggagccagcaagct

SEQ ID NO: 652594 - DNA, 483 bp, Homo sapiens
tgttggacaccaggagacaggcaggaagcctgagagaacagagggcccttccagaagtggagagtgtaccarttcctgggaggatctgcattttttaaaaaggttaaaacaacccagcttacactgggaaaaattgaaattaaaaaagaaaataataataataaaacttaaacaaacatccaacgttaagacttttcccaaacctgaaaatgagtgggagaatgaacatcagaagtaatgcaagatcttaccatctccatcgaacaccggctgggtctccatcgtgggtgtcggcttagacccgtcatctgaattgagggttaaaaagaatcgaaaggagactaccattattgaggtaaatactatctactctccagcactgttgaatggttggggtttgtacaaggcccggccaagtcccagtgaagagaacaaagaaaaagaaacaaaagaagaaaagggcaagaaggaaaagagaaccat

SEQ ID NO: 652595 - DNA, 565 bp, Homo sapiens
ttctgtcctcttcactgctgtatgcctaatacctagaacaatgactggcatatactaggtctttgattcatatttgctgcttgactgcattacggacatgtctaatctaggggtgtacaatcttttgacttccctgggccatattgaaagacgaagaattgtcttgggccacataaaaatacactaacacgatagctgatgagctaaatacaaaacaaaacaaaacaaacaacacaaaaaattcttacaatgttttaagaaagtttacgaatttgggttgggctgcattcaaagccaccctgggctgcatgtgggccacgggttggataaccatttcaaaaggatacatgctttctagcacttttcaatgccaatggttgccaagattgaaatctcccctagcgttctctgcctcaattctacaggccagcagaatccttctctgaggatgrcccacaagaatgcagcctagaggcctcagagttagggctgaggcttgttgcattggtgtggactttttgggaagctggttgctatagaaacacccattgcctcctagaatggg

SEQ ID NO: 652596 - DNA, 546 bp, Homo sapiens
tttaaaaggtaatgatacagtttattgatgtttgttatgaaaaggagtaattggagaagataaaaatgtaaggggtaataaagtcaaggaaggttttttgagctgaaaatgattatatttcagagtgtaacctgaataaaactgaggcttcacatggctcagtccatgcatgtaatagcattctaagaaaacataaactgaatgaaaacgtaaactgtgaagcatgaagaataatgagggtcttcaccttatgctttctgaaggagtccccgcaaatgcttcacacagcrtattgaacaagaaactcctaaaatcttctctagatatttctctctttcctattttttcccactgacagtagcaccttatatctatcctcctcaactgcgaggtcactacagcactatactaagcccctgttaacttccttctcttgaaacccatgcaactcacatgatcctattctcagcctgtgaatctcagcctcctgcaatcctgtgaaattcaacttggtctcctactctgaatgtgtataaaaataacaga

SEQ ID NO: 652597 - DNA, 427 bp, Homo sapiens
ttgacaaatgaagtgggttagtattttcttgaattctgaatttaagaagtaattgtgtgtgacacatacaaattatttttcttaatggctgattttttaggtaaatatgtacatgatgtaagttttcacattttttattctaaccaaagaggraaagttttaaagtactcatctgagccctatggtctagcctgtacataacttctagtatatacactttcttgatgttttgagaaaagttcatgaattcatccactcatttatttaatcattcaggaactgagaatactggagtaaacaaaacagtcaagctcctgccctcacagagtatacattccaattgtacggtggggaagggggagattgggggagcagaaaacaagccaagtaaagaaataaatctataatatcatatcatatggtggta

SEQ ID NO: 652598 - DNA, 568 bp, Homo sapiens
tggggctcttatgggatccagggcygggtacatttgtgtggttttaacttaacttgagttgagacactcagacatcacaggccagaaatcgtcctcttttacatgaaggaggggagtgtgggagggtggctgctcatggagggattacagacagaaaaagttgcaggggacaaaactcatccagaacgcttttccggtcttttcccaccccaagtgttaagccatttcaccctcttcaaaagcaaacacacaactccgatttgcatgcaggtaagaaaacacccctgctgccacatgggatcctggacttgtgtggcttgaagcaagaccagtggcaaagatttggtttcttctggcggcaggacacctaaggtagagatgtttttaatttactgaactgattgcccatctgtttatctccaagcccacaagactgttttcacgatgtaggtctttaaacaatctgttaagacacgggacaagttaatcaccctcgccgctccccaccaaaaaaatcaacaaaaacaagggctgggcaggcttaaaaataacaaaaaagtgggaattc

SEQ ID NO: 652599 - DNA, 369 bp, Homo sapiens
tcctgtcatccacaaaaaaagaggaaatagtaagagaaaagtaaatactaggtgaagtgctttgagccaaagggagtccatataagaagtgatggatggctctgttgggatcccggcagtagtgcatgatgatgttgttgtataaatacgtcagctcctttaccctcgggggactctgaagcatgtgtttttcaygggcccctagcgtgctcatgtgggattaagtttcagttgcctactgtggtaattggcttgagaagcctatctttattaattttctcctcttccttgacttatttctcttctcccctacctgtgttctcttcattcccttcttccctacaaaataaactatgtgagtttgaattc

SEQ ID NO: 652600 - DNA, 429 bp, Homo sapiens
agttgagtaggaatgaaaaaagaatcagaggatactataaagctcatctgtggatattgtttacatagtcatrataatgaaaagaaataatctaacaaaattaaatgtttgaagtgtggggagatagaaatggtagagtgtattcggtatttatgtgttggggaggatacctgtaagtttaacattagtgagctttactttactaaggctaaataaacaaactcaagtgtcagaaaggctagagaaggagcttacaagaatgaagctattgtggtgtgattcaatggggaataggtggggcattggaaacatcaatttgtagtatccctgccaattgatactacaacatcaatttgtagtatccctgccaaaatttaactatggaaaatagttaaattttaatatgcacacatctgtggttgtggttat

SEQ ID NO: 652601 - DNA, 429 bp, Homo sapiens
agttgagtaggaatgaaaaaagaatcagaggatactataaagctcatctgtggatattgtttacatagtcataataatgaaaagaaataatctaacaaaattaaatgtttgaagtgtggggagatagaaatggtagagtgtattcggtatttatgtgttggggaggatacctgtaastttaacattagtgagctttactttactaaggctaaataaacaaactcaagtgtcagaaaggctagagaaggagcttacaagaatgaagctattgtggtgtgattcaatggggaataggtggggcattggaaacatcaatttgtagtatccctgccaattgatactacaacatcaatttgtagtatccctgccaaaatttaactatggaaaatagttaaattttaatatgcacacatctgtggttgtggttat

SEQ ID NO: 652602 - DNA, 429 bp, Homo sapiens
agttgagtaggaatgaaaaaagaatcagaggatactataaagctcatctgtggatattgtttacatagtcataataatgaaaagaaataatctaacaaaattaaatgtttgaagtgtggggagatagaaatggtagagtgtattcggtatttatgtgttggggaggatacctgtaagtttaacattagtgagctttactttactaaggctaaataaacaaactcaagtgtcagaaaggctagagaaggagcttacaagaatgaagctattgtggtgtgattcaatrgggaataggtggggcattggaaacatcaatttgtagtatccctgccaattgatactacaacatcaatttgtagtatccctgccaaaatttaactatggaaaatagttaaattttaatatgcacacatctgtggttgtggttat

SEQ ID NO: 652603 - DNA, 387 bp, Homo sapiens
tttttgtggggacaaaccacatccaaaccatagtaatttgtagcataaattctttttcacatgatgtattctgtcctgggatactccacatcctgagtaatttgatttaatttgaatagagtttgctttaaccayttggctgtaaaattctgcatatttagacaaatgcattgtggcagatatcccactattaaagtatcatatggaatgcctcaaacccccaccccatggagccaatggcttcccatctgtgtagtttgccttctccagtgtctcattaaatgaggtcacactgtgtgtatcctcctcagactgtcttcttccacttagcaatgtgcatgcaagattcactcatgtctttgtgtgtgttgatatcttgttcctttc

SEQ ID NO: 652604 - DNA, 600 bp, Homo sapiens
ttggacttttgctaacaactatatcatcgtggaaataagagtattcagtaaggatttcaaaattctggaaaaatcaggcaagaaaaaaagataaacgcttmatttctgtttacaaaagtataatctactaaattgttgtaagttacagttagagtaagagaaagagatttcttaaatccagaaactagaatattaaccagcaatgctccaaaagctataccaattataatcaattttcatcagttcattcagtgccatgtaatcaattccagtcttgtggatcttgagttagcagtgtcatgaacccatcaggttcccaaccggacttctggagaccttaactgagtcaagtgtatggtcttaaagttatttaagcaatatcatcagaagcctataaccagagtacctgtcatagtcttttctgtgagtctcagagggagtcctgtcttggagacgaacattctgacctgtagttgattgcaggagctttcaggaaagcatcagggggaaataatatctaaatgacaaaaagtatgaaatggctgtgatgaaagatctgatgagaattcgttataccacaactgacaaggatattcgatt

SEQ ID NO: 652605 - DNA, 449 bp, Homo sapiens
accaccttgccagccaagtgactgagccatcttgcagtggatcctccagcccccatcaagccccaactaagccactaagtttcatggtaatttcttacactgcaataaataactaatacgggaccagtgagaaaaggagtcaagaataatctcagctttctacctttaataacttaatggatagtggtgctattaatcaagtcaggaaagagaaaggacaataattacacctatagtattacccaaagtcatgataaattattttycatatgctcttgctaaaatttatgtagtcattcaactcattttattgagtatctaccatgaaaccggcaatatggaagaaccttctgatatagaactgaatataatttagtcactgccctcaagtaataagtctggagaatcaagaatctgaaaaatgtttgtagcttttgttcaaaattttc

SEQ ID NO: 652606 - DNA, 581 bp, Homo sapiens
ttacagctctcctgtcacccccaattcctgccccctctgcagccttggaggagaatggagctgaagggcctgccctctgtagggtgagaaagggaggctaaagcctggtgcccactgccctggctgctccgcattgcaggagctgcgcccttcctttcctggcacagggtccacagccccgaaaccccgttgtgtgggagctgggcacagggcagcaggactaatccttggaacagctcagggaggattatcccagccactgtcagcagcggtgcagctggctcattcccatatagggggaggccagagccgggggcctgccacaagttggaaggctggggaaggggaggccagcaaaggtgtcctggctgtgggtggctctgagggggctctcagggrtggggctaaatctcaggggcaggattaggtaaatcaaaccaattctagccacagatttaaagtttggaaaaaaaaaaaaaacccagcctggcggaaagaatttaaattataaaaacttagaagtatggaatgtgaaatcatcctgtaggtgcttatttaacaacgaaatcatcccgacacaa

SEQ ID NO: 652607 - DNA, 581 bp, Homo sapiens
ttacagctctcctgtcacccccaattcctgccccctctgcagccttggaggagaatggagctgaagggcctgccctctgtagggtgagaaagggaggctaaagcctggtgcccactgccctggctgctccgcattgcaggagctgcgcccttcctttcctggcacagggtccacagccccgaaaccccgttgtgtgggagctgggcacagggcagcaggactaatccttggaacagctcagggaggattatcccagccactgtcagcagcggtgcagctggctcattcccatatagggggaggccagagccgggggcctgccacaagttggaaggctggggaaggggaggccagcaaaggtgtcctggctgtgggtggctctgagggggctctcagggatggggctaaatctcaggggcaggattakgtaaatcaaaccaattctagccacagatttaaagtttggaaaaaaaaaaaaaacccagcctggcggaaagaatttaaattataaaaacttagaagtatggaatgtgaaatcatcctgtaggtgcttatttaacaacgaaatcatcccgacacaa

SEQ ID NO: 652608 - DNA, 552 bp, Homo sapiens
  misc_feature 30: n = A,T,C or G
gaaattccaccatttcagatttttacctgnggatttagagtaatctgctgttttcctagagctcccctaaaatagaaattttggaaggctaaatatatgctaacatttgaaaactcattttctccccttcgtaatgctatgtactgaaggagggggccctacgggctgtgcagggacatcctggaggcatggggagaagaaactgaaaggcaaggttgtatggaacaaagaataccgatctcaggattctctcttgaacctgccctaactttgttcaaatagacttagccactgacctgctgtcaaaagaccrcagccaatctgacttgttttcaacataatgatgaatattgatttggtcccttcatccaacattctcagctggatctttttttgaccaaggatatacattactaggcgagtacaggcagttaattcttccacacgggactttggagtttctgagttgaccagaatcacccaccttaacatctgccagtttataccccaagtcctgaccagtgccccctacctgctatgcctcatgttttc

SEQ ID NO: 652609 - DNA, 546 bp, Homo sapiens
tgaaaactcattttctccccttcgtaatgctatgtactgaaggagggggccctacgggctgtgcagggacatcctggaggcatggggagaagaaactgaaaggcaaggttgtatggaacaaagaataccgatctcaggattctctcttgaacctgccctaactttgttcaaatagacttagccactgacctgctgtcaaaagaccgcagccaatctgacttgttttcaacataatgatgaatattgatttggtcccttcatccaacattctcagctggatctttttttgaccaaggatatacattactaggcgagtacaggcagttaattcttccacacgggactttggagtttctgagttraccagaatcacccaccttaacatctgccagtttataccccaagtcctgaccagtgccccctacctgctatgcctcatgttttcaatatagcataaaatctgaaatgaaagatgaaacatcatagccaatatcacagaaatacaaaggatcctaagaaactcctaggtataattacacactaacc

SEQ ID NO: 652610 - DNA, 584 bp, Homo sapiens
ccaatctgacttgttttcaacataatgatgaatattgatttggtcccttcatccaacattctcagctggatctttttttgaccaaggatatacattactaggcgagtacaggcagttaattcttccacacgggactttggagtttctgagttgaccagaatcacccaccttaacatctgccagtttataccccaagtcctgaccagtgccccctacctgctatgcctcatgttttcaatatagcataaaatctgaaatgaaagatgaaacatcatagccaatatcacagaaatacaaaggatcctaagaaactcctaggtataattacacactaaccaattggatcatctagaagaaatggataaattcccagacacgtaaaacctaccaagattgactcatgaagaaattaaaaaatctgaacagactaatagcaagcaaggaggttgaatcagtaagaaaatgtctcccatcaatkaaaaacccaaaaccagatggcttcccagattaattctaccaaatattttaagaagaactaataccagtccttctcaaactcttccaaaaagctgaagtggagggaa

SEQ ID NO: 652611 - DNA, 326 bp, Homo sapiens
atcccaactgaggagccagagagaaatcaaaccccatatatgcagcatcattgtctactggagtcaaaaatcacaattccactacccaccccaacaccactggccctgtttctcccaattgctttttattgtgtttttaaaaaatcctctttccccatccctgcaacaccgagaaggaggaattatagtagataaatatgaagcatggagatcctttaaaartgtttttaataataaatgagaaaatgaaaaggagagggttgggaaggaaggagggaattcaaatgccagggaattgttcagtttcgcttttaaagatgttaaca

SEQ ID NO: 652612 - DNA, 612 bp, Homo sapiens
ctctcttgctctcaaaaaggcatcagccatcatctccatctagagaatatactagctgactcagcttgaccagcctgtcccaaaatgagaatctgggtaaaataagtattgaaacacttcattccttgtagattcacaaaacacattagcatattaaagactatgaagttctgcaggaaaaaaaacctatttaactttaatccaacattgccaagttttatttgaccatggaagatttttccaaaacacttacaaacagatcaaggacattaatctttcatgaaacactttagatccccagggtcctctccagctacatcattctgtgatttttttatttatgatgcattaaaagattaatctctatcagacttccatttagaaattcaccagaatgtgcaaaggcagcaggtaaaattgccgaagggtattataaaaataccctccagtgatttttgraacttaaactgaaatatttatttaactatatatttcagtttgtatattatatatatatgtatatacacacatatatatgtgtatatatatatttgtgtatgtatatctatatctatgtatatatggcattatatccattttacagatgcagaa

SEQ ID NO: 652613 - DNA, 612 bp, Homo sapiens
ctctcttgctctcaaaaaggcatcagccatcatctccatctagagaatatactagctgactcagcttgaccagcctgtcccaaaatgagaatctgggtaaaataagtattgaaacacttcattccttgtagattcacaaaacacattagcatattaaagactatgaagttctgcaggaaaaaaaacctatttaactttaatccaacattgccaagttttatttgaccatggaagatttttccaaaacacttacaaacagatcaaggacattaatctttcatgaaacactttagatccccagggtcctctccagctacatcattctgtgatttttttatttatgatgcattaaaagattaatctctatcagacttccatttagaaattcaccagaatgtgcaaaggcagcaggtaaaattgccgaagggtattataaaaataccctccagtgatttttgaaacttaaactgaaatatttatwtaactatatatttcagtttgtatattatatatatatgtatatacacacatatatatgtgtatatatatatttgtgtatgtatatctatatctatgtatatatggcattatatccattttacagatgcagaa

SEQ ID NO: 652614 - DNA, 612 bp, Homo sapiens
ctctcttgctctcaaaaaggcatcagccatcatctccatctagagaatatactagctgactcagcttgaccagcctgtcccaaaatgagaatctgggtaaaataagtattgaaacacttcattccttgtagattcacaaaacacattagcatattaaagactatgaagttctgcaggaaaaaaaacctatttaactttaatccaacattgccaagttttatttgaccatggaagatttttccaaaacacttacaaacagatcaaggacattaatctttcatgaaacactttagatccccagggtcctctccagctacatcattctgtgatttttttatttatgatgcattaaaagattaatctctatcagacttccatttagaaattcaccagaatgtgcaaaggcagcaggtaaaattgccgaagggtattataaaaataccctccagtgatttttgaaacttaaactgaaatatttatttaactatatatttcagtttgtatattatatatatatgtatatacacacatatatatgtgtrtatatatatttgtgtatgtatatctatatctatgtatatatggcattatatccattttacagatgcagaa

SEQ ID NO: 652615 - DNA, 600 bp, Homo sapiens
agttcccatccaacttctgtctgaaagtgagggagcctcaaccagcacttctattgggaaattaatttaataaagaaaattctattaaatgtttaatgcatctaaatcacttcatctatattatttctaaacccaataggcacatgacaggacaatggatttatattctaaatgggggttgcaccttaagccaggacgcaatttgttaattacatagtcacaattatactcaaaatctgttgaatcacccttaaattattacgacctaggcccttagcagcacaaaatctaaaaatgtatttgtttccttctctcccaactctctctctttcttcttcccttccttatttccttcttttttctttctttttctgggccagttggaactgaagtttctttcaaaggtagaaatgaggggtgatggacatacaaagaaattcaccmcatgttataatgttacaatggttaagggaataagatttagagtcctatgccttttttgagttttatacttactagaaatctgtaatttactgaaaaagtaaatattaatatttatagaatacagaaaaaattgaatgaggtaaaatttgtaacgtt

SEQ ID NO: 652616 - DNA, 610 bp, Homo sapiens
gtgatctacttttattcacatattggtagtatctgtattttctaatacaacgagttgcatctgttttcaatttgatttttcttataagtggataaaaaaagtgatttgagattcttgacagaagtctgcactatgtctttcccaacaagtaatattatgatacatggtaatccctttgtgaaagcctcataaatgttggtgaattggaagcagtattaagagtaaaccaaagcccacttatattctgtaccatttgaacacacttgcttcacaaaaatgcaaccaaattaggaagacttccattttcctatgaatactcaagacttggagacttccatgtgtaastaacagacaacaagatagctttccaacaatatatcataacctctctgcattgggtttgaaggaaagatatatttgtagagccacccagacatagactataaatttaatgaaggatgtatgtaaaaaatgacttccatctttattaatgccatttcatttcattattaaacttgaaacatctcacaattcttgctggtacttgttttctaatgtttttttttcttcttttctattgagaatcatttatgaccagattatgtgtgtt

SEQ ID NO: 652617 - DNA, 610 bp, Homo sapiens
gtgatctacttttattcacatattggtagtatctgtattttctaatacaacgagttgcatctgttttcaatttgatttttcttataagtggataaaaaaagtgatttgagattcttgacagaagtctgcactatgtctttcccaacaagtaatattatgatacatggtaatccctttgtgaaagcctcataaatgttggtgaattggaagcagtattaagagtaaaccaaagcccacttatattctgtaccatttgaacacacttgcttcacaaaaatgcaaccaaattaggaagacttccattttcctatgaatactcaagacttggagacttccatgtgtaactaacagacaacaagatagctttccaacaatatatcataacctctctgcattgggtttgaaggaaakatatatttgtagagccacccagacatagactataaatttaatgaaggatgtatgtaaaaaatgacttccatctttattaatgccatttcatttcattattaaacttgaaacatctcacaattcttgctggtacttgttttctaatgtttttttttcttcttttctattgagaatcatttatgaccagattatgtgtgtt

SEQ ID NO: 652618 - DNA, 610 bp, Homo sapiens
gtgatctacttttattcacatattggtagtatctgtattttctaatacaacgagttgcatctgttttcaatttgatttttcttataagtggataaaaaaagtgatttgagattcttgacagaagtctgcactatgtctttcccaacaagtaatattatgatacatggtaatccctttgtgaaagcctcataaatgttggtgaattggaagcagtattaagagtaaaccaaagcccacttatattctgtaccatttgaacacacttgcttcacaaaaatgcaaccaaattaggaagacttccattttcctatgaatactcaagacttggagacttccatgtgtaactaacagacaacaagatagctttccaacaatatatcataacctctctgcattgggtttgaaggaaagatatatttgtagagccacccagacatagactataaatttaatgaargatgtatgtaaaaaatgacttccatctttattaatgccatttcatttcattattaaacttgaaacatctcacaattcttgctggtacttgttttctaatgtttttttttcttcttttctattgagaatcatttatgaccagattatgtgtgtt

SEQ ID NO: 652619 - DNA, 610 bp, Homo sapiens
gtgatctacttttattcacatattggtagtatctgtattttctaatacaacgagttgcatctgttttcaatttgatttttcttataagtggataaaaaaagtgatttgagattcttgacagaagtctgcactatgtctttcccaacaagtaatattatgatacatggtaatccctttgtgaaagcctcataaatgttggtgaattggaagcagtattaagagtaaaccaaagcccacttatattctgtaccatttgaacacacttgcttcacaaaaatgcaaccaaattaggaagacttccattttcctatgaatactcaagacttggagacttccatgtgtaactaacagacaacaagatagctttccaacaatatatcataacctctctgcattgggtttgaaggaaagatatatttgtagagccacccagacatagactataaatttaatgaaggatgtatgtaaaaaatgacttccatctttattaatgccatttcatttcattattaaacttgaaacrtctcacaattcttgctggtacttgttttctaatgtttttttttcttcttttctattgagaatcatttatgaccagattatgtgtgtt

SEQ ID NO: 652620 - DNA, 597 bp, Homo sapiens
catatattcagagatattttttattactatagggaatgtccttgcatgtttacactctttattatgatataattgtttttttctagtattctttgtatttctttctacttcttgagttttaaattcttggattatttcagtattatgcaatgtgggaacatagaagcttggcttgacaatgctactgacaatttatatgtcagggtgtaactgcctggcatattctttgctgttttgcattcctttgcaaagtatgcctttgtttagtcttgagggagtaggcttctcccattttccatatacttgggacatggttaatgacggttctgctttgtatggaatgcagatgtttgcattttcacagtttctccaattgcttctccactcctttttcaaactgcaaagtgtctaatctatagtgaaggattgargcattttttcctgttatttctaagaaaaagtacatgggttatggcagacaaattgtacctcctttccaatttgtctcatttatttttaaaatactacagtctgtttttgtaccatatgtagcttgttatggaaggtttggctaattaattattattctttggagtt

SEQ ID NO: 652621 - DNA, 408 bp, Homo sapiens
acaagagcatgttaatactgttactgctgctactattttaaatccagtgattataaactttggggtgggggcagtgagcatgccttattaatctttgtattcatgrtgattgacatatactaaataaccgagaagtaagaggagtaaataattgactatggcaaaccaggaattagataagtgttttgagtagtacaaacaacttgatacgaaaatgaaaaagcatagacattttataattagttcagagaatcaataaatgatttatagttttcacaaatgaacttgaggacaatgtaaccgtgatggtacttgggcattctcagttgcgggactatgaggagcaagaaaggacgaagcttgttgagagatttgaagtctaggttacatataagtatgttaaaatta

SEQ ID NO: 652622 - DNA, 578 bp, Homo sapiens
tactccatgcgcagcgcctgagacctacaaactcgccagccgccatcaccaccaactcacaccsacagagcacccccagcactccccacggagcacctatcatgttaacagaaaaaactggcttctagggtgcctcctgacccctgaggagcacacagcaccagagggggtgcggaatcaaacaaacaggcagtcttccgccagggagctctgtagcaaccacgatgccgtatggttccctaagggggccatagcagcaggaggctggcccagggcatcctcagtggggagggtctgggtcagctgactcagggcaggcagacatcctacccacccaggaaacatcacccccgctctgaaccctacctgctcatccagcttcatggacatcccttgaacttcaccgaagacctgcctgtttttaaacttcacccactttgagaagcatgggggacttaaaccttaaaccaaacggcaggtctgtcctattcaacgtcttagtgtgctgaacctcatcacaactcctcagcagttattaaggaacaagggagacacaaagttccaggtgggaacagaag

SEQ ID NO: 652623 - DNA, 528 bp, Homo sapiens
agatctgaaaacctactgttctgctctatcactgcaatgagggtggtttctctgctaattcctgtgccttgaaacctggaaaatctgacaccatattccttaagattcacagcctgtagctgttaacaaaagttaaaaacatttcagagggaaaaaaagcttcgaatttgttttagaattttccattagaacttgtgtaagtrgaagattgaatatagatttttaaaaacattccaaagtgaactggtaatgctggcttgaatataccatgctttccaactgtaaaatcccaaatgcaatagttttatgagcaaactaagcaaaagtaaattaattttaaattcctaaactacagaagtgacttcagacaggaaaggccccacacgtattccagtgttcccaatgtctagtccagtgctctaggaggggtgtcgaaaccctgcatcgatttaacacttccagaaacggcacggtgctggctgtgcttcaggcaggtgggatgctttttgagggcccccaagagaaccc

SEQ ID NO: 652624 - DNA, 570 bp, Homo sapiens
aatgacttacgtaccaagtatgttcacagtggtatggtttataattctgagacaatgatagtagttacacccacacgataaaatgttacacagacaccaaaattcatattatgaaagagtatttaatggcagggaaaagctttctcactgcctggtaaatgaaaaaaaggcaggttacaaacagtataatgatacgagccacactttagaaacacacacacacaaagcaagcacaagtaccaaaatgctggcagtggtatacctaggtgttgagataacaggtgaacttaagtttctttctacttcctaatccatagtaagaatatatatatttatatattatatattatataatatatacattatatatattatatattatatacattatatattataatgtatatayttattatatattacatatattatatatatatatatattttttgagacggagtcttactctgtcgcgcaggctggagtgtagcggcacgatcttggctcaccgcaacctctgcctcccaggatcacgccattctcctgcctcaacctcctgagtagctggga

SEQ ID NO: 652625 - DNA, 594 bp, Homo sapiens
aacctcacctccatttgagaccttcatcaatccaagctcacccaagagctcacagtgcaggaggagggaggacagggatgcagacacctgcccagtgctataccactggctctggccagccctgcccattccctcccatgaccctccaaactggaaactcagttgcccactgaaactccactcaggtatcacctcctccaagaagacttccccaactgcccgcacgcaggctgggttagggggtcttgcctcttgaactttcagcactatgtgcttcccctagcactcagcacagagtcctgaaagcacttgcctgtcacgaatggcacctgcagacagggcccatgccctgcgtatctgctgagcagccggcacagccaccaggccctcatcacagatgcccaggtcattgacagcaccaytgcctttaccccactgcccctgtgcatggctgtcgcgagggagacgccagcagaaatgcccctgcctatagcatacaccatgctgagtgtggctccccttcaaatccccagagccaactctcacaggctcccacaccagccctccaggcctctccctgaccctcggccccca

SEQ ID NO: 652626 - DNA, 545 bp, Homo sapiens
tgctacgcggggcgctgggaggggactggtggcccgaggcgggtgggtcgcggggcccggctccccgcccgtgggaccgcgcgccctcgccgagcgcagcctccccgcgtgtggggccccagcacgtggcgcatccctgcggccgtgcgcgtgcagccggggcccgagcgccacgtgcgagctggggtgcgcgggcactggtgcgtgccgggagcggggacgccctgccctccgaggttgctctgccctccgaggtcgcccgcagctgccgcccgctctgggcttggggacctcggccctgcgccyttccgcactcctggcaggtgcagccccaggtacagtcaagaggccccgcaaacccccgctcctcacggttgtgcgcggcgcgataaacgcgccccgaccctggggctgggctggagggcaaagaagaaactttatgttgagtttaggccttaggggcgcggcccctcgcgccctaccgtgccccaccgtgccatgttccgggctgcctgccttctaaaagttcctgcaggaagcaggtg

SEQ ID NO: 652627 - DNA, 545 bp, Homo sapiens
tgctacgcggggcgctgggaggggactggtggcccgaggcgggtgggtcgcggggcccggctccccgcccgtgggaccgcgcgccctcgccgagcgcagcctccccgcgtgtggggccccagcacgtggcgcatccctgcggccgtgcgcgtgcagccggggcccgagcgccacgtgcgagctggggtgcgcgggcactggtgcgtgccgggagcggggacgccctgccctccgaggttgctctgccctccgaggtcgcccgcagctgccgcccgctctgggcttggggacctcggccctgcgcccttccgcactcctggcaggtgcagccccaggtacagtcaagaggccccgcaaacccccgctcctcacgsttgtgcgcggcgcgataaacgcgccccgaccctggggctgggctggagggcaaagaagaaactttatgttgagtttaggccttaggggcgcggcccctcgcgccctaccgtgccccaccgtgccatgttccgggctgcctgccttctaaaagttcctgcaggaagcaggtg

SEQ ID NO: 652628 - DNA, 433 bp, Homo sapiens
gacctggggctctgagaagccgatggcttgcctgagaccacccagctgagaggcagagctgggatccgagtctaggtctctgtgactccattctctgtgcttttcccaattccgctcagaagtgtcccaggtagtgccagggaagagagatgggggagggggagctcaggcagctgtggtgacattttcagagggaaatggtctgccctagaggggcccagagggccttttgtgctttctttatacttcctggatctgaactggaaaaaaacatgcaagggctgcttcacacatgattcctgattcacgcagacacaaaagaacgaacccagccaaacaaatcacacagcccaacacacagatggaarcttttccttctgcatttctacctagtccttcataaatcaattaataatgtaccacccttataaag

SEQ ID NO: 652629 - DNA, 520 bp, Homo sapiens
aggtgggaacctccttctgaggcccctctagctgccagatgtcctggctccagacctcagaggaacccatgagattggcagaactattcccatgtggaaggtgagagagctgagacccagcggggagcctggcatcacctgctgggcagcggaggcaggcccagcatcccctccctgtctccctacccagcccctggccccagacctacgcgctctcggtgatacgtatcccggacgcagtgccagatgcctgtgtactttggctccgtctggatcctgacctgcaggagaaktgggcttcaggcacgagcggctccaggcctagggcaaggccagcaggccctggggaaggggcagagtcacactcttgattgtcccagccatgctggacggtggcacagcagggacagggagccttgtgttagacgagaaacctggggcacaggggtgagaaagtgggactgacatagtcccaggggctatggggagccattgaaggcatttgggtaggaaaggggtg

SEQ ID NO: 652630 - DNA, 399 bp, Homo sapiens
accgcagcctctcccaccccgccctccagggggcgctgctccaccggggggaagggggggcgtcccakggccttgcttagctggggccccctggtatgtggcccctccctcctcgggcgtcgccgccgcaccgccctgccccgtgtccctgtggccctggcggcgggagtctcctccgcccgaggcctcgggcaggtggggtgcacgcagcctccttccgcgtttctcgggctctgaatctccgcgcccccgtggccctgggctcactccgcgcgggggacgctcgtaagcggcggcggctcgcggggaccccacactcagggattctggacagcccccaccgcgcctcgggtccccgcgaggtccgggccgctccgcgctgcgcacgcgcagcccctc

SEQ ID NO: 652631 - DNA, 482 bp, Homo sapiens
ttaacattatgcatttattatattgtatagagccatattacacatgcttggtgcttcaaactgagttatcaatgtttttctggatgcaaagccatctgatgctggatgcggatgccttaaatactatatttctgcatctatgacctatgagctaaggaaaaaccaaggacaattccagaaatggcaaagaacacttaagaaaaagatgtacatgagacgaaatgctaagtccttgagccagggcctacagaagttaccagaaagcgaataaaaacakaatttttctcaccacctgttgataatagagcctcacatgtccgggtatggacaatgtagaaaaaagaggttgttccgtttggtactgatgcctttctcccctccgtgatgtgtgcggacattgtgcggcccccagagagagcagcagacagaacagagcacagcaaactgccccctcctcaacacatcccagtgctgtttttttt

SEQ ID NO: 652632 - DNA, 546 bp, Homo sapiens
  misc_feature 7: n = A,T,C or G
ggagctnactgctttgctagagaacagcctatttattttaccaaacacttttcattcctgccctgggtgaactttgtggatatagtctagaatcagcaggcaggttggacaaccccgaaaacccaaggagagccctcacgaactgtttaaaacacttggcaaaatggcaagtcttcctaaatgcaggctagagtcctagtgctgctgtaaacatttccaacagtaaaatacaaatgattaagggttctggtgtcagttgtcaaaaaagaaccaygttagatttactagctgcactgctagttctttcacttatttatgggctaaagtattacctatacttacactctagaaactttatcagttagtaattatactattaactaccaaaaataaattacttcaatcctgtaatgaatgaagtagaaattgagttttaggtatgctcttcaatcctgttctcctcctgccataaagtgtactccatcaacaccaatacattgcgtacccagtaccacagagtatagacaaggatgtccagagccccgg

SEQ ID NO: 652633 - DNA, 613 bp, Homo sapiens
atgtacatctataaatgccagtatgaaaacaggtctaccaactctgtgaggctcgtcccattgaaggtggagtccaatctcccttgccctgaatgggaggcagcctcagtgacttgcttccaaagaacagaatgaagtcaacagatgctgcctgcctttgaggctgggtcacagagcaatctggtttcagtataggggcctctcagaacactagcccctagaacccagctgccatgggatgaggaagcccagaccacatggagaggccacatgtaatactccagcaaacagcacagccagggtcccagcagacagccagaatcactcatcrgatgctgagcgaacagacctgcagatgcttccatttctagcctttgagctgccccacatgataccaagtggagcagagatgagctgcccacaccaagccctgcccaaactgcagattcagaagcaaaataaacattattgttttaagctactaagtttagaggtggcttattaaacagcaataaaaaactggaacacatgttcactacaatattgtatgcaagagacaaaaagtaaaaacaaccttccaggagtaggagaatgagtaaataaacttgagctt

SEQ ID NO: 652634 - DNA, 582 bp, Homo sapiens
atggctctcccaagagactggagttgggagggaacatgtatggctctttgtctcattcactaccacctctccaccttcttcctgaataacacttcctcctccattgtattgggagatggaaaaggggaggggaaatcattacacatgtgactgtaccactagcctcctctgttggttgcttgctccctgtgtgtggcaggctctgcaggagggctgtcttatagggtgtttttgtgagtccttctggagcatctgcaagggttctccccacagcrctactcccagacatgggatgagcagtcagatttaacccttcagatactccttaagttcccaccttcattgacaccagccacagcttcttgatgatgaggtctcactgctcaacagaaaaccgttctaaacacaacactaggaagaatgtgcaagctggtcttccttcccagatgttgtctactattatgtctcaacatcctgctctatctctttaattccttttctttattaaacaataggctcagaagttaaacaatcaaatctactactgcagcagaacttctgctgctggatgaaaatcctgtc

SEQ ID NO: 652635 - DNA, 534 bp, Homo sapiens
tccagcaattttactactgagtatctacccaaaggaaaagaaatcaaagagatacctgcagtcacatgtttattgcagcattattcacaggagcaaatatatggaatcaacctaagtgtccatctacagatgaatggatgaagaaaatgtggtacatacacacaatgaaatactactcagtcataaaaagaatggtatcatgtcatttgcagcaatgtggatggaactgaaggtcattatcttaagtgaaataagccaagcataaaaagacaaatatcatgcattctcatttatatgtcagagctaaaaaatttgatcacatgtaggtagagacaagaaaggtaacagaaactaggaagggtgtgaggaggggtagggaggaagattgagagaaatgggttaaagggtacaaacatrtaataagataagaggaatatattcaatacttaatagcagagtagggtgactatagttaacaaaaatgtattgtactagcaaagcctccaagaaatatgggactatgtgaaaagacca

SEQ ID NO: 652636 - DNA, 425 bp, Homo sapiens
catcaagcaactgaagataagaaactcacgaggtcaggagatcgagaccagcctggtcaacatggtgaaacgccgtccctactaaaaatacaaaaaaaattagccgggcttggtggcattcgcctgtagtctcagctactcaggaggctgaggcaggagaatcacttgaacctgagaggtggagcttscagtgatcagagatcacaccaatgcactcaagcctgggggacagagcaagactctgtctcaaaaaaaaaaaaaaaaaaaaaaaaaggaagaaagaaactttgtagctagaattcaggactaaggcattcatagggtagacagtgtaaaagagagccgggtgggggtatttgagggagtgtaaaaatgatcagagaggtgcagaaatggcagataaactgagaatgaggtacaggcag

SEQ ID NO: 652637 - DNA, 552 bp, Homo sapiens
atattgtagtgtgctaaggctagaatcacagagtatttcaaaatagttctggagacctggttatccttaaatagccctgcaaaaaaatctgtcctatatgtatttattgactttctacacgcaatttgctggcactgtgctggcgtttgaaaatagtctatactatgattctaaatgagaaaagacaaaaagttagagagtgaggatttggccctcaagtagattttaacctaaaagcttcaaaaaacaaaggtacagtaggtcagaactatcagagatatggccattcatatgagcattgtttatttgtcagatagtgggtgcatgccatagatcctcaatgtatacattgatttgttctgggaactcatttacattcattgttttcttatttttaaaaggagtcagaatctcacaacaatgaatattgtgagaatctaatttcaaaaatgaacaagacaattctaagaaaaatgtacagtaccaaatttataagatatcatrtttgttctcaatatgtttgtattttaacccctagaaggaaagacgtca

SEQ ID NO: 652638 - DNA, 614 bp, Homo sapiens
tgccaagcagccagtgccagttatttcctgtggctctcttggagtctggtaagaaaagaaaaaaaaaatgcttaccaaatctggatctgttgatactcaaattaaatctgcagmatgggccatggttatctggctgcttgctgctcagaaagtgtagaaacacccttaagtgaatagtttgcactggacccaaatcaataatagttattaagttagtttccaaaggggtcttagagataatggcaaagtttgaggcaaggggagaaagagaatgatttatgaaataaacatactgtgatgttttatggcggaaggaaaagagaaataactttctgtgaacagaattaataattttgtctttgtgaaaggaaaataagtaagttccaaaattttaaacgctggggttcaactcctagaagatcaggctgatgatacctctgggaatgttacctggatacctttctacgcattattgattcctggttctgtgtcttcaggtattcacaaaaaatgagctaagtcacaaatatgctcacattgaataatcctcacaattcagctaaattttgagctccctcaaagagaaaataagtttttagaatgatacatatatt

SEQ ID NO: 652639 - DNA, 614 bp, Homo sapiens
tgccaagcagccagtgccagttatttcctgtggctctcttggagtctggtaagaaaagaaaaaaaaaatgcttaccaaatctggatctgttgatactcaaattaaatctgcagaatggrccatggttatctggctgcttgctgctcagaaagtgtagaaacacccttaagtgaatagtttgcactggacccaaatcaataatagttattaagttagtttccaaaggggtcttagagataatggcaaagtttgaggcaaggggagaaagagaatgatttatgaaataaacatactgtgatgttttatggcggaaggaaaagagaaataactttctgtgaacagaattaataattttgtctttgtgaaaggaaaataagtaagttccaaaattttaaacgctggggttcaactcctagaagatcaggctgatgatacctctgggaatgttacctggatacctttctacgcattattgattcctggttctgtgtcttcaggtattcacaaaaaatgagctaagtcacaaatatgctcacattgaataatcctcacaattcagctaaattttgagctccctcaaagagaaaataagtttttagaatgatacatatatt

SEQ ID NO: 652640 - DNA, 614 bp, Homo sapiens
tctgctgttttctgggcaaaaacagatccgtgtcttgtttttcttatttattttcccttctaaatgaataatatttcctaattaagtgagaaagatattaaattaatatacaagctataatgttttagaagttatctgtaatattattagatttttttccattaatagatgcacaattactggttattacataatttcctgtttaaattcacaaataaaaattatatgtatttattatgtatattttgaaatatgtacacataatgaaatggctcaatcaagctaattaccatatgtactacctcacttaatttttgttgggagaacacaatatgcatctatctattgttttagtaattttcaagaatacacttgtatgattcattgaaattaactattgtcaatatattgtactatattgtacagtagaactcctgaacttcttccttctctctaactgaaattttgtatcctctgaccaacatctccttaacaccttccaagacaagctgctggagaccaccattctactctyttgcaacgagttaacttttttggattccacatatatgtgtgatcaggcagtatttgtttttctgttcctggcttatttc

SEQ ID NO: 652641 - DNA, 497 bp, Homo sapiens
gaattctttaaaaaactgttgtgggaagtcagggacccagaatggagggaccagctgaagccgcggcagaagaacttaaattgtgaagatttcatggacatttatcagttcccaaaattaatacttttataatttcttacacctgtctttactgcaatctctgaacatamactgtgaatatttcatggaaatttattagttcccaaaattaatactttcataatttcttacacctgtcttactttaatctcttaatcccgtcatcttcgtaagctgaggatgtatgtcacctcaggaccctgtgatgattgcgttaactgtacaaattgtttgtaaaatgtgtgtttgaacaatatgaaatcagttcaccctgaaaaagaacagaataacagcgattttcagggaacaaggaaagataaccataaggtctgactgcctgcggggtcgggtagaatagagccatatttttcttctcacggaaagcctatagacggatg

SEQ ID NO: 652642 - DNA, 497 bp, Homo sapiens
gtcagggacccagaatggagggaccagctgaagccgcggcagaagaacttaaattgtgaagatttcatggacatttatcagttcccaaaattaatacttttataatttcttacacctgtctttactgcaatctctgaacataaactgtgaatatttcatggaaatttattagttcccaaaattaatactttcataatttcttacacctgtcttactttaatctcttaatcccgtcatcttcgtaagctgaggatgtatgtcacctcaggaccctgtgatgattgcgttaactgtacaaattgtttgtaaaatgtgtgtttgaacaatatgaaatcagttcaccctgaaaaagaacagaataacagcgattttcagggaacaaggaaagataaccataaggtctgactgcctgcggggtcgggtagaatagagccatrtttttcttctcacggaaagcctatagacggatgtgtgagtagaagaaatatcactgaatt

SEQ ID NO: 652643 - DNA, 550 bp, Homo sapiens
gtatttctaaaactttgtttttattatgtgaagctcttaaacttttaattgtagacacttttaaatgtgtctgcattgcacatttactgataataatattatttatcattcattgagggtttattatatgtgttaacaactgttctaagaatgtaagccaaaatttgaaatttgcatatattagcaagtgctttttactttttcttcttttattttgttttaaacaagtgtttattcaagaatagttttagatttatagaaaatttgcaaaaacagtatagcaagttcccatataccccacactcattttcctgtattgttaacatctcatattactgtggtaccattgtcacaamtaacaaataaactttagaacattattattaactaaacttcatatattattattattgattaaactccaacagatttcattaattctcctctaaagccccttttctgttccaagtgttttagatggaaaaaatatataaggaaaatctacttttctttaatgtctcgtaacccacattaatttactgttttatca

SEQ ID NO: 652644 - DNA, 248 bp, Homo sapiens
tatgatagggaattgatctctcatctctaaaatattatccatgtaaatttcatttaaagctatctacctcatggctagttgtaaagatgaacaaaaaatatgaagtaagactrttttataaccacaatagaataaaaggcatcatgcaaagttaaagtagtagctacagtaataaataattagaaataaaaccttatttcccaccttgttaaaaggagacaagagggccctccaatgatgttcgtgga

SEQ ID NO: 652645 - DNA, 406 bp, Homo sapiens
tttaaccttggttgggagttagaaggtgggtactgggatgcatgcatwcaggatccctgctatgtgagtctttcttgagttctcactccccccaccccctaaaattacagtatcgaattcaaacatatacaagcattaatgccaatgattccccagtgtatgagcccagatgatgggcttagagcatctagatttcgttgaggttttattgtttgttttatttaaagagatattttaaaagactttatttttagagcaattttaatgtcacagcaaaattaagaagaagatacagtgatttcccatatacaccttgcccctacacatgtgtaccttcccccactatgaatatcccccaccacagtggtacatttgttagagtggatgaacccaccttaacacatca

SEQ ID NO: 652646 - DNA, 489 bp, Homo sapiens
tgtggtgctctttattaaacatcatttatacagagcaccaaaggggggattgaagtaraaaagttaaagaattgattgtccttgtgaaatagaaaaaaatcataaaagtttagctgtaaggcattggtgaacccccttgaagtaaaagttaaaaaagaatgttaactgcctttctgtagaaactgtaagacattaattaaccttatctctttcccacatattttgtaaggtctctaagtttctgtttttcttcttgctgtgcagctgcagggtcacaaaatagatgagcataagttataggacatgtttttcccaagatgtaagctgaatctcacgaatgttacctaatgattaactgcttttgttctggcttctgtaagcctgattcctgcaacacttagttcccaccataaactgcttaaaaggcatctgttttctttgtccggtgctcagtctttcaggacacgtctgctaagccagtgtacacct

SEQ ID NO: 652647 - DNA, 510 bp, Homo sapiens
gtaatcccagctactcaggaggctgaggcaggagaattgcttgaaccctggaggcagagattgcggtgagccaagatcacgccattgcactccagcctgggcaacaagagcaaaactccgtctcaaaaaaacaaacaaaaaaaggagagagtaaagtgaaacgactacttccctcattacaaagtacacatttctgttagcacaacataaaataatatttgatttggggataagaaatacgatcatactgagtttactgtggatttaaaacccagatttcattcttacatatattgttgataagccagattttccaattctgtacttagtccttttgaggaggttgagagagaaggacctaaatagaggacatagtttcaattgtctcctttaagttattttaccagcatggcccrttgctccagtctgtagttatttgggaaattatttgtgtaatccaatttgtttgctcttcctgttggcaacttctgagcagaaattatccttaaa

SEQ ID NO: 652648 - DNA, 664 bp, Homo sapiens
atgattgttctatctggtttctattttgaaaagatacctgaataatttggggtggagagaagtcgggggaaaatgtactgtgtcttgacaaaagagatcagccttgaggtttcacaggtgatttcccgcctgaaaaaatacacattgtaaaataaacataatctgcatggcagttacactcagcatcacactgattttctaaaagaagtcactgatcttacgatctgttatattttgtagagttgtgatgccctaccatccagaaatatttttagccaaaatatacaaaccatatgcatacaatatgggtattgaaacttagagctaagaaaatggcgatttacatttctatttaatgtattcagtctgccaaatgctacttagcaagcatttttctaatgcattatagtttaaatatattttactttaaatatttataaaacttatgtgcgaaaaaaratgaatacccaatctgtgtgaccttaaaggagctaaaatctaatgatgagagtgtggggagataggcatgtattgaaataataaaaggaaataaaatgggaaatggaacatgattgaaaggtgtgacctggggaacctattaagaatttaaatatgtccagttacagtcttttcttagagttttctgcaagctttggatgccttt

SEQ ID NO: 652649 - DNA, 521 bp, Homo sapiens
ctgttttggtgaggtaatgaaaaggacatgaactttgaagccggacagstgtggatccaagtcctattccaagacttgcgtgaacttaggcaaagtactgtaaagtctctgagccttattcttctcaggagtaggactatgatgatatatattttccagtgcagttgggatagctaagtagacacatatttaaatttcttagccaaaatcctggcatatattgcagttcaacaaatgctaatctactcctcacacctacctctgtatgtggttcctaatgttttcttattttgtctgttaatatttttccctctgaaatgatttattcccatgaactcagctattaccttcactcccaaaagtacaatccaatttcatctctatgaattgatagaacattttttatctgaaggtccaaccatgttttaaattcaacagatctaaaatcacaattgttattttagcctcaaatcagctgtactatatagacttctaagtgtaacctttcaggcttttcttct

SEQ ID NO: 652650 - DNA, 573 bp, Homo sapiens
caaacatgccaacatattttcccattgaaatgattttctggttggaaaagacaaagtacaagaaaaggaaaaaaatgagtaatgttcataaaacttattttagcgttcaaaaatgtatattggtgccattttttaaaataaatcttccattggactgaaattgttcattataaaggcttcctctgttataaaactaatttgttgttttttagaagtggttgaacagtagctataacaacagcaaatccagagtttactatgtgccaggcattgaaataaacattttacaaatactgttttgttcttgcagcaacactgttaggtagataaaactattatgtctgttttatagatgaagaaactcagccacagagaggttaattgattgcccagaaacagtaastgacagagccagtaactttattcaggtggtgtgattttagggcccagaattttaactataactttacacatctttaataagaagactcatgttcctgtgaccagtattcatgacaaatggtaattctaattaaaaaaaaaaaaaaaacaggtttactctaccattaacag

SEQ ID NO: 652651 - DNA, 318 bp, Homo sapiens
aaaaaaacagaatggagattcttcaaaaatcttaaaataggactactattttacctagcaatcccactgctaggtatataccaaaaggaaaaaaaactcaatatatgaaaaagacacctgcactcatgtttatcacagcactattcacaagagcaaagtcatggaatcaacctaaatktccatcaacagatgactgaatttttaaaattcacacacacacacacacacacacacacacacacaccatggaatactactcagctataaaaaagaatgaaattgtgtcttttgcgataacatggatggaaattgaggcca

SEQ ID NO: 652652 - DNA, 457 bp, Homo sapiens
ttgccaatttgatggacagcttcatccccctgtataccagagaagttgagccaaggacttggcttcaatttgcatataacatagtgcatgcctagtgctaattcactactatattactgtaattggaaatcttactctaggctcaactttatttgttgagaattttatcagttaagacagaatttaaagccattctagtaatcccctagyagtggactgatgctcccaggcttaaaattacaaaagcaattaggaagaagtatcttattaataagaaacattttgtttgtttaaacacacacacacacacacacacacacacacacacacaactttctcttgggaccatctagaacgctctaacccagtagtccccaaactttttgacacccgggaccagtttcatggaagacaatatttccacagctggtgtgggggtgggggaagggatgctttt

SEQ ID NO: 652653 - DNA, 609 bp, Homo sapiens
gggtagtatagtcattttaacaatatcagttcttttgatgaatgaacatgagatgcctttctatttgtttgcatcctcttcaatttcttttgtcagtgctttgaacctttccctctaaaggtcttccacctccgtggttaaatttgtttctaggcatttttttttttaatctaagcttgtytatcttgattgcatttaacattgtttgatctggaatccctagcctctctgtctactccaatccagtctccatagaacactcataattattgccccaaaatcatcaaagataaatctgtcatcttcaaatttgaaaatttccagtggttccaagatgtctgtaggatatgatctaaattatgtagttttgcatctggggtgtgcaaaatctgcctccatgtgttcttctggtctcatctcctcccactcaggctatcaccatttctttctcccactgtccagctcagacattccatgtacaccaaacactttcataacttctagcgtatccatagagcctgatgtctgaaaagcactcaagtatgttgactttatgaatgaatgaataattgggtgcaaaccactagaatcgatagcagaaaaactcaa

SEQ ID NO: 652654 - DNA, 601 bp, Homo sapiens
actactcaagggcccattttcatttgaatggataaatgaattgcagaatactcacaaaatggactgctttgcagcatgggaatgaagaaaataccactagacataatgacataggatattttcagagacagaatatagaaagaaagaagccagacataaaatagcacatactgtatgatatcattcatataaagtacaaaacagattaaattaatccatgtkagaagtcaggattgtgtttactctgagcaggggacaggtagtgactagaagacaacatgagaggacatctgggataggagtagtgtttcattattaggcccagatactagctacatggatgtactcacaaaacttacaaaaactcagtggcatctgtagttttctctagcttaattttacttaaataaaaagtttttattttaatgtacctatgtattttggggggcagagggtatatggggatatatctgtacctttctctcaagtttgttatgatataaaacctcttaaagagaataaaatacttaacaacaataataacaaagtgttattctcttgccaaaaatgattcagtggctttgcattgtctttaaagtaa

SEQ ID NO: 652655 - DNA, 536 bp, Homo sapiens
taataactaaaaattttccaagtgatragaaataataccacacaaggtaaacaaagacaagagagaaaaaaatagccaggcagtgagatgatcaaatcagtattgattggtcatttgtattgattgtatttgtactgattgcaatagagagatggatagttgaaacatcattagagaaaaagagaaaaaattagatctccagtctcaaccccaaacctcctgaactgtaatacctggggtggagtcagctgatgtagttagttttgtaatctactgcttgggaaaacattggaaatgacctttttttttttttttattcttttacttcaagttctgggatacatgtgctgaatgtgcaggtttgttacataggtatacatgtgccatggtggtttgcttctcctaacaaaccatcatctagattttaagccccacatgtattaggtatttgtcctaatgctgtccctcccctttcccccaaccccctgacaggccctggtgtgtgatgttcccttccctgtgtccatgtgttctca

SEQ ID NO: 652656 - DNA, 476 bp, Homo sapiens
gaattctgagaggcacacactcttgttgccctttagtacttgacttttctgattcattcttcatttccctctcccatctttctctttckctcactctctcagtcttatgaaacagaaaatgagaatattgagactataggctatagggctctggtcaaaaagaggtgacaaaaaggtagtaaagattcagaagatgacaactgctattttacttaatctgttagtatccatatgcctgtaagtatgaagttgaattgtttctattggagagttgttttctaaaatgctaagcttttttggttgttgatggctgaagtacgacagctcatatgtatcgttgaatactctgacagcatgaaaaaatgtactggctcctggatgttttatcttaatgtacctacaagtgccacattatattacagtttcttcatacctaaaaggtttttcattgttgtctaggagagttttgtctggtt

SEQ ID NO: 652657 - DNA, 518 bp, Homo sapiens
tttccaaatatgtaaaaatgtgtagggtcaaatttgacctcaatcagtgctgtctgtccaattcagtacgtagctaagagacatgctttcagtgtttcacttatcagtgctccctgcccacttctaaaatgttgacttatttaactcaaataatgagtcaaaaatcgaggagcaattaagctgagtgcaattaaatttagtatgccagtcttatattcaggtcagaacagaaatgaaaattaaagtaagtgccaaatttgactgatcaatgaaaagataaaacctgagattttaagtttaactggtgtatggcaatttaaacctcaaactcttataggcataatgttttgaaatattgaaatgattcttttctttctagaaaaataaagctttcaagcaactataaattttacatttttttgtcatgtgtctaacttctactargatttatgcctcatctgaatggtgatctcctcttcagaactattcctgatcattctcacaatatgtctctcttt

SEQ ID NO: 652658 - DNA, 553 bp, Homo sapiens
tttcctttgttcacttggttaaagtgatgtctgccagttttctctgcttgaatgttaatatatttatgtatttgaaattaatacacgattttaggaggaggagatactttgagattaggagactgtcctgttgctcttcaaactttcagccagtggttttatttaataataatctttgaatgaatgttgcctgaataacagttattgttaggtggttgcaaaatgctgagtttttccccctaattttattactccttactcatttatttagtattcttctgtaggaaaagctttcttcttcctctcatttctcctttctgcytttctaatccatatgggataacacatggttatttttcttcactagattataatctcttactatccttattcatactgatgttcaaattgtcccaggtttggctgtgggagccccttcaggttgtctcccatgtcttttgtaaatggtttcattcattatttttggagttcttgcttattttttggtattagaaaatgttcatcttagactttccctgttctagccctagaa

SEQ ID NO: 652659 - DNA, 513 bp, Homo sapiens
tcttttctgcaaagccctagtgtatttagtcaagatttcttgctacaagcaacccaaacggattttaagtgattttgcagaaaggaaggttatttaaaagatttcaaatggtttatttaattgtcagaaattgttttgtaaaacaggcagcgtaaaggtcccaagaagtgtgaatctcagggataaatcatgccttacaattatttgggtgaggacaagattgtcattgcttgttgaacactggatactatcctgaaccactgccactgcctccagcatggatcctccaacatccctgctttctattctactagctcctggaatcaaacctggggaagctatttctgatyggccaagcctagtttatttgctattttgaggtttaatgaagggcaaaagaatcagtatctagttttttagccttttttcctcatggaagacaggttccttcttttttcttttttctttttttgagatggagtctcgctctgtcacttaggctggagtgcagtg

SEQ ID NO: 652660 - DNA, 547 bp, Homo sapiens
agatgcaataggctctatctgcagctttgtggacatctttctctttatttatgtgtcctgtggtattctgcctataaataggtagctagcttgtttaattcaaacagtttctacctttttgattgaatgattccattgggctctgtttggattcttcctctctttctcgcagtccagaaaatgagtctaagcagaaagcctcgttaattttagggcttacttcatttgtttccctgctctccatgattacgaccaatgttctctatttttcacygcctaaaaattgttgtttaatatatttttccagtttcctggttgtttcctccttgcacaaagcagacaattttttttttcagtcacaaaacctgtcattaaactaatccaagccaatatcttttggcatcatagtgggacaccaatcccaaattaaagagttttcaagtacggcaaatttaaaaatcacagacatctactacattaaatctatatcaatttacttgtaccaggtaatgtaggcactgattttatacttttagtatttccaggt

SEQ ID NO: 652661 - DNA, 559 bp, Homo sapiens
tgtttgttgaatgacacttaaattgattccatatctttgttattgtaaataatgctgtgacaaacacatgagtgcaggtatccctttaatatcctgaactcttttcctttcaatagatatctagtactgggattactggattgtacagtggttytatttttagtttttggagaaatttccatattcttttccctaatggttgcactaatttacatttctgccaaaatgtataatagtttccttttcttcacatactcacaaatatctgttatttttgtctttttaataatagctgttctaacttgggtaagatgatatgttattgtggctttgattgcattatcatgatgattagaatgttgagcattttttcacatacctgtgggtcatttatatgacttttttttgagaaatgtctattaatgttttttgctcactttttaatgggattatatgtagttttaattgttgagtattttgaactccttgtatattctgaatatcagtcctctattgaagaatcatttgcaaatatattcttccattcaacaggttgttt

SEQ ID NO: 652662 - DNA, 602 bp, Homo sapiens
gcaacaaaccataactttctaaattaattctaatattacttttgtataattcaaaggttataaaggtaaaaaggtatttttgataagaaatgttaccaaaaagagactttatacagaaaaggatcttacttggtaaattcctgtcctaaagtaagtaaaacaaacagttgtttgcaaagagggatgtttaagacaagttagaatgtttaagcatgtgatagatcatctacattatgaaaatattaatgaaagggaatttattaaaaagygttgtacaattttgattccaagtcaaaggccaaacagtgcacttggttctctcaagtcacctgcttggccatcttcaaagtgaacgttacttccttttgtccctactgtaaaagtttttaacaaactttcattcatgctctaaaagttgccttggactcttactctgccttatgtccctcagaggaattattttcttgaggaggcaagaatcgagttgctgcagactcatatggatttgccactacttacaaatgtacgtaaaatattctgggccataaaatgagtttcaatgactttgaaattattgaaatcttacagaatgtggtctctga

SEQ ID NO: 652663 - DNA, 602 bp, Homo sapiens
gcaacaaaccataactttctaaattaattctaatattacttttgtataattcaaaggttataaaggtaaaaaggtatttttgataagaaatgttaccaaaaagagactttatacagaaaaggatcttacttggtaaattcctgtcctaaagtaagtaaaacaaacagttgtttgcaaagagggatgtttaagacaagttagaatgtttaagcatgtgatagatcatctacattatgaaaatattaatgaaagggaatttattaaaaagcgttgtacaattttgattccaagtcaaaggccaaacagtgcacttggttctctcaagtcacctgcttggccatcttcaaagtgaacgttacttccttttgtccctactgtaaaagtttttaacaaactttcattcatgctctaaaagttgccttggactcttactctgccttatgtccctcagaggaattattttcttgaggaggcaagaatcgagttgctgcagactcatatggatttgccactacttacaaatgtacrtaaaatattctgggccataaaatgagtttcaatgactttgaaattattgaaatcttacagaatgtggtctctga

SEQ ID NO: 652664 - DNA, 620 bp, Homo sapiens
aaggtcatccaaacataattatcgggtggggtgggtgaactcttttattcttttaatcatccaacaaatatttctcaagcgcataccttgttaagagactgttttgggtacagtaattcacagtgaataaaacacagatattctcacctttgtgatactacgtcatagttgcaaggagtggggagaaacagacaggaagcaaagaagaaaaacaagaagtcatgtgatratatctactgggagggactcattaggcagtaaaggactcagcagtgtggaggtgacacattcagttttcagtagaagagtcagggaagttgtcactttgaagctatcatttagcttccctttctttcaatcttctttctttacatgggaaataaggattgtgggatatttttgggtggatcacagcacctagagatggatctgatcaataagaactgctcagtaagcattagctactgcttcggttgccttccccctgtggagtgctggcctcttggattgagcttgcatcataggtgttcagtaggagcttgcttagtggatttataggttgaggttagaacccactggaattctcttcctggaaagaacaggcttctctttaaggtttc

SEQ ID NO: 652665 - DNA, 620 bp, Homo sapiens
aaggtcatccaaacataattatcgggtggggtgggtgaactcttttattcttttaatcatccaacaaatatttctcaagcgcataccttgttaagagactgttttgggtacagtaattcacagtgaataaaacacagatattctcacctttgtgatactacgtcatagttgcaaggagtggggagaaacagacaggaagcaaagaagaaaaacaagaagtcatgtgatgatatctactgggagggactcattaggcagtaaaggactcrgcagtgtggaggtgacacattcagttttcagtagaagagtcagggaagttgtcactttgaagctatcatttagcttccctttctttcaatcttctttctttacatgggaaataaggattgtgggatatttttgggtggatcacagcacctagagatggatctgatcaataagaactgctcagtaagcattagctactgcttcggttgccttccccctgtggagtgctggcctcttggattgagcttgcatcataggtgttcagtaggagcttgcttagtggatttataggttgaggttagaacccactggaattctcttcctggaaagaacaggcttctctttaaggtttc

SEQ ID NO: 652666 - DNA, 620 bp, Homo sapiens
aaggtcatccaaacataattatcgggtggggtgggtgaactcttttattcttttaatcatccaacaaatatttctcaagcgcataccttgttaagagactgttttgggtacagtaattcacagtgaataaaacacagatattctcacctttgtgatactacgtcatagttgcaaggagtggggagaaacagacaggaagcaaagaagaaaaacaagaagtcatgtgatgatatctactgggagggactcattaggcagtaaaggactcagcagtgtggaggtgacacattcagttttcagtagaagagtcagggaagttgtcactttgaagctatcatttagcttccctttctttcaatcttctttctttacatgggaaataaggattgtgggatatttttgggtggatcacagcacctagagatggayctgatcaataagaactgctcagtaagcattagctactgcttcggttgccttccccctgtggagtgctggcctcttggattgagcttgcatcataggtgttcagtaggagcttgcttagtggatttataggttgaggttagaacccactggaattctcttcctggaaagaacaggcttctctttaaggtttc

SEQ ID NO: 652667 - DNA, 616 bp, Homo sapiens
gaaattttaatacactaacaggccacttagagaatatttcagtgttcaaatgcaaattcttagcatggtatggtttttcaattgttaaaaaaattgaattcaaaaactgtatatataaaatgttacatttttctctaaattaagagtctcaaactccagtgaaattaattttaaaattcttaatatcaaatacgtatattagcagtttttttaagattaaacatagtctatttatttatgaagctgtttggacattttactatttttcaggtgaactatctggattctgcttacctagacaatgtccattggacttttgacaggaattattacactctttatctttcatggtgaaatagttcttattacattagactactggtttaaattttaaaaatattgtaaatgtatgaaacaacaacatatatggagagttctataaattatatacaatgacaaagcttgggagataattattgacaatgttactgatgctatacattagttgaattgctaattaaaaataaatgtcatggtcagtgaggtttcccacttaaaccatgcattgtgtctcctttgggtacaaccatttrattttttaaacgatttttttttc

SEQ ID NO: 652668 - DNA, 524 bp, Homo sapiens
ctcattattcagtgtagttacggtctagaaagttccatgaacaaataaaaagttaggtttcagcaagctactggtcacatttttgtaagcttaccaacacctacttttgttgtatgtgtgcttatttaatatatattgttggccaggcacagtggctaatgcctgtaatcccagcactttgggaagccaaggcgggcagatcatttgaggtctggrgttcgagaccagcctggccaatgtgatgaaaccccgtctctactaaaactacaaaaaaaaaaaaaaaaaaattagccaggcatggtggcgcatgcctgtagtcttagctacttgggaggctaaggcaggggaatcgcttgaacccaggaggcagaggttgcagtgagccaagactgcaccactgcactccagcctgagcaacagagtgagactctatctcaaaaaaaataataataattaattaaatgaatgaataaataaataatatacaatgtttattcattaacattaaactcacagccaatggc

SEQ ID NO: 652669 - DNA, 524 bp, Homo sapiens
ctcattattcagtgtagttacggtctagaaagttccatgaacaaataaaaagttaggtttcagcaagctactggtcacatttttgtaagcttaccaacacctacttttgttgtatgtgtgcttatttaatatatattgttggccaggcacagtggctaatgcctgtaatcccagcactttgggaagccaaggcgggcagatcatttgaggtctggggttcgagaccagcctggccaaygtgatgaaaccccgtctctactaaaactacaaaaaaaaaaaaaaaaaaattagccaggcatggtggcgcatgcctgtagtcttagctacttgggaggctaaggcaggggaatcgcttgaacccaggaggcagaggttgcagtgagccaagactgcaccactgcactccagcctgagcaacagagtgagactctatctcaaaaaaaataataataattaattaaatgaatgaataaataaataatatacaatgtttattcattaacattaaactcacagccaatggc

SEQ ID NO: 652670 - DNA, 524 bp, Homo sapiens
ctcattattcagtgtagttacggtctagaaagttccatgaacaaataaaaagttaggtttcagcaagctactggtcacatttttgtaagcttaccaacacctacttttgttgtatgtgtgcttatttaatatatattgttggccaggcacagtggctaatgcctgtaatcccagcactttgggaagccaaggcgggcagatcatttgaggtctggggttcgagaccagcctggccaatgtgrtgaaaccccgtctctactaaaactacaaaaaaaaaaaaaaaaaaattagccaggcatggtggcgcatgcctgtagtcttagctacttgggaggctaaggcaggggaatcgcttgaacccaggaggcagaggttgcagtgagccaagactgcaccactgcactccagcctgagcaacagagtgagactctatctcaaaaaaaataataataattaattaaatgaatgaataaataaataatatacaatgtttattcattaacattaaactcacagccaatggc

SEQ ID NO: 652671 - DNA, 268 bp, Homo sapiens
tgtttcaaaggtcccaaggcaaactttttaataattgtgrtcccactcaatagtcaagttcacttactttatgggtacatttgtggcatattttaaaatgtgaagttgagtgcatttcacttgaaaaccaaaggcatgtaatgacaacatgttatagaggaaaaattattgatttgtgtaaataggcagatcttgtttgtattctagctccatcacttactagttttgtgatatgggcaatttatatcctatctgagcctgtgtttcc

SEQ ID NO: 652672 - DNA, 400 bp, Homo sapiens
gacacacatttacctttttaacaaatctgcaaatgtacccctgaacttaaaagtttttaaaaaattttaaaaaggctatgagctctgccccatatcttagataagcaataaagcctttcaaagaacaacaaaacagaaatgattgtatggcttttgtgattcagttgacatgctgaatcacattgactaatctgcatatgttgaactatccttgcatccctgggataaattcccrcttggtgatgatgaataatctttttaatgtgttgttaaatatggtttgctagtatttcggggatgcatagaagatttttttgcattcatgttaatcagggacattggcctgtagtttcctcttttttgatgtgtctttgtctggttttgacatcagggtaatact

SEQ ID NO: 652673 - DNA, 494 bp, Homo sapiens
atttgattcaagaaatgaaactatggtcattcaggggtatagtgtttaattttcttatttgtgtaatttccaaaattctccttgttattaattttttgttttattccattgtggtcagagaagatacttcatataattacaattttttaaaaatattgaagactagttttgtggccaaacatatggtatatccttgagaatgagccatatgctgaggagatgaatgtgtattctgcagttgttgaatgaaaagatctgtaaatatctattaggtccayttattctatagtgtagattagtctatagtgtagattagtatagattaagtctgatgtttctttgttggttttctgtttgggtgatctgtccaatgctaaaagtagagttttgaagtctacagctattattgtattggggtctatctctatttttaggtaaacaatatttgctttatatatctgggtgccctagttttgggtacctatacatttgca

SEQ ID NO: 652674 - DNA, 541 bp, Homo sapiens
acctatctctgtctctcagggatttgtcactgatgttttatttattttgtctggtgatgctatgttttctaggatggtcttaatgcttgggaatatttcctagagtctcagcattaaagatttaggtatttattttagtcttcaaagtcttggtttgtttgtactcatccttcttgggaaggctttccaagtgttctaactgacttcggtgctgtgatctaagtctttggtcactgcagccatacctgcattagtaccccaagcccagtaacrctgtgactctttcagacttgtcaacatacggtgccttggtggtattgggtgaaatctgggagaattccctgaattacaaggtagagactcttgttatcttccctgattttcctccaaacaaatgaagtctctctttgtgtgttgagcagccttgaactaggggagaggttacacaagcacccctgtaaccacatcactgggactgccctgggtcaaacctgaaaccagcacagcactgggtctcacccaaggtttacagtaaccactg

SEQ ID NO: 652675 - DNA, 434 bp, Homo sapiens
aggaggtgtcccagacttcttgcttttacttactactcaagcctaatcagtgattgcatccttaagagccagccttcctagagtggctccaatgaactcgtgctccccattcctatgccattttctctgttcatgttttcattggattactgtaacagcccctcaccaatagctgcattcaggcttcatttgaatgctggagaagacacttagaatgcagatttgctccttttaggtccttacttaaaaccatggcctccacttcctayggaataagatctaaactccctcagcgagacacacaaggcctttctccagtcctgaccctggcccctggtctccagtgtgatgctttgctcagtcctaacaagcacagggaatcccttcaagggaggactcgctgcccacctgtgagcagtgtagctagcctatgg

SEQ ID NO: 652676 - DNA, 575 bp, Homo sapiens
attgcacaatgtattggctacagctaattataatgtattatatatttcagaattaccgaaggaatagattttaaatgttctcaccacaaagaaatgataagtatatgaagtgatgaaaatcttagcctgattttattattccataatgtaaacatgtatcaacatatcacattgtaccccataaatagatacacttatttattaaaatttaaaaataagaytgctggtttggtgtttcttgtcacgacatctggtgtgttggaacagagagagataggaatattcatggaagccactcctataccagaatggtttataattactgtaaatgaagcagcttagaaccacataaatatatttcattaatgccaaaactcacacttcttcagctagatcccagaggtgccaggagccatgacaatgttacctacagaaagggaattataaatgagagtaatgtaagatgtaaaaagtcagtgatttaacctttcgcaataaaaatatcttactctcccaaattacacaaaaacacacaacaatgatgtcaatgtattgctaacgcttctcattgcaag

SEQ ID NO: 652677 - DNA, 575 bp, Homo sapiens
attgcacaatgtattggctacagctaattataatgtattatatatttcagaattaccgaaggaatagattttaaatgttctcaccacaaagaaatgataagtatatgaagtgatgaaaatcttagcctgattttattattccataatgtaaacatgtatcaacatatcacattgtaccccataaatagatacacttatttattaaaatttaaaaataagattgctggtttggtgtttcttgtcacgacatctggtgtgttggaacagagagagataggaatattcatggaagccactcctataccagaatggtttataattactgtaaatgaagcagcttagaaccacataaatatatytcattaatgccaaaactcacacttcttcagctagatcccagaggtgccaggagccatgacaatgttacctacagaaagggaattataaatgagagtaatgtaagatgtaaaaagtcagtgatttaacctttcgcaataaaaatatcttactctcccaaattacacaaaaacacacaacaatgatgtcaatgtattgctaacgcttctcattgcaag

SEQ ID NO: 652678 - DNA, 575 bp, Homo sapiens
attgcacaatgtattggctacagctaattataatgtattatatatttcagaattaccgaaggaatagattttaaatgttctcaccacaaagaaatgataagtatatgaagtgatgaaaatcttagcctgattttattattccataatgtaaacatgtatcaacatatcacattgtaccccataaatagatacacttatttattaaaatttaaaaataagattgctggtttggtgtttcttgtcacgacatctggtgtgttggaacagagagagataggaatattcatggaagccactcctataccagaatggtttataattactgtaaatgaagcagcttagaaccacataaatatatttcattaatgccaaaactcacacttcttcagctagatcccagaggtgccaggagccatgacaatgttacctacagaaagggaattataaatgagagtaatgtaagatgtaaaaagtcagtgatttaacctttygcaataaaaatatcttactctcccaaattacacaaaaacacacaacaatgatgtcaatgtattgctaacgcttctcattgcaag

SEQ ID NO: 652679 - DNA, 528 bp, Homo sapiens
ttcagctccattataaccatatgggaccactgtcatatgtggtctgagtagccaactgaagttttattatgtgctgcatggctatatttaattgtcataactcctaaaaaagaacttttagagaacacaaaaaaaacactgacatcaaatttacatgtttatataactgtatgtgtgtgtttgttgtgcagtcttgtgataataaatacacataaacttttgatagagcacaagacatagttagcgtaaagtgcaaagcaaatatttacacaaaaagttttcaacacagacgattccaggacaggacagagcatcaaataagtgaatcatttaacataatacattytaaaatggttcaatctaaagaaattacataccaatgtccaagactatgagcagtgagcattttgaaacaaaaacattgtatatgttttattcaatatctagttgataacttaatcattttctttgacaatgaaaatataaactggtttatttttaaattatttgacatcataaattttcttt

SEQ ID NO: 652680 - DNA, 586 bp, Homo sapiens
ctcacccatactacctttcttgtgttattttataacactataactttacaacatgaagacagtattagtggtaactgatagcaaatgcctttaggtgaggtgacaggattctaatcaaattaaagtcacctatctttgctgctaaggatacaatgttaaacaattacttttaatgtgagtagttttcccatctcacattaaaagyaatttcccatctgcttactactaatacctttatatctatatttaggcattggtgaatacctttaaacctctgtagataaaatgatatagaagcaaagaaatctggctgaattgtttccccctgtcggtaaaattgccagaagctctgctcagtatctcatccttacagccagagttagcattcatttttggcaatttcataaatttttacatttcttgggttctcttcttctccagttctttgctctttacattaccattttcttaggagctttctgtccaaaagatttttttgtttttgtttttgttttaattcagtaccacaatccctgttgttctcaacaggagagatggtctgtagaaatctggtcaactattacta

SEQ ID NO: 652681 - DNA, 554 bp, Homo sapiens
agtttcaaacttaacattaaaattatgtcttatgtctgttactgaatccaagttatcatacaaagaaaaactcaaactgaaagtgccttaattttttgaaagaaatcactatgaaaaaattaaatttgaaaatgcccacttagggattcttatttttttttgtctcagtagagagtgagatcatattaaatacataaattgtgttttaatttgtataattattaaacacattcaaaataaacatagaaaaacagaaaatacaagtgaaaaagttaaattagtaaaagctaatgatactgatactactattgacaatatttgaatatattctctttctgcttttctattttatacaatattagggtagtactacttaagtagtattataacatttttcctcaaaatacgatattgtagatattttctcaaatcccaaaatrttttttgtaacataattttagtttgaatatatcatgccgtaactgagtatttttctattttttgacgttcatattgctttaacatttttactattgtatataaaatactttgat

SEQ ID NO: 652682 - DNA, 480 bp, Homo sapiens
acctaaattttagtcacattttgctttacctaaatgtcccagaatattagtattagctcttttcttgtgtataataattttaataatttcagatttttacgtccaaatctagactttcagtattgagacaaattaattttgtgaaattgggaacttaatttttcattacatgaagaatataattcttagatatttttscttgcttaggtggccttaaaaggtaaagactgctggatacacaatgctatcaacaatgttttttataattccagtagaaattaattttaaataacaaatatatgtatggtttaattttgatagcagatgaaacttactttatggttattgaagagtccgagtgatttctttggttgaaaatactttattgacccatatggcaggaagaccactcagcacagaggactgttcccaaatagggaaaaatgggaggcagccagcagacacgtgccttctcatatg

SEQ ID NO: 652683 - DNA, 429 bp, Homo sapiens
taacatataataataaaattaattttacctatgacttttacttttttaaaatgtgacttcttggaaattaamaatttcacatgtggctcacattatgttttattggaccgagctggtctagaatatgggggttttgttattcagattatttatccactcaggtaataagcatagtaccagataggtagtttttttatcctcatcttcctctcatcctccaccctaaagtaggccccagtgtatattgctcccttctttgggtccatgtgtactcaatgtttagctcccccatataagtgagaacatgtaatatttggttttctgttcatgaattaggataatggcctccagctccatccatgctgctgcaaataacatgattttattcttttttatggctgcatagtattccatgttttatgtttacca

SEQ ID NO: 652684 - DNA, 438 bp, Homo sapiens
aatgcatcttcctaattaaagccaagcacatgcaactattataatacttaatgctctgtattgtaattwgccttttaaattgtatcttttttagtacactcaaatcctcttaaggcagggcttacattttatactcctaaatcttgagagatagtgctaagcctggtacatattatacactcaataaatatttattgactaaatgaatcaattaaaaatgaaagaaaaagaagaatgggtgaattatttgttttaagatagaatagcacagatattgtgcacaaataattgtgaattgtttaaagctacacaatgattgactgatagaagaaagacattgattattgtttgagtagtaaaccaggatgcctgtgcattttatgaagttctacagaagcctttgaaattaggttatgtaacatggtcccagaattccag

SEQ ID NO: 652685 - DNA, 629 bp, Homo sapiens
gttagaactgtgttttcatgtatctgataaatgtatgcaatggtaaagcaagagcctttctatgaaaatcatgttatatttaaaactgttaagtgctgaatggtggctttaaatatgactcaaattggccccctctgtaagtaaagttctgataaacaggcagaattaaccatatacaatgtatttaatttggttataaattgagtagcatccaggcgtgatytaaccatttcgtcagcagcatagcaactatgtcatttctgcattatacccagaaaggcaattcgtattctaaaataagatgaaaaaaattattgataaattcagggtattccaaatagagagatctaacaaatacatatgtgcatccgtgacctataaatcactgtgctgctaaaactagactccccagcctcatggagcgtacaagtttataagatggagagcattttgaaagaatggtgagagaagggaattgaaattttctggaaaagaaaattcattttggaaagtgataggctattatattctagtgatagatggggtgaagagagagattccaactgggttttatcttatagtaatgattagaagtttttgagcatgaagttgaaacaaaaaaaaggaag

SEQ ID NO: 652686 - DNA, 530 bp, Homo sapiens
aacttacagggtagatacccagttttatggttgaggaaacttatgtcaacatgtggtaaattagactttaaactagggctttgaaactccaaagacgattactaaattatcctgtctcaaatcataataaaaataaaattatgatgtcccaatataatagtttactataacccatactttaaaaaagtatcttttaaattacayaaagaaaccagaaaatcaagtataaattgatggttcatcattattctcatttatagcacatatatttcattcataaatatatatttacattatatatttgagttattgtatatgtacattttaattttaatttagtataattttatttccacaagtatataaagctccaaatttaacaaatttatttaaaaaatcatagctaataatgacattccattgcaatatcagtgatacacaagaattattcttgaagatagagatatcactaggcagttgctgctgtgcgtgtgcatagcattgacactaaagccaatcttgtagagtta

SEQ ID NO: 652687 - DNA, 530 bp, Homo sapiens
aacttacagggtagatacccagttttatggttgaggaaacttatgtcaacatgtggtaaattagactttaaactagggctttgaaactccaaagacgattactaaattatcctgtctcaaatcataataaaaataaaattatgatgtcccaatataatagtttactataacccatactttaaaaaagtatcttttaaattacataaagaaaccagaaaatcaagtataaattgatggttcatcattattctcatttatagcacatatatttcattcataaatatatatttacattatayatttgagttattgtatatgtacattttaattttaatttagtataattttatttccacaagtatataaagctccaaatttaacaaatttatttaaaaaatcatagctaataatgacattccattgcaatatcagtgatacacaagaattattcttgaagatagagatatcactaggcagttgctgctgtgcgtgtgcatagcattgacactaaagccaatcttgtagagtta

SEQ ID NO: 652688 - DNA, 589 bp, Homo sapiens
ctataaattgggaattttagcctgtgccttccactgggacagtgactccctgagagtaaaactttggttttctgcggtattcagtccctgatgtggtgtttatcacatgatggatgctyactttatatgcttaagaatccaacaaattggtgttttgaggatatgcattggattctaaagtggcagtgttgtctgaaaatagaatttataaatatacaagattattatactgtcatttgagattacattagaatataattaacaagaaagatgatgcacataatgcattaatcatctctgtatttggtgtatatatacaaaggaaacagaaagttaataagtactttaacttaatgagaatttccctaaattcaactgtactttctctgactgatttaaatttcacttcaattacacatcatcttttcattttatatgaattcccagtttgtgacatttctaaattaaaaattagatgagaattttagatgatttaagacaatatttttaaacatgttacatcaatcttctgagttgtttaaaagcaagacattgtcactctctactgctgaatatgatgcatataatt

SEQ ID NO: 652689 - DNA, 503 bp, Homo sapiens
attcactttttttaatatgtccatatttgttgaaaagacttcctttgacctggtattgtctttacccctttgtcagaggtcagttactagatttatatgaatttagttgtggtctctttattctgttctattaatttatttgtttggtcttacactctcttgattactgtagctttataataagtcttcaagttgggtaattccagttctccaactttgttcctttccttcaataytgtgttggctattctgggccttttgcctatctctataaacttcataatcagtctgtcaatgttcacaaaaataacttgctagaatattcattggcaatctataagttgaatctataaatcaagtttggaataatttacatttgataacactgagttttcctatccataaatatggaatagctttccaattatttagttctttaatttgtttcattagggttttaattttcccttgtagctcttgtacatattttcttagatatatgc

SEQ ID NO: 652690 - DNA, 568 bp, Homo sapiens
actgagttttcctatccataaatatggaatagctttccaattatttagttctttaatttgtttcattagggttttaattttcccttgtagctcttgtacatattttcttagatatatgcctaagtattttattcttgggggatgctaatataaatgatattgtgtacttaatttcagcttcaacttgtgcattgctggtatgtaggaaaacatttgacatttgtatagtaagatcgtattttgcaactttgctaaaattacttattaattccagaagtttttttgttgattccttcagattttctacctagatcattgtgtcatctgcaaatgaagrtagttttaatttttcttttccaatctgtatgccttttcttttttttcctttccttttttttttgtcttatgggatttggtagtactttcaatatgagattgaaaagaaatggttacaggggacatcctcacaatgcttctaatcttagtgggaaggcttcaagtttctcactattaagtatggtattacctgtagttttttgggtttttttgcgggtatttttttaagcag

SEQ ID NO: 652691 - DNA, 407 bp, Homo sapiens
ctcatttgtaaaaagaagaatgctgacaaagaacttgaaatgtagttgttaatatttaagaaatacatacaaaggatacagcatacagcataacacattaagagacacagcgagggatacaattctggataagaggggaaagcagaaagtattgtgatttggtcaaatgaactatcaatcttgctataaattttaagtrtaaaaggataaggtataaaaaacagaaggataagattcctttaggatgcctacaaaaactatgaaatttattttcgttaactctaagtatgtactgattacccttatgcaaatcattattgtgaaaaacatttgcaggtcatttatacagtcgatgaatcacctggatcagagacctgtatctggggttcatgactttatttccatga

SEQ ID NO: 652692 - DNA, 407 bp, Homo sapiens
ctcatttgtaaaaagaagaatgctgacaaagaacttgaaatgtagttgttaatatttaagaaatacatacaaaggatacagcatacagcataacacattaagagacacagcgagggatacaattctggataagaggggaaagcagaaagtattgtgatttggtcaaatgaactatcaatcttgctataaattttaagtataaaaggataaggtataaaaaacagaaggataagattcctttaggatgcctacaaaaactatgaaatttattttcgttaactctaagtrtgtactgattacccttatgcaaatcattattgtgaaaaacatttgcaggtcatttatacagtcgatgaatcacctggatcagagacctgtatctggggttcatgactttatttccatga

SEQ ID NO: 652693 - DNA, 621 bp, Homo sapiens
tctctggttgtagaataaccaaagagggttagaacagataggagaagaaacagacagttggatttcagaatggatagggtctatttctgttggtaaaagagactcagaataccagatttaaagtaaataataaagatagcataaactatgtgatttccaaaaagtgytcagcttcctctgcctgttctgggcctgtctgtccaacagaattcagtgaaatctgatttcctcatattcttttttaattttttttttttgagatggagtcttgctgtgttgcccaggctggagtgcagtggcctaatgtgggttcactgcaagctccgcctcccgggttcatgccattctcctcattctcctgcctcagcctcccgaatagctgggactacaggtgcccgccaccacgcccggctaatttttatttttttgtgtttttagtagagacggggtttcaccgtgttagccaggatggtcttgatctcctgaccttgtgatccgcctgcctcagcctcccaaagtgctgggattacaggcgtgagccaccgcgtctggcctgatttcctcatattttttaggaaagtggagtcaacttatatttgaggaaggcgtttataggaattt

SEQ ID NO: 652694 - DNA, 621 bp, Homo sapiens
tctctggttgtagaataaccaaagagggttagaacagataggagaagaaacagacagttggatttcagaatggatagggtctatttctgttggtaaaagagactcagaataccagatttaaagtaaataataaagatagcataaactatgtgatttccaaaaagtgctcagcttcctctgcctgttctgggcctgtctgtccaacagaattcagtgaaatctgatttcctcatattcttttttaattttttttttttgagatggagtcttgctgtgttgcccaggytggagtgcagtggcctaatgtgggttcactgcaagctccgcctcccgggttcatgccattctcctcattctcctgcctcagcctcccgaatagctgggactacaggtgcccgccaccacgcccggctaatttttatttttttgtgtttttagtagagacggggtttcaccgtgttagccaggatggtcttgatctcctgaccttgtgatccgcctgcctcagcctcccaaagtgctgggattacaggcgtgagccaccgcgtctggcctgatttcctcatattttttaggaaagtggagtcaacttatatttgaggaaggcgtttataggaattt

SEQ ID NO: 652695 - DNA, 621 bp, Homo sapiens
tctctggttgtagaataaccaaagagggttagaacagataggagaagaaacagacagttggatttcagaatggatagggtctatttctgttggtaaaagagactcagaataccagatttaaagtaaataataaagatagcataaactatgtgatttccaaaaagtgctcagcttcctctgcctgttctgggcctgtctgtccaacagaattcagtgaaatctgatttcctcatattcttttttaattttttttttttgagatggagtcttgctgtgttgcccaggctggagtgcagtggcctaatgtgggttcactgcaagctccgcctcccgggttcatgccattctcctcattctcctgcctcagcctcccgaatagctgggactacaggtgcccgccaccrcgcccggctaatttttatttttttgtgtttttagtagagacggggtttcaccgtgttagccaggatggtcttgatctcctgaccttgtgatccgcctgcctcagcctcccaaagtgctgggattacaggcgtgagccaccgcgtctggcctgatttcctcatattttttaggaaagtggagtcaacttatatttgaggaaggcgtttataggaattt

SEQ ID NO: 652696 - DNA, 621 bp, Homo sapiens
tctctggttgtagaataaccaaagagggttagaacagataggagaagaaacagacagttggatttcagaatggatagggtctatttctgttggtaaaagagactcagaataccagatttaaagtaaataataaagatagcataaactatgtgatttccaaaaagtgctcagcttcctctgcctgttctgggcctgtctgtccaacagaattcagtgaaatctgatttcctcatattcttttttaattttttttttttgagatggagtcttgctgtgttgcccaggctggagtgcagtggcctaatgtgggttcactgcaagctccgcctcccgggttcatgccattctcctcattctcctgcctcagcctcccgaatagctgggactacaggtgcccgccaccacgcccggctaatttttatttttttgtgtttttagtagagacggggtttcaccgtgttagccaggatggtcttgatctcctgaccttgtgatccgcctgcctcagcctcccaaagtgctgggattacaggygtgagccaccgcgtctggcctgatttcctcatattttttaggaaagtggagtcaacttatatttgaggaaggcgtttataggaattt

SEQ ID NO: 652697 - DNA, 437 bp, Homo sapiens
ctcaagctactgtagccaaatggccacagtgggcagggaggaggccggcaggggagggtaggtggggtgcaggagctctgcagaactgtgctgggaccagaggactgttcctgacttgagccaggctctggaaagcggaatttggtcagaagggaagggaggtattggtgggaggggtgcccaaaggaccagcagttagaggaaagaggcccatctggaagcccawctgggctggaaccacccaccctttggaatgcatttatgctaattagataccatgtcttaaagtagatttagaggttcataatgtttttattaaaagaaaagaaaaaaaagaaaccatgtcaaataggtttgggatctgatgggctttagggtgggaaagtcagaaggcctggggtacctgatggagaggaagcaaaggtgaaatttgtggt

SEQ ID NO: 652698 - DNA, 432 bp, Homo sapiens
caagctactgtagccaaatggccacagtgggcagggaggaggccggcaggggagggtaggtggggtgcaggagctctgcagaactgtgctgggaccagaggactgttcctgacttgagccaggctctggaaagcggaatttggtcagaagggaagggaggtattggtgggaggggtgcccaaaggaccagcagttagaggaaagaggcccatctggaagcccatctgggctggaaccacccaccctttggaatgcatttatgctaattagataccatgtcttaaagtagatttagaggttcataatgtttttattaaaagaaaagaaaaaaaagaaaccatgtcaaataggtttgggatctgatgggctttagggtgggaaartcagaaggcctggggtacctgatggagaggaagcaaaggtgaaatttgt

SEQ ID NO: 652699 - DNA, 619 bp, Homo sapiens
agctgttggtggatctaccattctagggtctggaggatggtgctccactaggcagtgccccagtggggactttgtgtgggggcttcaaccctacatttccaggccccractgctgtgtatggaaatgcctggatgtccaggcagaagtttgctgcaggggcagggccctcatggagagcctctgctagggcagtgcagaagcgagatgtggggaggtacaattcaagatgagttttgggtggggacgcagccaaaccatatcaagtcccagtgactacagtttggttttccaaatttgtttcctatttctttctttcctgtcctcttcctttccaatactttcatatagcctcttgttccttcaggttctgtgcactttatttatactctcccctctgccagaaatgtttttggtactttttaggattaggttaagttatgagtgagagaaaacccagtgtaaggggcccattgaggttgcaccagagcccctgtgacccgtttaatcatctcccacagcttctgcacatcgagagaagcaggggcagcctttagctgaactaggtaacagcctagttccattgtctgaaatctgggcaaactgtgaggtgtagtttac

SEQ ID NO: 652700 - DNA, 619 bp, Homo sapiens
agctgttggtggatctaccattctagggtctggaggatggtgctccactaggcagtgccccagtggggactttgtgtgggggcttcaaccctacatttccaggccccgactgctgtgtatggaaatgcctggatgtccaggcagaagtttgctgcaggggcagggccctcatggagagcctctgctagggcagtgcagaagsgagatgtggggaggtacaattcaagatgagttttgggtggggacgcagccaaaccatatcaagtcccagtgactacagtttggttttccaaatttgtttcctatttctttctttcctgtcctcttcctttccaatactttcatatagcctcttgttccttcaggttctgtgcactttatttatactctcccctctgccagaaatgtttttggtactttttaggattaggttaagttatgagtgagagaaaacccagtgtaaggggcccattgaggttgcaccagagcccctgtgacccgtttaatcatctcccacagcttctgcacatcgagagaagcaggggcagcctttagctgaactaggtaacagcctagttccattgtctgaaatctgggcaaactgtgaggtgtagtttac

SEQ ID NO: 652701 - DNA, 607 bp, Homo sapiens
ggttggagtatgaggtgattagtgctcttccagcttgaggaagtaaagtggtggagagagtagccagggaagtgccaagaaacagtctacgagccagggaggagggagtgtgccaccgtacccagggagaacttgttggggctggcaatctggccctttgtcagagtattgaaggagacagcaagaggaccagatgtgaggtgggtgggtgctggcactgcccatggcacctggcacaggctctggcattgtgtggaacaggggaggktgacagtgcctcttgccaatctggttgagagggctattgtgccaggagtgagaaggaaggaggtgaaacatttcgggaggtggggtgtttgggagaccagatttttttctgccaggtcctccttccccttccctcttaggcatggggagtggagcaacagacggagagtggcatgaagacacaaaggaggaagcacaccattgccaagaccccaaggaagaaggatggaaagcgctggcagtcctgcctggcccccagccagttccctgctgaagatggccagatccccttgtctggtctgtatatgccacttttgctggggtggaaggagggaagggc

SEQ ID NO: 652702 - DNA, 456 bp, Homo sapiens
ttgggtgagtgggctcaagcatgcacatcaagaggtaaaatggctgagtttaactggtatatgaccaccttctaggaatactcgactggtaagggaagaatgcttaaagtgagcatgygtacaactccagtaaacacactgcacatgaagtccctgtcaggtgctggcaggccattgcacatgcagaatgccaatatgtaagaactcaagtccaaggtcagacctggcactcgatctctcaagttgcttgcttggccctctttctagcatactttacttcctttcgttcctgctctaaagctttttaataacttttcacacctgcttcaacacttgcctgggtctctcactctgccttatgtccttcagttgaattttttctcctgaggaagcaagaattgaggttgctgcagacctgtacggactcactgctgctaacatactttagtgccatgt

SEQ ID NO: 652703 - DNA, 374 bp, Homo sapiens
tgctgccctatgagctcacatgctagtcaggagaaactacaataaataacaaactatattatatatagtgttactaggtacagaataaaaaagataaggagtagggcagaggagttgrgggtgtgggggttgagggcaagccagggtaggcacatcatatgcaaagcatcacaggaccgtggaggaccatggcttccagtgaggctggtggaggtgccattggagctgagacctactcattaaacatacgaacaaattaggttgcaggaatgctgtctttcagtgggaaggccaggatctgaacaggtgggacggttaatggtgaagggataaatggacctctggaatcctcaagacatgggaagtaatattat

SEQ ID NO: 652704 - DNA, 646 bp, Homo sapiens
ggttgtctttcttttgagaaataagcaaaagacttgtcggagtttcctagatctggaaatcaggttgcttcctcagcagccatttcctatgtcatttccagtcctacccaatctaggtcctgccagagagatgggggtggggtgtgtactacagactctcagagccttagggctcaacagaggcgcttccacatctccagtcgcagcacgggaatagtagctgctatttatggagcctttattctgggtcaggcactgtgctaacagtgtctcaggagttctctcatttatagattattacagctctgtgaggyagagggttacctgtgaagaacctagattccgggaatggtcagtaacttgccaaagagtggtcatcccttcagcgcccccagctcagccaaggcggacaggtcccaggaagtccagactcatctcaaacatgcaccagtcagaagcatagggttaacgagcgcgggacacagcatagtttccctcctatgggcaggaagacattctgttagtttctcagtgggtcctggtggaattgattcctgttgcccacagcagcgaccccacactgcatcgttatttatattagctctgcttgctgacctgaatctctctccctgccctctccctgctt

SEQ ID NO: 652705 - DNA, 646 bp, Homo sapiens
ggttgtctttcttttgagaaataagcaaaagacttgtcggagtttcctagatctggaaatcaggttgcttcctcagcagccatttcctatgtcatttccagtcctacccaatctaggtcctgccagagagatgggggtggggtgtgtactacagactctcagagccttagggctcaacagaggcgcttccacatctccagtcgcagcacgggaatagtagctgctatttatggagcctttattctgggtcaggcactgtgctaacagtgtctcaggagttctctcatttatagattattacagctctgtgaggtagagggttacctgtgaagaacctagattccgggaatggtcagtaacttgccaaagagtggtcatcccttcagcgcccccagctcagccaaggcggacagktcccaggaagtccagactcatctcaaacatgcaccagtcagaagcatagggttaacgagcgcgggacacagcatagtttccctcctatgggcaggaagacattctgttagtttctcagtgggtcctggtggaattgattcctgttgcccacagcagcgaccccacactgcatcgttatttatattagctctgcttgctgacctgaatctctctccctgccctctccctgctt

SEQ ID NO: 652706 - DNA, 563 bp, Homo sapiens
atattctgtagcacagaggcaaataagacaagaaaagaaaatagactgaaagtcttgaaatatgcctactggataatctagaaactaaattactgagtgaaggcaactgagagggaagaggtaggaagcaaaaagcaatggcaatgattgaattttgtaaaatattttagtaaatgtaattaaggattgagagtaaatttcttaatatactttttgtgttttttctcatagtaaaataacatctctaaacaaatggtattaaaatagggtgtatgcaccccagatggttagcaaaatagtctcctggtaatcaaaaagaaaatattagaactttcatctttatattatatttcattatatatatgtatatattttataatttatataatatgttgataagcaatgcatgtctatagtttataaatragtaatacacttatattgcaggtgtgtgctcaaaattcattaattgagtatttgaaaatgttggagaccacagttctaggcaaaatagcaaagaatattgggtcagggattattcaatgagtaacgaaagtatccta

SEQ ID NO: 652707 - DNA, 601 bp, Homo sapiens
cctcccttttactgagggactatttctctgtattttgatgctcgttaggtagcataccaagactcacccatctgtggtaacctacctttggaaagatactatagaaataactacaaatatgtatgcacgccaagagcaactccacattgttcccctgggaccccagagaaagattgtyggtattgcatatcatggcaccctagccacaacaaaggtcaattatgcttaccaaaatgctggtggactgcaggttcctccttacatgtctacatacacacatacccagcaaccttcatatatgttatcaaaaagggaacccagacccgtctggcccagcaaggcacaaaaatgaggaacgctatctatcagaacagattagctttagactatctcctagccctagaaggagtagtatgtggaaagttcaatttaacaaattgctgcctggaaatcgatgacaatggaaaggcaattatggaaataactgcaagaatgagaaaattagcccatgttccagttcaaacttggaaagggtggtctccagattctctctttggaggcttggtttttatttttctgagggttcaagactttaatagga

SEQ ID NO: 652708 - DNA, 601 bp, Homo sapiens
cctcccttttactgagggactatttctctgtattttgatgctcgttaggtagcataccaagactcacccatctgtggtaacctacctttggaaagatactatagaaataactacaaatatgtatgcacgccaagagcaactccacattgttcccctgggaccccagagaaagattgttggtattgcatatcatggcaccctagccacaacaaaggtcaattatgcttaccaaaatgctggtggactgcaggttcctccttacatgtctacatacacacatacccagcaaccttcatatatgttatcaaaaagggaacccagacccgtctggcccagcaagscacaaaaatgaggaacgctatctatcagaacagattagctttagactatctcctagccctagaaggagtagtatgtggaaagttcaatttaacaaattgctgcctggaaatcgatgacaatggaaaggcaattatggaaataactgcaagaatgagaaaattagcccatgttccagttcaaacttggaaagggtggtctccagattctctctttggaggcttggtttttatttttctgagggttcaagactttaatagga

SEQ ID NO: 652709 - DNA, 508 bp, Homo sapiens
acttcatctgtggcatgagggtggcacctctgtgggagggcgctgtgtggcgtggggacactgggcatggggacactgcaccacaaagcttaggccctgacatacagcggctggtgaatcaagggtggctattattgttttggtgctatcattatcttaaataattaaagaaaataagaacatctcacgataaagggaacagattctaagttaaccttttaaaattactaggccactttaacctccgggaatagcactcagataacaatgtcttagtattactggaagatttacagagtcaagagcctgctcttatccctggatastgagataatcacatgaatggagaaaaaagcatgcttctctcaccttttaatagagtgaaacacatcatgttaccggaaacccttttgttctgttttttacagtaagagaaaaagtaattaaacttcaaagtcagatctgtaaatagctacatgaggacctatggtaaaagcagagctacaag

SEQ ID NO: 652710 - DNA, 545 bp, Homo sapiens
ttataattaatgacatatacttcatataaaatactgaaatcttgcaacttgtagatccatatttaccccatcttttatgttatggtacttgtatttattacataaaaatacattataaatcctgtaagacaatattttaatttctgtctttaaaagtttgaaggttcaaggctgggcacagtggctaacacctgtaatcccagcactttgggagggtgaagcaggatcacttgaggccatggattcaagaccagcctgggcaacacagtgagaccctgcctctataaaaaatttaaaaattagccaagcgtggtggggtgcgccygtagtcccagatcctcagaaggctgaggtgggaggatcacttgagcctagggagtgaaggctgcagtgagctgtgatcacaccactgtactgcagcctgggcaacggagtaagaccctgtcaaaaaaaaaaaaaataataaaacttaaggtttcataataacataaaaggaaaaaggaaaaaaatgagtctttgaactgatgcaggtatttatcatttcc

SEQ ID NO: 652711 - DNA, 545 bp, Homo sapiens
ttataattaatgacatatacttcatataaaatactgaaatcttgcaacttgtagatccatatttaccccatcttttatgttatggtacttgtatttattacataaaaatacattataaatcctgtaagacaatattttaatttctgtctttaaaagtttgaaggttcaaggctgggcacagtggctaacacctgtaatcccagcactttgggagggtgaagcaggatcacttgaggccatggattcaagaccagcctgggcaacacagtgagaccctgcctctataaaaaatttaaaaattagccaagcgtggtggggtgcgcctgtagtcccagatcctcagaaggctgaggtgggaggatcacttgagcctagggagtgaaggctgcagtgagctgtgatcacaccactgtactgcagcctgggcaacrgagtaagaccctgtcaaaaaaaaaaaaaataataaaacttaaggtttcataataacataaaaggaaaaaggaaaaaaatgagtctttgaactgatgcaggtatttatcatttcc

SEQ ID NO: 652712 - DNA, 588 bp, Homo sapiens
gagcattttattgtcgggatgtagccaggggataatggctaccacttctagggtgtctactatgtgccgggcactgtactagaaacttcgcattgctcattcctagtcctcacagcagccctgcaaggtgggtgggcactctgaccttattttagaaagaatccaaggcgtgtgctgygtcttccagctcagctgaggatgagtccagtcctgtctgccttgaggacccttgccctccttcacctgggcacctcttacccccagagacaggattccagccatcctgcaatccttccaccggatgcgttccaaacacagcgtttctcaggctcctttcatctgagaaattctccttttggtgctgtgtttgttgtcgtgttttgcctctaggaaaaagttaattttttttttaaaacaaccctttcatgaaccaaaagaatctctcatatcttagtgtcatctggaagctagggatccatttaccttagcacatgacgagcagaaaattgtgtttgaaacttccctgctgctatgtcacttctgcatttttaaagagcacttatctgaaaatgattcattacagctgct

SEQ ID NO: 652713 - DNA, 565 bp, Homo sapiens
tggctcctcctctgcacatctgatttttattaagaatttccaaaaagaatctgcattgtgtaaactccagatccattttatctttaaaatcctatggctttggtaaatgtgctgggtaaatatttccatagaagatatttacaaagagatttttgagaaatgccacagtaggaaattttgatttggaaatgagggactgggaaaatttactaatcatgttcccaaactaattcaggcaactaaacatgtccatttaaaaataaattctttgtcttgttagaacccaggcgtggttgaggcgagcatagcacagagctggctgagtttcatgcatcatgcactgaaggggtttcagagacagttactgtctcctcttaggcaattgctggtcttgacagggacccataggagtaagagctgcagtaactcaaaagmagcagctaagactcggtagaagtgaaggttaagctggtaattcagtggctgcctgaccccttcccgcctttcttcctctgtattcccacgtgcgcagccccatgctcaggctgccttgaccccagcacca

SEQ ID NO: 652714 - DNA, 493 bp, Homo sapiens
cgggcgggagctggtctgtgggctgcttgcgatcccagcctgcccgctgttccagagccccattctcttccactcaggaaggctagttagggtgcatgtgagtgagagtgctgacgtcatagggatggcttccaccctgtgctgctttgtagaagaagcaaatcattcacacaggcagtgctttaacttgcagccacaacagattattagccataaagctcacagttttttacacgccatgtgcaaagctgtcgttagcacatatggcacttatgcgcaaattagaaaaaggctcccttttctttagaaaaacagttccatctcaacactatttctcaataataatacttacagcagatagaaaaccattttgattaattatacaaatctttactattgaacacaaaataatagtgtttgtggagtcctaaatattaaccttttctgagatactttattttaaagtaattacmtgttttgctttcataaaact

SEQ ID NO: 652715 - DNA, 509 bp, Homo sapiens
tccctctttggtggtaatgctacagagtgatgctgtgtccyctgtggggcattgtatcaggaggcacatgctactgatttgtcccattgctggccatgttaagtttgcacagtggttgaggtggtgcctaccaggtttctccactgtgaagcaattcttgactatgtaatctgtggagaactgtataaacatccttgccagaactcttgctacagcctcctcattggcctaccctcctcctgtctccctcctccaatgtatccactcaccatcctgaagagatcttgctaaagctcagatctgaccatgccactcccctgttctgaagccttcaatggcttcctatcatctgagagatgagatcagccccattcaccctcagtctgcccctaaacccctccaaccttgcatcccctctccccagcctttctggaaaccactgtgctttttctggcatctctgctgttcccactgcctcaatgtgaacctctgggtaattcctgttcctc

SEQ ID NO: 652716 - DNA, 509 bp, Homo sapiens
tccctctttggtggtaatgctacagagtgatgctgtgtcctctgtggggcattgtatcaggaggcacatgctactgatttgtcccattgctggccatgttaagtttgcacagtggttgaggtggtgcctaccaggtttctccactgtgaagcaattcttgactatgtaatctgtggagractgtataaacatccttgccagaactcttgctacagcctcctcattggcctaccctcctcctgtctccctcctccaatgtatccactcaccatcctgaagagatcttgctaaagctcagatctgaccatgccactcccctgttctgaagccttcaatggcttcctatcatctgagagatgagatcagccccattcaccctcagtctgcccctaaacccctccaaccttgcatcccctctccccagcctttctggaaaccactgtgctttttctggcatctctgctgttcccactgcctcaatgtgaacctctgggtaattcctgttcctc

SEQ ID NO: 652717 - DNA, 392 bp, Homo sapiens
ccttcgtaagccaccgattgtcgctggcacgtggattccttctccataaaaccccacctcggaggctctcggaactcatcagggtctcctggggggtgtggggcagatcgtgggtgacagcaccctgcagataccctgttactaatgaacagtgccagcgccttggcctggctgggtaggatttggaacagagcaagtgagagtgtgagagtgtgtgtgtgtgtgtgtgtgtgtgtgwgagagagagacagagagagagagagagtgtgtgtgtgtgtgtgtgtgtgtgtgtgtgtgtgttggggaggggtacattgacagaaggggcctgacctcaccctcttccactgggtgccagttgtcctggctgccagaaattgcccgccggggct

SEQ ID NO: 652718 - DNA, 633 bp, Homo sapiens
gctgtgtgcatggtgtactgccaggcactgtggtttgaggctagagcagggaattcagccagccttgggtctccccttgtgggatttgcctctccagcccactctggtgtccttgtccttagggttaatagactgaggttactggtggactaaacaagaatgtatacagtaggcactgaaaaatggcggctccccctcccctaggccctttcacacactcagttccacatgacgccccctttaacctatgtagtcaatgttatcattccattttatagacgagcaaatggagatttagagaaatggagtggcttgcccaaggtcacacagggagtaactgagacagatgggactgagacaggtgcgctgtccccaacctggggtcacccacctcaggagggtcagaaaagtggcactctttyccaaagaagggagctgggtgtggcggtggcttgggggaagggcctttatcaggacccaagcccagcaatcccctctgaacttttcgggaggagggagaggtctcagggggcacctatgtttggagcctggatggaggcttggccctgagcccagctatgtggcggaagcactagcttcaggcaagccctttgcctctggggaggtttccac

SEQ ID NO: 652719 - DNA, 514 bp, Homo sapiens
tgagggtttgggcctgacaggactgggtttaaatcccagctctaccatttaccaacgttgtgacctcaggccaggcccctgagcctctggtcctagggagtttccttacatgcaaggtgcaggcagtaccagctagcttgcagcagagactggagccagcgcctgatggtgactgggggcctgtgtgagtgtgactgcggcgtgtttgctcccctctgrgctgtgagaccctcgggtgtgggatggtgcattgttccccattgtgtctcctgttcctggcacaacagggcactcagtgtggcgaaatgtgtgagcccagggtcagttctcagcaattgtctgtgatgaagaaccggtgaccaagcctgtgagggagataggggagcaacttcttattgagttgacttccagaaggatgctgaggacctttgccctactctctggtatagctggagtcctgggaccatggcaaaaatatgagcaagagttaccggaccccccattaattaggaag

SEQ ID NO: 652720 - DNA, 583 bp, Homo sapiens
aaaacgggtgcctctccttgctccttttggaaagaaagcctttatggaagctagccatggcacgtctcgctgcttggggtgaagcctgtattgttattgatttatttatgcttgggctgattttgaaagaagctcagaaagcttgtaaaggtacacactgtgtcacataggagcttgaggcaaaaaaggggtaaaataaattaaaaatggagctaggaatgaggctcaaaataaatgtcatggtgatggacatcccattgttaatgggtggtgaatgtgattccaagttttctggtgaccagttgtcgacaagaacccgtcagtcccccttcttgtggtaaccatgacatcagaaggcagattgcccagcagattgtagctcttgttaatgccacgattaagccaggatttctcccagagactttgatagagaggagtgtgtgatgccatgagcagagctcttaaaggcaccctcacrgtgggggctgctgccgtgtaaggttttgtttgcagactagggattgacagagcattctctgtggggaaagcactaacataggttttagtggagcagtgggtgggg

SEQ ID NO: 652721 - DNA, 621 bp, Homo sapiens
taaagtttgggctcagcctgtgaatttttacaaaaatgccagctggaattccaattgagattgtgttgagtctgtgactattcagggagcacatcttgaaaactgatgaacaaggtatctttcaccatttacttaactcttctttagccttctcttactactgttttattcctaggtatttcrtgtttttgctattgtaaaagttattttcttttggcattatggaaattttcaaacatacagtaaagttaattttacagtgaacatcaatatattcactacctagattttacattaccactttacttgttttatcacttatttatcaattcctctattcttcagtccatctttttgatgcatttcaaagtaaacttgacagcattacacttcccctaaatacttcagcatacatattaaccgcagtgttttcttttttttgtgacacgtatatgcgttgaaacatgtaaatcttaagtttatccagtgagtactggtgaatggaaccaaaccccaagatacaggacgttatcatcacctggaaaattctctcatctcccttcctaggcagcctctcactcacagataagcacccacagttccgagtattttctccacaga

SEQ ID NO: 652722 - DNA, 611 bp, Homo sapiens
tcagcctgtgaatttttacaaaaatgccagctggaattccaattgagattgtgttgagtctgtgactattcagggagcacatcttgaaaactgatgaacaaggtatctttcaccatttacttaactcttctttagccttctcttactactgttttattcctaggtatttcgtgtttttgctattgtaaaagttattttcttttggcattatggaaattttcaaacatacagtaaagttaattttacagtgaacatcartatattcactacctagattttacattaccactttacttgttttatcacttatttatcaattcctctattcttcagtccatctttttgatgcatttcaaagtaaacttgacagcattacacttcccctaaatacttcagcatacatattaaccgcagtgttttcttttttttgtgacacgtatatgcgttgaaacatgtaaatcttaagtttatccagtgagtactggtgaatggaaccaaaccccaagatacaggacgttatcatcacctggaaaattctctcatctcccttcctaggcagcctctcactcacagataagcacccacagttccgagtattttctccacagatt

SEQ ID NO: 652723 - DNA, 566 bp, Homo sapiens
aaattcatcattcgtataatgctgattaatatgttttaaacttaagtgggcggatcacctgaggccaggagttcaagaccagcctgaccaacatggagaaaccctgtctctattaaaaatacaaaattagccgggtgtggtggcacatacctgtaatcccagctacttgggaggctgagacaggagaatcgcttgaaccygggaggcagagcttgtggtgagccgagattacacgccattgcactccagcctgagcaacaagagtgaaactccatctcaaaaaaaaaaaaaaaaaaaagagaaaaaatgttttaaactcacactttgtcagaaatggcaggtgtattagtctgttctcgcactgctataaagaactacctgagactgggtaattaagaaaagaggtttaattgactcaattctgccagctgcacagaaagcatggctggggaggcctcaggaaacttacagtcatggtagaagggcaaaggggatgcaagcaccttcttcacatggaggagcaggagagagagagtgaagggggaggtgctacacacttttaaaca

SEQ ID NO: 652724 - DNA, 566 bp, Homo sapiens
aaattcatcattcgtataatgctgattaatatgttttaaacttaagtgggcggatcacctgaggccaggagttcaagaccagcctgaccaacatggagaaaccctgtctctattaaaaatacaaaattagccgggtgtggtggcacatacctgtaatcccagctacttgggaggctgagacaggagaatcgcttgaacctgggaggcagagcttgtggtgagccgagattacacgccattgcactccagcctgrgcaacaagagtgaaactccatctcaaaaaaaaaaaaaaaaaaaagagaaaaaatgttttaaactcacactttgtcagaaatggcaggtgtattagtctgttctcgcactgctataaagaactacctgagactgggtaattaagaaaagaggtttaattgactcaattctgccagctgcacagaaagcatggctggggaggcctcaggaaacttacagtcatggtagaagggcaaaggggatgcaagcaccttcttcacatggaggagcaggagagagagagtgaagggggaggtgctacacacttttaaaca

SEQ ID NO: 652725 - DNA, 600 bp, Homo sapiens
tttaaaaactgagatttatttgcattgataaatgaaatctttccttacagtgtgagcctagttctaggttgtcgactcctgaagggttctgttgctttcacacaacaatttgaatttgtcctgggatacagtctttagattgtagttaaattccacagtgctgcctccttttaaatgtggtgatatatttagtggctgttttcatcctccttttagcttttcttctggttttaagagaatggcctatgtggaatgtctaataaccgaaagagaaacattattcttccttcaagttaattttgtattcagaatactagtccatatttggagaaagtcatatataattatctatttggaagatttaattttatggttacatcagtaatccagtaattaaaattattttctgtaatatatagtgtgtagatttgaagataagtcttaagttcaccatgtgarctgacatacttaccagttaaaattccttacatgctgtttagaacctctaggtgctgaactttttggttagatttcatatttggttgatggtgatatagtgatatgtcttagtgaagagaactagcaatttttatggcttcc

SEQ ID NO: 652726 - DNA, 607 bp, Homo sapiens
tttgaaggcagttttgccaccttcgaaatttccagtaaaatatttggctttgtgaaatttgcattttacatatrtcgttataaatgtgaggtaactgtcatcagtttgcattgaaagcttatttagtaatagtaaaacacactgttattataacaccgtgagaatcatcagggtaatccttgagttcccttctcagtgtttgagaaaacagacttttaaaatacctttctgaaaagatgaatttatgttaaattgtactttttcaaaattacttgatgtttaattcaagtggtatagcttgatgaaacattatgacaataattcaaatattttctgttgtaatatatagagcataaacagatttgttcttaaaataatggagaatgaaaaacatgcaatgaaagtagcttacttaattttggaatgcaacatatgagtttcaaacttttgtcatgttttgcttagctgataaggatttgtttacatgcagggaacaaccatgagctgacagtggggtggtgttgcatgtgccttggtgaatatttatcagatgacttctgtgtgcatcatattgtattaaggggaaaacatcacccaagtagagcca

SEQ ID NO: 652727 - DNA, 607 bp, Homo sapiens
tttgaaggcagttttgccaccttcgaaatttccagtaaaatatttggctttgtgaaatttgcattttacatatgtcgttataaatgtgaggtaactgtcatcagtttgcattgaaagcttatttagtaatagtaaaacacactgttattataayaccgtgagaatcatcagggtaatccttgagttcccttctcagtgtttgagaaaacagacttttaaaatacctttctgaaaagatgaatttatgttaaattgtactttttcaaaattacttgatgtttaattcaagtggtatagcttgatgaaacattatgacaataattcaaatattttctgttgtaatatatagagcataaacagatttgttcttaaaataatggagaatgaaaaacatgcaatgaaagtagcttacttaattttggaatgcaacatatgagtttcaaacttttgtcatgttttgcttagctgataaggatttgtttacatgcagggaacaaccatgagctgacagtggggtggtgttgcatgtgccttggtgaatatttatcagatgacttctgtgtgcatcatattgtattaaggggaaaacatcacccaagtagagcca

SEQ ID NO: 652728 - DNA, 599 bp, Homo sapiens
tttaaaatatcaagtacatttaaaatgctgaaataaatcagatttaacaagatacatgttagaggaaaaaaaagtgtgtatatttttgaaacaaagtcttgctgtgttgcccaggctggagtgcagtggcacgatctctgttcactgcaacctctgccttctgggttcaagcgattcccctgcctcagcctcctgagtagctgggattacaggtgtgtgccaccatgcccgggtaatttttgtgcttttggtagagacggggttttaccacattggccaggctggtctcgaactcctaayctctagtgatctgcccacctctgcctcccaaagtgctggcattacaggcgtgagccactgtgccccgccgaaatgcttatatgacctcagaacctttatttatgtaagaatgagtcttgtaccgccaagaaaaggatatattccacacatttccttaccttagttcaccaggggaccccctctttttgtctcataaacacctgttaaaaacctgtaaatacttatgttccgaggattaacgctggtgaggtgtcgtacagcacagggtgtcagccctatgattcaagctcattttcctc

SEQ ID NO: 652729 - DNA, 501 bp, Homo sapiens
tttcttttaacaaaacaaacttttcttgtttgttcagcaaagccatgaagttctcaagggcctcttttccaagtcagtagaaaacattacagatggctctgtgccctttcccatgaaagacgacgagaaatatctcatccggattttgttagagagcttttctaccaataaactgggtactccaaactgtaaggtgattgtaggagttttaaaatgtaatttaaaagcttagtatcattttacatttatgtgctaggagttgtagtcagtagtcatggtggttttttcttttctggcttttaatgctgttacttttctcacaattgatcctcttataataataagaaaaaaccctggggtttagtgtttagtggggtttagagagaagctttgactagttttttttttttttttttttttttaaaccctcctgacgtgtgctttttttgtcggactaaaggaagcacagcgtgtrggttcagagaactggtgccagccttg

SEQ ID NO: 652730 - DNA, 601 bp, Homo sapiens
tggtgtgtcctatagtaccagctattcaagaagctgagacgggaggattgcttgagcctgggtgtttgaggctgtagtgtactatgatcatgcctgtgaataaccactgcacaacatagcaagaccctatttctaaaagaaaaacaaaaagtcttttatctcctggaactctttaaatatttctcccctctgtttaactaaggtatgtgataagagggtcttttctttttcccttttacaatatgtttctgggagactgaccaggaatttcacctaaatacttcccattggtagagtaaagccagcattgcagccttataaagaacattctgagattctcagcccaagtgagggaaggaagactgtcttgtgctttgatatggtttggctctgtgtccattgtaagtttcctgaggcctccccagccatgcagaactgtgagtcaattaaacttcttttctttataaattacccagtctcgggtatttcttcatggtaatgtgagaacgaactcatacatgccttctacaggcaaagcacatcattgggaaaatgagatgtctatattggcaaataatktagtgacaaaggaagagctgtg

SEQ ID NO: 652731 - DNA, 552 bp, Homo sapiens
agaaaaaaaaaactttattttatatcttgactttttaarttattccccaaatgagtaaaagtccagaaagtctttataagaataaaagacaaaatagtaaatgataacatagctaacatttatcaggtgttagtaggggcctggcttttttcaaagtgctttatgtgtattaacccttttaattcttaaaacaagctctcgagtgggtaccattgtgaggaaaccagggcagaggtgtgtaaatatctggcacagtgtctcagagctagaggcagagctggctttcaaatccagtggtgtggctgcggagtccatgcttgtaactgctatgctcgaatgccacttatgagtgaatccttaatcttgtacctgttgttttaatctgaggtctttttgatttgcatttgaaccattgttaccagagactgtggttgaagaggaaaacatctccctgtattgttaaaagttggcatattggatacccggggcacaccagtactttcatataagagacagttattaatgacccaggctgggagctttaaatagaag

SEQ ID NO: 652732 - DNA, 638 bp, Homo sapiens
tcaggaagacatattttcagctagggcagccagtgtacagacagtgggcagaatctagagaggggaaacccaagcgacttaacctccagactgagagatggacagcctgtctgtctgtggagagatcagaaacccagggtggggtactaactaatgaagaaaaaaaaaactttattttatatcttgactttttaaattattccccaaatgagtaaaagtccagaaagtctttataagaataaaagacaaaatagtaaatgataacatagctaacatttatcaggtgttagtaggggcctggcttttttcaaagtgctttatgtgtattaacccttttaattcttaaaacaagctctygagtgggtaccattgtgaggaaaccagggcagaggtgtgtaaatatctggcacagtgtctcagagctagaggcagagctggctttcaaatccagtggtgtggctgcggagtccatgcttgtaactgctatgctcgaatgccacttatgagtgaatccttaatcttgtacctgttgttttaatctgaggtctttttgatttgcatttgaaccattgttaccagagactgtggttgaagaggaaaacatctccctgtattgttaaaagttggcatattggata

SEQ ID NO: 652733 - DNA, 522 bp, Homo sapiens
tggtggggtcagaactggaaaacagacctcctgacgcccaacccaatgcttctctcagtatttttyaatggtattttattttccccttaagttctccttcattgttagcgatagtttggacccctgaaaacttcaccctggcttgcaaatcccctgggacctgtgggacctgtgggcatctaagagggatgttttgctcaacgtggtgggaggacttcattctatgccatctcaccttatctctgatgcctgcatttaccatttcctcctcattaaaatcttcactcacttatcctttgtctcccagcatcctctctcagttccagccacaaaccttggctgtgttatccctgctgcctctggctcccctcttttgacccagagtcccactgggtggatcaaccaggagctgtctacacattggacatagcttggggccttcccacccttgtgttaagggaccccacgcaggaaggttggcacctgcagcttggccacgcatcaaggagtgaattactgatg

SEQ ID NO: 652734 - DNA, 449 bp, Homo sapiens
taccacatccccagcaggagatgtgtctagttcttttcccttgaacctggactggcttatgactttctagtaaccaggagaatgtggctaaaggggcatatgcgacttctaaggctaaatgtaagaaggcattcagctattgtctggttctcttggaacacttgcagggggtgggggtggggagcagtggggcagccagctgctatgtaacaagtccagctaccctgagaccgttgtgctggagaggttgcaggtgggcaytccagtagacagtcccaactgagcccagctttccagccattcctgccaaggtgccaagcatgtgaataaccccacctgcgactctctagaccagtccatctgccagctgaacaccactgagtgacctcactgatgtcttcggggtaagaggagagcagaagaattgcccagtcaagcctgactgaatt

SEQ ID NO: 652735 - DNA, 549 bp, Homo sapiens
ccagacaagagcattccagatagggcaaacaacaagttcaaaggctctcaggtggaaatgcccatggcatgcatgagaaacaccaaaaacaccagtggggctggagtgtcatctatgcaaagattgtggtatgagctgcggatgggggagaagtggctatgctgaaactggtgagtgactgwatcctaagtgcactttgaaccatgtagattcagcctcagtcactagataaaggacaattcaggacaaccacagttcctgatccttattcaaggtaccctttagcgtccagccataattacagttggcagagatggccaaaattccctcagaatgactccccatgtgagccttgaatctgaaaagtcggctggggaataaaaaaacagccactcttgcccttcatcaactttgaaaaatctatcaaacctacatttttttctgggattgtaagtgcaaggccagtatttcaaaatctcccaagcgtcggtaatttttcccattgtatctctgactcacccaagagtttacctcagagtcccatcaaaa

SEQ ID NO: 652736 - DNA, 567 bp, Homo sapiens
ccaggtcttggtgatggacccaaggcaggagggtccttgggtctctgggtggtttgtttggcatttgtgatggcagtagcagtgtcaggccaacccttagcctcccacaaagcatgtgcatatgttagtggtggcagtagtaggctgggtgggctagtcctcaggcccttaggtggcatgtgcaagtggttgatggcagtggtggtggcagccgratgggcaggcctgtcctctggctcctggtaggtgtgcataggggtgccagtggtggtgggaagaatgggtcaatctctgggacccagatgatgtgtgtgagtgctgttaggctgtgtggggatgatctcagtctcccagaaggtgtgcatgggagcctgtagtagcaggaggggcaggtccatctgtagacacctggatgatgcatgtggtcactgataggggctgtgccagccaaaatagtcctgtcctcaagtcctctgatgatatgtgctggtgcagactgcaatgggtggggtgggttgatatccaggcccccagatggtgcacttgagtggcagcagaggtgatggt

SEQ ID NO: 652737 - DNA, 578 bp, Homo sapiens
catgttttgtgtttcttttctatttcttttttaaatttacagtttctattattgacagtacttattatgtgtttgttgtgttagtgatgtttccgcactcmtctgattcagaatttgtacagccaccttagctttagtgcttttgtttccggtccactcacctagtggctggctgatggaaagaatatcctaaggtaaccggtctggggccccaggagctgtgtgtgatgtgctggatgatactggctaagctggctcactccacatgctgagtataggtgccagggagagattatgtatatagtttgtcatttggggtcagatcagggggtctaatggcagtcagggctgagtcatagggtcagaagaacacagatgtgcaaaacatgtgagctgggatacattttctctaatattttgaggagagctggtgcctgtaagctcggggatatcagagctcatcacatttctaactggcctgcctaactaaacaatcaataaacaactgaagataaaataatggccaaaaaatctgtggcttgattatgttaaagttgattgaaatgaaacacagtgac

SEQ ID NO: 652738 - DNA, 446 bp, Homo sapiens
attttagtcatttaaaacaataacaatatttaccttgcccacgagcctgcaatttggatcagggttggtgttgatagcttgtcactgctcccctccatgtcagcaggggcaacttgaagcctggaggctggaatcatttgaaggttcactcactcacaggttcagcagtagttgctgggagcttcatgtcttcttcatggcggcctccctatgttgcttcactgcatggkattgtttctcaccacttggtggctgggtttcccagagtgatcatcctcccaaaaagtgagccaggcagaagctgtgtcctttttgttacctagactttgaagtcatatggtatccattctacaacattccattgcttggagcaatctaaagcccccacccagatttaaaagaaagggacatagactttgcctctcagtgagaggagtgttgaagtc

SEQ ID NO: 652739 - DNA, 583 bp, Homo sapiens
attccggccagcaattcaaagtctgccaaagggaaatcaagtattgtagaaacctacggggcctctcagagcattttaccagaactgtggcagggtgactgattgtggtattctctttgtattctctatgctgaatcatttgccagaacttccaatatatgattgcaaaactagacttttttaatgttatcttgtctcagatttctaagcctgaaagattgaggctgttgctgaacgatgcttaattaaccaaggcattgagctccaaccatgaggctttgaggagtttgatatctagcccctcttggcatcatatgctaagactggctgtgaggctatgagaatcttaagtacctgcacgctgttcataagtggtactctaaaactcctgaggaaataagggagactggaattagtgggattagyttgtgggattagcttgtgtcctttggcttagcctctttctctccagaaatttcacttttggctcagtcctcacaggggaagaaagtcttgtccaaagatggcgtctaccctgtgctccactgtgtatcccagaggagagcatctttactgtggaatg

SEQ ID NO: 652740 - DNA, 583 bp, Homo sapiens
attccggccagcaattcaaagtctgccaaagggaaatcaagtattgtagaaacctacggggcctctcagagcattttaccagaactgtggcagggtgactgattgtggtattctctttgtattctctatgctgaatcatttgccagaacttccaatatatgattgcaaaactagacttttttaatgttatcttgtctcagatttctaagcctgaaagattgaggctgttgctgaacgatgcttaattaaccaaggcattgagctccaaccatgaggctttgaggagtttgatatctagcccctcttggcatcatatgctaagactggctgtgaggctatgagaatcttaagtacctgcacgctgttcataagtggtactctaaaactcctgaggaaataagggagactggaattagtgggattagcttgtgggattagcttgtgtcctttggcttagcctctttctctccagaaatttcacttttggctcagtcctcacaggggaagaaagtcttgtccaaagatggcgtctaccctgkgctccactgtgtatcccagaggagagcatctttactgtggaatg

SEQ ID NO: 652741 - DNA, 400 bp, Homo sapiens
cctctgccattccaactccacaggagacagtaaatttgctcacacaccaagcacattgctactgtaactagcatctgaggaagccatcacayaaagagtctctataaccaaggagctcatacagaatcttcacccctgaaagcactcagagccaaattaggttatgataacttataaacattaaagtcacatcctcaaggggaaaaaaagaaacaaacaacaacaaaaaacacagtcaaataaaaagtgagccagaaataaattaaaaaataattagaagaaatagactacccaaaagagaagaaaacagaaaaataattctggcaatgtgacagaacagcattctacaacaacttcaaaagatcacagccactctccagaaatggatccaaaccaagat

SEQ ID NO: 652742 - DNA, 400 bp, Homo sapiens
cctctgccattccaactccacaggagacagtaaatttgctcacacaccaagcacattgctactgtaactagcatctgaggaagccatcacataaaragtctctataaccaaggagctcatacagaatcttcacccctgaaagcactcagagccaaattaggttatgataacttataaacattaaagtcacatcctcaaggggaaaaaaagaaacaaacaacaacaaaaaacacagtcaaataaaaagtgagccagaaataaattaaaaaataattagaagaaatagactacccaaaagagaagaaaacagaaaaataattctggcaatgtgacagaacagcattctacaacaacttcaaaagatcacagccactctccagaaatggatccaaaccaagat

SEQ ID NO: 652743 - DNA, 400 bp, Homo sapiens
cctctgccattccaactccacaggagacagtaaatttgctcacacaccaagcacattgctactgtaactagcatctgaggaagccatcacataaagagtctctataaccaaggagctcatacagaatcttcacccctgaaagcacycagagccaaattaggttatgataacttataaacattaaagtcacatcctcaaggggaaaaaaagaaacaaacaacaacaaaaaacacagtcaaataaaaagtgagccagaaataaattaaaaaataattagaagaaatagactacccaaaagagaagaaaacagaaaaataattctggcaatgtgacagaacagcattctacaacaacttcaaaagatcacagccactctccagaaatggatccaaaccaagat

SEQ ID NO: 652744 - DNA, 478 bp, Homo sapiens
tactacaaagatatagtaaccaaaacagcagagtactgttataaaartaggtacatagagcaatggaactgcatagagaatccagaaataaagccaaatacttacaatcaacttatcttcaagaaagcatacaaaaacatgaactggggaaaggacaccctattcaataaatggtgctgggaaaactggctaaccacatgtggaaaaatgaaactggatccctatctctgaccatatacaaaagtcaactcaaggtggattacagacttaagtctaagacttgaaatcataaaaattctagaagaaaacccaggaaaaactcttctggacattggcctaagcaaataatttatgactaagacctcaaaagcaaatgcaacaaaaacaaacataaagaaatctaatctaattaaactaaaaagcctccacacagcaaaagaaataatcattacggtgaacaaaatgggagaaaatattt

SEQ ID NO: 652745 - DNA, 451 bp, Homo sapiens
aaacataggaaaaaattctcaacatcactaaccatgaaggaaatgcaaattaaaaacacaaacttgatacaccttaccccagctagaattgccattattaaaacgtsaaaatataacagatgttggcatggatgtgatgaaaggggaatgcttatacgctgctggtgggaaggtaaattagtacactctatggaaaacagtatgaagattcctgaaagaactaaaaacagttctaccatttgacttagcaatcccactactgggtatctacccaaaggaaaataagtcattatatgaaaaagacacgtgcacacatatgtttattgcagcacaattcacaactgcagaaacatagaaccaacctaagtgcccattggaccatgactggataaataaaatgtggtgtatatacactatgaaataccactcatccataaaaggaatgaaataa

SEQ ID NO: 652746 - DNA, 539 bp, Homo sapiens
atacaatatataatgatcaaatcagggtaattgatcactataatcacctcaaacatttatcacttctttgtgttgacaacattccaaatcttcctttctagttattttgatatataaaataaattattgataactayagtcactgtattgtgctcatacagtagaaattattcctaatattttactgtatttctgtaggattaaccaacctctctttatcccagcctccggtaatcaccattttactctctacctccatgagatcaacttttttagctcccacaggtaagtgggaacatgcaacatttgtctttctgtgcctggcttctttcacttaacataatgtcctctaggctcatccatgttgctgcaaatgacaggattttattcttgtttgtggatgaaatgatatcccattgtgtgtatatatataacagcttatccatccatccattggtgaacacttaggttgatttttcttttaaagaagaaataacacaaatgcttctcaaactattccaaaacactgaagaagacta

SEQ ID NO: 652747 - DNA, 518 bp, Homo sapiens
gtgctagctgattagacttgagcccttccaattagtcagaagatgtggcaggcatttttgcagctgcaataacagaaaacatcattagtagtggcttaagccattaggattttaaaataagtttggtgttaatagctactgacattttttttttttgagacagggtctcactctgttgcccaggctgaagtgcagtagtgcaatctaggctcactgcaacctctgcctctcaggcccaagtgatcctcctgcttcagcccccaaagtagctagggctacaggcacgggccaccatacctrgctagattttgtattttttgtagagttggggtctcaccatgttgaccaggctggtagcaaactcctgggctcaagcaatctgcctgccttagcctcccaaagtgtgctactgacattttgtcaataggttgacagtgtcaaggttctctttcagcctcttggcctttcccttaggctgccatctttgtcaagacaaggatcagaagaggggacaggtt

SEQ ID NO: 652748 - DNA, 598 bp, Homo sapiens
  misc_feature 197: n = A,T,C or G
tgctactaatgcccgtaagttatattacatttttttgtaatggaacttaaaaaaatcttctgcgtctctggcagtgcactttttaaagaatgtagttgctatttgtctcagtaatggcctgtcatgggggaaaagtggacttagcagtgctacctactctcttttttggcttttcttattgcttccattaaggattntcattccagtttgatacatcattttctgctttctgcatctgccgtctcttagcagcctcttcttcagctaaaaacaaaacgtcagatgcatttaaatggattttaattctataaatatcaaccactagtattctttcttttgggcagtcatacaaacaaaatgaatgatctttcactattcccaaacatgattctaaaaacacttaagtgtggcctttacatgacacaagataaaacttaaaaaawatatatatatatatacacacatatataaaattcactgaaatcacttttttatagaaataccaataccaagccactcttagagggtacttttctgttggtaatgctaactttttaaatataattcaactaaaatttcagattatatgtgatatggt

SEQ ID NO: 652749 - DNA, 601 bp, Homo sapiens
gtggacatgttcagtacagttgcaaccacccattttttccaaatattttcaaatatttggttgaatccatggatacagagggctgacatgtatgtaagaatccatgaattcataatgatgcttgtgatattgtgaaaaaaatatttgatcttcatccgtttccagaaacatagctcttaaaatccctgaaatctcttgagtgataagaatgtcttctgtatgataatgagaaaattggtggctggaggttcctagakagccttgggataggacttggttgccagggaaaccaaccattagattagattagagggttagaatttacagtcccatcccccaacctcagaagggcagaggagctaaaagttgagccaataaatcaacgcgcaatgatttaatcaattatgcctgcataacaaagcttccataaaaacccaaaatagctgagttctgggagtttctggaaagctgagcacatggagattcctggaaggtgggtggcgtgatcagatcagagtgggcatggaagctctgcagtccttctcccataccttgccctacacctctcttccatctggcttttcgtctctatcctttgtaa

SEQ ID NO: 652750 - DNA, 643 bp, Homo sapiens
ctgtcttcctcttcttgaatagaggattctaattcagattcttctgaatcaagaaatatttgaccagcaactactctgcctgcagtagtatggtcctttactgactcatctgatgtcaaagtagtctgagaatataaagtatttttagttatcaacaatgccaagactttccccaaccctatttgaccgttatttttactaatccagatatcacatctccttcagctccttgaagtgccacactcactcatctctataggctttggcatgtgtccatcacgtgccttccttcatcacctaacttgtagcctttttgaatttcaacttagatgttacttcccccagaagccttccttaattcccaaagtctgggttcggttttcctccacatgcccccaacataccttatacttctacttcctgcttttatctacattccctcaaatctaaagatcagagctcataactgactgcaggrttgggcttggttagtacttggaagggagagctcaatcaaccaataagtgcattagctcactggatttatttttgagaactggaaagtggaaacaaatgacacaggttaaatcttcaaacttacacacacacacacacacacacacacacacacacagagcacatt

SEQ ID NO: 652751 - DNA, 579 bp, Homo sapiens
attaaacagactgataacctttaaacacagaaagtctaaatagtttggtgaaaacagaccagatatcctgttctctgctttagctctaaattggtacagatcctaagatactctcgattctaaatttcttcaattctgagacctggagagctaggtctggaacctggcttcatcacatgttaattctgacacatggttcagtaacaaaagcttgctcagcctctgtttctcaatctgtcaaaaggggtaacacctctgtcccgctgactcacaatattttaaggaacgaccaaaacagtgaaattaaacatcctctgctgtctgaaaactactctctgaatttataattattacctgaaatacctggcagtggacctaaytaaaatgactaacactgcttggcacaaagaaaaaaaaaggttaagccatttgcctcttctgccaaaaataagaaagcatgcatttgtgagaaaaattataaccttttcactattatcctgagaaaatgaagaaatatctttttagtgtcctcctttaaatttattaatagaaaagagaaaatgtttctaatattagcca

SEQ ID NO: 652752 - DNA, 579 bp, Homo sapiens
attaaacagactgataacctttaaacacagaaagtctaaatagtttggtgaaaacagaccagatatcctgttctctgctttagctctaaattggtacagatcctaagatactctcgattctaaatttcttcaattctgagacctggagagctaggtctggaacctggcttcatcacatgttaattctgacacatggttcagtaacaaaagcttgctcagcctctgtttctcaatctgtcaaaaggggtaacacctctgtcccgctgactcacaatattttaaggaacgaccaaaacagtgaaattaaacatcctctgctgtctgaaaactactctctgaatttataattattacctgaaatacctggcagtggacctaactaaaatgactaacactgcttggcacaaagaaaaaaaaaggttaagccatttgcctcttctgccaaaaataagaaagcatgcatttgtgagaaaaattataaccttttcactattatcctgagaaaatgaagaaatatctttttagtgtcctcctttaaatttattaayagaaaagagaaaatgtttctaatattagcca

SEQ ID NO: 652753 - DNA, 478 bp, Homo sapiens
gggtcattgtcagagatttccaagttgcagaaaacctgtttgctctgcattgcagcacagcatagcactcaacagaggtaggtaataaacaccttttaatgcagatgacactgatgtaacctcatgccattgaaatgaatcaagcaattaacaaatgctgagaacctgaacgtgttgaggacataaatccarcttgcttttcacttaaggatggtgagacaacctccagagacttttcctgagaatggggcaattgtcaccaactctagtgggatatatcctttcctgtgcttttctttgcgttccatttgaattggtaataggcaagactgtcagcatttgtattaaggtatttgccagggcaggattagggagaagcaagaagcagaatatttttcccttcagggcttagaaaagaatgtactttctttcctatagatgaggtaaattaaagttttcatgcataaatgaaaatata

SEQ ID NO: 652754 - DNA, 573 bp, Homo sapiens
ttaagtgaataaaaaaatggatgtttggcactactgggaaatgatagtatattttgagaaaatccattacatttctgttctctaagagaaatamatcaatttgtgttgtctcttactgaagcagtgtctacctctgacattggcatcagagcaattctattagtccattctcacactgctataaatatgtgaggctgggtaatttatagaggaaagagatttaattggcttacagttccacagtctgtacaggaagcatgatgctggcctctcctcagcttctggggggcctcaggaaacttacaatcatggcagaaggccaagaggaagcatgcacatcttacatggctggaggaggaagagagtgaggggaagtgctacacacttttaagcagctggatcccgagagaactctatcatgagaacagcactagggggatggtgctaaacatgagaaaccgctgccaggatccggtaacctcccaccaggccccacctccagcactgggaattacatttcaacatgagatttgggtagagacacagatccaaaccatatcagcaatacaaagc

SEQ ID NO: 652755 - DNA, 553 bp, Homo sapiens
ttaagtgaataaaaaaatggatgtttggcactactgggaaatgatagtatattttgagaaaatccattacatttctgttctctaagagaaataaatcaatttgtgttgtctcttactgaagcagtgtctacctctgacattggcatcagagcaattctattagtccattctcacactgctataaatatgtgaggctgggtaatttatagaggaaagagatttaattggcttacrgttccacagtctgtacaggaagcatgatgctggcctctcctcagcttctggggggcctcaggaaacttacaatcatggcagaaggccaagaggaagcatgcacatcttacatggctggaggaggaagagagtgaggggaagtgctacacacttttaagcagctggatcccgagagaactctatcatgagaacagcactagggggatggtgctaaacatgagaaaccgctgccaggatccggtaacctcccaccaggccccacctccagcactgggaattacatttcaacatgagatttgggtagagacacagatccaaa

SEQ ID NO: 652756 - DNA, 573 bp, Homo sapiens
ttaagtgaataaaaaaatggatgtttggcactactgggaaatgatagtatattttgagaaaatccattacatttctgttctctaagagaaataaatcaatttgtgttgtctcttactgaagcagtgtctacctctgacattggcatcagagcaattctattagtccattctcacactgctataaatatgtgaggctgggtaatttatagaggaaagagatttaattggcttacagttccacagtctgtacaggaagcatgatgctggcctctcctcagcttctggggggcctcaggaaacttacaatcatggcagaaggccaagaggaagcatgcacatcttacatggctggaggaggaagagagtgaggggaagtgctacacacttttaagcagctggatcccgagagaactctrtcatgagaacagcactagggggatggtgctaaacatgagaaaccgctgccaggatccggtaacctcccaccaggccccacctccagcactgggaattacatttcaacatgagatttgggtagagacacagatccaaaccatatcagcaatacaaagc

SEQ ID NO: 652757 - DNA, 573 bp, Homo sapiens
ttaagtgaataaaaaaatggatgtttggcactactgggaaatgatagtatattttgagaaaatccattacatttctgttctctaagagaaataaatcaatttgtgttgtctcttactgaagcagtgtctacctctgacattggcatcagagcaattctattagtccattctcacactgctataaatatgtgaggctgggtaatttatagaggaaagagatttaattggcttacagttccacagtctgtacaggaagcatgatgctggcctctcctcagcttctggggggcctcaggaaacttacaatcatggcagaaggccaagaggaagcatgcacatcttacatggctggaggaggaagagagtgaggggaagtgctacacacttttaagcagctggatcccgagagaactctatcatgagaacagcactagggggatggtgctaaacatgagaaaccgctgccaggatccrgtaacctcccaccaggccccacctccagcactgggaattacatttcaacatgagatttgggtagagacacagatccaaaccatatcagcaatacaaagc

SEQ ID NO: 652758 - DNA, 481 bp, Homo sapiens
aacatgggatctcagaaagtagtgcttgttactacgggaagaagcgctgtctttcgcctggrattagcagagacttaaatttattcactggaagtgagtttagaagtaatcttattcagttggttccccttttgggtgaagaagatgcctaagaaagataaatgatcaggttacataaatggccaaaccaggactaactgggttcctgacttctggtgtaaggctctgttaaacagttaatgccaccaccactgccaccaataataatatattttgatcaccaactttatgtaacactgataattgttttacatagatatgtcatttaatcctctcaacaaccagtgagatagatcttgttaccatctctctaagaatagacttcaggtaagtctaaatactgggcctgccagtaagattccctaggaaattgaccttaacatttgctttctcagtaagccattagagatttagtggaact

SEQ ID NO: 652759 - DNA, 481 bp, Homo sapiens
aacatgggatctcagaaagtagtgcttgttactacgggaagaagcgctgtctttcgcctgggattagcagagacttaaatttattcactggaagtgagtttagaagtaatcttattcagttggttccccttttgggtgaagaagatgcctaagaaagataaatgatcaggttacataaatggccaaaccaggactaactgggttcctgacttctggtgtaaggctctgttaaacagttaatgccaccaccactgccaccaataataatatattttgatcaccaactttatgtaacactgataattgttttacatagatatgtcatttaatcctctcaacaaccagtgagatagatcttgttaccatctctctaagaatagacttcaggtaagtctaaatactgggyctgccagtaagattccctaggaaattgaccttaacatttgctttctcagtaagccattagagatttagtggaact

SEQ ID NO: 652760 - DNA, 506 bp, Homo sapiens
atgaatcagacacaacatgggatctcagaaagtagtgcttgttactacgggaagaagcgctgtctttcgcctgggattagcagagacttaaatttattcactggaagtgagtttagaagtaatcttattcagttggttccccttttgggtgaagaagatgcctaagaaagataaatgatcaggttacataaatggccaaaccaggactaactgggttcctgacttctggtgtaaggctctgttaaacagttaatgccaccaccactgccaccaataataatatattttgatcaccaactttatgtaacactgataattgttttacatagatatgtcatttaatcctctcaacaaccagtgagatagatcttgttaccatctctctaagaatagacttcaggtaagtctaaatactgggcctgccagtargattccctaggaaattgaccttaacatttgctttctcagtaagccattagagatttagtggaactgttactagcatc

SEQ ID NO: 652761 - DNA, 577 bp, Homo sapiens
tgtttgttttaaatgccgatcctgggctcacacccagacctgatgaatcagattctataggggtgatgccaggaggctacactttttcaagcttccagggtgatttgtatgaacacctaaatttgaatgccactgttccactggttcaggggccaggagccataccattagaaacacaacactagactcttcaagtggttctgcaatgtctggcttagccagaatgccactttgtggaaatccaaaggaaagcagcaagcaggcattatgggaggcccttcctaagatgctctttgacgccccaccatgttccacctcaccaagccggcctggcgaacaggacccagcgctgccagcatcctcacttccccaacaccgtcatgcaggctggggagccttcccttcagtcctgcttctgaaggactgggatgggacagctcccactmccaatccttcctgcaagatgtttttttgttctctgtacaattaattagataataatttttgcttctgatccattcctcattaaaaagctgaatccccgagttggagctgtcggaacaaaggtgggagaatt

SEQ ID NO: 652762 - DNA, 468 bp, Homo sapiens
tccttccactcccaacccatacacaccaaaataaggcagtctatctcctggcaataggtattgttattgtgcttattttacagataggaaaactgatggagaaaggatgaagctaatgacctaagtggtagttccaggattagaacccaagcatcctgataatagagtctatgcttgtctctgctatgctatatttattgaaatgtcatattttcttgaatttgcttatcaacatgagaamagaagggaagcttatgttctcaagattgagagagatttacctaacaaaggaattcttacactgggaaaataaatcctgagaagtcaaggaagtcatctaaggctacccaatgaatcaggagacaaatgaatcagaacatggattcccagacttactatcctgacccattctcggggtatccaggggatctggagcctcccaaatcctgggaccatagactagaagat

SEQ ID NO: 652763 - DNA, 671 bp, Homo sapiens
gtgtgtttcctcattctctaggcactgtctgaggtcttcatatggttttctcattgaatcctcaccgcaccccatgaggtaagcatattattccatttcactgatgaataaactgagatttaaagaagtaacataactcgtccaagagcatacagctagtaggtggctcataactgtctaagtccaaactcaacacgcttcagtgyttcctgctttcttagttatctaactattctagaaaattcagtcaatgagtttgagaatcaacacattcacattaagcagagctactgtattttcttaaagtttcacaaaccaaaaagagttaactatttttaagaaatggaggaatgggtgctgacagctggggtagttagtagacaagtgtggtttctaaggccagactgcttgggttcaaatctcagaactatcagttactatctgggtgacattggggcaagcttcttcatcttcccatacttaggtctcctcacttgtgaaataggaatgataataataataataggatctaccttgtgggcttttgtatttgacacacttagaacagtatttggaagacagtacgtacccttcaggtgcttctgcattttggatttatgatgaaagcacagatgatggtctacctcaagggagccgagaagattaaatga

SEQ ID NO: 652764 - DNA, 534 bp, Homo sapiens
ttttaatttttaaatttgtgggtacacagtaaatgtatgtatttatagggcacatgagatgttttgatacaggcatgcaatgcataataatcatatcatggaaaatggggtatctatcccctcgagcatttatcctttttgtgctacaatccaattacacttttagttatctcaaaatgtacaattaaattattgttgactatagtctccctgtctagcaaatgctgtcttattctaactactttttgtactcattagccatccctacctccccttcaaccccttcacaccccttcccctggtaaccaaccttctgttctctacgtccatgagttcaattgttttaatttttagatcccacaagtaagtgagaacatgtgatgtttgtctttctgtgctttgcttatttcacttaacataatgatttccagttccatctgtgttgttgcaaatgacagtatctcaatcatttttgtggtkgaatagtaccccattgtgtatatgtaccacattttctttgtccacttatccgtt

SEQ ID NO: 652765 - DNA, 569 bp, Homo sapiens
tcagttcaattaaacagtcatgtctcatttcaggagatggcgctgcagaggggctctcaaagctaggcctctatatatagtgcaggcaaacagatctttaataagatgcctttctatggaaacagaagaaaaacaaaggtgaaggtccagagtacttactatgatttggatctctgtcccctcacattgaaatgtgatcctcattgttggaggtggggcctggagggaggtgactggactgttgaggtggatcctcatgaatggcttagcaccatccccttggtgatgggcgagttttcactcagttcacacgagatctggttgtgtaaaagaatctgggccccccscttctctctcttgttcctgctctcaccatgtgatgcgtctgctcccactttgcctctgccatgattggaagcttcctgaacttcaccagaagctgaggcaacctgctgccatgcttcctctacagcctgcaaaaccatgagccaaataaacctcttttctttgtaaattacccagcctcaggtattccttgatagtgacacaaaaaaggactatcactgtag

SEQ ID NO: 652766 - DNA, 502 bp, Homo sapiens
gcaaggaaaggcttccctgggggtgtcatttgagcagaarcttgactaaagtagggagcacatccatctgagggaagttatatggtctgtttttgtttcttaaaacattgctgcaactattatgtggaggagcaactgcttattgaaatggaatagaaatagaccagtttgcagacttttgcccaaaaacaggggagatggtcatgccttaaccatgggtaacagtcatggagatgatgaggcggaaaagatataaagaaacacactgcagagagagggaaaggacgtcacccagtatacaatcccaggagctgcatttgaaggggagggttatgggatccaaaaactactttagggcatgcctgtcctcttcccttaaccggcctatgtgtccatttcaaaaaacaatcaggttcatcaaatcaaagtcaacatccaaatgcatcaacagcataaaggatcttgaactcggctagcccccatgctatcctttccagagccc

SEQ ID NO: 652767 - DNA, 498 bp, Homo sapiens
ttccctgggggtgtcatttgagcagaaacttgactaaagtagggagcacatccatctgagggaagttatatggtctgtttttgtttcttaaaacattgctgcaactattatgtggagragcaactgcttattgaaatggaatagaaatagaccagtttgcagacttttgcccaaaaacaggggagatggtcatgccttaaccatgggtaacagtcatggagatgatgaggcggaaaagatataaagaaacacactgcagagagagggaaaggacgtcacccagtatacaatcccaggagctgcatttgaaggggagggttatgggatccaaaaactactttagggcatgcctgtcctcttcccttaaccggcctatgtgtccatttcaaaaaacaatcaggttcatcaaatcaaagtcaacatccaaatgcatcaacagcataaaggatcttgaactcggctagcccccatgctatcctttccagagcccaagtccaa

SEQ ID NO: 652768 - DNA, 491 bp, Homo sapiens
ttccctgggggtgtcatttgagcagaaacttgactaaagtagggagcacatccatctgagggaagttatatggtctgtttttgtttcttaaaacattgctgcaactattatgtggaggagcaactgcttattgaaatggaatagaaatagaccagtttgcagacttttgcccaaaaacaggggagatggtcatgccttaaccatgggtaacagtcatggagatgatgaggcggaaaagatataaagaaacacactgcagagagagggaaaggacgtcacccagtatacaatcccaggagctgcatttgaaggggagggttatgggatccaaaaactactttagsgcatgcctgtcctcttcccttaaccggcctatgtgtccatttcaaaaaacaatcaggttcatcaaatcaaagtcaacatccaaatgcatcaacagcataaaggatcttgaactcggctagcccccatgctatcctttccagagccca

SEQ ID NO: 652769 - DNA, 457 bp, Homo sapiens
tatttcatttttgataaatgcactggccattattatttgaactttgactaatccacagctatatgcatccgcttttgtgtaaatgagcattgccccaggtatagagctgcagaggcacagaagggagggcgtgttccggccaaggtgagatgcttggcacagaaagaggttaaagtgcatagatatgggagaatgaggtcagtggagctcagccataggttgaggacaggttacaaaaggcctggctgaggagttgaaacttgrttcctcaggcatcagagatcaatggagactttcagcacagaagtggcctatcaggtctgtcttttgggaagaacactgtaatagaacagtgcaggttgctcacttccttcgttgtaaacccaaaccatggttcttcaagttcgagtgcaataactttggaataacaaggtatcagtcatctcaattaccaccc

SEQ ID NO: 652770 - DNA, 550 bp, Homo sapiens
aaaacagtttataccaaatattagcttcttcaatctcaccactcgttaaagcaaaacacagcaggaaagctcagtaaaaacctatggcagtttggatatggggaagcaagtgttgtttgtcttctaaacaatcaattgaattacttaggaataatatttaggaagtaactcattggccctttgcatgttaagaaacaaaggcggcagggcacggtggctcacgcctrtaatcccagcactttggaaagctgaggcaggcagatcacgaggtcaggagagcgagatgatcttggccaatatggtgaaaccccatctctactaaaaatacaaaaaaaaaaaaaaattagccaagcgtggtggcataagcctgtagtcccagctactcaggaggctgaggcaggggaatcagttgaacctgggaggcagaggttgcagtgagctgagatcacgccactgcactccagcctggcaacagggtgagactccatctcaaaaaaagaaagaaagaaagaaaggcagggaaactgaaaattcactgcaggttagagac

SEQ ID NO: 652771 - DNA, 556 bp, Homo sapiens
caggaaccactaagtggaccctggagagcctccattcagtaccaggtcagatttcactggaggctcttccttgtaactctcctggtgaggcaaactagtatggtcaaaggagcaagtttgaatcttgacttcagcacaggagccctacgttcctaggcaaatgatttaacctctgagcaacattttcctgaattatagaatatagaggayagtctgtccttcacagggttgtggcaaggattaaatgagataagatatataaaaatgctggcaaatacttggagccgccaaattcacagtacttttcttttcctgattttccttacaaactagtttcctgcttgacaagcaaggaagtataaggaattataaggaattatggtctcttttttttaacgataactaaattcacccacccctgcagggtgatttctaccatctagcttcctttgcaaggtctcaccttccctgagcactccccaaacacattccccagcccacctccacctgtttccaccttcctcctggattcaaagctccagcttctctactcagg

SEQ ID NO: 652772 - DNA, 611 bp, Homo sapiens
tgttttctagaaaataaagattcaccttttatgcaaaagtatgacttgtgtctgtgaccacygacagctttactgtcttctcctttgttaattaataaaaacaataacaaccataagttaataccaactatgtgtcaggcaccataggaagcacctttatgtatgttatttctgatatttataaacttcttatgaggcaagcattttgctacctcattttgcaaatgaaggaacaaaagcttagaaacaaaaagtagtatgtccaaggtcagtcagcagagttaagattagaatctagacttatgtgagtctgaattttgtgttcttctcatgaggttacagagcctttcaatactatagaagaatatttctactatgtcattgctattttacagaatacggataacctcaaatacgtaatacataatttcatgggtaacttaaaaaaatctggtgattataaaacagcactgtccagtagagttttctgtgctgatggaaatctgtatctatgatgtccatatggcagctgctagttacaagtgaatgaaagcttgctagctacaagcatatgaagcatgactagcattactgaaaaactgaattttaat

SEQ ID NO: 652773 - DNA, 611 bp, Homo sapiens
tgttttctagaaaataaagattcaccttttatgcaaaagtatgacttgtgtctgtgaccaccgacagctttactgtcttctcctttgttaattaataaaaacaataacaaccataagttaataccaactatgtgtcaggcaccataggaagcacctttaygtatgttatttctgatatttataaacttcttatgaggcaagcattttgctacctcattttgcaaatgaaggaacaaaagcttagaaacaaaaagtagtatgtccaaggtcagtcagcagagttaagattagaatctagacttatgtgagtctgaattttgtgttcttctcatgaggttacagagcctttcaatactatagaagaatatttctactatgtcattgctattttacagaatacggataacctcaaatacgtaatacataatttcatgggtaacttaaaaaaatctggtgattataaaacagcactgtccagtagagttttctgtgctgatggaaatctgtatctatgatgtccatatggcagctgctagttacaagtgaatgaaagcttgctagctacaagcatatgaagcatgactagcattactgaaaaactgaattttaat

SEQ ID NO: 652774 - DNA, 560 bp, Homo sapiens
gtttctgaacccgcacagtgtatcagttatataaccactaatttatttttttaaaagaacagtctccttttctgtgcrgagagttaatttttaacttggtacttacagttatcttccacatcttttttactgtcctcttctgcaggaaacacttggtttatgagagccaaaaatgtctaacaagcaaaacaaatgctcattaaactcaaggcttttaaatagtaagaacaatagaagggcttaattggttgcatacactgtaatagtggcaacaatatgctctttattaaaatataatacagataatactatttaacaagtcattaaccccaaaacagaacaataactttactcaaaaatattatctactattactgtggacatgaaatcaacaataaaaatcagtaagtaagtatcctaggctccaacacctaaagaaggacaaaaaaagaggtatattaatattaaatttacatacatatgctatttaacaaatttttttaaataaaatgttaatgtggtagatacagcaatttcagtgttttaaaaaaggaaaaagt

SEQ ID NO: 652775 - DNA, 602 bp, Homo sapiens
aactcataaacagccagggtaatcagcctctgtggttaacccaacctstcttttgtggctgaggcatttagactttcccgttatggccagcacattcattaaccagtacagaaagcaaacaaatcgcaagagactggacagccaaatgtgatcacttctggagactcccctttgggaccattcaagtttctgaagcttatgaccaactggggcagccttagcatttcagaagccctgctccaccttgctcagaaaaggtccccagatgtcctaccccctttagccttctaaagctgaagctgtgaaggaatcagaggctctgatctgttggacaccaggtcttataaggtctttgtattctcagtgtctggcaaataaatgctttggaaatgaactgaccaggaactcttcgggctgacataaatcatggcagatcctagattcacatgagcattgaattgaagtggaacagcttgaactaccaaatctgtgtagcttgaattcaccttggtaagcttacattacacacaggatctgcacagtcagaagatactcaacagctgcgttttaatgaaggcacagtaacccatggcatggcaagt

SEQ ID NO: 652776 - DNA, 602 bp, Homo sapiens
aactcataaacagccagggtaatcagcctctgtggttaacccaacctgtcttttgtggctgaggcatttagactttcccrttatggccagcacattcattaaccagtacagaaagcaaacaaatcgcaagagactggacagccaaatgtgatcacttctggagactcccctttgggaccattcaagtttctgaagcttatgaccaactggggcagccttagcatttcagaagccctgctccaccttgctcagaaaaggtccccagatgtcctaccccctttagccttctaaagctgaagctgtgaaggaatcagaggctctgatctgttggacaccaggtcttataaggtctttgtattctcagtgtctggcaaataaatgctttggaaatgaactgaccaggaactcttcgggctgacataaatcatggcagatcctagattcacatgagcattgaattgaagtggaacagcttgaactaccaaatctgtgtagcttgaattcaccttggtaagcttacattacacacaggatctgcacagtcagaagatactcaacagctgcgttttaatgaaggcacagtaacccatggcatggcaagt

SEQ ID NO: 652777 - DNA, 602 bp, Homo sapiens
aactcataaacagccagggtaatcagcctctgtggttaacccaacctgtcttttgtggctgaggcatttagactttcccgttatggccagcacattcattaaycagtacagaaagcaaacaaatcgcaagagactggacagccaaatgtgatcacttctggagactcccctttgggaccattcaagtttctgaagcttatgaccaactggggcagccttagcatttcagaagccctgctccaccttgctcagaaaaggtccccagatgtcctaccccctttagccttctaaagctgaagctgtgaaggaatcagaggctctgatctgttggacaccaggtcttataaggtctttgtattctcagtgtctggcaaataaatgctttggaaatgaactgaccaggaactcttcgggctgacataaatcatggcagatcctagattcacatgagcattgaattgaagtggaacagcttgaactaccaaatctgtgtagcttgaattcaccttggtaagcttacattacacacaggatctgcacagtcagaagatactcaacagctgcgttttaatgaaggcacagtaacccatggcatggcaagt

SEQ ID NO: 652778 - DNA, 602 bp, Homo sapiens
aactcataaacagccagggtaatcagcctctgtggttaacccaacctgtcttttgtggctgaggcatttagactttcccgttatggccagcacattcattaaccagtacagaaagcaaacaaatcgcaagagactggacagccaaatgtgatcacttctggagactcccctttgggaccattcaagtttctgaagcttatgaccaactggggcagccttagcatttcagaagccctgctccaccttgctcagaaaargtccccagatgtcctaccccctttagccttctaaagctgaagctgtgaaggaatcagaggctctgatctgttggacaccaggtcttataaggtctttgtattctcagtgtctggcaaataaatgctttggaaatgaactgaccaggaactcttcgggctgacataaatcatggcagatcctagattcacatgagcattgaattgaagtggaacagcttgaactaccaaatctgtgtagcttgaattcaccttggtaagcttacattacacacaggatctgcacagtcagaagatactcaacagctgcgttttaatgaaggcacagtaacccatggcatggcaagt

SEQ ID NO: 652779 - DNA, 568 bp, Homo sapiens
gaattccaagatgtgtgtgtgtatattggtttaggtcttttccatttgttgttctgggccttttcatcctggagacatattwtgttcttttgttctgcgatgttttcttgcatttgtttgtttcttttcttttcttagggacagggtcttactctgtcacccaggctagagtgcagtggcatggtcatagctcactgcggcctggaactcctgggctcaagtatcctcctgcctcagcctcctgagtagctggactacaggagcagagcaccatgtccagctaattaaaaaaaaaaaatttttgtagagatgggggtctacctatcttggccaggctggtcttgaacttctgggctcaagcgatcctcctgccttgacctctcgaagtgctggcattacaggcgtaagccattgcacctggcctggttaatttttaaaattttttgtagagatggggttctccaacttctgggctgaagcaatcttccctcctcagcctcccaaatgctgggattaaagacatgagccatcacacctggccacatttgtttctttgataatttcttct

SEQ ID NO: 652780 - DNA, 572 bp, Homo sapiens
tttccaagaatcaaacctggggaatttgtgtttgattctgccttcccctcttgttccaaaattcattaatattcttattaaaacattcctattgctttcctaacatatattttggtgatctttcccactttcttggcttggacgcttaattaactgattttgattctttcatayttggtggtgaagctatttaagatacctgccattctgtgcaaatctctgatttcatctcctactatctttttgcctgtatttgactcatacaaaattagtcatactttaactagatttagatatgactcatctgcataggatgcattgtagttggactttgtttctttaatagagctgacaccatctttttaaaatttaattctgtccttatgttattttctaatcaatatttttaataattatgcatggttttattccctcatttatctaattctttttgcttgtgtgcttgtatgcttgtttttgtgctccctctgatccttttataatgtatgtgctatatggtctatgtgcttttccctaaataatttggagggcatagtcttttaaaaattata

SEQ ID NO: 652781 - DNA, 575 bp, Homo sapiens
ttttccaagaatcaaacctggggaatttgtgtttgattctgccttcccctcttgttccaaaattcattaatattcttattaaaacattcctattgctttcctaacatatattttggtgatctttcccactttcttggcttggacgcttaattaactgattttgattctttcatatttggtggtgaagctatttaagatacctgccattctgtgcaaatctctgatttcatctcctactatctttttgcctgtatttgactcatacaaaattagtcatactttaactagatttagatatgactcatctgcataggatgcattgtagttggactttgtttctttaatagagctgacaccatctttttaaaatttaattctgtccttatgttattttctaatcaatatttttaataattatgyatggttttattccctcatttatctaattctttttgcttgtgtgcttgtatgcttgtttttgtgctccctctgatccttttataatgtatgtgctatatggtctatgtgcttttccctaaataatttggagggcatagtcttttaaaaattatatc

SEQ ID NO: 652782 - DNA, 572 bp, Homo sapiens
tttccaagaatcaaacctggggaatttgtgtttgattctgccttcccctcttgttccaaaattcattaatattcttattaaaacattcctattgctttcctaacatatattttggtgatctttcccactttcttggcttggacgcttaattaactgattttgattctttcatatttggtggtgaagctatttaagatacctgccattctgtgcaaatctctgatttcatctcctactatctttttgcctgtatttgactcatacaaaattagtcatactttaactagatttagatatgactcatctgcataggatgcattgtagttggactttgtttctttaatagagctgacaccatctttttaaaatttaattctgtccttatgttattttctaatcaatatttttaataattatgcatggttttattccctcatttatctaattctttttgcttgtgtgcytgtatgcttgtttttgtgctccctctgatccttttataatgtatgtgctatatggtctatgtgcttttccctaaataatttggagggcatagtcttttaaaaattata

SEQ ID NO: 652783 - DNA, 606 bp, Homo sapiens
tctggtgcttctcttagtactagtaacagcaattaatcacaaaaattccacaactttgtggcattatgactaaaacataagcagaaaaacaaaataaaactccaggaggcagaaatacatcacaagctccatcataatacatgtttgtcttgctattaaaatgtaaactcttccaaaactttcccaaatgacttacattcatcaataagtgtgatttttacttgttaaagtgaagttaaagaaaatatttagcatatatttaccctcagttttagaaatgtcatacattaaatctaaattgactctcttcctttttaagtttggtgtctccactttatcttttaaatatggaaaataacttctacataggtcagacttgattttgccagtttctgcaggctcagttgatttcacggctttgtaaaagaaatgaagtgcgagtccatgtccagcatccacggagaggccacctcagatgagyctacggcgtccaacaaagtagaatgaactgacttacctgaagaagcccagtctagattcatcaagccatttgtgtgaaattctgcaccttggggtttgcacacatttccaccaacatcggtgtct

SEQ ID NO: 652784 - DNA, 571 bp, Homo sapiens
agactttaattattcatttttaactgtaggaagatttattattcaaagagcagccagcattccagaatagatgttgttttkttcatattttaaagggttagtcagaaatatttcttccaatgggaatattttgtacaaaaaggcagtagtccaaaaggtaaaaagctttaaaaatatggaattaaagtaaatctataacagaagaaaatgactaaatctttcaaaatctttagtagcatgatccccatggaggaaatgaattaaattaacataattagaatagaaataatctttgtactcatacaacatctatttttccaagatcttgttttgctttctatcttaaataaatgatccctcaaaaatactcttaagcctaacttgtcttttaagaatccatctaacactctctatgtgcttccctagaaatgattttcgttgtaaaatgagccttttttgatctatagctttaaattacacaactatgtctatcttaaggtgtaaaagcatcatcattttccctttagttctctgtagcctgttttataaagtttatttgccaaaggacctt

SEQ ID NO: 652785 - DNA, 566 bp, Homo sapiens
cttctgtttttaagtctctattaaatctttctttctgagaaactgaatttgtcagcctctttcttccactcagcttctttggattttgggtgtaggtttgcataggcctgctcattgcagaacagatctttacttttgttcatgaattaatgtggttctacttgaaggaaaaaataattgatagacccaatgttacctctggaaaagagctgatgcaaattagttgtagacatgttgtcccaaggcttgatggtacctgtaggtkgaggcctaggcagatggaaatcagaaccagggcttggcagagaggtgaagactttcatgagactcatccatgcaggaatgctggtgaaagttgtgaaagagtgacattcaataaaagagaagaggaacaaagacatacctatgatgagggaggagaagaaaaggaagaatccatgtgggagtctggaggggtgcacttggaaaggctggaggaaaactaaagaaattgtggcatcgcaggaggggaacatttcaaaagctaagacaggtcagctatgttaaatggaaactgaaaataatgc

SEQ ID NO: 652786 - DNA, 572 bp, Homo sapiens
ctcggctctcgtgccctgcctctgatgaagcctgtgttggtagggacatctgagagtaatgatgaatgccaaccgctctgatggtggcacatgccgagtcacccgagtaagctattgttaagggccgtgacccgagcctccatcagccgtccgctctcatgaaaggctgtcggtggtagtccacgtgcttaagtgcctgcattccgcagtgtcaccaatatttccattagtgtttcttttttcttttttgagaccgagcctcgttctgtcacccaggctggaatgcagtggctcgayatcggttaatggcaacctccgcgtcccgagttaagcagttctgcctcagcctcccaagtaactgggactacaggcgcgcgccaccatgctaggcttttatatttttagtagagacggggtttcaccatgttggcgagactggtcttgaactcctgacctcaggtgatccaccagccgtggtcccccaacatactgggattacaagccgtgagccaccgcgcccggccgccatcggtggttcttaactgcgggtgcagtgcttctttgtaacatta

SEQ ID NO: 652787 - DNA, 600 bp, Homo sapiens
ctaatgtctaacactaaagtaatggttaagttctagactactgaatattatacagccattagaaactactttcacaggcagggcacacctaaacacctctttccacctgcagacccgttctycttttctcccctgtcaccagccaggcactcagcctgcctcaggttcctctttggtgctgccactgccctcatcctgccctgctcctcttctctccccaagcctctgtgtgaatacaacactgacacccttgtgtcataaagtcaagacatattgaataggtgatacattgacatgttcaacattagaaaactaaataagatggtacatattgataagtctactcctacccttgtctctagccacccctcaccccatcatcctcactttgtgttacaaaaagcacagcatactataaacactttctgcagcttgctttttccccacataattatcctaaggacccttccatatcagtacatccatatagagcatcctcattcttttacacaatggcacagttttccattgtggggatgtgccttggtttatttaaccagtctcctacagatggaagtggtgtccaactttttgttatta

SEQ ID NO: 652788 - DNA, 600 bp, Homo sapiens
ctaatgtctaacactaaagtaatggttaagttctagactactgaatattatacagccattagaaactactttcacaggcagggcacacctaaacacctctttccacctgcagacccgttctccttttctcccctgtcaccagccaggcactcagcctgcctcaggttcctctttggtgctgccactgccctcatcctgccctgctcctcttctctccccaagcctctgtgtgaatacaacactgacacccttgtgtcataaagtcaagacatattgaataggtgatacattgacatgttcaacattagaaaactaaataagatggtacatattgataagtctactcctacccttgtctctagccacccctcaccccatcatcctcactttgtgttacaaaaagcayagcatactataaacactttctgcagcttgctttttccccacataattatcctaaggacccttccatatcagtacatccatatagagcatcctcattcttttacacaatggcacagttttccattgtggggatgtgccttggtttatttaaccagtctcctacagatggaagtggtgtccaactttttgttatta

SEQ ID NO: 652789 - DNA, 522 bp, Homo sapiens
aacagcttcaagaactttcaaaaacgtggcaggcaggactcccttgtgggtttgggttgctttgtgaggctgagggttatgtattgtgctttggaggcttccataacacggcacctccctttttgaaaaagttccccttgagagttaactctgctttatatttcagagaggggctggggtgttttgttgaagactccttttaatacaaacagcaaatgtaacttctgagatttcttagaagtttagctgtgggtactgttgttttgactaggcattcaaatttcccaccaaagtgaaaacaggtttaaaaaaaatccagcagatcacttgagagactataacagaggatgtgtctctgcttgaggtggggatwgactctcccagagagcaatcagatgcttatgcccaggggttgctcaagtggggcctttagagaactggcttagattatctatgtaggtggggtcccttgggctgcctttggaccagccctgcagaggagggtggggactgctgggtcat

SEQ ID NO: 652790 - DNA, 579 bp, Homo sapiens
aaggtgaatgtgtctgctgtcaggtaggcaggtagagtagaagatggggatctgagaagaatgggaggagtttggaacaagaaagtgagggtactagagatagtcaaagaattgtctggcaagattcctacttcatttttctgacattttgtttccctttgatggtaacataaataactcaaatatatgaactatttcaaatatatattttcaaagttaaaaaattttagctgggygcagtggctcacatctgtaatcccagcagtttgggaggccgagtcgggcagatcacttgaggccaggagtccgatactagcctagccaacatagcgaaatcccatctctactaaaaatacagaaattagccaagggtggtggcacgtgcttgtaatcccagctactcgggaggctgaggcaggagaatcgcttgaacttggtaggtggaggttgcagtgagccgagatcacactactgaactccagcctgggtaacagagcaagactctgtctcaaaaaaaaaaaaaaaaaaacaaacctttttgcagagcacatgtactattttatctcaccaactatcaaa

SEQ ID NO: 652791 - DNA, 593 bp, Homo sapiens
cagttacctcccaccaggtccctcctacracacgtgggcattattacaattcaaggtgagatttgggtggagacacagagtcaaaccatatcagccactgggtgtcctctttcaccctcttccctctctccccattctttgcctttactcctttgggttggagcacagaagagagtgtgaaagacataggcatagccccctctgtgttgataattaaactaaactgcctctgccttcttggtatggggttgaaagtggcccctcagaccctgctggtgaggttggcacagtcccaagctgttccaaaggctcactcaccttctggctccctcagcccttgcctggctctctcctgccacatatctccaatgtgtgtgctatgggaactcgtggagtctgattactagagtgaaccttctctgaactagaccctgcagagttccatgcctttcttcttaataagcaggctctcatctggagtccttgcactggttgggagcccacaatcacaggtgacattggtgagtgacttagagaccacatagtgtggaattctatcttatctatcaagccagctaatagagactacagat

SEQ ID NO: 652792 - DNA, 606 bp, Homo sapiens
taattctacttataatccacggcttagaatatttaaacattgtttctattaaactagaaaggttcagcatttctgtcatttacttctgctatgatacacaagaacttatgttggaatgaagtgaaaagtaaaatggccattcttatgaacctacaaaatgtttgtggcttttctttgcctatrttagagaacattggctctgtccctggaaccaagattatcccagggatattcccgatattggcactttctctgccaggctagaagacattcagtctttcatggagggcagctctgtgtggtaagcaaaatgatgagacccaaagtcagaagctctgcttccctaacccagggctgctggtaagttaagtgaccttagtcaggttgcacgatgtgtgtgggtctcatttcctcctgtatcatctggtgtttgaattggtttatctataaagttacatccatccagtccaaacattctactttgattttccccaaaccctgcaaagcactccttctgcctgcctgttcctcactcccatcagcacagccttctataccctctatgattcttctcagttcctgactttgctggtggagacagatact

SEQ ID NO: 652793 - DNA, 535 bp, Homo sapiens
attgaattcttattgtttctacggtttttctactggattctcttgggttctctaggcatataattgcatcatataaaaacaaagacaactactaccccctttcacatttttatactcttttaaataatcttgttaatttggactggttaagatttacagagtgatattaaataacagtagtgatacttgtcttattcttgactttactggaaatggaaaacttgtaattgctacactgattctgtcttaggcagttttcctttacaggagaagagcatgtasagaacattcctcaagttgattttatataccatcgagggtagcacagtcttggttaattcagaagttactttatgtaaacatgtctaacttattatttcatctttatcacatgcataataaaagggtataccaacctctcctgctgacaacttctctctcacatttttccaataaatatctttattttcagtgttagtgaaaaaaagtagccactctgcaaagtcttcttttctcatgaaactcaaacctttag

SEQ ID NO: 652794 - DNA, 602 bp, Homo sapiens
tgggcgttagatgaatgaatcgactcaacccgggccgccacgttgtgttcagaacaccgacagtcgctcccaggcaaccagcacctgctgcgccccgtttccagcgacctccccaaccgcgtggactcgcatccacgtgcccggcggggccgcagcagaaaggctcggaccccccaggacgatcggccggtgggggccggtggggccgcagactyggggggcggggggcgccaggcttccgggtcctgcccccgccccgtggggaacagcaggacggcgccgaggccgtttcgctttcctccgcgcccatttgccgggaggggaccccgtgctccgacctgaaggtgacggcagagcctgcgggaggcctaggccggtcccgccctacgggtcccgggggcgaccctcgcgctgacattggcgtccaggccgcggcccctgcctccgcgcccacccacgccgggcctggccctcgctcccccgggaaaagccccgccggcggccgcgagagcgcggaagcgcagccgtagtgaccgcgagacaaagacccggcggcgggggaggcggcggagagaccccgccagcgcggagaccccagggaa

SEQ ID NO: 652795 - DNA, 189 bp, Homo sapiens
ctgtccaatagtgtagccactagctacatataactattgaaatttaaattaattaaaattaaataaaattaaaaattcagtccttctgttacactaggcacattttagatattcagccatcatatatagctagtaggtgccatattggacagctcagaatwgagtatttttatcctcccagcaagttca

SEQ ID NO: 652796 - DNA, 432 bp, Homo sapiens
catgatcaggtttcactgcagcctggacctcctggacacaaatgatcctcctacctcagccttctcctcccctttaccagctcctccccttcccttccccagctctccccctccagtagctgggaatacakgtatgcatcagcatgtctggctaattaatttattttttaatttttatttatttatttatttatttatttatttatttatttatttatttatttattgagatggagtctcgctctgttgtccaggctggagtgcaatggcgtgatcttggctctttgtatcttcctcctcctgggttcaagagattctcctgcctcagcctccctagtagctgggattacaggcacctgccattatgcctggctgatttttgtagttttgtggagatgcagtttcaccatgttggccgggctggtcttgaac

SEQ ID NO: 652797 - DNA, 642 bp, Homo sapiens
gcctgggtctcatcttccacccactgccattcaataatagcttgggtctgtcttggctaagccaagggaacatccagcttcactgagaaaacctttgctgcatggtgatacgccacctacttgcactgtagcgttgtctggcaggtttggcccattgtctcccagaggaaacagaaaacaactccccagcaacccgccaatctcttttgtccccacagtcgagctctggaaaatatctgaatgccacagaagtgggagtaccctttgatgtttataytggctggctccttttcctttttgctttttctttttttcatttaataatcagggtagtagaaaatgcggagaattaaccgcatgacagcagcagaggaattcattagagaaacagagatgaattctgctcagatttcaggctctcaggcagaagacacaaaggagtaatcgtcttctagttttttttaatcatttcttttgtggcaccttccttgtccatgaaggcaatctcagcgtctggcatgggggagcccaagaacataggcagtgcaaatggtggctttgatttggggattattacagcaatattaaccacttccttcttacctctctttgaaaagatggagcttgtcattcttggagaag

SEQ ID NO: 652798 - DNA, 506 bp, Homo sapiens
tcagatgtgtctattgataccaaggtgaaaacatctaggcaaaaccataatctatgtcctcattgtctcctccatctcctccagacctaccctgtcctcgtcctaggagtttatattgtgatctagaggaggcccagccagggtggggtctaacaaattggggtgggtataaatttagtacttcaaagatagtggctcttattggaaaactttataagctgaatgcctatytccccctcactaatttggggaactgcagctgctgctaaattctgagtcaaatagacttgcaactatggttgatcagatttgtgatgtattagtaacacatggaagtggtgccttatgtcggggccctgggttcctactggaaacccatcacttagatttgtatgatattggtatgatctgctagtgtgtgatgctttgttacatcctcttttcaagtcagctttccaccagagcttcccaagaacagagaggcctgcctcaaatatttggttcaa

SEQ ID NO: 652799 - DNA, 540 bp, Homo sapiens
aagctatacagtttacttttaagggaaacaatcacaatttcatcaattcctttaagtagatgttttcaaatattatagaattctttggatttgtgtttccaaaatgaacaacacaatggtagtgctattattgttttaaggagaaaaagaagcatatccaaaataggtaaaatcttcccctaaatcccctgggaacaggcctatgggtgttgccctggcctgctcacagccccaggacaaccggcattaattcactgagggcctcatacctacatctcaatgactgcttaaaccagatacctgagggtctggggtctaacagaagaaaaaaggagagtagagctgagggttatggaacattccyaggaagggagagaatatcagaaaatgcaagactgccccagtgcagcagcagtgatgcagccagaggttaccagaagttctggcacctccaccttcatggacacaagctgtatatatcagtttaccatggttttcagtgtaaaaaagcaacttatgtccttcagtgtcagtttattg

SEQ ID NO: 652800 - DNA, 573 bp, Homo sapiens
ctggatcttatcttgatgtgcagtgttaggtgaagctcatatttaatttttctatttgtcagtgtccccagtatattagtgcctctttaggaacttggaaaggacttgccttctctaagattcctttgtgattagtgccacttcatgttacttgtttctgcaattgtttatttcttcagaattgttggtttctcagcagctttgatctgaatgattttgtggaatctcatgttgctcctagattaaaagatttattttaaaaaaagaggtgctgtctcttcaagtygtttcattctttacataagaacagggtgggaggttcttgtcctagttagcatcagcccctctcccccaaccctccacagtcagcagatccatgaatttagatgagaggaaagccacatctccattttcactaacctttaactgaaattgattatttccttcaattttgattgtgggcaaaaaaccacagtagtattagctgttcctgggactttaaaccacagatcagatagttaatcttgcatttcagttgttccaggtacctttaaatattctttatacgcatca

SEQ ID NO: 652801 - DNA, 610 bp, Homo sapiens
aatctgccacatgtggttataaatggccataattttgtatgatcccaaagcaagatagatagcagattaagggtcagcacagatctgcaagttgagctcatggcactttatttccctccctagccccttttctagtgcttaggtrgcaggcaccagttaagcatggtgtcttgaccatgatactgtggaccaagcagcgatatggctatggctatatcactgttttgcctgagagtcatttattccttcattatatatttattgggcatctactccgggccaggcatgtgttgggcattgagaaagtggtgaaaaagacagaggtcctgtcctcaaggagctttcattccagtggaagaattcagataatacacaaaataacaaatatataagatattttcgagtggtgatatatttgaccagggaaataaaactaaggaaagtgataatgggggggtgtggagactggctgctataaaatgggtgagcagaggaggcctctatgaggaggacttgcattagctgagacctaagtcatgagaagcatccccatgggtcttgggaaaagtgaggaaaacatattcaaatagaaagaaatatctggtgcaaa

SEQ ID NO: 652802 - DNA, 460 bp, Homo sapiens
ttctgggaaagactcaagcactgacctgattttgtttgtaggaaggattggggtgaatgctttggagggacaggggaagggtgacggtaacaatactgacctttagacagtggttattatacaggggacagtgggagccaagtggcaggaggagagttggagcagaggaggcagctttcctcttttcctaatgggccaaactttatggatagtgcttggagcccaataccttctgtaagaatgttcaaaagtccttccttttcctttcattaaaaaaaaatccagcctgtatttattattgagaatttactgtgtatttgtcagtgtgmtaaaccctttttatgcactatttaatcctccaacaatctcatgagataggtactatcacaactaccctcattcaactgatgtggaaactaaagcttagggaagttgagcaacttagccagatcacaaaacc

SEQ ID NO: 652803 - DNA, 408 bp, Homo sapiens
ccgagcgtagagtagctcatcctgcacaggctccagggggcayagtctcagggcccgcacctcctcctgcactcgtccacacagccgctgcagcatctggagcacagtggcaggggtgtcaaggggacccctgcttccacatcttcgcaggtaggaccccttagacagtgctactggtgctggcaccgacagtggtggaggtgatgtctctggctggcctggtccccattgctacagccttcttgaatgcccagctgagctcccagagtcctgtgcactcctgctgttcgcccacatatgtttgaagcccatatcctgcatgtcctctctttttgcttccccacatgctcagtccagtgataggcaccatgcagtgcctcttcatgctcccccactcaattttccatc

SEQ ID NO: 652804 - DNA, 424 bp, Homo sapiens
tttgatgaggtcccgagcgtagagtagctcatcctgcacaggctccagggggcatagtctcagggcccgcacctcctcctgcactcgtccacacagccgctgcagcatctggagcacagtggcasgggtgtcaaggggacccctgcttccacatcttcgcaggtaggaccccttagacagtgctactggtgctggcaccgacagtggtggaggtgatgtctctggctggcctggtccccattgctacagccttcttgaatgcccagctgagctcccagagtcctgtgcactcctgctgttcgcccacatatgtttgaagcccatatcctgcatgtcctctctttttgcttccccacatgctcagtccagtgataggcaccatgcagtgcctcttcatgctcccccactcaattttccatcacat

SEQ ID NO: 652805 - DNA, 424 bp, Homo sapiens
tttgatgaggtcccgagcgtagagtagctcatcctgcacaggctccagggggcatagtctcagggcccgcacctcctcctgcactcgtccacacagccgctgcagcatctggagcacagtggcaggggtgtcaaggggacccctgcttccacatcttcgcaggtaggaccccttagacagtgctactggtgctggcaccgacagtggtggaggtgatgtctctggctggcctggtccccattgctacagccttcttgaatgcccagctgagctcccagagtcctgtgcactcctgctgttcgcccacmtatgtttgaagcccatatcctgcatgtcctctctttttgcttccccacatgctcagtccagtgataggcaccatgcagtgcctcttcatgctcccccactcaattttccatcacat

SEQ ID NO: 652806 - DNA, 485 bp, Homo sapiens
ttaggtttcatttaaatgaaatttaccttgaccctgaaactaatttgcatgtctctttcccttagtgaacagaatactctgaccttgggtcatcagtatgaacaagagttattgcatcagctcgtagtatgcatcatggccttaggaggtatgcaggaactgttaaacacaaattaacccaggatgcagagttaatcattcagtttgctatgcaacagccattgtcctttcaagttctggcagctactacccctgttgcttctaatattttcctaggactcttctcagaaagttctgagcattgctgtgggaaccaatttaccatggttagtcttatttactagtttaatttaataaattctctcctgaaggtgcatctgtactttcccttgagagcagaccttcagggctygagtgatcctcccacttcagcctcctgagtagctaggactacaggcacatgccattacacctggctaattttt

SEQ ID NO: 652807 - DNA, 536 bp, Homo sapiens
ttttgctgaaaacttaattaatttcttcatgtttcttctttttttaaaaataatataagtaatttatgagttttcttctgtgtacttgaccttatttcaaaccttttcatttgcagtgtctttatttattttcaaagtaatttctattgcaattttccttttctttttgatacaccatagtgtttaaacattttttaaaaactygttggaattattttgtttaaattttattcttaatccttattagcgtaaaaatatattcttcaaaataccagtttcttggaatttatggatatttgctttgggttgtgctagatatcccaatatctctcagttaattcagtggtattatttgttatcactttgatattgtggccagactaagcagagcacaccttaggaatcagatggtcttgaatctgaattccacttacttcctgggtaacctcgtactattattttaacctcatgaagtctcagttttttttgtttgccaagtgggtcttttgaggatttaatgagagactatatggtgc

SEQ ID NO: 652808 - DNA, 604 bp, Homo sapiens
ttccttttatatgccttgaactttatcttttaataatttctcagcaaaaagtataacattttaaatgcagataattgcaaaaagagatttgtgtatttttctttcagtgttacatttcctaagttttctcatcacatcactatgctaattgatatatttagwttatataaaatgtctataattttcacttttttatgcatacataagtaaataagaatgaatatattgtaaaattgtaagtaactgattagaagaaactttattttagaaagttaatttttagctgcttagaatcaaaatcgattatttcttccagaggacaatatcttcttatgatgaaatattatgatcttgcaaagtttactatttatcaaatagcagaaatggacaaaggtaagtataattaattataacttttaagaaatacttctttaaaatttttatgctattttgcaatagttatgtataaatagcatgaaggatccaattgaaagtcaaattagattttcaaactttagttttatatgtacattgccaattagtaaaatgattcatagcagtgaattttgtgagagagaatttttatgggaaatattaagcttac

SEQ ID NO: 652809 - DNA, 615 bp, Homo sapiens
acatgcatttaatagcttgtggatttcaatcaataaatatttaataaacaatatgttaaagcatttgtaaactcatttaaggcatttataaagtattttcttattacttctgctacaattttcaaaaggaattcctaggaaatacacacatataaaacttaagaaaccaaagaaccatttcaaagaatatttaatttctttgttggtgctcaccaaattttcttatataatttctgaaagaagtcaaatgaaaaattaagttgataatgcttatagaagtatttaaaggcatttataaattaaatacattacataattatcaattgaataaatgtttctaccatatgcagaatttttttttttttttttttttttgagacggagwctcactctgttgcccaggctggagcgcagtggcgtgatcttggctcactgcaacctccgcctcccgggttcacgccattctcccgcctcagcctcctaagtagctgggactacaggcacccccaatcatgccctgctaattttttgtatttttagtagagacagggtttcaccatgttagccagaatggtctcaatctcctgacctcgtgatccgcctgcctcggcctcc

SEQ ID NO: 652810 - DNA, 615 bp, Homo sapiens
acatgcatttaatagcttgtggatttcaatcaataaatatttaataaacaatatgttaaagcatttgtaaactcatttaaggcatttataaagtattttcttattacttctgctacaattttcaaaaggaattcctaggaaatacacacatataaaacttaagaaaccaaagaaccatttcaaagaatatttaatttctttgttggtgctcaccaaattttcttatataatttctgaaagaagtcaaatgaaaaattaagttgataatgcttatagaagtatttaaaggcatttataaattaaatacattacataattatcaattgaataaatgtttctaccatatgcagaatttttttttttttttttttttttgagacggagactcactctgttgcccaggctggagygcagtggcgtgatcttggctcactgcaacctccgcctcccgggttcacgccattctcccgcctcagcctcctaagtagctgggactacaggcacccccaatcatgccctgctaattttttgtatttttagtagagacagggtttcaccatgttagccagaatggtctcaatctcctgacctcgtgatccgcctgcctcggcctcc

SEQ ID NO: 652811 - DNA, 531 bp, Homo sapiens
cacacatgtagcagggaggatggagtgatggttttcagctccagggaccagtgaccaggtttggcctatattttgaaggcctgtgggctgcagcaaacctttttttccatttgtcttgatccagcatctacctgtgcaaactcttgtttatattttgtaatcttacctactctcttctctcytgtcggtttggtcccttttcaatgaggattcctcactggggagcagctagtcttgcggtctttcagtgtagtgtcccatcctctttctctgttacttgtctcactctccttattcctgcccatgtccatagtaaatgacgcattcttttaaaaggctaggtcacattcccgctgttctgtgttcacacactctccattctgtgaaacgtggacagtgaaatctgtttaaaacatttagtaatttagaaatgtacaagctttagaagggaagttgagaaacattgtctctacctgagaggatgtaaaattcctggtaaccagattatcaggtttcctccagaaatgttga

SEQ ID NO: 652812 - DNA, 604 bp, Homo sapiens
tttgtggctaatattctaggtttggttttttcttttttgacaaatactactgattttttttatagtcctggcaatttttatttttaattatgccacaacatacctataggatstttaactgcacattttttaaagacacttgagcacgcaacattaggaaacaccagaggagggcaaatgagcaaatataaaatgctctttgtcattttcagttggcagatgctacaggcataataagatttagcccttttctgatcagaccatatggctcttttggacagaatgttcagtaggaaaatgatttaagagattcagctccaacccaagtttaggatgcttctagtacctggtacagagtagaaaccagtaaaatcttgtttagtcagtgaatgtaaaaaaaaccaaaaaggtaaaagtaatggagaagggtctgagttgattctcagattacactatgtgtcttttaaaaaatgaatatatttatcaaaatattttgagatagctttcctacaagtgcttatttgttagttttaagatctattttcattgattcatgattttttcattggatacaaatttattgaatgcatgctatgtgcaggct

SEQ ID NO: 652813 - DNA, 575 bp, Homo sapiens
agaccatatggctcttttggacagaatgttcagtaggaaaatgatttaagagattcagctccarcccaagtttaggatgcttctagtacctggtacagagtagaaaccagtaaaatcttgtttagtcagtgaatgtaaaaaaaaccaaaaaggtaaaagtaatggagaagggtctgagttgattctcagattacactatgtgtcttttaaaaaatgaatatatttatcaaaatattttgagatagctttcctacaagtgcttatttgttagttttaagatctattttcattgattcatgattttttcattggatacaaatttattgaatgcatgctatgtgcaggcttgattcttgttactgggcttaaaacagtgaacaaaatggataagctctggcctcacagagcttaggaaaacaatacaacactaaaaagaaattacatttttaatggtaatcacagcaacagtcatttgatgaaactacccagtagaggcagaatgctaagtccctcccttccagcccgtacaccagtgaaaatgtatagggtgacttgtaggtaaaacatgaaatgca

SEQ ID NO: 652814 - DNA, 575 bp, Homo sapiens
agaccatatggctcttttggacagaatgttcagtaggaaaatgatttaagagattcagctccaacccaagtttaggatgcttctagtacctggtacagagtagaaaccagtaaaatcttgtttagtcagtgaatgtaaaaaaaaccaaaaaggtaaaagtaatggagaagggtctgagttgattctcagattacactatgtgtcttttaaaaaatgaatatatttatcaaaatattttgagatagctttcctacaagtgcttatttgttagttttaagatctattttcattgattcatgattttttcattggatacaaatttattgaatgcatgctatgtgcaggcttgattcttgttactgggcttaaaacagtgaacaaaatggataagctctggcctcacagagcttaggaaaacaatacaacactaaaaagaaattacatttttaatggtaatcacagcaacagtcatttgatgaaactacccagtmgaggcagaatgctaagtccctcccttccagcccgtacaccagtgaaaatgtatagggtgacttgtaggtaaaacatgaaatgca

SEQ ID NO: 652815 - DNA, 573 bp, Homo sapiens
gtgtgttgttttggtgactaaactattcgcatagttgctacgatttacacagtagttgcatttctggaaaatacagaatgggttaaatgagggatatattttgtgtttaaagattctggcctcatctatttatgaaactttttttacccacatgaaagtctttcaggacatgtatttctttgttttgtgggactgccctgtgaactgcaggatgtctactatatccttggctccttcttgcctactaaatgccaatagyactttctcattctagcaactaaaaatgctgtctctctcacccactggccagaaatgtctaaatgttctctagggactagtactgtcccttctgagaatcactgatgtgtagagtcttgtagcccatggtaagaaatgtggatttcactctgagtgatgtgggaagacactggagggttttgagcagggacatgacatgatctgatcttgttttaaagggattatctgatactgtgtggacaatagattataggtggaaaatggtaaaggaaggaagataggcacctgttaaaataatccaggtgagagatgatg

SEQ ID NO: 652816 - DNA, 573 bp, Homo sapiens
gtgtgttgttttggtgactaaactattcgcatagttgctacgatttacacagtagttgcatttctggaaaatacagaatgggttaaatgagggatatattttgtgtttaaagattctggcctcatctatttatgaaactttttttacccacatgaaagtctttcaggacatgtatttctttgttttgtgggactgccctgtgaactgcaggatgtctactatatccttggctccttcttgcctactaaatgccaatagtactttctcattctagcaactaaaaatgctgtctctctcacccactggccagaaatktctaaatgttctctagggactagtactgtcccttctgagaatcactgatgtgtagagtcttgtagcccatggtaagaaatgtggatttcactctgagtgatgtgggaagacactggagggttttgagcagggacatgacatgatctgatcttgttttaaagggattatctgatactgtgtggacaatagattataggtggaaaatggtaaaggaaggaagataggcacctgttaaaataatccaggtgagagatgatg

SEQ ID NO: 652817 - DNA, 622 bp, Homo sapiens
aaaaaggcccttgtttttttgataggggttgcaaagaatctgtagatagctttggggagtcttgccatcttaacaatattaagtcttttaatccatggacataagatgcctttcctttcatttaggacttctttaatttctttcagcaatattttatacaagtcttgtggttttttggttaaatttatttctaagtattttattctcatttatggcattttaaatggaattgttttcttaattttgtttatagattgttcattgtttgaaaataaaacttatttttacatatttaccctgtaccctacaactttagtgaattagtttattagctctagtaggttttttttgtattctttctgattttctgtatatgtgtaatcatattcatttgcaaataaagagattttttataattagtggtttttattattctgacagtgaacttgrggcagtgttctttgtgtgtttctgctcagaggtcattgaacttagggggtttgtagctgtcatgatatttggaaaatttttggccatttgtgtgtgaatattttcagtcactccccatatccctttctggaaccccaattaaatatatgttagactgagtatttgttcattt

SEQ ID NO: 652818 - DNA, 511 bp, Homo sapiens
ctcccaatgttggttttgtagaggagattgtcgtcaggtggactactaaatggatttgtaactacttatgcaaaggatgcacaactagtacatggaagtctcgtggactgctacagggctgtgtccaattcaataaatttcctaatggtttagatgatatattagtctgttttcatgctgctgataaagacatatccaaaactgggaaatttacaaaagaaagaggtttaatgggctcacagttccacatggctggggagacctcacaatcatggtggaaggtgagacgtgtgtctcacayggtggcagacaagagaagagaatgagagccaagagaaaggagtttccccttatgaaaccatcagatgttgtgagacttattaactaccatgagaacagtatggaggaaactgcccccatgattcacttatctcccactgggtctctcacacaacatgagggaattatgggagctacaattcaagatgagatttgggtggggacaaagtca

SEQ ID NO: 652819 - DNA, 403 bp, Homo sapiens
gctgaataaaaacaactttaaacctagaataatgtatctggtgaaattatccttcagacatgaaggagaaataaagactttcccagacaaacaaaagctgaggcattttatcaacaccagacctgtcttacaagaaatactaaaaggagtacttcaaccagagagaaaagcatgataatgaggaataaataataatatgaaggtacaaatctcactggtaatagtaagtacacagaaaaacagaatattataccaccataaatgtggtgtgtaaacttaartagagagactaaatgattaaccaacaaaaaataataactataacaagttttcaagatataaacagtaccatagatataaatagaaacaagaagataaaaagcagaagaataaagttaaagtg

SEQ ID NO: 652820 - DNA, 587 bp, Homo sapiens
aacctcaaaacaaaaatcattcaacagatacacaaaaaataaaaagcaagaaactagatcatatcaccaaagaaagccacctttactaaaaggaagacaggaaaggaagaaggaagagaagaccacaaaataaccagaaaacaaataacaaaatggcaagagaaagtccttactcatcagtcataacattgaatgtgaatggactaaactctccaatcaatagacacagagtggctggaatggattaaaaaaataagactgattgatctgttgcctacaagtaatgcacttcatctataaagacacacatagactgaaaatacagggatggaaaaagatattccatgccaatggaaaccagaaaagagcaggaatctctatacttatatcagacaaaatagatttcaggaaaaaaactataagaagagaaaaagaaggtcactaaacaatcataaacrggtcaattcagcaagaggatgtaacagttttcattatatatgcacccaacactggagtgcccagatttatgaagcaaatattagggagtcaaagagggagactccaatacaatagctgaaaacttcaac

SEQ ID NO: 652821 - DNA, 458 bp, Homo sapiens
agggaacctggagaccagtgaaaagaagggtgaattaattactgtgaatgcgacaattaatatagagttgtgcagagtgctatgtggaaacatgtaagaggagtccctgattatttggggaggtttgaggattgatacctaaattgaaacctgaaagatggatagaagataggaaggaggaggggaaagaatgttttagatctttggtactcaaagtatagtccgcaractagcggcatcaccatcacctgggaacttgttagaaatgcaggaaatttgtatacagtttgaagtttgagttcatgctgtgggcaattggaatccatctgataactggaagtaagtccagtattagagaacaggaagagcagtgatacatttgaagctagagctgaggcaggattttatggttaccccgtatgtatgtgtgagggcacgtgtgagtgcttgggggaggg

SEQ ID NO: 652822 - DNA, 500 bp, Homo sapiens
gatggggagagactgaaaagtattgaaataaataatgtctgaaaagttaccagtttggcaaaaggcagaaagctatagattcaggagcctgagcaaatcccaaactggaaaaatccaaaggaatatagaccaaaccacataatattcaagcttctgaaaatgaaagataaagaaaaaccaaacatcaatctaagaaaagtgggaatggctatattaatatcagataagatagacttccaagcaaagaaagttctcagagacacagaggggcattatattaagataaagaaagcaacraaaaagaaacgacatgctacctgtaggggaaaaacaagttgaatggaaatgggtttctcatgagaagtgatggaggccagaagtaagtgacagaacatttttcaagtgctggaagaaaacaactgtgtttccagaatcctacatccagaaaaatatcctttaggaataaaggaatcaagacattctcagatagaaggaaacga

SEQ ID NO: 652823 - DNA, 448 bp, Homo sapiens
tgaaaataaagggatgggaaaagatattccatgccaatggaaaccaaaaaagatcaggactggctatacttatatcacacaaaatagctttcaaagacaaaaaatataagaagagacaaggtcactatataatgataaagggctcaattcagcaagagaatataacaattttaaatatatatgcactgaacactggagcacccaggtatataaaagaaatattattcaaactaaagagagatacaataatagctggagatttcaacatcccactttcagcattgracagattttccaaacagaaaattaagaaagaaacaccagatttaatctgtactataaatcaaatggatctaacagatagttacagaacattttatccaagaactgcagaatactcattgttttccttaccacatgcatcattctcaaggatagaccatgtgtt

SEQ ID NO: 652824 - DNA, 448 bp, Homo sapiens
tgaaaataaagggatgggaaaagatattccatgccaatggaaaccaaaaaagatcaggactggctatacttatatcacacaaaatagctttcaaagacaaaaaatataagaagagacaaggtcactatataatgataaagggctcaattcagcaagagaatataacaattttaaatatatatgcactgaacactggagcacccaggtatataaaagaaatattattcaaactaaagagagatacaataatagctggagatttcaacatcccactttcagcattggacagattttccaaacagaaaattaagaaagaaacaccagatttaatctgtactataaatcaaatggatctaacagatakttacagaacattttatccaagaactgcagaatactcattgttttccttaccacatgcatcattctcaaggatagaccatgtgtt

SEQ ID NO: 652825 - DNA, 564 bp, Homo sapiens
acataaaaatggccaacaggcatataaaaaaggtgctcaacatcactgatcatcagagaaatgcaaattaaaactacaatgagatatctcacgcctgttaaaatgacttatacccaaaagacaggcaataacaaatgctagcaaggttttggggaaaagggaacctttgtacgctgttggtggaaatgtaaattaggacaaccactatggagaacagtttggagattcctcaaaaaactcaaaatagagatactatgtgatccagcaatcccacttctgggaatatacttcaaagaaaggaaatcagtatattgaagagatatttgcatttctatgtttgttgcagcactgtttacagtagctaaaatttggaagcaacctaagtgtccaacagcagatgaatggataaagaaaatgtggtacatatacacagtggagtactattcagccataaaaaagaatgagatccagtcatttacaacaacagggatggaactggagattatgttaagtgaaataagccaggcatggaaagacmaacatcacatgttctcacttatttgt

SEQ ID NO: 652826 - DNA, 440 bp, Homo sapiens
actcttttcatctctcttcaagccttgcaaccttttccctcatcctcactttcagctgatgaatytgcttcctattttactttgaaaatagaaggagtcagatgaagatttatacacgatcctgttgactcatctattcacctatatgcatctttacctttatactctgccttccctcctgttacagtggataaattatctatatgtctacctaaggctaactcctatacttgtgcactagactctactcctcttgcctattaaagaatattgttccagtacttgtctcctctccccattgcactatcaaaatttaccctctctaatggatcatcctcatagcatacaaacatgctgaaattctgcacatcttaaatgaaaattctctcttttccccacatttctctccagctatagctctatttctctattgctgtaac

SEQ ID NO: 652827 - DNA, 560 bp, Homo sapiens
ctcaacacagtggacagaacaatctttaaagctttaagtcaggttatgtgactcctttgcttacagcattccatggtttttctgtttgttttttaaataacagaataaagcccagagttcttatcatggcatacaaatgctccaaatattctctgtcaacctttccccctctaacacctcttaactcatctagcacactggccctcattacctcctcttcagctatactggcctcctcagtgttcttatttcagtgcctttgcacatattgttcccttggcttggcatagtcttcccacagtaacctacaaggttcacagtttcaccatatgtgaaatagccactcactgcattcctctcgttttgaccccatttaatttttctccataacatttrtcaccatctgacatatatctacataaaatttgtttgttggctatcttctcccagtacagtataaactttacaagggcaaaatcttactctattctgttcattgctgatttcacagtgcctacacctgggctcagcatatagcgagtacacaatacttatttatt

SEQ ID NO: 652828 - DNA, 600 bp, Homo sapiens
tgcagtcctaggaaactaatacaaagagaagctaggcagcaggcctcagctaacatcatgcctagcaacagttggcagatgtaatgcggcagctgctcctggttcctgatgctggtgtgactggccttgcggccctctgctgtgtcctcagaatgaatcttccactcaccttacttcttggtattcaagttctgggcaggaaaatctgactggttaaagtctaggtcacatgtctggcctagaggrtttgacaggaggagagagaaagcaaaaatctggtctttaggaagttacacagtgggttcttccccaaaataggagtgagcttcagatgctaggcaaccacaaaaagtccctatgacatatatatgcaagaaagcagcaaattttaattgttactggttccaaataatagtaataatactgaggtttatgaatgatttgctttttgacataaactgtaggcattgcaagtttatcttttaatatccttttagctccctgctagaaggccaggtattatatatatttccattgtatatacatgagaatgttaccatttgtgagacatctctgcaaaaaacaaggtgggtatatgtt

SEQ ID NO: 652829 - DNA, 417 bp, Homo sapiens
ggcaagggtggggtccctaggcagggggagttgtggaatataaatcctaccatagggtcgtctgaggcagcagttcaggctttccttctatatgaaaccattttaggacactaaaaaatctgtggaaagtttgtggaagcatcaaaaatrgcaatttgctgtgataagtgtgccctataactttcagatggctatgcaataggttccctttagccacctcttagtgatgattcaaccaaaatagccccacaataaataacaaaacatttccttgttcatgaatttaattactatttcttaacatctgttaggtgctcagaactgtcctaggcactaaaatcatggcaaaacaataaaaagtaccagtggatattttttaagtactgaaaaaataaccagttgaaaacaaaatcgaaa

SEQ ID NO: 652830 - DNA, 417 bp, Homo sapiens
ggcaagggtggggtccctaggcagggggagttgtggaatataaatcctaccatagggtcgtctgaggcagcagttcaggctttccttctatatgaaaccattttaggacactaaaaaatctgtggaaagtttgtggaagcatcaaaaatagcaatttgctgtgataagtgtgccctataactttcagatggctatgyaataggttccctttagccacctcttagtgatgattcaaccaaaatagccccacaataaataacaaaacatttccttgttcatgaatttaattactatttcttaacatctgttaggtgctcagaactgtcctaggcactaaaatcatggcaaaacaataaaaagtaccagtggatattttttaagtactgaaaaaataaccagttgaaaacaaaatcgaaa

SEQ ID NO: 652831 - DNA, 559 bp, Homo sapiens
tttttcttatttacagtctgatgttagaggaatatcataatgcatagtctcataaaataactttgtttcatatacacctaactttaaaaggttgtgtatgtgtagcaaagaatttggtctaatagtctccccatattgacatatacagaattccagaacagtctgaacacatcctcatcattgtgtttcaggttggtggtgatctgattgattaaattaagcatgccaaacacatgaaaggcttgggtgagggtcacctcacgatgcagcaagcaycctgaagcaccaaacttcagaagcaaagactaaaagaagacctccccttattccaccttgcaggggaagtcagctctttaatggaaggaaaacaattagaaaatacagcatcttaatccaagaagagtcaaatggaggaaacagatgtccattatttaattctgtattttccactctttcaggtagaaaagaaagatttgtggggaatcgtaagccttatgggtcctaagttatttatctcccaagcccctgcttgagagcagatcttcatctacagagagga

SEQ ID NO: 652832 - DNA, 631 bp, Homo sapiens
aagtatttacaataaatcctaattgtagaatatagatggtgagtatattatttgtaaaaattttaaaattatttaaaaatttcgtgataaaatgtctgaaacatttctttggataagatgaacaccatattagacactgcagtagaaagggcatgtacttgcacagagggaataggaactgaaacaatgggaagaaaaaagggctgaaaaacaaaaatcagagtatcagaaatgtggaaaatatcacaaagtctaatacagatatacttggtgttttagaaaaatagaagaaaatggtcagaagaataaagaaataattactgaaattttttcaagattaataaacccaaagatgagaaatacaaagtaaactatacctattcacatcatagtcaaattgttgaaaaccaaaataaaaagaaaatcttaagaacagttgggggggtagatatattgtagaagatataaatgggaatatttttwaaaatactttgttaatacaaaagaaggcatgtaaagagaagcaaggttgcaaaaaataagtgttaccaaaaaaacagataacaagctggtaaattgaacccaaacatattaatgatcatattaaatctaaatgcacaaaaagatgtaa

SEQ ID NO: 652833 - DNA, 700 bp, Homo sapiens
agaaattacttatctaaaataggaaaataagtggggaaaaaagtggagcagagcatctaagaggtgtggaccattacataatawaacatatgtgaattagacttccagtagcagaagagagagagagtatagggcagaagaaatgtctgaagaaataatggccaagagccaggctcagtggctcccacctgtaatcttggtgacttgggaggctgagatgggagtattgcttgaagccaagagtttgagaccagctgggcaatgtaaagagaccccatatttaaaaaaaaaaaaattagccaaatgtggtggcatgcacctgtagttttagctacttaggaggatcacatgagccaaggatttcaaggctgcagtgagctatgattgcaccactgcactccaacctgggcaacagagcaagactttgtttcttaaaacaagagagaaaaaaataatggccaagaattttcaaaaagtaataataaataccaaattacaaataaatgtttcgaaaacatccgagatcatcaagtagaagaaataccaaatcaaaaaatacacaacaaacacctatacatattatatttaaactgctgaaaacaaaaattggaaagttgggaaaagatacgtcctgcaagcacaattcatatgaaaactagtaaggctaaattatgattggataagaaaactacaagatgag

SEQ ID NO: 652834 - DNA, 700 bp, Homo sapiens
agaaattacttatctaaaataggaaaataagtggggaaaaaagtggagcagagcatctaagaggtgtggaccattacataataaaacatatgtgaattagacttccagtagcagaagagagagagagtatagggcagaagaaatgtctgaagaaataatggccaagagccaggctcagtggctcccacctgtaatcttggtgacttgggaggctgagatgggagtattgcttgaagccaagagtttgagaccagctgggcaatgtaaagagaccccatatttaaaaaaaaaaaaattagccaaatgtggtggcatgcacctgtagttttagctacttaggaggatcacatgagccaaggatttcaaggctgcagtgagctatgattgcaccactgcactcsaacctgggcaacagagcaagactttgtttcttaaaacaagagagaaaaaaataatggccaagaattttcaaaaagtaataataaataccaaattacaaataaatgtttcgaaaacatccgagatcatcaagtagaagaaataccaaatcaaaaaatacacaacaaacacctatacatattatatttaaactgctgaaaacaaaaattggaaagttgggaaaagatacgtcctgcaagcacaattcatatgaaaactagtaaggctaaattatgattggataagaaaactacaagatgag

SEQ ID NO: 652835 - DNA, 548 bp, Homo sapiens
tctgaaatatttgctgttctgcagcctccgctggtgatacccaggcaaacagggtctggagtggacctccagcaaactccaacagacctgcaggtgagggtcctgactgttagaaggaaaactaacaaacagaaagaacatccacaccaaaaccccatctgtatgtcaccatcatcaaagaccaaaggtagataaaaccacaaagatggggagaaaccagagcagaaaagctgaaaattccgaaaatcagagtgcctcttctcctccaaaggaacacagctcctcaccagcaatggaacaaagctggatggagaatgactttgacgagttgagagaagaaggcttcagatgatcggtaataacaaacctctctgagctaaaagaagatgttcgaacccatcacaaagaacccattgcaaataagctaaaaaccttgataaargattacatgaatggccaactagaataaacagtgtagagaagatcttaaatgacctgatggggctgaaaaccctggcacgagaactacgtgacacatacacaagctt

SEQ ID NO: 652836 - DNA, 515 bp, Homo sapiens
attgttgattttgctgcctctctgatatgttggaggcaatttccatccccctaaacacgttaaatgcattttgtgattttaacaggctaaagtgttaactcttgtttaaatatctatatttagcattacttatagaactaacacaagtacattctcttccatacagagcgattaactttttcagaaaattattcaaataattcattgraccattatgttagggatgcttactcatcaattccagatagagttgataaagatttgtgcccatatgggatgcactctgtagagtatccacatatagattggacctactagtgctacctctagcaaaatgagaatgttaccggtaatcatcacacaaaggatgtcatggtaaatcaaggctcagaaaattatatgctacctaagggatgtggcattgtgcttctaccttgtttcttctcaagcccagttacatcagtttcttcttgtttcttctttagtctggctgtggcattcagatatttgttcag

SEQ ID NO: 652837 - DNA, 515 bp, Homo sapiens
attgttgattttgctgcctctctgatatgttggaggcaatttccatccccctaaacacgttaaatgcattttgtgattttaacaggctaaagtgttaactcttgtttaaatatctatatttagcattacttatagaactaacacaagtacattctcttccatacagagcgattaactttttcagaaaattattcaaataattcattggaccattatgttagggaygcttactcatcaattccagatagagttgataaagatttgtgcccatatgggatgcactctgtagagtatccacatatagattggacctactagtgctacctctagcaaaatgagaatgttaccggtaatcatcacacaaaggatgtcatggtaaatcaaggctcagaaaattatatgctacctaagggatgtggcattgtgcttctaccttgtttcttctcaagcccagttacatcagtttcttcttgtttcttctttagtctggctgtggcattcagatatttgttcag

SEQ ID NO: 652838 - DNA, 532 bp, Homo sapiens
ggtgttgagtcattgtagacagtcagaccttagccttatgcactgctggatgtgtgtgcgcgaaccacaggtcttcttcaggacctgctggcaaggctacctctagttctcctgtgccaagagttctgattccttcagcagccttgaatccagctctgggcacaattggccccaactgctgaaacttttgcccagttctgtgctgaagctttgcactactctggctctatgcgcgggtgcctgtctgtcttgctcttggttctggcattctgcttcagcacttggctaaaaggccagccactggctttgtggagctggacttgcagtggcccttgattgctgctctgcaaaggttttctttcttcctttttacattgttgtcttcaggctggcacttgaaggagcccaacaggccattacagtcacacagtcaaacaaagatcttttaagagaacaatygtcatttgtttcccagttggcatttctggagatttagcaggataatcttggatgtacgtcagcaagcatgagc

SEQ ID NO: 652839 - DNA, 515 bp, Homo sapiens
attgttgattttgctgcctctctgatatgttggaggcaatttccatccccctaaacacgttaaatgcattttgtgattttaacaggctaaagtgttaactcttgtttaaatatctatatttagcattacttatagaactaacacaagtacattctcttccatacagagcgattaactttttcagaaaattattcaaataattcattggaccattatgttagggatgcttactcatcaattccagatagagttgataaagatttgtgcccatatgggatgcactctgtagagtatccacatatagattggacctactagtgctacctctagcaaaatgagaatgttaccrgtaatcatcacacaaaggatgtcatggtaaatcaaggctcagaaaattatatgctacctaagggatgtggcattgtgcttctaccttgtttcttctcaagcccagttacatcagtttcttcttgtttcttctttagtctggctgtggcattcagatatttgttcag

SEQ ID NO: 652840 - DNA, 437 bp, Homo sapiens
tccagtgttggtaaagcctccctaaccctagactgtatggggagtctcctggatattcttgcaaaatttagttttttcccatttacatctttttctatatttggaatttgtttttgtatatggagtaatatagaagtctgatgtattttttgccttccatatatcgagccagttgcactagcactattggcaaaataattcatccatgcccactaaactgaaatgccactgtcatgtatgaaatcatcatatgaatagggatttattcctttatctcaattcagatatatttgcctactcctatactcataccatgttgatttgaaatagtggycttatattatgttctgatatctggggagtcagtttttttttttcacagttttcttggctattcttgggcatttattctgccacttattcttttttaaaagaat

SEQ ID NO: 652841 - DNA, 495 bp, Homo sapiens
cttcacaaatgtcaggctgggggacatcaccagatgttagtgttgaaatagcrtttagaagacaaacattgactccagaggccaagggtcacctaaacaaagagccagactggcaaggaggatcaaagtgagggtacaaaaactagattcatgtggccatgactttctgtggtctagctcacagttcatcagactttccaggactatagaaagtttttgcattgtcttctgtggcttggatctcagtcctagctggtggagtgttggctggagagagaggaaaggggaggcacgaaatgatagggcaggcacaaatttaacatacagacattcaaataatttcttcttcatgtgggatcttggggatccatgaaacacaatctaaaaactgctataccaggggattttaggttgtctcaccaataccaaaaattggaatgaggttattccttctctttgtaccaaagaggataccctgctaagcctttctgagag

SEQ ID NO: 652842 - DNA, 485 bp, Homo sapiens
agtaggtgtagggtggagtccaataactggcaattttctcaaattcccaggttatatcatgctgcctgtgcagggaccacactttgagaaccattgttttagcgtaactcattggttttgagatccaaggaaatggaagcacatgtgtttagggtaatcttgtgctagtttgcatttattctcatatatatgtcagcacatgcaaactrcagtagaggaggcatttacctgaataattcaggctcacaaatgacttgcactccattaaaatacttcaagcataggaagtgttttctaggggagtagggaggggagtgtttctgaatcaccctatgacttgctttattgcccgtttttattttgcatatgtatagcaaagtattgtttgccttaagagaaatatgttcacctgtctctaatgatggctttactctgatttcctgtttgtgcaagatctggaaaaaaagttgtgttaggaaatggga

SEQ ID NO: 652843 - DNA, 527 bp, Homo sapiens
tgtgttaggaaatgggaatgggaatgggcaagaggttttctagataagctagttttaaaatatgtcctattcatatttytggtgtcattatgaaaaggtcacaggcagtctgaagatgagtttattgttacctcaaaactgaacgaacccaaaaagtgcttcttacttgttttcagtccaggctttaactaggaagaccctggaagacgtcatggtagagtcttagaatttccaggatggtgttaggacaattgataactattttgtcccacaaaactgcacaatgtcaaggaatcaaaataatctcagtgttaacttaaaccaactcttacttaatgctgatacagttcttaactcctaatctattttctctgcatttccaacttttgttttgtaagcctacaaaacaaaatgtatatgatatacattatcatttttgttccttatgaaaggcctgaaaagcaagtcttagtttgtgtgctttactgatgaggaagctgaggtcagagaggcaagctagtgagtgg

SEQ ID NO: 652844 - DNA, 528 bp, Homo sapiens
aaaaagttgtgttaggaaatgggaatgggaatgggcaagaggttttctagataagctagttttaaaatatgtcctattcatatttctggtgtcattatgaaaaggtcacaggcagtctgaagatgagtttattgttacctcaaaactgaaygaacccaaaaagtgcttcttacttgttttcagtccaggctttaactaggaagaccctggaagacgtcatggtagagtcttagaatttccaggatggtgttaggacaattgataactattttgtcccacaaaactgcacaatgtcaaggaatcaaaataatctcagtgttaacttaaaccaactcttacttaatgctgatacagttcttaactcctaatctattttctctgcatttccaacttttgttttgtaagcctacaaaacaaaatgtatatgatatacattatcatttttgttccttatgaaaggcctgaaaagcaagtcttagtttgtgtgctttactgatgaggaagctgaggtcagagaggcaagctagt

SEQ ID NO: 652845 - DNA, 528 bp, Homo sapiens
aaaaagttgtgttaggaaatgggaatgggaatgggcaagaggttttctagataagctagttttaaaatatgtcctattcatatttctggtgtcattatgaaaaggtcacaggcagtctgaagatgagtttattgttacctcaaaactgaacgaacccaaaaagtgcttcttacttgttttcagtccaggctttaactaggaagaccctggaagasgtcatggtagagtcttagaatttccaggatggtgttaggacaattgataactattttgtcccacaaaactgcacaatgtcaaggaatcaaaataatctcagtgttaacttaaaccaactcttacttaatgctgatacagttcttaactcctaatctattttctctgcatttccaacttttgttttgtaagcctacaaaacaaaatgtatatgatatacattatcatttttgttccttatgaaaggcctgaaaagcaagtcttagtttgtgtgctttactgatgaggaagctgaggtcagagaggcaagctagt

SEQ ID NO: 652846 - DNA, 528 bp, Homo sapiens
aaaaagttgtgttaggaaatgggaatgggaatgggcaagaggttttctagataagctagttttaaaatatgtcctattcatatttctggtgtcattatgaaaaggtcacaggcagtctgaagatgagtttattgttacctcaaaactgaacgaacccaaaaagtgcttcttacttgttttcagtccaggctttaactaggaagaccctggaagacgtcatggwagagtcttagaatttccaggatggtgttaggacaattgataactattttgtcccacaaaactgcacaatgtcaaggaatcaaaataatctcagtgttaacttaaaccaactcttacttaatgctgatacagttcttaactcctaatctattttctctgcatttccaacttttgttttgtaagcctacaaaacaaaatgtatatgatatacattatcatttttgttccttatgaaaggcctgaaaagcaagtcttagtttgtgtgctttactgatgaggaagctgaggtcagagaggcaagctagt

SEQ ID NO: 652847 - DNA, 570 bp, Homo sapiens
tacactgctataaagaaatacctgagactgagactggggtgatttataaagaaaagaggtttaattgactcatggttccacaggttgcacaggaaggatggctggggagcccttaggaaacttacagtcatggccaaagtcaaaggggaaataggcacatattcacatggccagagcaggaggaagagaggaaagggggagttgctacagtatacttttaartaaccagatattataagaactcactcactatcatgagaagagcaagaaggaaatccactcccatgattcagtcacctcttaccaggccccttctccaactttggggattacaattcgacatgagatttgggcagggatacaaatccaaaccatatcggtggggtgttttgctttttaaatttttaatttttttagaatcatatttttaaaatgtcttaaatggaagccataattgtacatatctatggggtacatagtgatgttttgatacatatgatgtatagtgatcagattagggtaattagcaaatccatctcatttatcatttctttgtgttgtgaacattca

SEQ ID NO: 652848 - DNA, 570 bp, Homo sapiens
tacactgctataaagaaatacctgagactgagactggggtgatttataaagaaaagaggtttaattgactcatggttccacaggttgcacaggaaggatggctggggagcccttaggaaacttacagtcatggccaaagtcaaaggggaaataggcacatattcacatggccagagcaggaggaagagaggaaagggggagttgctacagtatacttttaaataaccagatattatragaactcactcactatcatgagaagagcaagaaggaaatccactcccatgattcagtcacctcttaccaggccccttctccaactttggggattacaattcgacatgagatttgggcagggatacaaatccaaaccatatcggtggggtgttttgctttttaaatttttaatttttttagaatcatatttttaaaatgtcttaaatggaagccataattgtacatatctatggggtacatagtgatgttttgatacatatgatgtatagtgatcagattagggtaattagcaaatccatctcatttatcatttctttgtgttgtgaacattca

SEQ ID NO: 652849 - DNA, 525 bp, Homo sapiens
tacaaatccaaaccatatcggtggggtgttttgctttttaaatttttaatttttttagaatcatatttttaaaatgtcttaaatggaagccataattgtacatatctatggggtacatagtgatgttttgatacatatgatgtatagtgatcagattagggtaattagcaaatccatctcatttatcatttctttgtgttgtgaacattcaatattctcattctagctatttgaaactatatctatatagtcatcctatggtgctatagaacactagaatttattcgtcctatctagctgtaattttatatcctttaacaaatctctccctttccctctacctttcccatcctctagtatcttctgttctactttttacttctatgcactcattttttttagctttyacatatgagtgagaacatgagatatttcatttccacttaatataatgtcctccagttccattcatgttgctgggaatgataggatttcattcttttttatggctgaatagtattccat

SEQ ID NO: 652850 - DNA, 613 bp, Homo sapiens
tgatatattcctgctaaaaatcataacctgaatttaatcacgaagaagcatcagacaaacccatattaaggsatagtctgtagagtatagttagctgtcctgtacgctgccagaaccacaagatcatgtaagtcaaggaatagctgaaaaatgtcctcatattaaaggaaactaaacagacacagtcattaaatgcaacatgtgatcttggattggattttttgccataaagcaatggttcttgaagtgtggtcccaggattagcagcttcagcaccacctaggaacttgcttggaaatataaaattttggacctcatgttgaacccacttaatcagaaaccctggatttgggcccactaatctgtatttactgagacttcccattgattttgtagcacactaaagtttgagatccattactataaagtacattgttggggcaatagttgaaactctggagtaggtggtaataatatatcagtgttaatttcctgctttgcaggtcatttgtaggaagaacatactgaattattcaggagaaatagaaaattatgcctacaacttactcttaaatgactcaagaattggccaggcaagttggctcatgcctgt

SEQ ID NO: 652851 - DNA, 515 bp, Homo sapiens
tcaactgaagaagacaacatttgttttaacagagtttatttagaacatcctgctgctaatgtcagcacacagattgggcaagttccaccaaaataactttcaggctatttgtactcaattaaatgtttatttaaaatttccttttggtttttactgctgtaaatgcattgtccatttttcacataccaggcactgttgtttagtctcaagggcattacttgttacaaatttaacaactgtgacatattaaaaacaacatttagggaagaaattagtgttgagaagatgtgaccagatgttttcatagtgttttgccaaagtgtcacttaaatgccaacaagattttaaaaggaatttttttccaaagtatttcactatacccacttaagtgaccccaaaatatgttgctatcacagataygttagaaacaaagtttaattttcattttaatcatagttttcttgaggatacataaaatcttttcactgtcattttttcttttataaacccatggt

SEQ ID NO: 652852 - DNA, 617 bp, Homo sapiens
cccccttcttccataaagccttttcagggcacttaagtcagaagctttctttgccttcctctcattgagcatttgattgggactactcttaaggcctataacatgcattttttgtagttatttaggtccctgtattagctttctcagtgggttgcaatgtctggaaggtgtaaacctgtctttgtattctccatcatgccttgtacatgttggatgatgaatgagtaaaggaaagaataaaggtaaatgctacttccttcccttcctaatcatattgaaaaagtgtaacatggagaataggtcctgcagaaatctctggtacatccagttatagggcagcctgagcctaaggatgtggattagtggtgaggagaccttggcatgtctgagtttgggtcagtttccaaggaccacctaagtgtttagaggcttatctgaataaatggattctcccagatctttggaatttctgagatgaaagtgggcagagttgtgggcttgtcataataaracatgtatttaaaaatttttaactgaagattatataagtatcagaaaacttgaagctcaaatctgacaaatatgtggtgcaggtggctcaggaactgagcaggttg

SEQ ID NO: 652853 - DNA, 574 bp, Homo sapiens
attttttttatttctgtaagatcagttgtaatacccagtctttcatttccaaatctaataatttgagttttctctatatttttctcagtcagtctagctagaggtttgtcaattttgttaatcttttcaaagaaccagcttttagttttgttgattttatctattgttgagtctacttcagatttatactaacttaatttcagtgtgatatagaaacattatttctatatagctctattatattttttccctttttgttatatacatagtattatatttatattggttatgcatattattgttatacattttacttctataaatgttacaaacctcaaagtatattattayaacttattttatataattttatgacttttaaagaagctgaaagaagatgggagaacaagtatatatagcttttatgatattaatcttctcatttatcatttcttattttctttacttgttcctgtagacctgagtcatctatagtcatttctttagtccaatagagctttgcttacacccacctcctttgttaggatattggcaaatatattacatttctatg

SEQ ID NO: 652854 - DNA, 574 bp, Homo sapiens
attttttttatttctgtaagatcagttgtaatacccagtctttcatttccaaatctaataatttgagttttctctatatttttctcagtcagtctagctagaggtttgtcaattttgttaatcttttcaaagaaccagcttttagttttgttgattttatctattgttgagtctacttcagatttatactaacttaatttcagtgtgatatagaaacattatttctatatagctctattatattttttccctttttgttatatacatagtattatatttatattggttatgcatattattgttatacattttacttctataaatgttacaaacctcaaagtatattattataacttattttatataattttatgacttttaaagaagctgaaagaagatgggagaacaagtatatatagcttttrtgatattaatcttctcatttatcatttcttattttctttacttgttcctgtagacctgagtcatctatagtcatttctttagtccaatagagctttgcttacacccacctcctttgttaggatattggcaaatatattacatttctatg

SEQ ID NO: 652855 - DNA, 579 bp, Homo sapiens
aattgggatgagggcttttattgcaggaaaggatggtgagaccacaaattaatccaaattggagctgcccaacacagcatatttcacctggtggtaagaccctaagtgcagtggactttttaaaaatggaaagcttattgcttctcagggatatctctctaactgattgattgcctaaccagcatttcttccttctattttgagtaattgtgcaccacttaattagtctttcaatccatgaacatagtttatctcttcatttattttgaacttttctactatctctcagcaatgttttatagttttcagtgtagaagtattatatatcttttgttgatttatttccagggttttttttttgttttatatattactgaaattggkttcttaaaaaactttattttccaaattgttattggtagtatataagaatgcagttgattagctttgtattctgtgaccttgttagactcatttattactccagtaattgttttatagattccctaagattttctacaaaaaaaaaatcatatctgtgagtaggaacacctttacttctttcttccaaaatttagg

SEQ ID NO: 652856 - DNA, 573 bp, Homo sapiens
aaagatttaggaatttagtaaaacagggtttttgttttgtttgtttgtttgtttttaaaaggctagttctctgatctcacaaccaaaaccacgagcacattcctttaaaaggatatccttttaatgatttaggaagctttttaggctctccggagttctcacagaggctaatatggaaaactcacttacccaagaggcttggttgactaattagacaatctgcaccaatctgatggccccagctgtccaaataaaacctgccttgatggtggaaagctcagcaaaactggaaggggcaggaactgagacaagaataaaaatccagggagacagccgagcyggctgctttctctgagtgtctgagaagcagcatctttataagactaaaagagtttattttaaccataactgaaagaaactaagtaccagttaccactagcaagggtgatctttatctgtctttgctgacctgagagaaagggaaggaatcttaaaaggctctagcagctgtgggctcctcacagaggacatctcccgcacatttctaacatgtcttggattttttccaacctt

SEQ ID NO: 652857 - DNA, 377 bp, Homo sapiens
acaattacataaagtcacatccctataacaaatccctcatttatgtatgcgtatgtgtatacatgtaagtacatgtatgcatctgtatgtataatctgtacrtatatatgcattgtgtgtgtgtgtgtgtgtgtgtatatatatatatgaagggacttattacaaggatgtggccttatataattgtggaagctggggatcaaaatatatatatatttatctgatggaaccctgactgataataacatccatacatttaaaatatattatttttctttcctttcttttctctagatatctcaaatctttttgccctcttcaacatgaggtgagggctaaataattaaacagaaaaaaacacctctctctctctcctc

SEQ ID NO: 652858 - DNA, 550 bp, Homo sapiens
gaagtgctcatgtgacatcacaggaacatgacagccctcaggatgcttgccttggaggagacttgaaggaaggcagtaatatctataatccttatgaggctatcatgtgaaaatggaactgagaccgtgttctccctgggacaaaatagaactcataggtggaaatcacaatatatggaaaagctttttatcagtaagagatgagcaccgttggagagtgctgcctttggatgtcgagtactcagtgtcactggaagagactcctagatacaatgggtctcaattacctcttctaaaatcccttctaagtctaagtctttattgatgtatattttaagaagagttttagagagtagcacagtgcctagcatgtagtaagtactacataattatgttgaataattgagtaaagtaggtactatggtctgaatgtgtcccccagccccccaaagtgatggtattagaacgtgaggcctttggggaggtaagtcatgagggaaaagtgmtcatgaacaaaattggtgccctcataaaacaggcccaagcttac

SEQ ID NO: 652859 - DNA, 566 bp, Homo sapiens
acactggagtgcagtggcatgatcgcagctcactgcagcctcaacctcccggactcaagagatcctcccacctcagcctcctgtgtagctgggactacaagtgtgtgccaccactctcgactaattttgtataatttttgtagtgatgaggtctcactatgttgcctaggctggtctcaaattcctggtctcaaacaatcctcctgtctcagcctctcaaagtgctggcatyacaggcttgagccaccgcacccggcctcctgcatttctaaaatttctaaacccaatgaaaactttcactaatcttcatcacatgcacctataagggtgtagttacaaattgtcttttctaaagaaacccatggattttacattgcctctttccaaggagaaaagtcatacagtatccaaagttacacaacgggtcaggagaacagcccagaatacctgtcagtgtctctcgattgaagtgtttattcacagaagcaaagtcatgtttaaagctgaaaaagtatttcctaaaatatactctagttgaatatttcaggtacaatagtaagtaggtc

SEQ ID NO: 652860 - DNA, 535 bp, Homo sapiens
taacagaaatatagatgttgtgatgcttctgcctgtacccttaggtggccctctaaacaagctttaagtagtacacctaactgcagcaaaggagaatctgctggtcaaagagcaaaagcagcacctattacttcattgtcagagtgtttaaaatgtgtatcaaggtcattactcatcaaattttccctctgggaacagataaagtccgttgttctttctaaggccaaacgactgtgtgctgcctgccattaatatttcctgtcactcttcaattccattttcactaatcatcacattagaccatagccaaaagacgtaactttaaaaaaatgtrcttaccttaatgtgctcagagtatttataggtcaatttccctgctggttactattagcatagttttataatgtataaagagtatttcttctcattctctttaacattaggtaaaatcctcagagggagcagaacctagatatgtttaaataaaacagaccaatgacctagggctatagcattcacacagcagtggtttgat

SEQ ID NO: 652861 - DNA, 603 bp, Homo sapiens
ttcattcatctaggaaaagagagggaagagacgagatcatacagtgagtagtactttggacctgaggcaggtgagggtttgaggatggaggtgaggagagacactggttaaaaaccaaaggaagaatgtgaggagccttgggtacayaagtcattagaggagggtttggggccagatgaggtaagttagaagaaaaggagggacaatgaagcagagaactaaaatagaaggtttatggaggaataggggtaactaaaggaatggccaaaaaagcagaagatgttgatctcttcctcctcttctcttcctcccattctttctctctaatgtaaacttcactgtctcctagttcccccactgctctacctccagatcttagtcttatttttcttttcctttcctttaatggcccaaacagtggaaccaaagtatacttttactttatatgttgattgaataaagtcatatgctctcagttagtttttaaattaactcaaaagatagttttctatctctaccactacccagaaacttcactgaaactagaaccaagtttctcttcataagtaaatatgaatatctccataaatatcataagaagac

SEQ ID NO: 652862 - DNA, 603 bp, Homo sapiens
ttcattcatctaggaaaagagagggaagagacgagatcatacagtgagtagtactttggacctgaggcaggtgagggtttgaggatggaggtgaggagagacactggttaaaaaccaaaggaagaatgtgaggagccttgggtacacaagtcattagaggagggtttggggccagatgaggtaagttagaagaaaaggagggacaatgaagcagagaactaaaatagaaggtttatggaggaataggsgtaactaaaggaatggccaaaaaagcagaagatgttgatctcttcctcctcttctcttcctcccattctttctctctaatgtaaacttcactgtctcctagttcccccactgctctacctccagatcttagtcttatttttcttttcctttcctttaatggcccaaacagtggaaccaaagtatacttttactttatatgttgattgaataaagtcatatgctctcagttagtttttaaattaactcaaaagatagttttctatctctaccactacccagaaacttcactgaaactagaaccaagtttctcttcataagtaaatatgaatatctccataaatatcataagaagac

SEQ ID NO: 652863 - DNA, 497 bp, Homo sapiens
gaattcattttttactttttctattctctcaaccctgcctttgcctccactacttccctccccacatttgggtgatcaactgatccactgattccatttccagattatttcttgaattgattagtactgtttcattcctactacaggctttcatcacattcttatcacctctcatttagatttatgaaataggtttctaatttgtttcactcttccagttgatcctccacactatgatgtttcttaaatacaaaattgattatcttattttcatatcttaaaacctacaaagattataatttttctatcaaataccttaaacaaacaatgmacactagttaatgatagtcatgctgaagtatttagagaggaatgtactgaaacgtacaatctgttttgaaatgtataaaaaataaaatgaattgatggattataaagggatagataggtgattaaacaagtttagcaaaatgttaatagtacaatctaatggtagt

SEQ ID NO: 652864 - DNA, 496 bp, Homo sapiens
gaattcattttttactttttctattctctcaaccctgcctttgcctccactacttccctccccacatttgggtgatcaactgatccactgattccatttccagattatttcttgaattgattagtactgtttcattcctactacaggctttcatcacattcttatcacctctcatttagatttatgaaataggtttctaatttgtttcactcttccagttgatcctccacactatgatgtttcttaaatacaaaattgattatcttattttcatatcttaaaacctacaaagattataatttttctatcaaataccttaaacaaacaatgaacactagttaatgatagtcatgctgaagtatttagagaggaatgwactgaaacgtacaatctgttttgaaatgtataaaaaataaaatgaattgatggattataaagggatagataggtgattaaacaagtttagcaaaatgttaatagtacaatctaatggtag

SEQ ID NO: 652865 - DNA, 558 bp, Homo sapiens
atggatcagctggcaccacccagatcaataaactggctcatctgatcttctggacccccacccaggaaatgatttagcacaagaagacagctctaactccctatgatttcatctctgaccaatcggctctcctggaacactggcttcccccacccaccaagttatccttaaaaactctgctccccaaatgctcagggagactgatttgagtaataataaaacyctggtctcccgcacagctggctctgtgtgaattactctttttctattacagttcccctgtcctgatgaatcggctctgtctaggcagcaggcaaggtgaatcccttaggcagttacacttataccccacccccccaaaaaagccataaattttgaaatgaaatttatattataaagagctagaaccgtcagactctgaaacatcaaaaattctctcaaaatttctaccaaggattgtgtctgacatcatcttttcctaaaacaagcaacaattagcaatagtacttcaaccactcacttaatttcccccaatcattctcagtattctcaaaagaa

SEQ ID NO: 652866 - DNA, 605 bp, Homo sapiens
atgtttttgttttttttttyttcttcttaatatccactaaactataagtttcaagagggcagggattatttagtcttattttggtcttatttgataactagcaaaaccccagggcccataacagcacctagtacatagtaggtgctcaaacacatgtttaattattagcttgtaaggggtccacggtttgggcactgcctacctatccaacttcatctctgccctctattcacagtctaatcttcagtcagattgtactgtattcagttcctttctcacctctagacctttgcgtatgttggtacctgttcctccttcccccacctctacctctagtatccccctaatctcctgcctaattcctttaaagtcacttccttttggaggccttccccaaccctctagttaggaaatgtcctcgcactgtgtatgcccacatcactctgcacttctcctagactaatactcatcatactttacagctaacaattattggtctctcactctggtagtctgtttgttctgtgatcacacttatacatacttccagcacccagtacaatgtctaccacctgagatgcaattaataaataactgctgaatta

SEQ ID NO: 652867 - DNA, 415 bp, Homo sapiens
tattaatgaaaaaaaaaaaaaagtctatgcagtagtttagttaatagtaatgtattaatttcttagatttgataaatataccataattatgtctgatgtcaatattaaaggaagatgagtgaagggtacatatgagagcattctttattagttttataattctttcataaataaaattattttaaaataaaacattttttaaagtatgactttscttttttctgctttttgtatgtattttacacttctatttaaaaattgtttttaaattgagcatgtttttcttcaaaaatcagaaataaacaggaaaatgttcatttttaaagaccaactttttggaaaaggctcctctcagaaggataaattgctcttcatcctgtacttccccaaaattttttttgtactaaaactctac

SEQ ID NO: 652868 - DNA, 502 bp, Homo sapiens
tcagcattggaagtgaccatatagtcaggggcattggtattacaaagacagcatggaattgagagtcatttacatttgggttcagtgtcttatccccactcacaaattgaaaaactttaggcaaatcatagatcataagcttcagtgtctgtaaaatgataatccaatgttacaagctctrtaatttatttttaaatacttcattctaattggtttgatatatgtgacaattaatttaagtttcatttctaggcaaagtcagctaaagcaatgcctgaaatgtacagtccgaaagtgggtgtgtgtgtcaggcaacaatacatcagaaaggggatggactcactcctacttcagtcaataaccattaccatttagcaagctgaaagtttagaaatgggttttacctggtgaaattaaacgtattcaagacatatgggttagctaaaataatttagaaacatgtgtaagaaaaaagggcaagacttctctgatgcctcaactt

SEQ ID NO: 652869 - DNA, 375 bp, Homo sapiens
tttatagtagagctaagattcaaaggtaaatatacctggctccaaaatccaccctgccaggctctgtttttgttcagtgtttaggtatagggtgtcaggagatggagtaagtcaagaagggaaacatgatgattattctcatggtactgcctattccctgctcaccttccctaccactaatctcttgctcagagaatttcagtctatatatatatatgtataaattgctrgatgttaggattccaaatccaaaatggaaaccccctatttgatgcaagctattgcaaaaatatcactttagatttgggcatgtaacatttccaccaccatttaaggttctagagtagactttttttgaaagcttgttttctcctc

SEQ ID NO: 652870 - DNA, 495 bp, Homo sapiens
aaaatatggctggtggcttatgaggaaaacaaagtctgtcctttatcttcaccaaatcttaaagccaactcaggaattcaattactgaccggtatgtgctygtggagaagaaactgtatgccttattaattcaaactgcaatagtccccctcattatcagggaatatgttccaagaccccccagtggatgcctgaaaccatggatagcaccaaaccctacatatactatgttttttcctatacatatatacctgtgataaagtttaatttatagattagacacaataagagattaacaataactaataataaaacagaacaattgtaacaatatgccagcatcactaatcttgagctttggagtcattattaagtaaaataaaggttatttgaacatgggcattatgatagcgagatagttgatctgaaaaccaagacggctattaagtgacttaacaagctggtagcatatacagcatggatatgctggacaaa

SEQ ID NO: 652871 - DNA, 547 bp, Homo sapiens
atttataaccacagacctgccctcatgtgggtttgagatacagatttacactactacaagggcaggtaaaccccaagcagataaattaacatgaaaatggattcccagatgtcattgctgaggtcctggtrgaagaaaagaagaagcctcttggtaagaacacatcctcaaataaggtcacacaggattctcacagataacgaaagcttgcaaccttaactcacaaaacacctggggaaacacagcaccataaccaaggctcagcagaaaacagcaaaatatgaacttcacataatagaattatcaggaagagctataaaacaagctggttttaaactattattataagtctaaaagggaattaaaaacgagagaaaggaatagatactatttttaaaaaagaaccaagcagatttaaaagagatgcaaaagggaaatatccagcttctatcatcctcaacaagaaatgtatgacctcaacaagaaatcagcctgggctggaagagaagttgtcagagaacctgaggaagcttgaggttattctcaa

SEQ ID NO: 652872 - DNA, 385 bp, Homo sapiens
cacctatgcaatggaatttcctctttttcttgcattccttttatatatggcttcccttagggaaaatggaggaggggaggaagtttatttaacaatatatacmtggctatatgtttaaaaagaaaacaactgcaaagagcaaaatgtgagcaaagcttgatcatgaaccacatattttttaaaatccttcccataagggcaattccaaaggaaaaaacacactttctgcttagcaaatgtgtatataaagacactagtatgcccatcccagtagatgtatacaaggctcagcacagtaaatacagcacatgaaaaacgacaacacaccatgaaataaatatcctaatgaaataaattaattcgaacaaaatatatcaggaaaact

SEQ ID NO: 652873 - DNA, 385 bp, Homo sapiens
cacctatgcaatggaatttcctctttttcttgcattccttttatatatggcttcccttagggaaaatggaggaggggaggaagtttatttaacaatatatacctggctatatgtttaaaaagaaaacaactgcaaagagcaaaatgtgagcaaagcttgatcatgaaccacatattttttaaaatccttcccataagggcaattccaaaggaaaaaacacactttctgcttagcaaatgtgtatataaagacactagtatgcccatcccagtagatgtatacaaggctcagcacagtaaatayagcacatgaaaaacgacaacacaccatgaaataaatatcctaatgaaataaattaattcgaacaaaatatatcaggaaaact

SEQ ID NO: 652874 - DNA, 607 bp, Homo sapiens
tcagtatttgccaacagtgggcctcagctgggtaatggaaaaatacagaaagtggtggcatcgaatgcatatgtactggcaaatagccatcaaatggctgattgtgagccaggatgaatacctaagtacaaggatctggattaacagtttcaagttcagtctagtaacatggttgtctcacagacaatgttggcaaagaccccctcatcccttgttggtcccaaaggcaagtagtggcagggcagagagaataaagtaacctactagaagctgagggaacactggggcataggatgaggcaaactatgcccacccccacaacaaatacccactagttatttgaatgataagatctggagttaccagcttgggctgaagcaaagtactcatccctaaaatagacctggtggcaacccacagaacattctgtaaactctaaagcactatataaatgtacttgttatctttactactgttaccaaagaggcaacatccagacccaaccatttggaaattrtgttttactcatttttgtttttaagctattaatggtctcggtggtttcttcattgaactttggagcatttattagtcatgtcaaatattc

SEQ ID NO: 652875 - DNA, 620 bp, Homo sapiens
aacatttttccttttgctataattcagcactgtagatgttttgtagctctgcaatttctatccactttgtgtttgtcttcactggaccttggaaatgtcatttctaaagaaatgatgcaaataaaataacctagaagcaacctctaaccttgtaaactgaattcaaaagataccctttagtttacatggttttcaatttctgtaaaattcatatggttactagttattttttcctttatcaacttaacgtaaactaccaaaacattaaaattctgcctatgtgcttgtgttggaattttttttttttgagacagcatcttctctgtcacccagtctggggtgctggggtgcaatctcagttaactgcaacctccccctcccrggttcaatccattctcttgcctcagcctcccaagttgctgggactgcaggcacgcaccaccatgcccagctaatttttgtatttttagtagagatggggtttcaccatgttggccaggctggtctcaaattcctgacctcaagtgatctgtccgcctcagcctcccaaagtgctaggattacagttatgagccaccacaccaagctggatttttttttttaaattctggttaaatttt

SEQ ID NO: 652876 - DNA, 620 bp, Homo sapiens
aacatttttccttttgctataattcagcactgtagatgttttgtagctctgcaatttctatccactttgtgtttgtcttcactggaccttggaaatgtcatttctaaagaaatgatgcaaataaaataacctagaagcaacctctaaccttgtaaactgaattcaaaagataccctttagtttacatggttttcaatttctgtaaaattcatatggttactagttattttttcctttatcaacttaacgtaaactaccaaaacattaaaattctgcctatgtgcttgtgttggaattttttttttttgagacagcatcttctctgtcacccagtctggggtgctggggtgcaatctcagttaactgcaacctccccctcccgggttcaatccattctcttgcctcagcctcccaagttgctgggactgcaggcacgcaccaccatgcccagctaatttttgtatttttagtagagayggggtttcaccatgttggccaggctggtctcaaattcctgacctcaagtgatctgtccgcctcagcctcccaaagtgctaggattacagttatgagccaccacaccaagctggatttttttttttaaattctggttaaatttt

SEQ ID NO: 652877 - DNA, 616 bp, Homo sapiens
ccacctcccgggttcaagtgatcctccggactcagcctcctgagtagctgagattacaggcacgcaccaccacatctggctaatttgtacttttagtagaaacagggtttcaccatgttggtcaggctgttgtcatcctctttttactctttctagtcatgtctcctggtcatagtgagaccagcatagggaagccccagggtatgtgccagggcacctgagtttctctccaggtgcatttggccagctggtctgcaaataactgttatggagactggrtcaggacactggggctgaattgctgccttgcagagcagtgacactatgcagtccacagctggaaaaaaatgattggattcctttaaacttttttttaattcaacctgtggaggctctccttcttttaatagaaaaagaaggtgtttttcttctgactattcttatgcttaacttttacttagcttgggtactagttggccattgatataagctgcttcaatagtgcccacagctcccatttcttgagtatttgctatgtgaaggccctgtgctaagttcatcaggtgcatctcattggttcctctcaaagccctgtgacacaggtacagttttatcc

SEQ ID NO: 652878 - DNA, 530 bp, Homo sapiens
attaatcattccttcacctctccctgagatagatgagattaatcgttcttttactcctccctgagccatctgcttcttctattccctttttcttcaaatgttcaccttatgttatgtaaaatgtagattttctggacactcatcgaagtttcacaagtatgcaatcagttgtctcactgccatcccccccaccctttttaaggaaagtgaataaatattgaacctcttaagaatctttttggaagaaacagccacagacacttcaatgacttgtgtttttccaggggacaccatcaagctggcttaataaccctcgatgatttgaaacttatgcctcaattgctcattttggttgtcaccaccaattatgttgagcactttttcatgtgtctattgacatttttatttccttttgtgtgaagtgcctcatttatgtaggggttttctcatttttttctatggattctcagttcttgccttattgatttgtaggaatttttaacayagtcaagatactagccttttgtggt

SEQ ID NO: 652879 - DNA, 539 bp, Homo sapiens
gtgttctgccatcaatagtttctactgctattaccaacgaaagcaacaatggcaataataattcctaaaatttygtataccatattacatttaaaaaatccaatatgtaataaagaaataagaaggttaacagtattacttagttactatatataaagaaaatgaggcccaaactgcttaacagttcatgaaagttcacagaactaattggtggaattgaggctgaattcagacttctgacattagacttgatggtttttctcctacattgtgattaaaccccatatcacttacaaaaatcaagtctgtttgggaacatgaatacaaataaatagtgttaattttttcatattggattactggaaaaatgtatattaatagaaatacttgtccatagaacacagctttgcagcatattcatcccaaagagctgaacttgcctgcgcacagcaacaaacaaattactttactaatacacatacactgacaatagttatgaactccagttactaacacaggcaatatcacaaagacggata

SEQ ID NO: 652880 - DNA, 539 bp, Homo sapiens
gtgttctgccatcaatagtttctactgctattaccaacgaaagcaacaatggcaataataattcctaaaattttgtataccatattacatttaaaaaatccaatatgtaataaagaaataagaaggttaasagtattacttagttactatatataaagaaaatgaggcccaaactgcttaacagttcatgaaagttcacagaactaattggtggaattgaggctgaattcagacttctgacattagacttgatggtttttctcctacattgtgattaaaccccatatcacttacaaaaatcaagtctgtttgggaacatgaatacaaataaatagtgttaattttttcatattggattactggaaaaatgtatattaatagaaatacttgtccatagaacacagctttgcagcatattcatcccaaagagctgaacttgcctgcgcacagcaacaaacaaattactttactaatacacatacactgacaatagttatgaactccagttactaacacaggcaatatcacaaagacggata

SEQ ID NO: 652881 - DNA, 567 bp, Homo sapiens
cactccaaactgcagaacaaggagcatgtgactgaggccttatacagggccaagttcaagtcgcctcaccagcaaatgattcacatctcaaagaagtggggctttaccaagttcaagtcagatgaatttgaaggcatggtggctgagaagcagctcatcccagatggctgtagggtcaaatgtcattgtgggttttgccattaaaagtaatttcttttgcaccgccctaatacatcctcaactgtggcctcctggaccagtggcagatgctacattcatgagactttccactgtgcccyctcctctttctgcccaccaataaatcctacttcctataaataaatagtaagtaagacttaaatttaagcaaatacagacctaccatttaatagcctcgtgaagctgggcttgtgatttctttaaatctaaaagtctccagacttttagataagggtgaactaacacctatcccataaatgtcttatgctagtgttttatgctagagtgcctgggataaaagaaaagccaaaaccctattacccatgttaatattgagcccaaaagtaa

SEQ ID NO: 652882 - DNA, 562 bp, Homo sapiens
ttcaattatatttttcggtgscaaaatttctatttgtctcttggcatcttctatttctttgtaaagctttccattgtttcatttgttccagcatattcgcaattgctcattaaaacatttttatggtggtggctttaaaatccttgtgaataaatctaatttatgtgttatcactgtgttggcatgtgttatctcattcaagatgagattttttttctggtgcttgatatgctgagtaattttcaacgtatctagggtaatttggatattatgctatgaggctctgtattttaactcttggaaataaacctcctgtgacaccacacatggtgaaagtgggggtgccttgttattgctaggtggtgataaaaatttatccctgctcaaccacctttggagagtgggggatttttttcttgtttctgctcccactatggcctacactgaagggaaggcaaacatcaggaggccttggacctttttaccactagatgatggtgaaagttccaacttctcacttagtttactttgacacctaaggaatctggtggagaaggacggg

SEQ ID NO: 652883 - DNA, 562 bp, Homo sapiens
ttcaattatatttttcggtgccaaaatttctatttgtctcttggcatcttctatttctttgtaaagctttccattgtttcatttgttycagcatattcgcaattgctcattaaaacatttttatggtggtggctttaaaatccttgtgaataaatctaatttatgtgttatcactgtgttggcatgtgttatctcattcaagatgagattttttttctggtgcttgatatgctgagtaattttcaacgtatctagggtaatttggatattatgctatgaggctctgtattttaactcttggaaataaacctcctgtgacaccacacatggtgaaagtgggggtgccttgttattgctaggtggtgataaaaatttatccctgctcaaccacctttggagagtgggggatttttttcttgtttctgctcccactatggcctacactgaagggaaggcaaacatcaggaggccttggacctttttaccactagatgatggtgaaagttccaacttctcacttagtttactttgacacctaaggaatctggtggagaaggacggg

SEQ ID NO: 652884 - DNA, 563 bp, Homo sapiens
ttcctaagcagctccactgatacagtggagatataatctctcctctctattgaatgaatttgctgagggtcggtgcatatagtagtcaatggaatacaaaccaataaaaatatgatagataaatagaatgaaaagtatccaagggtcaagtgctaaatctgttctgctgattccagctggtatttccttttcttctttaacccacatgaagacactctactaaacagtcatgtatawctcaggcatactggttttcatttgtaattttcattttattgcactttcaattttcaggttttgtccatctttcttccccttggcccttccatcacttctgctacttgatgaattctgtcttaaacagtagctagaatataaacatttaataaaatattaacctgattgcttgccctccctataaacaataaaatgacatacatgaacaaatgacaaatacaatattttatgttgtgtttatttctacctttctccaaggcttcttttaatctttattaaagtttattatagcaaactactatcaaatatttccatgcatttaactg

SEQ ID NO: 652885 - DNA, 563 bp, Homo sapiens
ttcctaagcagctccactgatacagtggagatataatctctcctctctattgaatgaatttgctgagggtcggtgcatatagtagtcaatggaatacaaaccaataaaaatatgatagataaatagaatgaaaagtatccaagggtcaagtgctaaatctgttctgctgattccagctggtatttccttttcttctttaacccacatgaagacactctactaaacagtcatgtataactcaggcatactggttttcatttgtaattttcattttattgcactttcaattttcaggttttgtccatctttcttccccttggcccttccatcacttctgctacttgatgaattctgtcttaaacagtagctagaatataaacatttaataaaatattaacctgattgcttgccctccctataaacaataaaatgacatacatgaacaaatgacaaatacaatattttatgttgtgtttatttctacctttctccraggcttcttttaatctttattaaagtttattatagcaaactactatcaaatatttccatgcatttaactg

SEQ ID NO: 652886 - DNA, 596 bp, Homo sapiens
gtctttcctgcctgctggctctgaagggtctggacattctggacaagggagattccctccagtgcagtgcaccctctctgccaaggggcagccagagtgctttgttaagtggtccccgatcctgtacatactccctaactgattgagaccaccaacaggggtctccwggcaccttatacaggagtgttcctgctggcatcacatcagtgcccctctgggatggagctcaaaaaagaaggagcaggcagccatccttgctgttctgcagcttccactggtgacacctccaggtaggggagggaccaagtgaatagggtctggagtggacccccagcaaactgcggcagccctaaggaagaggggtctgactgttgaaagaaaaacaaacaaacagaaaacaacaacaacaaaaacatccacaaaaatggccccacaaaaaccccttccaaagatcagcagcctcaaagatcgaagatagataagctcatgaagatgagaaagaatcaatgcaaaaatgctgaaaactcaaaaagccagaatgcctcttctcctccaaatgattgcaacacctctccagcaagggcacagaactgggt

SEQ ID NO: 652887 - DNA, 596 bp, Homo sapiens
gtctttcctgcctgctggctctgaagggtctggacattctggacaagggagattccctccagtgcagtgcaccctctctgccaaggggcagccagagtgctttgttaagtggtccccgatcctgtacatactccctaactgattgagaccaccaacaggggtctccaggcaccttatacaggagtgttcctgctggcatcacatcagtgcccctctgggatggagytcaaaaaagaaggagcaggcagccatccttgctgttctgcagcttccactggtgacacctccaggtaggggagggaccaagtgaatagggtctggagtggacccccagcaaactgcggcagccctaaggaagaggggtctgactgttgaaagaaaaacaaacaaacagaaaacaacaacaacaaaaacatccacaaaaatggccccacaaaaaccccttccaaagatcagcagcctcaaagatcgaagatagataagctcatgaagatgagaaagaatcaatgcaaaaatgctgaaaactcaaaaagccagaatgcctcttctcctccaaatgattgcaacacctctccagcaagggcacagaactgggt

SEQ ID NO: 652888 - DNA, 596 bp, Homo sapiens
gtctttcctgcctgctggctctgaagggtctggacattctggacaagggagattccctccagtgcagtgcaccctctctgccaaggggcagccagagtgctttgttaagtggtccccgatcctgtacatactccctaactgattgagaccaccaacaggggtctccaggcaccttatacaggagtgttcctgctggcatcacatcagtgcccctctgggatggagctcaaaaaagaaggagcaggcagccatccttgctgttctgcagcttccactggtgacacctccaggtaggggagggaccaagtgaatagggtctggagtggacccccagcaaactgcggcagccctaaggaagaggggtctgactgttgaaagraaaacaaacaaacagaaaacaacaacaacaaaaacatccacaaaaatggccccacaaaaaccccttccaaagatcagcagcctcaaagatcgaagatagataagctcatgaagatgagaaagaatcaatgcaaaaatgctgaaaactcaaaaagccagaatgcctcttctcctccaaatgattgcaacacctctccagcaagggcacagaactgggt

SEQ ID NO: 652889 - DNA, 642 bp, Homo sapiens
aattagttcaactattgtggaagactgtggcaattcctcgaagtcctagaaccagaaataccatttgacccagcaatcccattactaggtatgtacccaaaggaatataaatcattttattataaagatacatgcatgtgtgtgttcattgcagcactattcacaatagctaatacatgaaatcaacccaaatgcccatcaatgatagactgggtaaataaaatgtggtacatatacaacatggaatactatgcagccataaaaggaaatgagatcaagtcctttgcagggacatggatggagctgaaagccattatcctcagcaaactaatgcaggaacagaaaaccttgaaatatgagctataatgaggggcactagaggtacttggctttaaaaagacataggtgcagtgacatgatgttagttacatagcctttgaagtcatgttgtgtgaaagagcagttggatattgaygttggctaccaaaaccaatgggtaggcatttagattttggttcactagaaaacctgaactatctatcgattaagctctcaaaaactaaatagactgctgtctcctaaataaaatatgtctcccactgtggaaatgtcattgattttcaatttgtatagcttttatta

SEQ ID NO: 652890 - DNA, 642 bp, Homo sapiens
aattagttcaactattgtggaagactgtggcaattcctcgaagtcctagaaccagaaataccatttgacccagcaatcccattactaggtatgtacccaaaggaatataaatcattttattataaagatacatgcatgtgtgtgttcattgcagcactattcacaatagctaatacatgaaatcaacccaaatgcccatcaatgatagactgggtaaataaaatgtggtacatatacaacatggaatactatgcagccataaaaggaaatgagatcaagtcctttgcagggacatggatggagctgaaagccattatcctcagcaaactaatgcaggaacagaaaaccttgaaatatgagctataatgaggggcactagaggtacttggctttaaaaagacataggtgcagtgacatgatgttagttacatagcctttgaagtcatgttgtgtgaaagagcagttggatattgatgttggctaccaaaaccaatgggtaggcatttagattttggttcactagaaaacctgaactatctatcgattaagctctcaaaaactaaatagactgctgyctcctaaataaaatatgtctcccactgtggaaatgtcattgattttcaatttgtatagcttttatta

SEQ ID NO: 652891 - DNA, 594 bp, Homo sapiens
gcgcatttaaacatttcttctacctcataatggctttgcaagatacttgtaaagaagcaaatgtctagagccttactttaagaaagttaaacaactttggtgaatgatttggattaagattgttacatccagctatagaaatgtggtttcaatagggttgatgtgagtgagtaccttccttttttgaataccacttaaaacagttaactttttaagtcttgaagatgagaaaaatattgcttatctaatataactattttaatagttatctaatttatagttatctactataactatacattctgaatacttagcatgtactgtgctggggcacatatcttattttcccagctgctaaacgattatcttccttttctccctggtattttaatgcycaagtagaaaatggaaaatcatgaaggaaaaatatcacttgtgaaaatcgtggcagttagctttatgaagacacagtggcctctgtggggacatgggatatgcagaaagagatggctagtacagttgttctgtcttctgcagttcagtcagggacatattgagagaggaaagtttaagcaggtacattagaaattgata

SEQ ID NO: 652892 - DNA, 594 bp, Homo sapiens
gcgcatttaaacatttcttctacctcataatggctttgcaagatacttgtaaagaagcaaatgtctagagccttactttaagaaagttaaacaactttggtgaatgatttggattaagattgttacatccagctatagaaatgtggtttcaatagggttgatgtgagtgagtaccttccttttttgaataccacttaaaacagttaactttttaagtcttgaagatgagaaaaatattgcttatctaatataactattttaatagttatctaatttatagttatctactataactatacattctgaatacttagcatgtactgtgctggggcacatatcttattttcccagctgctaaacgattatcttccttttctccctggtattttaatgcccaagtagaaaatggaaaatcatgaaggaaaaatatcacttgtgaaaatcgtggcagttagctttatgaagacacagtggyctctgtggggacatgggatatgcagaaagagatggctagtacagttgttctgtcttctgcagttcagtcagggacatattgagagaggaaagtttaagcaggtacattagaaattgata

SEQ ID NO: 652893 - DNA, 565 bp, Homo sapiens
gaagggcttgtttttctctgaaatttagttcattgacactttagacccacaattttttgatggctttaaacaaaaaaaaaataattttttaaagttcatccgatattttctcattatggcaggagcaattgtctttggtaactttattttaattggaagaagaatttctaacattggcattgtaatgaggtttttggtctttgaccctagtggagcaattaaatccacgtctatttcttctgttatgcatgtattgaaggatcaaatgagaaaatatatgtagagtgcacaaagtgtctaatgtacactagtgatatacagttgtattatgactacacaccgaaaacacataatcaaccagattgcttcctgagaactagagccaggcttttccaatgatacttaactgtcaaataattctattcaatttttcatgggacttagggtttggtccatgaagtgctgccacagtatgcaaatcaattatatcaataaatgtgctaatttattcagcaaaygtattcttgtagcaatagttactcaatgaaagaagtaacatatttaa

SEQ ID NO: 652894 - DNA, 553 bp, Homo sapiens
gtctaatgtacactagtgatatacagttgtattatgactacacaccgaaaacacataatcaaccagattgcttcctgagaactagagccaggcttttccaatgatacttaactgtcaaataattctattcaatttttcatgggacttagggtttggtccatgaagtgctgccacagtatgcaaatcaattatatcaataaatgtgctaatttattcagcaaacgtattcttgtagcaatagttactcaatgaaagaagtaacatatttaatttctagtagaagctacttctctcattgtgaactcgktacaaagcttgaatgctctagctattttgaggagcattaataagcattacctaaagaagatgatatattccctagacaacaagaactcttatttctctttatcttctttttgataaatgctacagtctcttggtagtgaatccagattctgtggtgtggggaaaagaaagagagatcagactgttactgtgtctatgtagaaagaagtagacataagagactccattttgttctgtactaagaaaa

SEQ ID NO: 652895 - DNA, 579 bp, Homo sapiens
tcaaaaaaaaaaaaaaagaaaagaaaaaaaaaaaccagaaaagaaactcagtgtggctggaggagggagagcagggggctggagtggggaggccagaaagctaacaaggactacataggcagggccttggccattgcaaggactggctctttttcaccccaaagacagctgagcctgagagggtgagaggtgctgagtgcagttgagttgaaggccacctgcatgccttgaccctcatccaagtatttctgagcctcccctcaccccaggacccagcccaggcaacaggtggaagatgcttttcttctgggacctcagaggygagtgggtgggtggggaggaggaggtcgaggggggacagctgccccaagggagaggctgaggatggagcagggagggcactgaagtgggctgggtggaggacagggggctggagggtgagaagagggtggggtacttaccgcctgtgcccagatgcttgaaccatgttttgtccttcagatttgtagatgctgaggagccaaagagaggtcactagggctggaggacacagaacttggccccacacttccatcagat

SEQ ID NO: 652896 - DNA, 496 bp, Homo sapiens
attctattctctaagcttttatccttcaacattataggagaatgttgttccatgttaccacatagccaactgtttcaaaacttgtctagtaaattctgtgctgttgttttcacagggagaaacatgcacatgtatattacttttttttttctgttgaatcatactcttggaataaacttttttcagtgaggtttttggttccaaaaagtataaacattttggtgatctttagtaagttgtattgctttccaaagaagtgataggaattatacttgccaccccaacagtgaaagaattgcaatttaatttcaatgtaaaagaggatgctactgttgctattatattttctattataatgaaaaccgttaaagatttaaaycaagctggattgtctttcaggagctgctgttaaatgaacaccttgatattttcgttcttggagagaaatgagccaaggaggaagaccatctaaaaaaaaccactagacaatttgtgc

SEQ ID NO: 652897 - DNA, 498 bp, Homo sapiens
accctactaacagtattagacagatcattaaggaagaaaattaatgaagatattcagaacttgaactcaatacttgatcaaatggacctaatagacttctacagaacgctctatccaaaaatgacaaaatatactttcttctcattaccacatgacacatactgtaaaatggaacacacaatcagacataaaccaatcttcagcaaatttaaaaaaaaaacactgaaatcatacaaacgacactctcagacaacagtgcaataaaaaatgtggcacatatacaccatggaatactatgcagccataaaaaataatgaggtcatgtcctttrtagggacatggatgaaattggaaatcgtcattctcagtaaactattgcaaggacaaaaacccaaacaccgcatgttctcactcatagatgggaattgaacaatgagaactcatggacacaggaaggggaacatcacgcactggggcctgttgtggggcagggggagg

SEQ ID NO: 652898 - DNA, 657 bp, Homo sapiens
atgaccacactgcccaaagcaatttacagattcaatgctattgctatagaactaccaacaacattcttcacagaactagaaaaaawctatttttaaaattcacctagccctcaaaaaagaccctggatagccaagggaatcttaagcaaaaagaacaaaactgaagccatcacattatatgacttcaaactcttctacagggccacagtaacccaagtagcataacactagtacaaaaacagacacatagaacaatggaacagaatagagagcccagaaataatgccacacatctacagccatctaattttcaacaaaaccaacaaaaacaagcaataaagaaagaagttcccattcaataagtggtgatgggatatctgattagtcatatgcaagaagattgaaactggactccttctttataccatatataaaaatcaactcatcatgaattaaatacttaaatgtgaaacccaaaactataaaaactctggaagatatcctaggaaatgccattctggatataggaactggcaaagattccatgatgaacgtgctaaaagcaatcgcaacaaaagcaaaaactgacaaatgggatctaatgaaactaaagagtttctgcactgcaaaagaaattgtcagcagagtaaacagaca

SEQ ID NO: 652899 - DNA, 502 bp, Homo sapiens
atgcaaataaaagttgagtatgcctccctgcctccaactaggacataaagttgatcttccatgtcatgtttcttaaaagtaactctaaaataagtttctttcaaaccttctaaattattctctttccctaatggcttgttgtattcttccccagcagaaatgactaaaatagccctattgcacttaatctaattagggatttttggagaaatggtggttacatagttctcattaactgactaaaaaactgtaccatctccagaggtatagatattaaaaagcgggggagggggatgattccttttaaagctccagaaatgaatgtaagtgttcatattctggtacattaacagtttgttccagtacattgayattttatgtggaagccctactctgcaattaatatgcctgatgcaaattgaaaaacccataatccatccttctctgttggaatgtaagagtatattattattgagaagctacaggataccagaaccatttt

SEQ ID NO: 652900 - DNA, 610 bp, Homo sapiens
gaaaaacccataatccatccttctctgttggaatgtaagagtatattattattgagaagctacaggataccagaaccattttttaaacttgactgctcaytaccttaaatctgcatataaaacagttttgcattcagacgaggtaatacataccggaatatattgtggcgcatattaaaaaaagtgctccaaataaaaacgacctgtgggcttcctttgtagaagaaatttatgcagttccaggcattagggattaatgatagctaagagcaaaagagaaggaatgagcattaaaacattgtgcctaactttcctgactaccccaaggctaaaagacaaagtgaattgtcaaatctccttaaaggtaaggactatgaatttatattaagtaaatatgatatttggggattgcatctggttctgtcacattagtattcagaatatttcttatagctttaaaggagaaaagacaaccttaatggaggtatgagagaagaaagattttaaaaatcctttgtttctaacagcttagagagcctctttcctttgtcttgtttccaaaattatgcatacaattcttcacaggacataaaatgctattgtctgctat

SEQ ID NO: 652901 - DNA, 564 bp, Homo sapiens
tttttgttcacaaaaatagtaaaagtaaaggaaaaaggtagataatataccaactttgcagggtattgcaggaagttcagagagggaaagaaagaggaactataaatagttatcataaattacagctaaatattttagtttagcataaagagggtatgatgaatgtaaacaacatcacatatagttcaaagtagagttgtggaattacttttccatgacaatgtttaagaattgtacagctttgctgttatctagtgatgtgtccccacccaaatctcaccatgaattcccatgtgttgtcagagggacctggtgggaggtaattaaatcatgggagcaggtctttcccatgctgttctcatgatagtaartttcatgtgatctgataattttataaagggaagtttccctgcacaagctctcttctcttgtctgctgccatgtgagacatgcctctcaccttctgcaatgattatgaggcctccccagccacatggaactgtaagatcattaaacctctttcttttgtaaattgcccagtcttgggtatgtctttatcagcag

SEQ ID NO: 652902 - DNA, 399 bp, Homo sapiens
ttgaacagcataacttttaaaagcaagtactaatactttataaaagtatttcataaagtagtttacagtaactgaggttgatttgtgccrttaaggaaaaaacttttacttttttattactaaaaatgtatgtaaatctcactggcactgaatgcatttttcaaacaaataaagaggcttgaaatggtgaacagctattcttttctgcctactagggatgagaaagtacaggctgttttcaaattaaaaccggaagcatatacaatgagacattatgtggactgttgtgactattagggttgttagatcatgtgctgtgttactgtgggatgtttgggaggatcctttgaatatattttattatcaaaaattttatttttctgatgtatataatcagaa

SEQ ID NO: 652903 - DNA, 575 bp, Homo sapiens
ttgctccagaaaattctgatgtatctaccttcaaaatattttgaaaatctgaccacttttgaccactttcacattaccactgatccaagccattatcatttctctcttgagttgctacaataatgtagtataactttgggcttttgctcagatatcactttctcagagttcctccctgattgttctatttaaaattacaattccacccctacaaatcgccctattccctttctctacctgacattttatactaaaggatttctcaccatctgacatattatatagtttgcttccttgtctgtgtctggtgtctttcctccaactagaatgtaagcttgatgaggatgggaagttttcttcctacyatgtcacccatattttacaatgtcagtttttatttttatacatctcaagagttttcttgaggtgatgcacatcaatagcattgccacagatgagcatcactaactcctctgaccacaggaaatgcagggtgggtttaatactcagctttgccccaagttctctgtttcctgtgcctttcctactcccaaccaggaccacagaaggaaggg

SEQ ID NO: 652904 - DNA, 597 bp, Homo sapiens
agtggaaataaattttaaatgaaaaaatacaaaaaattaatggaacaaaaagttgggtttttgaatacataaatgaaattaacgaatctttaaccatactaagaaaaaaagatggaagacccaaatgaataaaataagagattaaaaaaggagatattacaactgatgctgcagaaatttaaagaatcattagtggctattatgagcaactacatgccaataaattagaaaaatcttaaaaataaataaataaatttctaggtacataaaatctaacaagtttgaacaatgaagaaatccaaaacctgaacagaccaataacaaacaatgagatcaaagccataataaagtttcccagcaaagaaaagcccaaaactcaaaggcctccctgtttaattccaacatttaaagaaataataccaatcctactttaattactctgaaaagttgagcaggagggaatacttccaaactcattctatgaggccagtattactctgataccaaaaccaaacacacacacacacactcacacacacacasagagagagagagagagaaaactacaggccaatatctttgttgaatattgatgca

SEQ ID NO: 652905 - DNA, 483 bp, Homo sapiens
ttgccctgatgctgacaataagcaaatgacccacttcaagcacagacaatggaggtggagcatggatttgagcaagatatcctggaaccgagagctgtaactactctaggtcctgctagtcatcattcaaaggtcagtccataccagcagccacataccagagagttatggagccaacatgatgatcgaattaatatctgcaagtaatactaagtcacatctgtccttacataagattgtaaaatctttgattgtgatccaataaaaccatttgctcaaataatgataaatctgatagttcctggtctccgcacaccacagattaaatagataaactgcctaatattttttcttttttttttttttgaatcaggctggagtgcagtggtgcaatcttggctctctgcagcctcgacttcccaggctcaagtgwtcctcccacctcagcctcccgagtagctgggactataggcatgccccaca

SEQ ID NO: 652906 - DNA, 544 bp, Homo sapiens
ctttttaaaagagaaatatacttaaggatcaaatggatccatactgaacttggcaaaccaatgggaaatgccagctccagggatgtgtgacattagtagttataatcataatggtgatgatgtgagagtaataatagtgatattgatagctgtaatctgatgagactctggtaagtatcaggcataatattttgtaytttatatgaattttttcatgtaattctcataaacacataagattcaaagagtagtggatgctgatgactgaagctagaatgaggggtggtggacagggttcatgtgcctgaaatggggctgtgatttacgaagtcagttcagtgtgaacaaaggtatcccactagcattaacttcataagcctaccagcaacttgcaatgtttgttctctttttttttttttcaaatcattctcaattctgcctcgtctgctattccacaggaacccagatcctgtgacaaacatgatgttccttccagggttcccttttctctttatgccatgggatctttacatcttgttaaata

SEQ ID NO: 652907 - DNA, 601 bp, Homo sapiens
agaaatgagttgtctctttaataacatgtttcaaaatgggattcctgtaagaggcatggtggatacctttggaagcatatagaaaaaataaatctaagcagaagtatctacttatagaatagtttccccacaaatgcttcatttagaggaacactaaaaatgaaagtgtaaaggcaaagtagcatgcagtragtggcagattaaattaggatctaattagtgatcctaatttaggatctatttagatagtggaatcatatcacaacatgattaaaatgtaaggtaaactatcccctatgaaatacaattgcttgataccttaagtttattctcatctgttgcactataatcttttacaaagttattggaacattcatccagatacatctgaaacaaactttgggtggaaacttctgtgaatgttttcatatctttgtttttcatcaagagatacctttgtgtatctatttaatttaatttttatggaatgcaaagtacatagaaatccctctttctccattcattgtaagagctggattctttgacttaagtaatcatttagaggattcttgattttctgttttgaaaatcttgtgagatg

SEQ ID NO: 652908 - DNA, 601 bp, Homo sapiens
agaaatgagttgtctctttaataacatgtttcaaaatgggattcctgtaagaggcatggtggatacctttggaagcatatagaaaaaataaatctaagcagaagtatctacttatagaatagtttccccacaaatgcttcatttagaggaacactaaaaatgaaagtgtaaaggcaaagtagcatgcagtaagtggcagattaaattaggatctaattagtgatcctaatttaggatctatttagatagtggamtcatatcacaacatgattaaaatgtaaggtaaactatcccctatgaaatacaattgcttgataccttaagtttattctcatctgttgcactataatcttttacaaagttattggaacattcatccagatacatctgaaacaaactttgggtggaaacttctgtgaatgttttcatatctttgtttttcatcaagagatacctttgtgtatctatttaatttaatttttatggaatgcaaagtacatagaaatccctctttctccattcattgtaagagctggattctttgacttaagtaatcatttagaggattcttgattttctgttttgaaaatcttgtgagatg

SEQ ID NO: 652909 - DNA, 561 bp, Homo sapiens
gttgtgtctccagaataattttctgtcatttgattacgtgatttggccttggttatcttcaactaagaaatgaagaacttaggccagaagagatagaaaattctgattctgcatttacttattcacatccctttcaaactttgtttggaggggtggctgaagacattgtttgggacaaattcctatctccagccttgggtcactttcatttttgagggcaaataagtaatagtgtctccgttcatataaattgttttctccaaattagcatttggagaaaatactcacatggaaggcaccacagtagcagatacatttgggctgctctatctccagtgtttgagaggagccatttccaacttgtagggttaatatgcagactaaaaaagatccacacataaagcgccctgcagagcgtgtcacacagagtaagcatgaaaaatgtcttgttcttttcctttcatcatccctctctccttctagctatcctttaatatataagataatttatttctaaaaatttgattatgcaamaaaattctatgtattagatctgatttt

SEQ ID NO: 652910 - DNA, 529 bp, Homo sapiens
aaagcaacatgcagccagccatttccagtgcaaattatctcattgcayagtgtgacaactaaaggtcataaccataatacaaatcgtgtttttcttgtaatctatccttgggttaaatgtgaactccaggagagcaaagactttgtgggtatccccagcactgacatctgtgaccagcatatgataaactgtagttgtacataggagagaatcaataactatttgtagaactgaatatattttattgcaacccttttcataatgttaagataatagacatcatagtgtaactaacagtgccttagaagtggatatcagagacttggctaccaccaacaagcaactgtgaatgagtaacttctctgaatatctctttgttcatcaggaaattgagagagatggggcagatttattttttaggtcccttccacctgtgaagtgctatttctctccaccttcacttatgatcattcattcaccagggcatgcagacattagtcattgctcagaactcagtgtttccagtaga

SEQ ID NO: 652911 - DNA, 582 bp, Homo sapiens
tttaaatctggaatgccacagaagacagaagataacatgcttactacacttgtaaagcaacatgcagccagccatttccagtgcaaattatctcattgcatagtgtgacaactaaaggtcataaccataatrcaaatcgtgtttttcttgtaatctatccttgggttaaatgtgaactccaggagagcaaagactttgtgggtatccccagcactgacatctgtgaccagcatatgataaactgtagttgtacataggagagaatcaataactatttgtagaactgaatatattttattgcaacccttttcataatgttaagataatagacatcatagtgtaactaacagtgccttagaagtggatatcagagacttggctaccaccaacaagcaactgtgaatgagtaacttctctgaatatctctttgttcatcaggaaattgagagagatggggcagatttattttttaggtcccttccacctgtgaagtgctatttctctccaccttcacttatgatcattcattcaccagggcatgcagacattagtcattgctcagaactcagtgtttccagtaga

SEQ ID NO: 652912 - DNA, 529 bp, Homo sapiens
aaagcaacatgcagccagccatttccagtgcaaattatctcattgcatagtgtgacaactaaaggtcataaccataatacaaatcgtgtttttcttgtaatctatccttgggttaaatgtgaactccaggagagcaaagactttgtgrgtatccccagcactgacatctgtgaccagcatatgataaactgtagttgtacataggagagaatcaataactatttgtagaactgaatatattttattgcaacccttttcataatgttaagataatagacatcatagtgtaactaacagtgccttagaagtggatatcagagacttggctaccaccaacaagcaactgtgaatgagtaacttctctgaatatctctttgttcatcaggaaattgagagagatggggcagatttattttttaggtcccttccacctgtgaagtgctatttctctccaccttcacttatgatcattcattcaccagggcatgcagacattagtcattgctcagaactcagtgtttccagtaga

SEQ ID NO: 652913 - DNA, 631 bp, Homo sapiens
tactattccttcagtgaaccatggccactctgagattgggtgtggggaggagaaaggaatggaatgccagtgaaaccatcttctattgtcatcctcctctggggcctcactcagttgtagtcttgcatctgagaccttggcctctttgtgaaataaacatttcttggccctgtcttgcaggaaaattggaagcctgaccctaaaataagctaatatcatccatagaccagaccaaaagaaaagcagggagaatttggcacaaagcagctctcttcaagaaattattttccatgtcatatttgcataaattagtcatgggcccsccaattcaatgaaagaggaaaagagcactcatgaccctagtgtgctggcatcctgttgtcctttatagctaaggtcagactgtttctccttttgcctcatgtcggctcctcttagtcgactaagactggcaaatctgaggctacagattgtgctatgaatgagcagctggaattgcgcaacattttacttggctaatatttcagtttgttgagtcagtggcctgacaagtagctacagcccatgaaacagcattttctgactcagtgcatgtgcgaaagaagtagtagctaaaggttctgttggcaca

SEQ ID NO: 652914 - DNA, 612 bp, Homo sapiens
ggccaagggcaattcctgaggagtgattcagctgcgacctgtcaaccagcaatattgcagctggaacaattagtgtcatcactctgaaggggagaactgggaagggcaccacggcatacaatacagggtccagtttgattttttcccatacaggtactcaattgtcccagcacctttttccacgttatatgatgctacctctttcatatcaagtgttcatacagtagtctatttctgaggttattaaaagttatgtttccagccgggcgtggtggctcacacctgtaatcccattactttgggaggccaaggcgggtggatcacgaggtcaggagatggagaccatcctagctaacatggtgaaaccccgtctctactaaaaatacaaaaaaattagccagacgttgtggtggcccycgtagttccagctactcgggaggctgaggcaggagaatggcgtgaacccgggaggcggagcttgcagtgagctgagatcgcgccactgcactccagcctgggtgacagagtaagactctgtctcgaaaaaaaaaatatatatatatatatatatgtttcctcggtcaattatctgattaaaacaaattgatatca

SEQ ID NO: 652915 - DNA, 612 bp, Homo sapiens
ggccaagggcaattcctgaggagtgattcagctgcgacctgtcaaccagcaatattgcagctggaacaattagtgtcatcactctgaaggggagaactgggaagggcaccacggcatacaatacagggtccagtttgattttttcccatacaggtactcaattgtcccagcacctttttccacgttatatgatgctacctctttcatatcaagtgttcatacagtagtctatttctgaggttattaaaagttatgtttccagccgggcgtggtggctcacacctgtaatcccattactttgggaggccaaggcgggtggatcacgaggtcaggagatggagaccatcctagctaacatggtgaaaccccgtctctactaaaaatacaaaaaaattagccagacgttgtggtggccctcgtagttccagctactcgggaggctgaggcaggagaatggcgtgaacccgggaggcggagcttgcagtgagctgagatcgcgccactgcactccagcctgggtgacagagtaagactctgtctcgaaaaaaaawatatatatatatatatatatgtttcctcggtcaattatctgattaaaacaaattgatatca

SEQ ID NO: 652916 - DNA, 476 bp, Homo sapiens
cgtccacccaccaccaccactctaccaacatgccagtatctgaaccaacttctataccttctgttacagtgaatcaactactatgcccctttttaaggccaaccccttcaactctatgggatttctttcactttcagctattcaaggttatcactgcagcagctgaccttctctcttctgtttcattaactttcctctctttagagctatgctgtccaattcactagccactaactcatgtgattatttaaattcaaatggcctacaattaaataaaatttaaaattcagtttctcagttacactagccacatttcaagygctcagtaaccacatgtgaccagcggctactctataggatagcatggacatgaatgatagaacatttctatctcacagagagttctgttggatagcgctcttctggaagattattcccatctatccacaaagttctataatctcacatcttaaaaa

SEQ ID NO: 652917 - DNA, 551 bp, Homo sapiens
tgggagtatagacataaatatggtggattttgacactgccttcatggaactgtctgcttttgaagaagaaaaagccatgcctttcatctgtgttcctccatatgatggcataaagtggttttgcacaacttgtgcttgtagaatcgaacaaaagaaaatagcaaatacggttaagaagaaaacaacacacgtgctgttggcagctggatccactaggcctarcatagtcccagagtgtgagatctggggtcttttctgtcttctctttttcaatttcttgtaattaaaaaatgataataatatccagaaaggtagtgagagattctacctccctctctggaagacataaaaaaggcagggaaatgttccaattttaagccattaaacactctggcttgaatcaaatcaaaaacattatctaaactgtcatacactaaatacccttgactctactagggctatttatcactgaaaagcactggattagtggtgtgtttctttgcttcctaaggattattgatgataagagcatacaagacagccagtgtaga

SEQ ID NO: 652918 - DNA, 618 bp, Homo sapiens
tgggcgtgttatattcagatttttaaaatagtgcctgttaccagattaaaggtacactgtactcctctgtactatctttgytatttcctatgtgttccacaataaaaaaataaaaaaaatatagttactgacataaatattatctagtaatttaagatagcattcctctgaaaattaaaattcagttggcaactgagtacataatagaaaatacatcattcatgatctgtcttcagtgttactttatggttttagaaaatactttaaataaatcattcaagttatacttactgaaatataaatatcagagtggtaaatgtcaacatattagaataaatattttcttttcctggctcctaaatctaagtgaatctagaagttcatcgactaagaagctttaatatgacaactggaatgtgaatatatcaagtgtgataacatctcaaagataaatgaggattgcataagaaaggagatatgggccaattattgcttaccttttttgaaaagtgcctcatttcagtccccataaagatagtcagaggaggacatgggagaggaaagagaactgatattcctctcaggggtacatggcagagcaaggctagattctgcatg

SEQ ID NO: 652919 - DNA, 528 bp, Homo sapiens
agcccatattgttcaagtttcctgtgctgtggaaatgtcagcattcttccagaatagcatgatgtcctaagcatgccaatttgccaattgctgcaaaaaacatccaccagctggctcctctttcttccgcatttaattttagatgagttattgtaatcgaatacacaagtctgggtatagttacgtgtccctgccctcctgtgtggatcataagtagcatgcttcgatttcaccgggggagaaagaaggactcaagcttcaagcgtaatccaaggcaggaataaaatgcaactaaaagatcatctttaattcctcgtagtttatgcaactactgctgccaaccccagagagtcgtcctacgcctgttactatgatgagaagaggtccacgtacctgggggactggtacagcgtcaactggatggaagaytcggacgtggtgagccctttgggggctggctgttcagctggggtttaaccgtcagactctgattgtcaaaggtctctaatggtctcactttttgcagga

SEQ ID NO: 652920 - DNA, 515 bp, Homo sapiens
tttctaattttactatttctgtatacttatattcaatccatttccagtcaatgtctaaaattgtgtcctcaaatattctaaaaatatcactagcctgcaggatcactgctaatagcaataggcaagataaattgattccaactcaaaagtctgttttctacacatctctatgatgatgacgttctcacatgagaacatctagcctgcttgtttgatgtcttgtttaattattggtactagaattagtcaaaccattccaatttccacttacctggattggatgtgtactgcattgcaatcattagcatggatgawgcagagaggttaacatgggcaggtacaccttctctccttgaggagcccactgcaaccaaaagttctttgattagacacaatttaatctctacatatacctgttactttgcacagagcatgagagataagaaggaactttaaaaaaaaaaatagctccaataaagctaatggaagttttgcacaaatgaaaccacaaaatg

SEQ ID NO: 652921 - DNA, 574 bp, Homo sapiens
aatcttcaataatacttggtwtttgtattactacattctacacaagataactgaggcacaagaagttagatgatttgcccaatggaagttttagaaaagtcaagggcagtatcagaaataaaaccgggctatttctgctccatcaatcaaaccatctggagtgtcgggcaatgaggtaatttgcaaccttcagccgagcagcaatttcagcaagcaccaaacaagggaagccgtaagctggtgctacatgaccatgtgcattgagtcatcaatgatcatgggaggaagtgctacctaataataatctttctaacaacatctttaaacagggatcataacaatacctacctcacttcattagaaggattgttaggaggttttaatgagataaatgtaaagtccttagcatagcacatactgtgtgctccacaaatattagctgttattactaatattaacagttactattattattacctgcacaagaataaaaataaaggagatgcaacaaaaccataactatttagctttagaatgcatgtaggccaaatcccattacactaaatgtacattt

SEQ ID NO: 652922 - DNA, 505 bp, Homo sapiens
gaattcaagagaacagaattggatgccttgattcataaatttttctgatgatcactatgaaaattgggctaattattccactacaatttgagaagaaggaaaatatcctgtaagaggtcctaaccttaccgtgcaagtatgaaatgtatgaatctgataagcaggagcccttcaatatagaacaggatcactaaggactctaaagaaggaaagatatttcaaaaaataagaacagaaagataggaggactgcaaaagattcgtagctgacttgatcgcatgaagcttccatccgcaaagcattcagcttttcccgtggcaaagcyttcgactgctagaaactccagtgccactagtctttgcaaatttgtgttctcctaatatctgtcttacaaaatttttgcttctgtacagctaaaagaaacagtaccaagccaatttatgtgttgccaaaatcagatttgaagtgagaagaccgtggtaatggagaaaccacatcttggaat

SEQ ID NO: 652923 - DNA, 602 bp, Homo sapiens
gaaggaaagatatttcaaaaaataagaacagaaagataggaggactgcaaaagattcgtagctgacttgatcgcatgaagcttccatccgcaaagcattcagcttttcccgtggcaaagctttcgactgctagaaactccagtgccactagtctttgcaaatttgtgttctcctaatatctgtcttacaaaatttttgcttctgtacagctaaaagaaacagtaccaagccaatttatgtgttgccaaaatcagatttgaagtgagaagacygtggtaatggagaaaccacatcttggaatttaatggaacgtgagaggttcttctgaattcttcaatgttatttctgaaaacaactgagcctttacttgaacagttcagctttctttgctctgttttcttaatcaagatacgtggagcaaatagggccctcctatctctaccttacagtaaaagtagacaaaagaaaaagagccctattttttttccttgtccttcatagaatttcattatcaaggcaaagcatgttgaacatgtgaagtgttacccagattaaaaataactattatcactgtatattacacttagggaaatagaaaatgc

SEQ ID NO: 652924 - DNA, 594 bp, Homo sapiens
cttgaaaacagaccaatagaaagtatcaaacatgaagaacagaggagagaaacgatttaaaaaaaaaaaaaaaaagaaccgagtctcagaggtgggttaggtagtatcaaacagtaagaggtacatatgtgtgatgggaataccaaaaggagaggacaaaaagaacggggctgagaaaatatttgagaaataatggccaaagagtcctcagatttggtaacaggcagaaattttcagacwtgaaatgacaaacacaaagcagaatgaacacccagaggcccatgccaatagaagcccacgtgacactcagactgttgaaagccaaaaataaagagcagatcttaaaaccagtaagagaaaaccataatttacataattttatggatatatgacaagtaatggctgaattcacctctgaaaccaagaaggccagagggaataacatttttaaagtactcaaaggaaaaaaaaaactgtcgaagcaaaatcctgtattcagcaaaaatattattcaagaataaaagcaaaataaagactttttcagacaaaagaaatctaaaacatttggtcacaagtagagctacactacaaaat

SEQ ID NO: 652925 - DNA, 614 bp, Homo sapiens
catatttaaaaggatttttagagagcacttaccctaagcaaatgtcctaattacccataggggaggatgaaatggaaagaaggacacaaaaagtatcacagctagcctaaaacgctcccttaataaaattaaataacagaaatcagatttagaacaaaaatttaaatctacacccaccataaactccccttcaccaccttcctcctgcacatggcccaggggaaggctgatagtccagtctgataggagatattatggaagacttccctttacaggtcaatgggctgaagtggaatgatatgctcagagggcaggaattyatcctaaaggctctgttaaaagatttataaaaacattccaaaggcacacagctctaaattcagaagccctggaacacaggaatcttttggtttccatgtcagttagaaattttctctccgacctaaggggacaatttcaaaatagggcagttggatgggcaggccaatccgtgaatgctattgttgatgtcaccacccaattctttgaggtattaaaaaaataactgttctaggctgaggcaaaaagatcgcctgaggccaggagttcaagaccagcctgagcagcacagtgag

SEQ ID NO: 652926 - DNA, 561 bp, Homo sapiens
tggttaaatcataaccttcattaaggcttattggatttgttagggaagcaggagcctaggagagccagagtaaccccattttaagttcagctccatcttcagattaactgggcatattccttgttggtcactacccacagtcatgagatatttacagttgaggaaacagcctaagataccggcaaagacactcccacaacagcagaaagtccagatgtcccaatacccrtaacaaaatatggcttcaagattgttatagttatggtttgatgtattcacacactaaaacatcaaggatagttttctttaaatcaatagaatataaattttgtcacactctctgctcacacttacatagacatggcttagcttagcttttatatagagatgacccctatacaagaaaaacttaaggatgtccttctctgtaatggagtagctttcaataaactctctcttctcactgcactctgccactcaccttgaattccctcctgcatgagatccaagaaccctctcttggggtctgtatcaagaccccttttactggtaacagttgca

SEQ ID NO: 652927 - DNA, 611 bp, Homo sapiens
tcctgtctatgcagtccttgtacagggttcctgacctatggtaagtaaagactgtcactttctaacaggtccaggagccccaagttatctttggacttcaagaggggaggaattcacccaattcatacaagtgtttgcaggcacagatgaatccatagctaggctcacagctttaaaaagtctaatctgagaatccttacaaaacaaagttccagcaaagccaattaaaaaaaaaagtttatatggcaaataattattcttgctgcacttcacgcaaataatcaaaacaagtataatgaaactaaartttaatttgcaaacacatcaatcctacaataatttgtctttgataaaaatgagagactggagagaaaaagagtataatatacctgttgtaggttctagtcttatctgttgtttttgagctttttaatattattttctgagctgcaagtctccaaactaacattttaaaaattttcttccacttttctgacttaatgaaattgctactacctttttcctaaggccctgcaaactaaggcttattctttataatacaagcaaaaaaacatgaaaaattgccaccaccctcctccataactaaagat

SEQ ID NO: 652928 - DNA, 409 bp, Homo sapiens
ttccctctatagaaatcaacctagcttctttcatgtatgttgaaacttcaagggaagtttcagatgagggaaatgttatccaccaaaaccctacagttggtataaagaktattttaaagtgaaaacatttaagctaaagaagatgcaaaaagaaatcttagccgaacttccgttatgtgactctagcagagtctccagagaaaacccttctgttaacccccccgaaagggagtttcctgtggattcagctgctgtggagatagcccagttcctgcccagctcccatggcattaaaaaacccaatggaaccttccataccttctcactgaagcccttaagtaaaccttttgttaagtttgatatataaatcttttatttctggctattcaggaagtaatttatccttgag

SEQ ID NO: 652929 - DNA, 484 bp, Homo sapiens
tactgtaggtttaacacctggctcttcatcaaaatcaatggccaagagctttttaaaaaattcccaagattctggaatgcgatctgggcattgttagtttttaaaagctttcctagctaaatctaacatgcagctcaggattgacagctattgccatagcttcagccccattgctaaggttaatttttcactatttactccttttaaaagaacaggagaaattcctcttcagtacaattttgaaatgagaaataagaaagtggagaatagttaacttctttttcttactaagaaccatattccgaattgactgagcagcctctgatcgtgtttatcatcgtccttgttatcaaagtcagcattatccagggaatggtgggaagaggagagrcccagctgccgccgccggttcagctcatgttctcgctgctcagcatggaactcggcttctttcaacaagctgccaaagagcagtgtgatttca

SEQ ID NO: 652930 - DNA, 623 bp, Homo sapiens
tcaatgtaatttaccatattaacagaatgaagggaagaaatcatataatcatctcaatagaaagagaaaatgcatttgaccaaaactgacattcatgattaaagctctcagcaaactaagaacagacagtaatttcctcaatctggtaaaaaaaaaaaaatctatgaaaaacctacagttaacataataatttaatggtgaaagcccaaatactctccccaaagattgggagaaagaacaaggacgtccactctcagtacttctattcaagtggagatattaagcagtgcaaaaaaaaaaaaaaaragagaaggatagaaagaaaaaaagggagaaaggaaagaagggtaagagagagagaaaaggaaaagaggagaaaaagaaagagaaaggaaggaaggaaagaaggaagggagggatggagaaagggagagaggggtggagagaggggaggaaggaaggaaggaaggaaaaaagaaaggcatacaaattagaaagaaaagaaaaaaaattatttgcagagagcataatcaggtatacagaaaatctcaagaaacttacaaaaaagccacaaaaactaagaagtgaatttagcaaggttgcagggtatttgtagagtacca

SEQ ID NO: 652931 - DNA, 604 bp, Homo sapiens
atgcttaatggtgaaatattccctcaagttaggaacaaagcaaccatatctaatatggcttggatttgtttcctcactcaaatctcatgtcaaattgtaatcctcagtgttggaggagcagcccagtggaaggtgactagatcgtgggagtggatttcccctttgctgttctcataatagtgagtgagtgcacagagagttggttgtctaaaagtgcgtggcacctccccaccacctctccctcctgccaccgcttgaagatgtgcccgcttccccyttaccttctgccatgattgtaagtttcctgaggcctccgcagaagcagaagccaatataacccacagaaccatgagccaattaaacctcttttctttataaactacccagttgcaggtatttctttatagcagtgtgtgaacaaactaatacaggaaattcatactagagaagtggggcattgctataaagatacctgaaaatgtggaagccactttggaactgggtaacgggcaaaggttggaacagttgggaaggctcagaagaagacaggaaaatgacagaaagtttggaacttcctagagacttgttaaattgttgtgaccaa

SEQ ID NO: 652932 - DNA, 415 bp, Homo sapiens
acccctccaaaaagacaaacatacataatatcataactagatatatcatagtaaagctgccaaaaataaaaaataaagasaaaacttttaagacaaagaaaaaaatgtttatcttcaaaagagtaataattggcaattgactttgatagtcaattttttatagaaacaatgaaaatgagaaaatcatgaaataccttcaaagtatgaaaaataaaatgactgccaatcaaggctagcctggccaagatggtgaaatcccgtctctactaaaaatacaaaaattagccaggcatggtggcaggtgcctgtaatcccagctactcaggaggccgaggcaggagaattgcttgcacccaggaggcagaagttgcaggtagctgagatcgtgccattgcactccagcctgggtgacaag

SEQ ID NO: 652933 - DNA, 384 bp, Homo sapiens
ttgtggagctatcttcaggacttcctattaagtaaacaaccaatgtgtttatactttaaagcctctgtcagccaaagacatcttaacagatgcaacctctctgtctctttggagagctcatcctcttccactgggccattatctgttgaagtttctgaaggcctaatcacagaaccactccacatttctttcattctstgctctcccctaagcaatctcacactcacacacaacttcagcagccatctatatgcaattcagtgaaggtcactggacacttgtgtgtgggctcaaagttcattatctctagtccaaagctctgttctgagctccagacccataatacaactacctaattaccagctcctattaggtgtctcaaag

SEQ ID NO: 652934 - DNA, 584 bp, Homo sapiens
gtaatggaagaactacaaatctaaacaaagagatattaatattcatctgtctaactctacacaaattttataataataatgacaaatcacaatgagacaagtactttcacatactattggaaatattgaaaatttctcaagtcctttaactcattaatccctcttttgttggtttattctaaggaaataatcagaaatatagtgaaaggtttatgtttaaggatacttgggtgtaytggggtagccaatttaccaaaatattaacagtggttatcttttgttcttagaattgcaggtgatttttatgtttctaattttactatttctgtatacttatattcaatccatttccagtcaatgtctaaaattgtgtcctcaaatattctaaaaatatcactagcctgcaggatcactgctaatagcaataggcaagataaattgattccaactcaaaagtctgttttctacacatctctatgatgatgacgttctcacatgagaacatctagcctgcttgtttgatgtcttgtttaattattggtactagaattagtcaaaccattccaatttccacttacctggat

SEQ ID NO: 652935 - DNA, 614 bp, Homo sapiens
caggaagttccaccgtctgccatctgaaagctggagaaccagaaaagtcagtcgtgaaattcaatctgagtccaaaggcctgagaaccaagagtgctgctgatatctgacagcaggagaagatggatgtcccagctcaggaagagagagagaatgtgcccttcctcttcctttctgttctatccaggccctccctgggttgaatgatacctgcacacattggtaaggtcctgcccacactgggatgatgcctgacctcaatggactgtatgatcttctctactcagtctacccattcaaatgctaatctcttccagatayaccctcacaggcacacccagaaataatattttaccagctacatgggcatcccttagcccagtcaagttaacacataaaattagtcatcacaggcaacaaacaaaaggagtggctagggagaaaaagcctagctattttgtaaatgtgctagggcagaccggttatagtaggtaactagtcagatatgaacagagcaggggagggctcccctgccacacacacacacgccaggaatctcaagcaaccatcaggtgatggtcaggtggctaactgtctttctaaaataataattgg

SEQ ID NO: 652936 - DNA, 614 bp, Homo sapiens
caggaagttccaccgtctgccatctgaaagctggagaaccagaaaagtcagtcgtgaaattcaatctgagtccaaaggcctgagaaccaagagtgctgctgatatctgacagcaggagaagatggatgtcccagctcaggaagagagagagaatgtgcccttcctcttcctttctgttctatccaggccctccctgggttgaatgatacctgcacacattggtaaggtcctgcccacactgggatgatgcctgacctcaatggactgtatgatcttctctactcagtctacccattcaaatgctaatctcttccagatataccctcacaggcacacccagaaataatattttaccagctacatgggcatcccttagcccagtcaagttaacacataaaattagtcatcacaggcaacaaacaaaaggagtggctagggagaaaaagcctagctattttgtaaatgtgctagggcagaccggttatagtaggtaactagtcagatatgaacagagcaggggagggctccccygccacacacacacacgccaggaatctcaagcaaccatcaggtgatggtcaggtggctaactgtctttctaaaataataattgg

SEQ ID NO: 652937 - DNA, 430 bp, Homo sapiens
gctacatagaaatatactttaaaatgtaaacaatattcagttgttcccgggctggttttctagctgtttgcttttttcttcctctggattttctgccaatgacttgcacctccacctgctggtgtactgaggaaatgaagtggaaataaaattcaagcaagtcaattaaactatttgctgkaatctttaatacaggtttggtgggaggaatgggtgaaattacaatctaaaatgaagtttctgagggctggtagtatatttattcattcatttatgctctgtgttaactattaaaagatgcaaaaaaattaaaatattttcattaaacttcttatctccttgctatcaacatgtaattcaattatcttgccattacctatgtgtcatcctttcaataatcccactaaaagttttataagaaactgcagca

SEQ ID NO: 652938 - DNA, 430 bp, Homo sapiens
gctacatagaaatatactttaaaatgtaaacaatattcagttgttcccgggctggttttctagctgtttgcttttttcttcctctggattttctgccaatgacttgcacctccacctgctggtgtactgaggaaatgaagtggaaataaaattcaagcaagtcaattaaactatttgctgtaatctttaatacaggtttggtgggaggaatgggtgaaattacaatctaaaatgaagtttctgagggctggtagtatatttattcattcatttatgctctgtgttaactattaaaagatgcaaaaaaattaaaatattttcattaaacttcttatctcctygctatcaacatgtaattcaattatcttgccattacctatgtgtcatcctttcaataatcccactaaaagttttataagaaactgcagca

SEQ ID NO: 652939 - DNA, 651 bp, Homo sapiens
tttgcacaccacacttcctgtgcttatattacactatggaattaaagaaaacagaggaaaaaacatgaaagttctcaagaaccaaaaggatagaaagaactctattctcacaccatatagaaaaattacctcctagacaaaaaggagattatcatttatgcaacacaaaggacaaaacaggtgttagtacaagaatagatcatttcaggggtcataagctgaacccttgctctacataaatcaacacaaatcaagaacacacatgcaggaattaaaccacaatttggccttgtttgctatgtaacattgtaactaaaactggtactatatgacatctgcaagcgtttcatatgagcctgaagggaagctgctttctgacctttgcagatttacagtcccacctagtatgaaacagaacagaatatggttgctgttttcagaaaaatatttgctctagccmcttgttgatgccttcattaccgaactccaataaatcttcacttgctgtttactaacgaagcacattttactccacaaaaggctaaatgtgttgcaaatcagacaaggcacttttggggggtttgtgttcttttgtttttttgttttggtctggttttatggcttgtccattttaagaaatctaaagggcac

SEQ ID NO: 652940 - DNA, 392 bp, Homo sapiens
  misc_feature 125, 126, 127, 128: n = A,T,C or G
tttctcattaataactagaagcactgagtagaatatgaagtttctagacagacttgtaaaaaactactgataaaacctcatctgtattgcgaaaacatatgcttagaaagtagttgacgctgatnnnntttttttttttttttttttttttttttagcgttaggkgattcaaatccagctcagaaagtttaaggctaatacagagcttactttcatattctccaaacctacagagaatgctggtaataaaatatcactgctgcagactaaactaaataaggctcataataatctttcctttgccaagtatttagaaggtctgtccaggtgaaaatatttgctgtttgtggagctaccaaaggcctagaataccccagatgttgactgcattt

SEQ ID NO: 652941 - DNA, 392 bp, Homo sapiens
  misc_feature 125, 126, 127, 128: n = A,T,C or G
tttctcattaataactagaagcactgagtagaatatgaagtttctagacagacttgtaaaaaactactgataaaacctcatctgtattgcgaaaacatatgcttagaaagtagttgacgctgatnnnntttttttttttttttttttttttttttagcgttaggtgattcaaatccagctcaraaagtttaaggctaatacagagcttactttcatattctccaaacctacagagaatgctggtaataaaatatcactgctgcagactaaactaaataaggctcataataatctttcctttgccaagtatttagaaggtctgtccaggtgaaaatatttgctgtttgtggagctaccaaaggcctagaataccccagatgttgactgcattt

SEQ ID NO: 652942 - DNA, 583 bp, Homo sapiens
ctatcaaaagtgtggttagttatattctttgttaccttagtaatttttatttaggttgtgcacagaacagagcagatttaaagttgtaactgtgaaaaagtagcagccagtagtgtttgctgggagagtggtttggtggtcattttsttgtacagtgtttttgtttttgtctgtgttaagacaggtttgcaaagtgattttgtttttgtctctctcaattcaattcattttgcacaggtattatttgaaattgttcatgttcagtaggaacatataacggtcaactcccagctgtcagatgaagaagttgttcttttctttctcaactctattacaatgtctgttgtgggttttctttcacagatgaaactctgactgaaatagtaggttcatcaatacttctacttataaaaataaatgttactttataatatatacctttctcttgacctattctattcatttttaaaccatgtcattacattaggatagtgaaaattataaaactgagaggaaggtaaaaagtcatattttagctaattagtaatgtttaagatgttatattagattaaaagtagaatat

SEQ ID NO: 652943 - DNA, 583 bp, Homo sapiens
ctatcaaaagtgtggttagttatattctttgttaccttagtaatttttatttaggttgtgcacagaacagagcagatttaaagttgtaactgtgaaaaagtagcagccagtagtgtttgctgggagagtggtttggtggtcattttcttgtacagtgtttttgtttttgtctgtgttaagacaggtttgcaaagtgattttgtttttgtctctctcaattcaattcattttgcacaggtattatttgaaattgttcatgttcagtaggaacatataacggtcaactcccagctgtcagatgaagaagttgttcttttctttctcaactctattacaatgtctgttgtgggttttctttcacagatgaaactctgactgaaatagtaggttcatcaatayttctacttataaaaataaatgttactttataatatatacctttctcttgacctattctattcatttttaaaccatgtcattacattaggatagtgaaaattataaaactgagaggaaggtaaaaagtcatattttagctaattagtaatgtttaagatgttatattagattaaaagtagaatat

SEQ ID NO: 652944 - DNA, 602 bp, Homo sapiens
tgtgatatttttctactatgaattaagaaaagctgtattttcattggcttagaaaataagcatttataaacattattttctcagaaaaatacaattaacctagatgatttctaagtgcacatgactaatgaactttggcagatataaatattattgatctaattaaaactaaatatctataaacattaaatataattatgacatacaacttttatctctrttaggtatttaagagaacaaaagtgtgagtctaacccaggaacaaaggtattaatgaaagtacaatacagtgtctattgcctcatgtatatcagccatgaaaataaaacaaaatgcttcatatatctatctttgagatttttgttttaatgacgctttcctaatatatagtataataaaaatggttaaataggaaaataacctttaaaaagccattcctaaggtatttcctacccccacagattggttaattagctagacttgcaaacaaagaaaaaataaatttgttatttttttcaaggtccacgtaaaagtgctgtttttcttgacattctagccaatatagtggggaagaggcttctggattgatagcctggtagtta

SEQ ID NO: 652945 - DNA, 601 bp, Homo sapiens
ttgcaggcatgcctaatgtctttttattctttttgttgttgttgtttctcctctgactatgtattttcatatagcctgtcttcaagctcactgattcttctgcttgatcatctactgttgagagactgatacatttttaagtttgtcagttgaattttttagcttcagaatttctgcttaattattttttattatttcagtctttttgttaactttatctgataggattctgaattttttctctgtattgtcttgaagtcattgagcttcctcaaagtagctattctgaattctcttaaatgtcacatatctctcactccaggattggtccctggtaccttgtttagttcatttgatgaggtcatgttttcctgggtattcttgatgcttgtggatgtttattgatatctgggcattgaaaagttaagtatttattccagtcttcatagtctgaacttatttttacccrtccttcttgagaaggctttccaaagggaattaagtgttgtgatctaagtctttagtcactgaagccatatctgctttaggggatgccccaagccaaataatgctgcaatttttgcagactcgcagagatata

SEQ ID NO: 652946 - DNA, 641 bp, Homo sapiens
cctacactcaaacacaattacatgctctgtaattctcttaaagctaacacttatgtttagagtgacagacttataaaattaactccatgttaatcaaaactaaatgtatgtatgtgtttttacaggccagaggggtcacaggctcaaagaaaaacgtagtatgacattttgtaaatagtcattcgtgattcaaaatacatggcctttcattatactcctttatagtgggcaattataatggttatactgaagattatataagagtatcattgtccagtatttacaaaagaaaaaaataaaaatataacctatgggatgttagtccattttgtgctgctagaagggaatacttaacactggcaaattaatacagaaaagaggtttattagcctcagttctgttggctatacaagcatgacatcaacatctgcttaacttctgatgaggcctcaggaagcttttatgcataataaaaggcaaaggggtatcatggcaaaagacaaagcaagaggaatatcagttttttgtttgtttgtttttgtttttwacaaccagctttcacatgaactaacagagaacacactaactgcagtggtaagaacaccaatccattcatgagtaatctacacccatgacctaaa

SEQ ID NO: 652947 - DNA, 444 bp, Homo sapiens
aaccgagttaggaggtagaaccaacaagattaagtcttagattttgtattttagaaacaagagttctggaaaacttttatgaattttacttgagtgactaggcatatggtaggttagaggatatgcgtaatatggcttttggtagagaagcgtcttttagttttgggcaagttatgtttgaaggctcctgaaacatatccaggtggcagtagatgagtaggggaggcagttgtgtctgcagttctgttatttagaagagcagtttgggctagaggctagagttgacattttgctttactatgggaaatgagagatggaagtggattcagttgtttgtgttgtgggaaagttgggggcaggtgggtagagtgaggtgggtgaccctgtgggaattgggccaggatgaagttgtgtrtggagggatgggggtatatttgtgaggga

SEQ ID NO: 652948 - DNA, 559 bp, Homo sapiens
tgggctcaagcatgcacactaagaggcaaaatggcagagtttaaacactctactggtaagggaaaaacgcctcaaatgagcatgtgcacaacttcagtaacacactgcgcatgcggcccctcccaagtgcggacaggccactgcacatgtggacagcccaccccacgggaagaatcagggagaagagaccagaagcaaccagaggcatgccaatgtataagacccygagtcaaaagtcaaacagggtacttaatctctcaagtcactcacttgggcctctttcaagtatactttacttcctttcctttctgcttaatgctttttcataaactttcacttctgatctgaaacttgtctcagtcttttcctctgccttatgcccctcggtcgaattcttccttccaagtaggcaaggactgaggttgctgcagtccccctagggatcctctgccactaacattagtattaattgaatcatctggaattgatgatttcttaccattttgatgtattaagaagggcaattcctcaatttgcttgaactgtgctgtgtgatgca

SEQ ID NO: 652949 - DNA, 596 bp, Homo sapiens
acaaataggacaaaatgtgaacaattggtgamtctaagtgaaggatatctagacattcattgtacttctatctccaatttttctgtaagattgaaatattttaatataagcagttgtctagaacagtgtaaacagggtcatacatttgttttagattatggatgtggggattctgattgtagcctgtcccccagcttccccagaaggtgactcctcatgatcccactttctaaccatgcctagccagacagtccttcctagagggccaagaacatctcactccctaagcccagaagccagagaagtgctagaacaaccccacatatccaaggtcaggccacattttccctgagaagcatggcctactctagggcaggtagtctagggcaggtccaggaggctgacaattccaggctctacctacttggaagaaacagagaaaacacagctcaaatccaaaggccccttctggcccaaatcatacttggctgattatgaaacaagatgaaccaggctccatttttgctcacctgaacctaatgtatcaatatctagctgagcagctggtgagagctacttctccctgaacctcagtt

SEQ ID NO: 652950 - DNA, 596 bp, Homo sapiens
acaaataggacaaaatgtgaacaattggtgaatctaagtgaaggatatctagacattcattgtacttctatctccaatttttctgtaagattgaaatattttaatataagcagttgtctagaacagtgtaaacagggtcatacatttgttttagattatggatgtggggattctgattgtagcctgtcccccagcttccccagaaggtgactcctcatgatcccactttctaaccatgcctagccagacagtccttcctagagggccaagaacatctcactccctaagcccagaagccagagaagtgctagaacaaccccacatatccaaggtcaggccacattttccctgagaagcatggcctactctagggcaggtagtctagggcaggtccaggaggctgacaattccaggctctacctacttggaagaaacagagaaaacacagctcaaatccaaaggccccttctggcccaaatcatacttggctgattatgaaacaagatgaaccaggctccatttttgctcacctgaacctaatgtatcawtatctagctgagcagctggtgagagctacttctccctgaacctcagtt

SEQ ID NO: 652951 - DNA, 554 bp, Homo sapiens
gctggattcagtccatctctgcattgctgtaatacttccacatcctttcatttcagggacccaagtagccacatcaagcagcaaaccaggatatatttttgtcaattctaattaccttctgaccctagaaaggagctcttcttgtgggcatcaacatgtcctattttaatgcactccttaaatactcaggggtatattttaatatactggccaccccctggtctctgaccaagtctttcttagaggagacttgcctaatttccatarggtcatgccctatgtgagcatccatttaatagaccagtgttccattgcccatctacttgaccatatagccacgccactggccactgcccatgagtcagtaaaaacccaaacctaaaggcttttttattgttgttcaattctcccatcactgccaggaaaacagcatgtaattaagtctgttgagttaatttgttaccttcttcaaacagagcctttcaatctgccagtcttagtgtggtggccttccagacaggatgccattcatccatcttggaactgtcatctgc

SEQ ID NO: 652952 - DNA, 591 bp, Homo sapiens
agcactggccttctttctggttctcataaatattcatrtctacacccaagacaggagtatgcttttccttgtgcctagaagtctgtttctggccctcttccttgtctatctcacactcatctttcaagccttggcttattttttttattatggtacaatatacatggcataaaatttactcaccattgtaaccatttgtaagtgttcagttcagaggcattaagtacattcacacggttgtgcaactgtcaccactatccatctccagaatattttcatctcgtcaaactgaaactctaaacccattaaacagtaactctccattctgtcctcctccaagcctattgtaaccaccattctactttgtctctatgaatttgaccactctaactacttcataaaatggactcatacagtatttctcattttgtgactggcttagttcacttagcataatgtcctcaatgttcatccatgttatagtatattgcagaattcccttccttcctttttaaggctgattaatattccattgtatgtacgtatcacatttggcctatccattcatccattcacagactggggtgctcc

SEQ ID NO: 652953 - DNA, 591 bp, Homo sapiens
agcactggccttctttctggttctcataaatattcatgtctacacccaagacaggagtatgcttttccttgtgcctagaagtctgtttctggccctcttccttgtctatctcacactcatctttcaagccttggcttattttttttattrtggtacaatatacatggcataaaatttactcaccattgtaaccatttgtaagtgttcagttcagaggcattaagtacattcacacggttgtgcaactgtcaccactatccatctccagaatattttcatctcgtcaaactgaaactctaaacccattaaacagtaactctccattctgtcctcctccaagcctattgtaaccaccattctactttgtctctatgaatttgaccactctaactacttcataaaatggactcatacagtatttctcattttgtgactggcttagttcacttagcataatgtcctcaatgttcatccatgttatagtatattgcagaattcccttccttcctttttaaggctgattaatattccattgtatgtacgtatcacatttggcctatccattcatccattcacagactggggtgctcc

SEQ ID NO: 652954 - DNA, 591 bp, Homo sapiens
agcactggccttctttctggttctcataaatattcatgtctacacccaagacaggagtatgcttttccttgtgcctagaagtctgtttctggccctcttccttgtctatctcacactcatctttcaagccttggcttattttttttattatggtacaatatacatggcataaaatttactcaccattgtaaccatttgtaagtgttcagttcagaggcattaagtacattcacacggttgtgcaactgtcaccactatccatctccagaatattttcatctcgtcaaactgaaactctaaacccattaaacagtaactctccattctstcctcctccaagcctattgtaaccaccattctactttgtctctatgaatttgaccactctaactacttcataaaatggactcatacagtatttctcattttgtgactggcttagttcacttagcataatgtcctcaatgttcatccatgttatagtatattgcagaattcccttccttcctttttaaggctgattaatattccattgtatgtacgtatcacatttggcctatccattcatccattcacagactggggtgctcc

SEQ ID NO: 652955 - DNA, 591 bp, Homo sapiens
agcactggccttctttctggttctcataaatattcatgtctacacccaagacaggagtatgcttttccttgtgcctagaagtctgtttctggccctcttccttgtctatctcacactcatctttcaagccttggcttattttttttattatggtacaatatacatggcataaaatttactcaccattgtaaccatttgtaagtgttcagttcagaggcattaagtacattcacacggttgtgcaactgtcaccactatccatctccagaatattttcatctcgtcaaactgaaactctaaacccattaaacagtaactctccattctgtcctcctccaagcctattgyaaccaccattctactttgtctctatgaatttgaccactctaactacttcataaaatggactcatacagtatttctcattttgtgactggcttagttcacttagcataatgtcctcaatgttcatccatgttatagtatattgcagaattcccttccttcctttttaaggctgattaatattccattgtatgtacgtatcacatttggcctatccattcatccattcacagactggggtgctcc

SEQ ID NO: 652956 - DNA, 613 bp, Homo sapiens
catgttgggcagaaatagtgaggtccttgaccacactgtcctgctcagtaaatggccagagccgccctgagaagaaygtaacctccttccagaagctgaagtagaccagaaggagttaacagctggacactcacagctaatcaggctctcagcagctgggccatgagtcctgtctagaaggaaaacctgagctttgacctgcgtctccacatctgccacagggactatctctggaggacagaggaaacctcagttttgaaagcagggctaggaatttgctggtgccaataaaagacccaatgggaacttatattaggcatgctatgcctggtggatttgtccctctgtattgtgattcattctgcccccaaatcttcagtgaatttcttagtgccacggcattgtgaggaataaagaataggcagctggggaagtgtgtgagtccatgttacattgctataaaggaatacctgagactgggtaattcatattgaaacagggtttatttggctcacagttctgcaggctgtacaagcacagtaccagcatggaggaggtcccaggctccttttaacaaccaactcccacatgcactaaaagagagagaactcac

SEQ ID NO: 652957 - DNA, 386 bp, Homo sapiens
aagcaaaagcaaccaactcaaaacccccacttcccagagaagaaaaggtgggcaagcagatgcagaaaggcagcagccaaagcctgcgggttcctgcargggccaggggaggggcgagccctacaggcaacttgaacggagagctcacccgccagcccggaaaggcaagccccagtcaggcggaaggtagatggtggaggggcgccgcggcggatggaggtgcccagggccacagaccgctcacagcggtaccggggcggggagcagggcgggcagggaatcggcccgcccttcgtcctgcccctcgccctactctgtcaccgcccctgggaagagtggaacccatacttgctggtctgatccatgcacaaggcggggctgctagg

SEQ ID NO: 652958 - DNA, 386 bp, Homo sapiens
aagcaaaagcaaccaactcaaaacccccacttcccagagaagaaaaggtgggcaagcagatgcagaaaggcagcagccaaagcctgcgggttcctgcaagggccaggggaggggcgagccctacaggcaacttgaacggagagctcacccgccagcccggraaggcaagccccagtcaggcggaaggtagatggtggaggggcgccgcggcggatggaggtgcccagggccacagaccgctcacagcggtaccggggcggggagcagggcgggcagggaatcggcccgcccttcgtcctgcccctcgccctactctgtcaccgcccctgggaagagtggaacccatacttgctggtctgatccatgcacaaggcggggctgctagg

SEQ ID NO: 652959 - DNA, 606 bp, Homo sapiens
tatttcagattgataggtaaatacaagaggccaaaggttttactccagtgaagaaactacatgtgggacagtagctgcagttggagtcatcatctgattaagtttatgatgatacactcttaccctctaagactgtcagtctttgaagcatatactaaacaggtgagtcaaatgcagattgataggaataattaccctgcatttttagtcttgcttggttacrttcatctttgaggttccacacagggatttagtattgccttctattttttgtagggtaatcccaggtccttccacttggttatttctaccataataactgttattcgatgtgtcagaaagccaatgtgggaattccatcagttgtcaggtgtgcttattgaagcattcactcaggaacagtataaataaccacaagacaggtttatggatacattgaaccagctatgagaaggactcaacaaaattccatttgttatcacacccgtataaacacccattttgatgggtgggccacagtggagtcctgggttccggcaaattaaccatgtccagaattcctagaaagtctggatattttcctttctctagaacacaattattcta

SEQ ID NO: 652960 - DNA, 561 bp, Homo sapiens
cccagctgctccagaggctgaggcaggagaattgcttgaacccaggaggcagaggttgcagtgagccaggatcatgccactgcactccagcctaggtgacagagcaagactctgtctcaaaaaaaaaaaaaaaaaaaaaaaaagaaaaaaaatcacagacatttctcagattttcttttctgagaatcagatcaaaagaatctcacataaaacaaggttattactaaactaagtccttagtggtccaaaagccattgcattaagggaaaatttaaggctttttgttgctgtttgtgtctgtttatacagattcactccatggattttgatgacacgtggcaccctgccacccacccttctggggctgtccttcctgtcctcacagctttagcagaagccctgccaaggagtccaaagttttctggccttgacctgctgctggctttcaatgttggtattgaagtgcaaggccgattactgcatttcgccaaggaggccartgacatgccaaagaggtatggagagaatttgccccatcaaaaggtagtcacatccccttca

SEQ ID NO: 652961 - DNA, 651 bp, Homo sapiens
aaaaacgaaataagccatgagctttgagtattttgtacatgattaagaggaaccaaaaatatgaaaattatggtggatgagccgggattgattaattctccaacaagagggaagaaatcttctggtttaatagagatttacaaaatacgtcagtcttttcatatagatgtagccaagaagctcagatgacatgatagggacccaacaaaataagaaataaaaaaagcagagagaagaggaaagcaagcaaaggagattatatatggaacaaaagtggtggtgacaaagacagaagtagtagcaaaagagcccaagaaatatcatcagctctgtggaagcagaaagaatgaggcagacatgaagtgcagagacattatcagcaacccagtggatgtttgggtacaacatcccacaattacatcttcacaggcacaatatttctgggaaaaactacttatgccaactagagttgtttgtttgtttgatgctttacttactcatttgcagttatctgatttctaccagaggtttgcactctctttggcctatgtgctctcagtgaccaaagcctaggtgctatgggtgatgctgtcaaacctaagacctgaaacacagaacatgggccaaraaaaataaagtaagaagaacaag

SEQ ID NO: 652962 - DNA, 556 bp, Homo sapiens
tgattttataactgtatgcagctgctgtatgaaaaaagacttgaaatctttaagtgaattaaagaaacagaatccataaaacctatgacagcatttcctaattaattaaatgcgtgttggaaaatggggaaacaggcagctagaaaatgtgttcagatttttttatgtgtctttctggctcaaaggatttgtcctggggagtaataacagctaaagcagtgtttgttaggtggagctagttacaagagggatgtgaatatttttatgtttcaggagttatataacttgatggcctagcactcaatattgacaaagtgtatccctttacatgagatttgacatcagatttaggcactggatgtacatagaaaactagaggtggaatttttatttgcatcctcacgtcaggaatcttaatttgagttaaggaactgttgcttcatctgaattagacttaggtgaattgttgagtgctttttctctcgagagrataagttataagctgcatgtgaccacttgtttatgatggtgataattaattaaattaaacaactgc

SEQ ID NO: 652963 - DNA, 550 bp, Homo sapiens
gctatttcttttctacactatgttgactcaaacaaacagcatattttactgaagcataggggatatggagggatctttactacaggcatgcaaacaacttcaaataaagtggtagccatctctgtcattcaaagtccttcagccatttctgcaacccaagctctagtctcctaccatgtggctcagtttcctttttctctcttggtggctttttcccttttcttttccttttgctcctgtcctcccaggagaaatataaatgtattatgcaaatatgaatattcttatgcagagtaattcagctctctctagcagcaactycaaaacgaagtctgggtttccctttgtatatctacagctttatgtttattgcttaacagagcccttcagattggatttgttttctagtatgaacagagacacataggcacacacaaacacacacatacatttccaaatttataaaacttataagatgtatcagttgcaacttattcttttatttggcaatagaatttcctataaaacagcctcttaacttgtgggcagg

SEQ ID NO: 652964 - DNA, 584 bp, Homo sapiens
tggcagagccagaactcaacccgacagtgtgacaccagaagatgagttctcaaccctgaggctctctacctgaaatgaaacaggcatcagacctggaccctcagagggactggcttcttcgaagctcaaagggcttcaccatcataggccgtgggcagctccccaaaggctaaagtgactttagcctctctagagatcaccctgggggccctagcaaatgctttctgtcatcctattaacactactttctaattaggaccagtgcaaacctgatacttaggcagaaatgtctgtttattkatttattttgcgtgtggaaaaaaatattaaaaagatgtccaaaaagaagattcagaaaatctttgctcctgcccctcaggaattcgactcagctccccagatgccctggacagagggggacgtgtggcccccaacagtcaccatggagttaactcatatttcccaggcctggcacatgttcagtcaaaaacctggcggagtgcctgttgtttactgaagctggggaagaagcatctgcaacattacgaaaagcatattgtaaaaggcaacacatgcaaattaaa

SEQ ID NO: 652965 - DNA, 600 bp, Homo sapiens
ataattactagtaggaagcaaatattaggctcgggctgactggagattatttcattatatccaattaacacccacttgattattcttaattacttctgcatgatgacagaggagtaaagatgtcrtacttcaaatgtacaaataacatctgggccatcaacgtacatgtatttgtaatataatatcctgctcattttgggatggctaatatggtcttagcagagggatggaaaatgaaatgacaagattctggtaattactaagcgggtcttagacaagatgccaaaagattcttctagtataaaaatgggccttttgtagcaatctagtttagacatgttttcttataaaatgccttattacctttctgtgtgagaatttctttcttcctctgcccattgactatagtacaaagatataaatggaaatagctaagtgcaaactttccagaaaagagtgagctatatgtgtgtgtgtgtatacatgtatgtcaagtggtatgaatgggaatccctgctccaagggtgtttgtggagttttgagaaactgagacaaaatcagcctgtgtgcgagattcttaatgacctgcctagtaaagaa

SEQ ID NO: 652966 - DNA, 591 bp, Homo sapiens
tttcatacagtaagactagtaattgaaagatgataccatccaacatgcatctgaaaatgaaaatggtcttagaattagcctcagatgggaaagggatctgaaggactatttaatctaataggtttctgttaaatggattccccagatgatatttttcagggcgcataaaagctaacagtggctagcttacctgattttggctctaaatgttagttcttccttacatttaaccaaaatccatctcctcataacttctgttcatygattcttgctctgccttccagtgctgtagcacaatgaatgtaattgctctttgctgtggcaatttttcaaatatctgaaggcagccagttcaatcctacaaagtattctccttttaaagattaataacccacaaccccacttcctttcttatctcccatccaactagttttaagtaccttcaatattttaatggatttctcctaaataaaatctaattaaaacaaaattaagccaaacaaaaattttaaatgtagcacctataactcaagataatactccagtttgtacagaacttaagtcaactaaaatcctatgtttgtttatatg

SEQ ID NO: 652967 - DNA, 622 bp, Homo sapiens
gtggttcattttacgattcatagttttgcccctagggaattcattaattctcttgcaaataattttgttaataatgcagataaggggatatagttcaaaatagatttccttttaattgatgtgtcataaaacctatttctatamctgatacattctttatcaaaatttaatactaagagcagtaggacttcatttcaaatattcgtactcaatatgcaggagtaacatttaaaaaattttaagcatgtaaaagtgaatgatacataatgcggttaagacaattgtcaataaaactgatttttttgtgactagttgaaaatatgataaccaagataaaacccattattcttctggttccagtaatacttgtaattttaaaatgagtactaataggctttgcaaattttgaacaactacattataagcagaataaaaagaaaaggtaaatttattagtatgtacctctattagaaactacacgaagagataacaaaatccaatgtaaatccttaacaaaattggttttcagtttatggtcgtgtaaaataggtcccatccaagtaaaagtcaatgctctggattggtctttgccagtttgctataactataaaagtcaagtatt

SEQ ID NO: 652968 - DNA, 622 bp, Homo sapiens
gtggttcattttacgattcatagttttgcccctagggaattcattaattctcttgcaaataattttgttaataatgcagataaggggatatagttcaaaatagatttccttttaattgatgtgtcataaaacctatttctatacctgatacattctttatcaaaatttaatactaagagcagtaggacttcatttcaaatattcrtactcaatatgcaggagtaacatttaaaaaattttaagcatgtaaaagtgaatgatacataatgcggttaagacaattgtcaataaaactgatttttttgtgactagttgaaaatatgataaccaagataaaacccattattcttctggttccagtaatacttgtaattttaaaatgagtactaataggctttgcaaattttgaacaactacattataagcagaataaaaagaaaaggtaaatttattagtatgtacctctattagaaactacacgaagagataacaaaatccaatgtaaatccttaacaaaattggttttcagtttatggtcgtgtaaaataggtcccatccaagtaaaagtcaatgctctggattggtctttgccagtttgctataactataaaagtcaagtatt

SEQ ID NO: 652969 - DNA, 584 bp, Homo sapiens
atattttgaatttatctgttcaaacattatagactaaatagaaaaaaagggaaataataaagtattttatatgcgtagcaaactcttctctaaggttctgactaattttttttttctgcctgtattagtccgttttcacactgctataaagattctacctgagactgggtaatttataaataagagaggtttcactgactcacagttctgcatagctgaggaggcctcaggaaacttataataatggcagaaggtaaaggggaagtcagcaccttcttcgcaaggtggcaggagagagaaaaagagtgaagcaggaactgccaaacacttataaatcgataagctctagtgagaacttactcactatcacaagaacagcagaggggaaccatccrcatgatccaatcactttccaccaagttcctccctcaacacctgagggttacaattcaacatgatatttgagtggggacacagagataaaccatatttcctcatctcttttatttacaaataatcactgcctcctacctggaagaaaatttatattaatttctgggttataatcacattatctgtgacta

SEQ ID NO: 652970 - DNA, 610 bp, Homo sapiens
gaattccagagttttctttgtggaggaatgacttcctcaaagctctgagaaccagaagtagacaacatgtgaggtaattagacagtatgtcgagacyggaagtgtgggggtggggggtgttgaggttgcttctatagattccagtgaaacattttgtggaaataaagagtcagactcaaacttaaaggtaggctctatcatttactaagattttcatgcaatgagaagaattggaaagcaaacacacagcagaagttcaatgccccaatatttttagtactttaaaattacaaatgttcttttatctgctcttaggtggaacaaatatgcaaactaacctaatagcttgagcaagccaccgagggtttctttcaagggatatttttctctgggtctacaggggagctaagaacaaagacgtcacgtaacacagggaagcttgggaacacttctagcaaggaagagttgagtgatgtctttaccactatggagaagggtgaacagaagaaggtgaaatgatgaaaacagcaagctggctggtctaatagaaaagccttctctttttgatatgctagaaggaattgatcagctattgaaccctgcagtagtt

SEQ ID NO: 652971 - DNA, 532 bp, Homo sapiens
gggggtggggggtgttgaggttgcttctatagattccagtgaaacattttgtggaaataaagagtcagactcaaacttaaaggtaggctctatcatttactaagattttcatgcaatgagaagaattggaaagcaaacacacagcagaagttcaatgccccaatatttttagtactttaaaattacaaatgttcttttatctgctcttaggtggaacaaatatgcaaactaacctaatagcttgagcaagccaccgagggtttctttcaagggatatttttctctgggtctacaggggagctaagaacaaagacgtcacgtaacacagggaagcttgggaacacttctagcaaggaagagttgagtgatgtctttaccrctatggagaagggtgaacagaagaaggtgaaatgatgaaaacagcaagctggctggtctaatagaaaagccttctctttttgatatgctagaaggaattgatcagctattgaaccctgcagtagttaagtctgaaagagagattttagaattc

SEQ ID NO: 652972 - DNA, 238 bp, Homo sapiens
atttatttatcatcttattgataatagccattctgacaggtgtgagatgataattcattttggtcttaatttgcatttcccttatgatyagtgatgttgagctttttaaaatatgtctgttggcaatttgtatgcctacttttgagaaatgttcatctaggtcccttgtccatttttgaattggatttttttcttgctattgagttgtttgagtttattatatgttttgaatattaac

SEQ ID NO: 652973 - DNA, 553 bp, Homo sapiens
ttatttttctgcaaagaccacagagttgactctctaggagggcttctcacacctgaacagcactgaaatcacctggagggcttcttaaactcagttcactggccctaccccacagcgtgattcagtacatctggggcagccccttgaatgtgcatgtctaacaagttcccaggtgatgctgatgctgctcrtccaggaatgccacttggaggaccattttcccctatgaagtatctgtctataaggaagcaataaaatcctggttctaggctcactgatccacagcagtctatcaaagatgggaaaagattcagctgtccagggactaccagagcttttacagtgagctctcctccaggtttcctcttacaaatgctaccaggtacaacactttccttctggaatgctacaaccaccccaaaccaacatgatctctgaaaatatttcacttcctactcagtatctaactgcaagtgggaagaaaaagaaagcctgcacataaccaagtcataaatcaagcaatatatctcacataaaactggaaacaccaaga

SEQ ID NO: 652974 - DNA, 597 bp, Homo sapiens
agcctagaagtggaaaacacaggtagcaggacagagtcactgcatcttcctgagcaggggaataacatgatgaaaacagggcttcagaaagatgaaggcaggcctttcttgacacgcaaaattgcaacttcccggttcctttcctttcagaatatgtcactctcttcccttctacacccttccccatccctcgtccccacctccttacccactgcaatagatcctagtaaaaactgagtattgctatttaaattgtgaagatgtatatgaagattcaaatatatgaagatytgggggagtaaatctttggatggtgctatatctcacttctatactacaattaaggggcttctcaatctttttggagtcccagccagaaataagattgagtttgagtttagaaagagccctctatggtattcaagtgcatggggtataggggatgtcacagaaaaaaaagtttcctatacggcgacttcaaaactggagatcaaaacaatgggacccaggccttggacacttaaacccagccactggacttaaaataagaccatcagtcacaaataaggatgccaagaactccactaccataactgg

SEQ ID NO: 652975 - DNA, 498 bp, Homo sapiens
tcaatcttaccagttgtagtctcctataatactgattgtgttggatgcatcggcagcccaygtaatgggtctctggttgagaacttggcgtagcgtgaagtgatgctcgccagggtcttcaatatttgtaaaatattcaaatacaccagtttgatcagcaaagtttggagcttcactaaaaaatgggtaatctgttcagaatgtaagaaattctctgtttagtatcaaatccttcagaagctctccttgctgatattttatagtatgtctgaaacacttctgaaagcttttaaataaataaataaaatctaaaccaaagtttagggcctaggtctaataaagatacattaatttttgtatcatcattactaaatatcaagatgatgagttcgacatatagatgctgcataatatttaatccaggcatctggtgtagaggaaaggtcatgagttttgaagtaagacctagattcaaattcgagttcagtctgtcgccct

SEQ ID NO: 652976 - DNA, 509 bp, Homo sapiens
ctgtcgccctggacaagctatttaactgccctgcatctaaagtttcttcatttccaggtttgcaggaggacaagagaattaaagaaaagataacaggtacataagccagcacctggcaagggctcaataagggatagctttattatttctaatatctgtcaagcaaggttccaaatcatgcgtcacaatcatctgccaaaagagcataagaaaggtttactatatcaagcataaaatttacaaattttcttctacttctaaactgcmgcaaaaaccagttttgggcctaagttatcaatccctttttagttttactaaattaaattatagtcttacaataatgaatgctgtagaggagaaattttacatatcttatagctcttatacctcatgcttttccaagtgtttttgcattcattacctcatttgagacatttagaaccctaacaagtatctccagagcctagcttataatatttaacttagttttaaatttatattgtagctca

SEQ ID NO: 652977 - DNA, 599 bp, Homo sapiens
taacaggtacataagccagcacctggcaagggctcaataagggatagctttattatttctaatatctgtcaagcaaggttccaaatcatgcgtcacaatcatctgccaaaagagcataagaaaggtttactatatcaagcataaaatttacaaattttcttctacttctaaactgcagcaaaaaccagttttgggcctaagttatcaatccctttttagttttactaaattaaattatagtcttacaataatgaatgctgtagaggagaaattttayatatcttatagctcttatacctcatgcttttccaagtgtttttgcattcattacctcatttgagacatttagaaccctaacaagtatctccagagcctagcttataatatttaacttagttttaaatttatattgtagctcataaagtattacattttatatttgaaggtttgaaattgcctcttagtcttcagggtcacaaaatattggtcttggtgctggcagttcttcaatctcattatctaggccatatcccacacagattcctcacttactgaaggcaaaagtcacttttgctaacagagaaccaagcgagcaacag

SEQ ID NO: 652978 - DNA, 630 bp, Homo sapiens
gaaagacagatatgaatgtgtcttaacctccacacagaaggaagatgtcagtaatggctaatggggcagtagcaaagttacaaagtttaagtttcaccaaaaacaaatcagaactataactttcattctaacaatgaaccctatatttttttctgaaactgaaaaatacagggtcctcaaatttagatttaccataaagtaatgcaaaaaattagccctccttttaccgcatatgagatgtaggaggtaaatgaatgtgcttttgacagccactccatcatgcacccagtttgacaggtagaaatcaacacactactgttaaatatagagaccaagttaagttttagtgaaaaatactcaccaacattgaaatcatccttataggtacttgggaagggctgggattttggaggaagcgggtagctgcctttgcgaccagtggtgagagtggtgagtgtgaacagctcatcttcatgcaggctcagtgtgaaactgccatcgctgtcaaggagctgaaaaagaagacactactgtattcaggaccaggtactatagctcatctcatgtggacaraatagctttaaaaaaattagcttaaagaaaagtccaaatcatttctgttagaacttc

SEQ ID NO: 652979 - DNA, 589 bp, Homo sapiens
tgaattcagtaaagtttcaagttacaaaatcaatgtacacaaataatgtatataaatcagcagcactgctatataccaataatgacaaaactgagaatcaaaccaataactcaatctcttttagaatagctacaaaaatatataagaatatacttaaccaagaaccaatagttctaaaaggagaactattatacaaaacatggctgaaagaaataatagatgatgcaaacacatggaaatacatcccatgctcatggattggaagaatcaatattgtgaaaatgagaccacaawgcccaaagcaatctacatattcagtgtaattcctatcaaaataccaacatcatctttcacagaattagaaaaaacaatcctaaaattcatatggaaccaaaaaagagtccaaacagccaaagcaatcctaaacaaaaagaacaatctggaggtatcacattatctaacttcaaattatactacaaggctatagtaaccaaaacagcatgttactggtttaaaaacatataaatttatgtataaagtaacaatgtcctattgagttcgcagcacgcagtgttgtgacatgtgtgct

SEQ ID NO: 652980 - DNA, 583 bp, Homo sapiens
gcattttgtaaaatacatacaaaacccttcaaaatctatgtatttctgaccattccatttctaagaatacagcctaagaaaatagtcatgggcatatacaaagatatttgtatacaattgawcatttcagtttgtacaaagctattaattaaaacagagacaacttccaattctaaaagaggagaatattcaataaacaataatatattttccacatcagtgtttcccaacttgtgtggcatcagaatcacttgagggcactgactagatggacagaataccaggagccttccctgtagattctgattcacaatgtctgggcagctgccaaggagaaggtataacaacgagtgtctcgggtgcttcttaaggcaagtctgggaaatggtgctttatgtaacaaaatattttaaaatgcattaaaaatgatgaagtagaaatataggtaaatgtgagaaaaagttcctaatgtcgtctcaagtgaaaagcagttttttaaacagattctatagtatggtctcaattttgtatttaaaatgtatacatgccaatataaaacaggaggacattcactaaaaatgtt

SEQ ID NO: 652981 - DNA, 504 bp, Homo sapiens
cctcttccaattctttccttgtgaatccttttaaacattgaaaagaaaacctccaaaaaccagtgcaatagctgccacaagacagagtagttggtggtaagagccaagctagtggcccaagtaataacagctctgtgttctgacactggagaaataattytgggcaagggatgcagctggtctctttataaactagtttatgaactccgcacttggtgttacattgtcaggaggagaaagaaggacttcaaattgcttcagaaggaaacagatcaatgctgagtccctgggaatggtatttgatttgctgcatcttcacaaaaagaaatgcccacatgaagagttgttatccctgggtattgaaaggacttcttaggcagaactcacacagctgaagagcaagcttgaatgcttgagcaagctgccatcaagcaactatttgagaggatataaagcaaatgtggcattttatcacctcctggcatgaccacaaccctcctagcc

SEQ ID NO: 652982 - DNA, 540 bp, Homo sapiens
gttaaaaatatgggctctggagacagacatactttgaacactcacttcagaccttgagcttgttacttctcctctcagtgcctcagcttcctcatctgaaaaacgaagatacattcatactagaatatttgaatattaagtgagtayatatatatatatgtatatatatatatacacatatattatttaaaacattactggcataaaaatattatataaatgtgatggctctgccaggttggggcaaaagattgcaaaaaaggggatgccagaagagggggtgtcaaaataattgcactgagagagggggtcaattaacctctggactagtacaaagtgtatgaaacataatactaagaaaatgcatttatagccaagcatggtgtagtcccagctactcaggaggctgaggcaagagaatcgcttgaacctgggaggtggaggttgcagtgagctgagattgtacaattgcactccagcgtaggtgacacaatgagactctgtcaaaaaaaatgcatttatagataaaaagatttgcct

SEQ ID NO: 652983 - DNA, 543 bp, Homo sapiens
gatacctattctattaattcatactgaatgttttctaatcccagaaagactaggatgccacagaagctatagaggacactggagcttcttggtaactcattcattcttttttttttttttttttttgagacggagtcttgctctgtcacccaggctggagtgcagkggcatggtctcagctcactgcaacctccgcctcccgggttcaagcggttatcctgcctcagcctcctgagtagctgggactatagacacacaccaccatgccacctaatttttgtatttttagtagagaaggggtttcactatgttggccagcatagtctcggtctcctgacctcaactcacccattctttcataggctgcaggtgcccatcctccagcacctgtgaccttctgaggtttgcccttaggcactggaactgcctcacccatgcacagaatgagaagcggtggggagctggggcagctaagggagtgctggcatcacccctcccttaacctcagagtgcacaggtctcaggtccaaaagagacctcttc

SEQ ID NO: 652984 - DNA, 479 bp, Homo sapiens
cagcatggttatcaccacagttctggaaagcagtaagttgcatgtttgattcccaactccagcactgtggagctgtgtgcctttgagaaagttacttcacccctgtgggtataatttcccagatctgtaaaatggggctcataatacctttcatagggtccaggtatgsattaaaggtgatatgcatatgtaataagatggagaaatatttattcaccagcactccagaaaatttgaagaagatagaaactgcctcatcagggcagcctatccctattccaccctcatttctaagaggagcagttgaaaggctgaacaatacttctcaaagaaatgcctactgtggcagggtcaagagggatgaatgcaggtttggtgggggtgggaggaggtgttagaaacattttttgaggaaaacatatgagattatctttgtgaattggaggtaacaaaaaatttattggagaggtcacagtgaa

SEQ ID NO: 652985 - DNA, 494 bp, Homo sapiens
tgaggaaaggatgacaacctagagtttttttatttactcaaaaacccacagcagagccccgatgcgaccctgaaaacaagacacactaaaggtggggtcagtgtctctacttccccagaatcttctttaataagtgggtaccaagttgtgccttcatgtttgaaaataatatgcagcaggagtttacacttaacactacatgattttgacaaacacctgccattattgatccccaaacattattttctaaaattctctgattgcttttgtggaatcacctctctcctactgaragggttcttcatgggagggtcatccagacacctgccctttccactgtggaagctaaagcagactggagtttcttttgccagagcctttttctttcattctacagcatccagtggcagacatatggttgtcttcactggttcgagcagcagatccaggcaagattgtcaggtagtcagttcctactcctgagactttgtacc

SEQ ID NO: 652986 - DNA, 618 bp, Homo sapiens
caatcatattgctctatatgtcaatttatcatcataagatttataaatcaatatgttgagccaacaactctttgcaaccagaagttgagcccttcaattgtagtaactgggcagatggcactacaaatagagttaaagagctttagttgaagcaacaggcaggacctgctgtgaaagattctacaaggagggatgaggaaaactcagacagagctaaactgagttatgggaatgcaataagaaatcttattatagttggaaggaagatctatccacaaaaagagtcatccagaatatcatacatcaaactgttcatacaagcagatagaagccaacatgaatttctaacactttgaaaccattttcaaagactrcatgcaaaataaaagacttgacttcaaaattcacactgccttttgaaaacaaaccatctgttgtttatgtaaaaagtgctaaagtttttgaagaaaaggatatgaattgagcttcagaattaaaggtgacaggaagggcagtgattcatgtataaatgtgtaaatatgaaaaaaaaaccagcctccagattcctagaacacagataatttatcaccagaaattgctaacatgaggagctgtgct

SEQ ID NO: 652987 - DNA, 564 bp, Homo sapiens
ccaaactccccgttgcatgaaatcaggccatgtcatctgctaggcatctcagtgtcaggaatattgagcaaatgtttgtgtaacaatcttattaataccatttttttctgggcttgatgcactgggatgttcttataaaacacgactttcagaaataaatagatctagatttaaatcttggttctattatttataagtgtataacattgaatgagtcattcaacctttctgaatttgtgtcctcttgtcttaaaatggggataacaccaccttaaaatgtaaatgttaccaccggtcataataagttatgcaaaagcaccagtacagtgcctggcatgttatagacacatttatatttttaagggaggactgattctgcttctagtgctygtcaccaaccttagatcttgtttcttcacataccccaaaaaactcaactcatattcccaagagataaaaataggcatattttcataaaacatttcaatgatctcttattgggcagttaacatgaaacctacctgaattttttcattggagattgcttttcttgagcagtggcta

SEQ ID NO: 652988 - DNA, 564 bp, Homo sapiens
ccaaactccccgttgcatgaaatcaggccatgtcatctgctaggcatctcagtgtcaggaatattgagcaaatgtttgtgtaacaatcttattaataccatttttttctgggcttgatgcactgggatgttcttataaaacacgactttcagaaataaatagatctagatttaaatcttggttctattatttataagtgtataacattgaatgagtcattcaacctttctgaatttgtgtcctcttgtcttaaaatggggataacaccaccttaaaatgtaaatgttaccaccggtcataataagttatgcaaaagcaccagtacagtgcctggcatgttatagacacatttatatttttaagggaggactgattctgcttctagtgcttgtcwccaaccttagatcttgtttcttcacataccccaaaaaactcaactcatattcccaagagataaaaataggcatattttcataaaacatttcaatgatctcttattgggcagttaacatgaaacctacctgaattttttcattggagattgcttttcttgagcagtggcta

SEQ ID NO: 652989 - DNA, 479 bp, Homo sapiens
agcgagccttgattctgttttcttggctgctgttctcagaatgagtctgtgtcccatcgtctgctggaaacaggaaaggaatacaaatktgaggaaagcaggttatgaaacagcaatcaaatatatcagctccttaaaaaagatggatgaaaccaaagaggcagacagtagaattaccagtgtttttcttttctaccatcatttgaagagactgataacttcggctcactttttctctggactctgtgctctgcacaatacagtaagcatctgagtcccgatccagtccatgaggttgctcatgcggatgttatgctgttttccagtgtgcccttcccttgtaagagcattacacatcccagcccccaaagactggtcttggccacatgccctgcgctttctattgaatgtgagaagacatgaggcataacacctcccataagaagccttaggaggcatcccaaggtcctaccagctct

SEQ ID NO: 652990 - DNA, 452 bp, Homo sapiens
aattcaggagttcaagaccagcttggccaagaaagagagaccttgtctatgcaaaaaaaaaaaaaaaaattagccgtgggaggtggcatatacctttagtcccagcaactccagaggctcaggtgggtgaatcccttgagcccaggagtttgaggctgcagtgagcaatgattgtaccactgcactccagtctgggtgacagaaggagacccagtctctaaaaaaaatgcaacagagatgattattaaaagtaatgtgtcccaagaatagagcaagtcctgactacacagtcatttcccacctcaccaatgactaatatatttctgggagcacaataaattctgctttgtacttttactaaraaaattttgcagcaattttacagcacactaaaatagccaaaactctctaaaagtgataatcatgaaggctgtctcccttcatggaaaaaa

SEQ ID NO: 652991 - DNA, 497 bp, Homo sapiens
gacttgttattgatgatgttaactgtgatcacccagccaaggtcgtgttggccaggtttctccactgtcttttttttccctttccatgctctcttcttcggtagccagtcactaagtccagcccacactctggtgtggggaagagagggtgctaagcctcactttctggagtcggggrggtctacatatattatctggatttcttctgtaaagataatttgtctcttttcctcctttattcacaatttatttgtattggtatagacttatgaatatttagttcatactttgggttatgatcaaacctgcattgtttattatttcactcaaattattccagctttggccatggcgagctcttttagattggctactgagtacctttgatttgtccccattcttttgcgtttgagctcttccttactttctggcactgcaagatgccctgggcttgtcttatagtttccctgccccactcctgaaattaatcacttctc

SEQ ID NO: 652992 - DNA, 567 bp, Homo sapiens
ctaccctgagttcagggaaactggtttggcatgtttatcacctctctgcttccatgattgttgcaaatgtttaatcacaatcctcaccataaggatcatttcttagccagagataaggaaaaaatgatattaaagtatttgttctgttcctttggtaagcaaaagagtgtaagtcacctcccaggagtaccatattcacccatgtgaggygaattatgggagctatgcaagtattagaatgcttaatgtgctgttgctgacagttgagcatagaatatttaaaatgtttcttgtagaggcagctcttgcagtttgttatgcatgctctcctctcgaaatcctaaatttatctgatggagtgaaagataatccttctgatgttcacactgtccggaagatggcttaaatttactacacaggctttggaataaggtaaaaatgctgctggcattaccttctaaacattccttgaatccatctccttttgccatccttgcccctccgcttccccacattaggcccttgctggctatttcgtggatgactggctgccatgtgttcctagcc

SEQ ID NO: 652993 - DNA, 576 bp, Homo sapiens
agaacaagttgaaaaagaattggaagtaaaaagacttaaaaggagrtgtgtgtgcatgtgaccattctccctcaggcaactgtttttaatgaagggcccagctgtcacagtagagggaaatggcagatgagctctagatctctctctgatggggcaacagggagtggtgggtatgggatttcaaactagacagctccccataatgacttctgggtggtagatcagccatgaagatagcttggttcctgctctaaacaagtgcatatgaggggtttgtaagacaacatgtagggagaaagctgtgtgaccttgggatgtcacttaaactttttagatttaagtgttctcgtccataaaataagagggtgggaccagaaattctatgaaaatttcactgaagcttttgagatttgagtgttctcatccatcaaataagaaagtaggacaagaaattctatgaaaatttcagtctaaacttttaaaattttatgaggaccttgtgacttaataccaggtagggctgtctttccagctaagtacaagttaaaatcctaaactttgtgaaaccaatatgat

SEQ ID NO: 652994 - DNA, 563 bp, Homo sapiens
agggagtggtgggtatgggatttcaaactagacagctccccataatgacttctgggtggtagatcagccatgaagatagcttggttcctgctctaaacaagtgcatatgaggggtttgtaagacaacatgtagggagaaagctgtgtgaccttgggatgtcacttaaactttttagatttaagtgttctcgtccataaaataagagggtgggaccagaaattctatgaaaatttcactgaagcttttgagatttgagtgttctcmtccatcaaataagaaagtaggacaagaaattctatgaaaatttcagtctaaacttttaaaattttatgaggaccttgtgacttaataccaggtagggctgtctttccagctaagtacaagttaaaatcctaaactttgtgaaaccaatatgattcttcactctcacctcctttaaaatgtgtctttcctaagcatcgccatgacaattgagaacatttcactaagaaagggtttctcagaattattcctaggcacagggcaagacatttccaggaaatatcaatgcatttggaacctt

SEQ ID NO: 652995 - DNA, 555 bp, Homo sapiens
atatgctgttgagaagccactcttaagagtccagtttgtttaatgttatgagcagccaccaatttgtggtgtctctgtatatttttgtaaagattctcatttttatgcttgaagtatttggtgaaaagatgtggttgaccataatttgcaacattcttttattaaaaataaactttcatatttgtatttggtagaaccgttaacctagaaatgtagcttgttaataagaatgacacaaaaatgaagtcatagctacagtacaacactgactgctcagacacatttaggttcagggcaggcctttatgtcttgtcaaggtgtcttgtcatgataattatttatgatgaagtgtggattcgtttttttgttaaccccactgtcttagggaattatgccaactgggttacayagtattttcagggagactgagtttttgactgaaacatggaggcttcactgcttttttctggttcctatgaagatttggaaaatagaaaacatcacaaaaactcaccttaaaatggcaaaaataattttaaagggaaaataatgttc

SEQ ID NO: 652996 - DNA, 604 bp, Homo sapiens
accaagggactctctgctcagcagcctctggaagcaccagtgggagccaccaaacaagagatttgtctttatagcacagagaccacagagccagcatgaagttgcacacatctgatacctcgacacaattgctcatatttctccagttagtcggtaacacgttttggacaagcatcaaccctttagttccatggagttctagcaatggaaagagccacaggtaactaaaatcagaacttcacaatccccacaaattggtctgctggtgaaatcaggctgctgggcccttgttaggagtgacaggtcagtatcactttttagtccatgccaagaaaatacaaaccatcctgggccaccaggcaaagccataagaaagagattgcaaattggcagttcacagrtgctacacaatctgcaggcatgtttcagttagcccaaatcctgtttttatttttttgaattggtggccaacattcaacatttgggaaatttcaaataaaaagttggatgttcagttttcattgaaaaaaaaaattcctcatagcagtagggcactgtacatagaggagaatattaataaactctgatggaaatattaatatct

SEQ ID NO: 652997 - DNA, 287 bp, Homo sapiens
aaaacaactcccccacaaggaaaatcctgcagcaygaaaaacatacttaatggggaaataccaaatgcttttcttctatgattgggaacagtatagctggggtggggctataaaatgagaaaagagaattaaaaatacaaaatttgtgagagtatttacctcttgttacacataggtaaggctactagtggacttccaagataaatgtctgttctgttaaaaaaatttgtggctacatgagtgctttttgaattgttactctttacatgttacacacattttggata

SEQ ID NO: 652998 - DNA, 576 bp, Homo sapiens
ttcagattgttaagtagtcaaagatttatttagttgggaacttacatatgaggtgggattgggtgatgtctaggtaaatctgtgtgcttgcaatgcatacttgtctaatcttttataccrtgaaaagaaaagagaaagggacaaaatttaaaaaaaaagtcactgatgatcataagtcatagggttactttcttaatctatgtactttctacttaaagggattgtttgggtttcccacaatctggtcaacattcctaagtggggaatggagggtaagggaagggatgttctaggaagtagcagttatttggtcttctgatgactgcatcctacaactcactttgtggtcatgtacccagaatacattttcacaacacgccgcccctcccgactggccttatattcttacaagccccttcttccatgagagtacctggcttccctgaggggttttatagggagggtggatgcattattcacaaacttggtgccacattgcatgatgagtctacagtaacaatagagacacacacaggagaaaacgcaaagcaaaagaagtaagcatattaacaaatg

SEQ ID NO: 652999 - DNA, 607 bp, Homo sapiens
cgtgtgaaaaaaaatcctattgcattcatatcttcatttttcccttggtgatttttatgttagaatgactgctgtgattttaatactgacacattcagttcatccaaacctaggagagacagtgattagagttttaaaataatataaaagatattttattagaaagatttaagattgtcaggaaatctttaagttgcagccattttactctccaaagctttatattcaatgcatctttttatgcaaatgcaatttattgatagatttgtaaagaaacacataatttattatttttcattatgtttttcctgagtttggccagtaactatatacaaatgctaattttttcaacctcataaatagtccctcacaaaattccagtagagtaggtgggagaggaggaaagagaacacacaggttttattttttgtttgtttttaatcatatgcaaaatatttcagagtgaaaacatcmtaaataaaggatgctactggagaaatgtagatgcacacatacccaaagtacatttttgagaacttgttgtcctagtcctttcagcctcctataacaacattccataaattttgtggattataagcaagagaaa

SEQ ID NO: 653000 - DNA, 428 bp, Homo sapiens
gaattcagaagattttttctcttttaataagttggtaatattaaaaataattattttcttattggggaaatttggccttttaaagaagaatgtagatttaraaaaactggggataggatgctttcaataattttttgaaagctgacaagtaaaaagcaagagacctttatattaaagatatcccttgcatataatctttgtttgtacatgttcattaattacaggctagaaaaagcataatttgaagtaggaaacttgtgggggaagttctagattaaaatcccaacacctttggtattggtgatttgaatgtcacttgctggaaccagctagtgacctctgttctatcctgtctttggctcaattttaatcacaaggaacaatcagactatagagaggtgtgtgctttttctgtagtcaaataagac

SEQ ID NO: 653001 - DNA, 570 bp, Homo sapiens
tgatatcagctttactttactgagcattttatgtgtgccgagagatatggtgaacactttgtatattctatctcactttaccctcacacggatgttgaaatctacatgttgttatcattattttatagatgagaaactgagacttagatttctgtagattaacaagaacttggattcaaacaagctttgggtcttctaattcgagaataaacttcaagttttttcttctggcatgtaaaatcttaaacaatgtcttccaatgccctgaattttatataagtttgcaggactgatatttcttcagctttagttcatctccaaaatctgttctttcccctctgattgaacaaaattgaayattttctcttaacaaggagacgactttgtgtgtattgtttgccatgggttactttccacagttgttcaattagtcagtttatctttcttagagggttaaaatattttatgttgacaagatcagtgtctgactcaaatgtgacttgctgaaaagaattgtgttatatttgcttttgaatgaacaaaataaatagacctaaattattagcagga

SEQ ID NO: 653002 - DNA, 548 bp, Homo sapiens
tctgttttcctcttggagtcataacgagttgtttttctttccttgttagataacatctggaatgatttctaagtaactgattattttgttccattttcttgggtgcttattagaataaggacaaggcttttcatctcttattcattattatagtcctaccacctagaaaagtttaagtgtagtggtgtggcttacatagtatccctctaaatttcggatccatctggaacatcagaatgtgatcttatttggaattagaatcttagagatataattagtaaagaacctgagtatggaatcatcctgaattaaaggtgggctctaaatttgatgactgaggttcttataaaagagaaagggacacagacacagaggagacaatgtgatggtagcagcagagattggagtgatgtatctacaagctaaggtatgctaggagccatcagaaagtggtagaagcaaagaatgackctttcccagagtcttctgaggcagcatgtaactgctgaccccttgattttagacttctaggcttcaaagctataaca

SEQ ID NO: 653003 - DNA, 644 bp, Homo sapiens
atacaattagaggattcaaatttagtaaaataaatcactccttgtactatagtttgtgatttttgtgccattaaaaaaaattccctgccccaaattcttaaatatattctcacataatatcttctcaaagtttaaaaatctttccccttacatgtatcactttatctggtagaaatatattttttaaaaaatatgatgtcaggaaaaaagcaatattcagttttattttgtttattcctcacaaatgttcttgaaaaggatccatagactgcactcttgggagcagtatttttctgtacaacgactggattgaatttgttagtttgcatcattctaatcatttatgaatttacagattacttggctgattgactaattgttaaaatagattaaactgcctttctctgaagaygaatttctcatttgctacttttagttttgtcaatttgtgctttatatttttgaagttattaggtacagcattgaatttattacatctttcaagtgaatgtaatttttcatgtaaattgtacacactatataaagcacttctctgtatatttaatgttctttcttatcctaactaatgactaaatatcacctcttcaaaggttactccttcatctgtatcctaaatccttact

SEQ ID NO: 653004 - DNA, 644 bp, Homo sapiens
atacaattagaggattcaaatttagtaaaataaatcactccttgtactatagtttgtgatttttgtgccattaaaaaaaattccctgccccaaattcttaaatatattctcacataatatcttctcaaagtttaaaaatctttccccttacatgtatcactttatctggtagaaatatattttttaaaaaatatgatgtcaggaaaaaagcaatattcagttttattttgtttattcctcacaaatgttcttgaaaaggatccatagactgcactcttgggagcagtatttttctgtacaacgactggattgaatttgttagtttgcatcattctaatcatttatgaatttacagattacttggctgattgactaattgttaaaatagattaaactgcctttctctgaagacgaatttctcatttgctacttttagttttgtcaatttgtgctttatatwtttgaagttattaggtacagcattgaatttattacatctttcaagtgaatgtaatttttcatgtaaattgtacacactatataaagcacttctctgtatatttaatgttctttcttatcctaactaatgactaaatatcacctcttcaaaggttactccttcatctgtatcctaaatccttact

SEQ ID NO: 653005 - DNA, 412 bp, Homo sapiens
gaattctattcagattcaccatctcttcatttccaccctgcttttgtctgcagcagaggctcaagtatcatggrctacattcacatccttcagtttcttgtacattgtttattctccctgccctatccttgcagccttggtctggttgtgtcccactgctgaaagtttacagctcttgacaatgtggttttctttatgggatgctctccttccaatttccagtaacatcttctccttactctttcagatgcaaaggttgaactagcccccacccccttactatctctggggcattgcactcatcctgttatgatatttttatagattatccctttattaaactctcttgtattatactaattttgttgtatcatctttttcctgactgaaaatctatttccaagtcctgacc

SEQ ID NO: 653006 - DNA, 611 bp, Homo sapiens
attggcaacagtaatttctacattttagattaattactaagaattttcattccccataggtggcagcataaacttcaatagaatattcattactagcaayattagctcagatcttcttctataataacagcaaaagtactattctgagggttttctgattccactgagtccatcttttgaatctatttaaaaatcttaatgtaggacagtcgtgagtaatttattttattgaaagaataggactataatttcacattatttttcaagacagccatagcaacgaaaataaagaactaagattaaaaatcaaaattaatagtggttttaattgatatgtttgtgtggtcaatatgctactcttaggactgacaacatgaggtgattttatattgataaatgcactcacttattgtacactgaattctacatcttgtgtatataaaagtatgtatatgtgcacagtactatatataatactatgtattttgttttctaattgaatcagagctctcgatctatacagattttaagtttgttcatttctttggatttccaaagcaaagaaaagaaaggtgtatatttgcacttaaaagaatgctgacagagtcaat

SEQ ID NO: 653007 - DNA, 504 bp, Homo sapiens
agaaaaatacagtggttataatcttatagagcactatcacatatatagtccattattaaccaaagctaattatgcagcacatgactgtatgctctttgtttttggtatctattgaagaaccctgattaataattagtctgcattggcaaatggctgcaaacttctaaaacataaagggttagcagagttagtagaaagggaaagaaaaatgatcagggtagagtaaaagcagcatgccaaaaagcctccartaagcaggtgaagtgattaagttgttgctatgacaagatttaggggaaaatgtttcctgggacctccaggggaagccacagaggactgtagtgtgatgtcacccatagggaaacagtgagattattattccattgaccttcaagatatctactgcataagtctttcctgcctgaggcgggtatcaatgatgtctgccataaatacaagctggtcgctctgatatgggaggtaaacatgtttaaaagacaacgt

SEQ ID NO: 653008 - DNA, 602 bp, Homo sapiens
tttttagcacagaaaaggtgctcccactgttcccaagctgatagctcactgttagccatcatgctttaaatgaaaatattctggaacagtcttgaactgactgactcctaagtcagacagcctgtcaacatctgaaaatcaatgttatcagtatctcttcyagtgggaggattacttaacaggggtatctccacagtcatccttggcacacctggtcacaggaacacatgatttatacagctgcccagtaggggtttatgctgagagagattttggcagatgaggcataaaatttgaaaatatgctgccaggaagacttgtagtatgaaaaccctgtgttctgcaaacatcagccttctgattttgttaagtctttacagctaaatagaaaagtaacgaagttgcaaaaaagcataaaaagatgctggaaaataaacagattaataataatgagctggcaaaaacaaaggctcaacatttatatatttcattgtatacttcagaagtgaataaacctattggccaagataatattggacaacaagagacacaagtatgaaattacgcacatgaaaacatgttagagataaatccagaaaaca

SEQ ID NO: 653009 - DNA, 493 bp, Homo sapiens
cttagtgggtgattgcttattacatttttataatgtagtaattaytatatatacatagtgctttgagcatcctgacagaaggtattttataattatattatttaattgctcaaacatttgcaaataacacattcataaagtctaaaacatgtaaacatgacacagattctagtgctattcagaaaaccactagatcggaaatactttatgtaaacataaattagcattttacacactcctggccaaactacatgagacctgggcctgaatttagttacctaccctcaggcagctagtagcaagatgctggtatatccatacagagtgcagcaatagacttatgaggcaaaagtgtatggtttattgttgttggctattgttttttctgaagaaaaataatgaaaatcgaagtcttagaaaaacaatggggatgataatgagaaaactgagacctagttgtcgttcttccacttactaagcacacgagcacatc

SEQ ID NO: 653010 - DNA, 597 bp, Homo sapiens
tggaatttcactaagcaattcttgcaaactggatattgctaaagtcaatttaacttgtgatagttaatagacagtcttggaatcatatattaaggttgctagtggaaactagaaggtcaaaggaacagaaaacatacatgattatgcttctgtatgtgctcaacacacactctcaagaaccatagattttaaaagttcctaaaattctgagaaaaaatgaggaagcattctaataatcatcttaagaattgcaaaataattttctactgtgggtacttgagaatgactgtgaattgtttgaacagaamactgattatacgatagttctcatacgaataataattgaaaacagcccaagaataatgcagtttgtcgattagaaagtcaaatatataccatgcattttacatacataacttcttttactcaaacaccatttttatagggaacaaagctgatagcatttattattattattacttgaaaagtcagccctcacacactcaaatgcttccaagagtaaacactacccactgtaaatagaagaagtaaataaaatttgctttgcatttcttcatcaaaaaaaatatttctgag

SEQ ID NO: 653011 - DNA, 597 bp, Homo sapiens
tggaatttcactaagcaattcttgcaaactggatattgctaaagtcaatttaacttgtgatagttaatagacagtcttggaatcatatattaaggttgctagtggaaactagaaggtcaaaggaacagaaaacatacatgattatgcttctgtatgtgctcaacacacactctcaagaaccatagattttaaaagttcctaaaattctgagaaaaaatgaggaagcattctaataatcatcttaagaattgcaaaataattttctactgtgggtacttgagaatgactgtgaattgtttgaacagaacactgattatacgatagttctcrtacgaataataattgaaaacagcccaagaataatgcagtttgtcgattagaaagtcaaatatataccatgcattttacatacataacttcttttactcaaacaccatttttatagggaacaaagctgatagcatttattattattattacttgaaaagtcagccctcacacactcaaatgcttccaagagtaaacactacccactgtaaatagaagaagtaaataaaatttgctttgcatttcttcatcaaaaaaaatatttctgag

SEQ ID NO: 653012 - DNA, 595 bp, Homo sapiens
tgattagtcattgggataatacaaattaaaggcataaggagataacaatagacacctaytagattggtaaacaacaataactgaaagaataacctgacaaagctacatttggtggcaagtttacagagcagccagaaatttcgtacattgctggtaagaatgcaaaaatgatacagccaagagtttagcattttcttattaaactaaacatatacttacgttatgatgccatgagttttctccctaggagtttacccaaaagaaataacactttaattcattaaaatttttatagggatttttaaagtagcttaatttataagctccaaaaataaaaaaaaaaaaaacaactagatgcccttcagccagtgtaaagaaaaacagaccctgatgaatccatgcagtgaatactactcagcaataagaaggagcaaatgactgatacaagtaataataaacatgaatttcaaatgaattatgataagggaaagaagccaggctcaaagggctacgtcgtgcaaaattccatttgtataacatactgaaaaagacgaaactatagggaacgagaacaaatgattgatagatgccaggt

SEQ ID NO: 653013 - DNA, 595 bp, Homo sapiens
tgattagtcattgggataatacaaattaaaggcataaggagataacaatagacacctattagattggtaaacaacaataactgaaagaataacctgacaaagctacatttggtggcaagtttacagagcagccagaaatttcgtacrttgctggtaagaatgcaaaaatgatacagccaagagtttagcattttcttattaaactaaacatatacttacgttatgatgccatgagttttctccctaggagtttacccaaaagaaataacactttaattcattaaaatttttatagggatttttaaagtagcttaatttataagctccaaaaataaaaaaaaaaaaaacaactagatgcccttcagccagtgtaaagaaaaacagaccctgatgaatccatgcagtgaatactactcagcaataagaaggagcaaatgactgatacaagtaataataaacatgaatttcaaatgaattatgataagggaaagaagccaggctcaaagggctacgtcgtgcaaaattccatttgtataacatactgaaaaagacgaaactatagggaacgagaacaaatgattgatagatgccaggt

SEQ ID NO: 653014 - DNA, 595 bp, Homo sapiens
tgattagtcattgggataatacaaattaaaggcataaggagataacaatagacacctattagattggtaaacaacaataactgaaagaataacctgacaaagctacatttggtggcaagtttacagagcagccagaaatttcgtacattgctggtaagaatgcaaaaatgatacagccaagagtttagcattttcttattaaactaaacatatrcttacgttatgatgccatgagttttctccctaggagtttacccaaaagaaataacactttaattcattaaaatttttatagggatttttaaagtagcttaatttataagctccaaaaataaaaaaaaaaaaaacaactagatgcccttcagccagtgtaaagaaaaacagaccctgatgaatccatgcagtgaatactactcagcaataagaaggagcaaatgactgatacaagtaataataaacatgaatttcaaatgaattatgataagggaaagaagccaggctcaaagggctacgtcgtgcaaaattccatttgtataacatactgaaaaagacgaaactatagggaacgagaacaaatgattgatagatgccaggt

SEQ ID NO: 653015 - DNA, 646 bp, Homo sapiens
tgtgtaaagtggctattattattgtcccactattacagaaaaaagaatcaaaagtttaaaaagcacaggtaacttccytaaggtccaaaatcattaagtggcagagctagtactcaaacagaggttccgctgacttcaggtccatatttttccaccacaaaacattgtctcccataaataagtaaagaagttccatgtgaaactgattaaattctgcaagaacaaaattaactaaaccagattttgttttcttttctacaatgaaaaaaaaaacctgtatgtacagggaatataaatattatattatgcttggcactatgataaaatgtaaaacacgaaaactgttgacacattttcaaagctatcagtcagggaggtaaccaggcagtggtttacagaccaaacttaggcctgcaaacacttgaggattcccttacgaaaatgaatgtagatggcaacacaagaatatttacatgaagtgatggaggtaataaaattagcacattaaagccaaagtaactaatatcttttagaacctctctattagaatattgttttcacccaaaatggtttatagattgtgctaataaatacgtacatttttttaaagtatcacttttgctctgttatctacagaaaacatgca

SEQ ID NO: 653016 - DNA, 516 bp, Homo sapiens
tatttacatgaagtgatggaggtaataaaattagcacattaaagccaaagtaactaatwtcttttagaacctctctattagaatattgttttcacccaaaatggtttatagattgtgctaataaatacgtacatttttttaaagtatcacttttgctctgttatctacagaaaacatgcacaagggctagtgcccagttaagatcacccttccaggccattggacaaaatgaattcaatgtatgaacttgttcttactagagctttgcttcaaattagtgattccaagctgtggtctaactctaacaatagtaatgtacaatgttcaaattgccttcacattagtttactcattttattcacacacaaaaaaacttttattttgagtgattatactactaatcacttttttaaaaagataatagcattgggctgggcaccagggctcacgcctgtaatcccagcactttgggaggccgaggcgggtggatcacaaggtcaggaattcaggaccagc

SEQ ID NO: 653017 - DNA, 516 bp, Homo sapiens
tatttacatgaagtgatggaggtaataaaattagcacattaaagccaaagtaactaatatcttttagaacctctctattagaatattgttttcacccaaaatggtttatagattgtgctaataaatacgtacatttttttaaagtatcacttttgctctgttatctacagaaaacatgcacaagggctagtgcccagttaagatcacccttccaggccattggacaaaatgaattcaatgtatgaacttgttcttactagagctttgcttcaaattagtgattccaagctgtggtctaaytctaacaatagtaatgtacaatgttcaaattgccttcacattagtttactcattttattcacacacaaaaaaacttttattttgagtgattatactactaatcacttttttaaaaagataatagcattgggctgggcaccagggctcacgcctgtaatcccagcactttgggaggccgaggcgggtggatcacaaggtcaggaattcaggaccagc

SEQ ID NO: 653018 - DNA, 610 bp, Homo sapiens
gatataaagcaggcagaaaaacaaaaacaaacaaaaaaacatgagaaagctagactgacctagcctcccagcctacatctttctcccatgctggatgcttcctgccttgaacattggactccacattcttcaggttkgggactcagactgggtctccttgctcctcagcttgcctattgtggaaccttgtgatcatataagttaatacttaataaactcatatatatatatgagtttattatatatatcctcttagttctatccctctagagaaccctgactaattttggtaccagaagtggggtggctctagaggaactgaatattaaggatggagttcttatgttagttttggggtttctggggttggctgcttaatacgattaaaccccaaaatgttaaggactcaacttccaatagtatggagaacactgatagtccttggtgtgaactgtttagagagttatgcaaaataagcacacttgacactgctgattcaccacttgtgagaggcaagaagtttagtgactctatacataatagcttagactatatgtctgaatagtctgactcatgtggagctctggcattggctaattaatcatggtgt

SEQ ID NO: 653019 - DNA, 397 bp, Homo sapiens
gaattcgcaccaaacaaggggagcagggcagggcccaggcctctgcatggtctatccagactggtcatccagctgctctggagagaaaagcaggggcaaggagattcatttaattaatttcggctttatctgattcacaaaaaataaaaagactggtactacccaggactgggaaggatgtgggtcagcgggtgttctcaaatttcaacggcgcaatctttgtgaaatargacctggaatgtcctatgaaaataaaaaatgcccaagtccaatcagtcatccctcattgtgagactttaatacagaaatatatatgtgtgcatgcagatctataaacacatatgcacctacatacatgaaatgcatatataggaatatttcttctggccttatttgt

SEQ ID NO: 653020 - DNA, 622 bp, Homo sapiens
tctggaaaagagagagacagaaatctgtcttttcatcttggttaaatttctaattctcctgggtgagagggaagcagactaattacccatcatgcagagcctaattataaagttccttgggtctcaggtcactgaaaaacatccctttacctggttagagccaagaaaaaattcctaggtttgatggaaagacagaatccaactaaaatttggcaaccctgggtccctattgtctcctgggaattttgtagtgttggcagaacaaaagctgtttccacaaatggggaggaaagagattaggaaacacactcaagacaaacgaaatgactttctccataagtatgacgwctcagaagtggtctcacacaatatgggtaatagataaatacaaattaaaaccactgatatcatgttttactcttattgtccagaggccaaagatttaacaatatactgtgatgctggggctgggaggagattgcacctttatagcctggtggtggcagtccagagtgcaacccctagagatggtaacttgacaagacctctcaaaaacactacacacagcttttgagcccctcatcccacttctgagagtaagtcctatggcaacatgtgcaca

SEQ ID NO: 653021 - DNA, 629 bp, Homo sapiens
aaaaaaatgaaataatttttattagaaaagacaaggcatggaacattctatcctcccttccacttaatgagcaggaacaagtgagtgagtgggggtatggatctgctgctaccatttccatcacagtactaatttgcatgtcatagtgtaagtagaagattttaagaaaatgtaagggatttwatggtggttaaaaccaagcccccatgaagacaggatgacatacatttcttaaagatttaggttgttccctcacaaattgtagtggtcaagtgtaattgttgtgaccaaataacagtatacaaggctgatgaaaggtaaaataaaaatgaaaaagatagatgttaatatttactgactacttagccctatacaagtgtcttaaatcttcttttacctcaacccacagtaagaaatatgttttcagagttatctggtatatacatgtgcgtgtaggtctatatgagaaactgaaacaaaaatttcaccatccaatacatacccttactgtatatgatatactctgatattttccattatatttgcatgttattaagttgtttgctacccattatattgattttgtactaaatgttcatgaagaacatttgaaatcactgcctaatgcc

SEQ ID NO: 653022 - DNA, 629 bp, Homo sapiens
aaaaaaatgaaataatttttattagaaaagacaaggcatggaacattctatcctcccttccacttaatgagcaggaacaagtgagtgagtgggggtatggatctgctgctaccatttccatcacagtactaatttgcatgtcatagtgtaagtagaagattttaagaaaatgtaagggattttatggtggttaaaaccaagcccccatgaagacaggatgacatacatttcttaaagatttargttgttccctcacaaattgtagtggtcaagtgtaattgttgtgaccaaataacagtatacaaggctgatgaaaggtaaaataaaaatgaaaaagatagatgttaatatttactgactacttagccctatacaagtgtcttaaatcttcttttacctcaacccacagtaagaaatatgttttcagagttatctggtatatacatgtgcgtgtaggtctatatgagaaactgaaacaaaaatttcaccatccaatacatacccttactgtatatgatatactctgatattttccattatatttgcatgttattaagttgtttgctacccattatattgattttgtactaaatgttcatgaagaacatttgaaatcactgcctaatgcc

SEQ ID NO: 653023 - DNA, 629 bp, Homo sapiens
aaaaaaatgaaataatttttattagaaaagacaaggcatggaacattctatcctcccttccacttaatgagcaggaacaagtgagtgagtgggggtatggatctgctgctaccatttccatcacagtactaatttgcatgtcatagtgtaagtagaagattttaagaaaatgtaagggattttatggtggttaaaaccaagcccccatgaagacaggatgacatacatttcttaaagatttaggttgttccctcacaaattgtagtggtcaagtgtaattgttgtgaccaaataacagtatacaaggctgatgaaaggtaaaataaaaatgaaaaaratagatgttaatatttactgactacttagccctatacaagtgtcttaaatcttcttttacctcaacccacagtaagaaatatgttttcagagttatctggtatatacatgtgcgtgtaggtctatatgagaaactgaaacaaaaatttcaccatccaatacatacccttactgtatatgatatactctgatattttccattatatttgcatgttattaagttgtttgctacccattatattgattttgtactaaatgttcatgaagaacatttgaaatcactgcctaatgcc

SEQ ID NO: 653024 - DNA, 610 bp, Homo sapiens
ttcttgtagagagttcattgctcagggtgactatgttccactatgcttttgttttttaagttttcttaattcagatctagaatatctattcctataaaactgtacaggcaagtacactcctatagaacatatgctcatatgggtttgaatggcaacaaaactcagccttaaatttttatcacaattagagtacaaatacttcagaaacttcatcagaagtttcagattcatggcacctgataatatatatatatatagtctgtaattgtatgattggctttgctttctatttttaaagattaaagggaataaatgggtacagagtgatgcaacagatatcctccatccaaaataaacaaaagtttatataaaatatagtttgcaaataaaattgaaatccaaaaaccatgaacattataaagtattactttmttttcttgtatctgtatgaggtacatgaggtattttaatacaggcatgcaatgtgaaataagcacatcatggggaatggcatatttatcccataaagcatttatcctttgaattataaacaatccaattacactctttgtttttaaatgtacaactaagttattattaactgtaatca

SEQ ID NO: 653025 - DNA, 546 bp, Homo sapiens
gtatggaaatgcctggatgtccaggaagaggtgtgctccacaggtggatccctgatggagaatctctgtcatggcagtgcaggatggaaatgtgaggttgaagtccccacacagagtccccactggaacactgcctaatggagctgtgagaagatggccactgtcctccagaccccacaatagtagtcccactgacagcttgcactgtgcacctgaaaaagccatagacactcaacgccagctgtgaaagcagctgggccagggagctctaccctgcaaagccacaagggtggatctacccaaggtcatgggagcccacctcttgaatcattgtgacttggatgtcagacatagagtcaaaggaaattacttaggaactttgagatttattgactgccctgttgaattttggacttgcatggggcctgcagcccctgttatgaccaatttctcccattcggtatgggagcatttatctgatccctgtatccccattttatcttgaaagtarcaaacttgcttatgattttacaggctcataggcag

SEQ ID NO: 653026 - DNA, 512 bp, Homo sapiens
tacataatattctagaaaatgcaaactaatctattgtgacagaatgtggtttgtatttgcatgatgtaagacaagaaagggtggggaaagggatggcaaagaatcacaaggacacttttagaagtaataaatacacttactattttcatcatagtggtagtttcacagttgtgtgacatatgccaaaacatcaaattgagcacttgaaatatatgccatttattttatatctgttacacttccacaagcctttaaaagaggaagagagagagcaaatttgaagtgacagagatagaatgaaattgctttctgcttgtttctaccatgatgccctcattcaataagctggttacatttcctcatgggtttgtaggacatataatgagaatatatatatatatatatacacacgctatatattatatatagactatgtatgtgttatatatacatatatgtayttatacatatatacatttaatcgtatacatataaacatttaataatacttc

SEQ ID NO: 653027 - DNA, 541 bp, Homo sapiens
gaattggggaataaataggagagatcaacagaaaggccatttgaatcagaaccagcaggcaggaagtatgaaaccatctagcagcctgttctgtaaggacaaaagatcattaaataggcaaattgcagaaagccagggatagtatggtttagctttctttaattcctctttgttgagtttcccattgtcttagaaattattcaggaggtaagacctactggtgtatggcacagcaggaatatcaggcctattaatcrcaatcaagtctctaatgcttgtattaataaatcatgtttaatgtagaataatttctgaaaataatgccacagatcaataaataaatctctaagaaaagctgaagttcccagggtcatatctgagaacttgaggccaggggagtttagacactctaagtagaagacacccaggcaagacttttgtggataaggacaattatacaagttcatagccttctgaaataagcttagttctaataatctcaggaaaaacacaaaataatttagctatactgatggttttt

SEQ ID NO: 653028 - DNA, 606 bp, Homo sapiens
ggcttttgctattttgtgggctagagaaaccacttggaaggaccataaaagttcccagttttatgttggtactaaatatattctttgcatccattaatgtcctcaccaaattttttatcatcaatacaatgtacaaaattatgtatggtgtgattatctgtgatgttctcaaatcccacaaataattattagtaaacaaggactagagcccaggttggagaattgtaattatttattrctaatattcttagacaaaagggaatgccatttttcactactcacacataaaaaaatgcagtatataagtaaatgtttaagcgctgtccaaaaaccactatgagttttggggctcagaaaattataccccaaagtgaaggcctcagaagtagactcagaagcaaagtttctctgaacttctgcccgcctgtctctcgcacctcattcttccccccaatgcaagtcatagaaacttgaattcttcctttccaaggtgggtcatagaaaccgaaccccttttccccaaagccagccataaaacctgaaaacattaccctaaccttccccctcctttctgtgtaaaagatggccataaagaaattctctgac

SEQ ID NO: 653029 - DNA, 592 bp, Homo sapiens
gaattcaggtctatctgatgcttatgtaatagtccaatgggttcaccttgcccgctgcctagacagagcyaatttatcaagtcaagggaattgtaatggagaaagagtaattcacacagagcctgctgcgcaggagacagagttttattattactcaaatcagtctccataagcattcagggatcagagtttttaaagataatttggcaggtagaggcttgggaagtgggaagtgctgattggtcaggttggagatggaatcatagggtgtcaagtgaggttttcttgctatcttctgttcccgggtgcgatggcagaactggctgagccagatacgggtctgggtggcgtcagctgattcatccagtgcagggtctgcaagctatctcaagcactgatcttaaattttacaatagtgatgttatccccaggagcaattttgggaggttcagactcttggagccagaggctgcatgacccctaaaccgtaatttctaatcttgtagctaatttgttagtcttccaaaggccaactggtccccaggcaagaaacggatattttcaggaaagggctactatcagttttgtttta

SEQ ID NO: 653030 - DNA, 396 bp, Homo sapiens
aacagggggaaaccctgtctctactaamaatacaaaaaattagccgggcatgatggcgggagcctgtagtcccagctactggggaagctgaggcaggagaatggcgcgaacccgggaggcggagcttgcagtgaggggagatggcgctactgcactccagcctgggcggcagagcgagactccgtctcaaaacaaaaaaaaaacagcatgttgctccacactgccttgtgttgtctgctggcgcactcttggtgttcgaactgatacaagaaccttacaccaatactgtatgattcttttatatgatgaatgtaaaacagtaaaactcttaaatgcagagagtagaatggtagttactagggactaaaaagagggggtaactgggaattactattc

SEQ ID NO: 653031 - DNA, 396 bp, Homo sapiens
aacagggggaaaccctgtctctactaacaatacaaaaaattagccgggcatgatggcgggagcctgtagtcccagctactggggaagctgaggcaggagaatggcgcgaacccgggaggcggagcttgcagtgagkggagatggcgctactgcactccagcctgggcggcagagcgagactccgtctcaaaacaaaaaaaaaacagcatgttgctccacactgccttgtgttgtctgctggcgcactcttggtgttcgaactgatacaagaaccttacaccaatactgtatgattcttttatatgatgaatgtaaaacagtaaaactcttaaatgcagagagtagaatggtagttactagggactaaaaagagggggtaactgggaattactattc

SEQ ID NO: 653032 - DNA, 396 bp, Homo sapiens
aacagggggaaaccctgtctctactaacaatacaaaaaattagccgggcatgatggcgggagcctgtagtcccagctactggggaagctgaggcaggagaatggcgcgaacccgggaggcggagcttgcagtgaggggagatggcgctactgcactccagcctgggcggcagagcgagactccgtctcaaaacaaaaaaaaaacagcatgttgctccacactgccttgtgttgtctgctggcgcactcttggtgttcgaactgatacaagaaccttacaccaatactgtatgattcttttrtatgatgaatgtaaaacagtaaaactcttaaatgcagagagtagaatggtagttactagggactaaaaagagggggtaactgggaattactattc

SEQ ID NO: 653033 - DNA, 583 bp, Homo sapiens
aagacggaaatatacacatacatatacatattcatatattcatacacatatacctacatatatacttgtacatatgtatatgtttctatgtatatatgtgtgtttgcatatagaatatgtgtatcatgttacagaggtaaaaactgttataaaatgggaagttttaccttggctcttaccagrgagtgattttagggcaagatgcaactttctctctctctctcttcaaactctttgtgcctctctctctctttgtggctctctctcagtcattaatttatttgctaagaattgttttagcagtaaacaaaagacatgcaaaattcttcctctcataaaatttgtgtttaaaaaggagaggacagacaatacacacaaataaatctagaaagccagcagggtaaagtgatgggcagctaggcagtgaccatggggaaggtaagggtggtgatggtgtttgaggtacatttctcaggcagctccccaaattgtgattgaaagtttcctccgatggtgggagaagcctaatgcattgtttggtttcagtatagcattttcttttacatatttattcataatgtaa

SEQ ID NO: 653034 - DNA, 328 bp, Homo sapiens
cactgtggtccatgaaaaaggagaaygcccttctctcccaaagggtaccatgcggtaacttgaacctttaagtagcactttctgtgtaattctagttcccatctctctgtccactggatccaatatcaaactaaaggactagaacatggcacagagtatggcatcctctccctctccctcatccaacttacctttccctctaactgcttaattgtcaatcctgaaaactagttttctctacttttagcaaaaccaaacctcatgcatatgagtcaccaactcactagctccataaacactatattctggatctgactttgaatttttc

SEQ ID NO: 653035 - DNA, 328 bp, Homo sapiens
cactgtggtccatgaaaaaggagaatgcccttctctcccaaagggtaccatgcggtaacttgaacctttaagtagcactttctgtgtaattctagttcccatctctctgtmcactggatccaatatcaaactaaaggactagaacatggcacagagtatggcatcctctccctctccctcatccaacttacctttccctctaactgcttaattgtcaatcctgaaaactagttttctctacttttagcaaaaccaaacctcatgcatatgagtcaccaactcactagctccataaacactatattctggatctgactttgaatttttc

SEQ ID NO: 653036 - DNA, 592 bp, Homo sapiens
aaattctgggaacttggagtaggtccacctagaagtagaagcagcaaaacccaaaaaaccaatacaatttttaatagtgttgtttaatttttaagtgttatttactagaaaataaaactatactgtgtttaatcatcaagcaatttttaacaaaaaagtttagcactaggaataggttaaacttgacacaatttgctatcatagaattatatatatgggtaaagggtaccagttagattcccattggcaaaaacctggtgattttcattctgtggtatagagatcctagttaagaggcaggaattatttaaaaatgactttaattttgatcatttaattataggacctatttattcacttgtttttaacttattcacaaatctkagtcatgagcattattaatagataatttgatgccttgtcacttagcagtacaagcatgtttatttctgacttttaaactcgaattcacccttcttgtgtttttctattcagtcgtaacccactccttctacatctacaaaatttggtgaggcatctttgactttcatcatattcagacatgctagcttcaagaactttcctattcctc

SEQ ID NO: 653037 - DNA, 611 bp, Homo sapiens
catgtgcctataatcccagctacttgggaggctgaggcaagagaatcacttgaacccaggaggcagaggttgcagcgagccaagatagcactcctgcactccagcctggatgacagagcgagactccatctccaaaaaaaaaaggaaaagaaaaagaaaaagaaaattgctgtgaacaatttgaattttttgaactatatgacctgcctaggtgatttgtcggaggttataacaatcctgcttctctgcacatcctagggaagttatctgaataagatcgtgtagtgtgtagtaaaggaaaatattgacagtttaccctcatggttgaattaatttttcaattatgttgtcaaatagtcactttttctgtcaagtggaatcttctctctttcaatgtcgtmtgaattttttaccggacatggtaaccttatagtatcttttcagtgtcttccaattcataaactaggcagcagaatgatatagtgacatattttgctaacagcttctaatttggaaaacaagtgacattagctttaaaattgcacatctggaaaagttcacagatgaacagttttttttttttttctttaagtggccagattaaggagaca

SEQ ID NO: 653038 - DNA, 551 bp, Homo sapiens
ttacagcttgtgtacataacagcagtcacactaggtgcaaagttaaaacccatttaaagagaataaagcttcaatgaggaaatatggaaataatgacaagcctaggaaaagaggtctaactaacatgaatgaccacacacacacacacacacacaccacaattagagtctccacaactctgatctgtaacttaaatgaatgtcaaattgcctcacaggaatttcagatcttcagtctgaagttctggtagataatattgaacatattcctcarcaacagcatgcatgcttctaaatagccactagaattcattggaaaagagcaatatacaaacaaacaaaaaaccccagaaaactggcaagctgatctagatggcaacattggatgaactagaaaactgagaccactggatactaaccagtttgagataacagtatcagctggctttctttggaagagagagagaagcactaaataagtgaggttctcaattttaataagttgcattattcaaacatagaactaaagctattagatttttattaaaagtg

SEQ ID NO: 653039 - DNA, 526 bp, Homo sapiens
acagttagtaggccgggtgcagtggctcacccatgtaatcccagcactttrggaagctgaggtaggtggatcacttgagcccaggagttcgagaccagcctggccaacatggcgaaatcccatctctactaaaaaatacaaaaaattagccaggcatggtggcacactcctgtaaccccagctactcaggaggctgaggagggtcagctgagcccaggaggtcaaggctgcagtgagccgagatcgcaccactgcacaatagcctgggcaaccggagtgagaccctgtctcaaaaaaaaaaaaaaattacagttagtaaatgcccgaactgggattcaaatcgatgtcttggtctccagggtccttgcccagttccaatataccctggggcctctctgcatttccacctttggtggtattccccatccaggctcccatgactgtggtttctgttccaggttctcatttctttgagattttattttatactttctcttattcttctctctgaactatgtggattatg

SEQ ID NO: 653040 - DNA, 614 bp, Homo sapiens
agtgaataaaaataaaatgttataagggctatcatataattttatcatctctcgcttgatgacaattttcttgggactcagcagcatacctggttaatctctgaaaagtaatgcatggtcaacaaatatttttgaataaattaaagcaataatgattcactctaaatgtatgtatatttcctaaacgtggatttcstcttatgactgactccaaaatcctaagatcaaaattcctatcacaaaatttcccatagagtgtatcatgaaactttgaagcactttggcaggacattcttcagtcatgagttgggcaaagatggaatagtctacctctgaaagcagtaaatttcccattgattggaaatgtttaaagacagaatagacaacagcttggaaggggtgtcttagagaaaattctgatttcctttggatgagaacactggattagaggttggactagatgtcttccaatagtcctaattaggacatttcgtaagactcagattgtttgtagagggactcgtctatcagttgagtcaatcattcactagtggggagagacacagagtgggagacacaggcaagtagctttgaggaactcagcctaacagaga

SEQ ID NO: 653041 - DNA, 531 bp, Homo sapiens
acagatctgtgatccattttgagttaatttttatgtatcgtataaggaaggagtccaaattcattcctttgcctgtggcaatccagttgtaccaggatggttattctttccttttttgtattattttgatatcctgtcaaaaatcagttgaccataaatgtgaggggtttatttcgaactctcagttytactccattgatttaactatgcttatgtatcactctgtcttgattatggcagatatatagtaagttttcaaactgggaagtgtgagttatagctttgttcttctttttcaagattgtctggctattctgggttccttgaattttcacgtgatttttggattagatttttttttttttttttttttttttttgcagaaaatgacaaagaaaaagaaaactttgctggtattttgataaggattgcacattgagtctgttttcaaggtttatctatatatctatatagatataccaatatagatatatagatggtccattccttgaggaatgttgccatattaag

SEQ ID NO: 653042 - DNA, 344 bp, Homo sapiens
caaacaagataaatataaagaaaaactgtatctggcaccatttacttttgaatactattccccaccaaaagaaaccaagcctccttagagaaatggctgattccaggtctgggactagcaaagtacaaggtaagttgaaacatctgtgccagaaagtaagaaagtgmtcaaaaagacatgtcaaaggggctcaggcactgatttgaaatagacaccactggcctaaactgggacaattcatgcaacaaaataaacaatagtaacagaatatatagagtaaaattaaaatacataaagtactgaaataacaaaaaaaaaaaaaaaaaaaggaaaatggaaagcct

SEQ ID NO: 653043 - DNA, 278 bp, Homo sapiens
ctacagtatcttctgcctatgagtccctgaagttaaaayggagttcttttctttcaaggtacaacgatggtacagacattgggtaagctttcttaatccaaagggaagaaatttcccagaaaaataacacaaatgggaccacaggcccaatgcacatccaaaacccagcagaccagtattcaatctcacagctacgaaattatgacgagaactatcagaaggacagcattaaggagatggtatttaaccatttgtgaaggatctgcccccacccctgt

SEQ ID NO: 653044 - DNA, 278 bp, Homo sapiens
ctacagtatcttctgcctatgagtccctgaagttaaaacggagttcttttctttcaaggtacaaygatggtacagacattgggtaagctttcttaatccaaagggaagaaatttcccagaaaaataacacaaatgggaccacaggcccaatgcacatccaaaacccagcagaccagtattcaatctcacagctacgaaattatgacgagaactatcagaaggacagcattaaggagatggtatttaaccatttgtgaaggatctgcccccacccctgt

SEQ ID NO: 653045 - DNA, 278 bp, Homo sapiens
ctacagtatcttctgcctatgagtccctgaagttaaaacggagttcttttctttcaaggtacaacgatggtacagrcattgggtaagctttcttaatccaaagggaagaaatttcccagaaaaataacacaaatgggaccacaggcccaatgcacatccaaaacccagcagaccagtattcaatctcacagctacgaaattatgacgagaactatcagaaggacagcattaaggagatggtatttaaccatttgtgaaggatctgcccccacccctgt

SEQ ID NO: 653046 - DNA, 634 bp, Homo sapiens
cttaccttgcctttgttttttattttcttcctttcttatctatcatctcccttttttaccatccaattctgttctcaagaaaatgaatctacttctagaataatgggttctctactgctgttaattccagaaataaaaaagttttactaaaatttaacatatataaagtgtcctttcatttccccagctctccctacaagaaggaattaagacggagcctcaaaaaacaacagtcatacatctacatttaacacatctatacaattcactgaaagaacattttggtagaaattgccgttttgcatcttgactgatttaactgcctaatgacaagtcttaccacttaaaatatagtctgggggaaaaaattcckcccacacctgtgattgcatattattcactgggcttagggttgccagattaaatagaagatgcccagttaaaattgaattccagacaaagaacaagtaactttttagcataagtatgtctaaaatattattctaaaagttagtgtttgtcatctgaaattcaaatttaactggtgtcttttattttgatttgcaaaatctggtaatgccaattgtgcttaaggatgaaataaaagtgcttgtatgacctgaaaggtgaacag

SEQ ID NO: 653047 - DNA, 644 bp, Homo sapiens
tagccttttcctactggcacaactgcccgcattcacctgtgcaagcttctagtttgcctttctatgtctgcagctcaattttccaggctgctctttgttagaaaagaaatgattttcaggctactttcattaaaaacaaaaacaaaaacctgaccgaggacttccttaccctcactatctgcctaaataatttcttttcgactcatatcaacatgarcacttggtgtgtttgagatgacaggcaagtcacatgagggatgacaacacagctaacttagggaagagcatgctgtttgagtttgtggtcacaaggtagcaaaatccttgcttttcatagctcaaagcagccaggaacctaaaaggaaagaaattatatcctaaccaaccctaaagaaaataacaaaacaacttagtcaatgtgtaacaaccccagaggaagtacataaaaatggtggttattctttcagagtaaaagaataaacagtaataccagaggcagtttttttctccctgtttttaaaacgttgttaataaaaaacttattttcaattcaaaagtaaccatgattattgaaggaaaaaaagagaatggtaaaagaagaaaaaagacagtcattcatagtcccatgattccccaaataacaa

SEQ ID NO: 653048 - DNA, 432 bp, Homo sapiens
gggcttcttgtatttggatgtctagatctccagcaaagccagggaagcttttctcgattattccctcaaagaatttttccaaacttttagatttctcttcttcctcaggaacaccagttattcttatgtttggtggtttagcataatcccaaacttcttggaggctttatttttttaaaattcttttttctttgtctttgttggattgggttaatttgaaagccttgtctttaagctctgaagttctttcttctacttgagtctattgttgaaattttcttgcatattttgcatttctttaagtgtgtttttcatttccagaagttgtaattgttttttcattataatatctctttctctggagacgttttaatgcatatcttgaattttttttttaatttaagttstttttcatctttctctggtatctcc

SEQ ID NO: 653049 - DNA, 574 bp, Homo sapiens
tgtcttgcaacattaactgcaatgttcattctcataaaagccataattcatggctgctccacagcccttttctttcagcaattatgcatattagaggaaagtttgaatacataaaamccaaatgctgatagaaaagcaagcctcataaaagacgcatttactcaactagttttcctcaaaggaaaatgtgaaagctaactaggctgcaccagtccaaggtgtccctagttcaagggagttggagaaagcatgaaaactacagctgcagggcattatacagggcttactgcctgggattttttgtcaacccattggcagtcaactccatcaccagaggacagcacctttggtggagggaggatgttgggacctactactggctctcctgggaatttaatgcaaagttgctcttttgaaaggagagtgccaggagagtacctcaaacacactcttttttcttcattcctttttttcttaatccctgtttcttctaactttcatagggtgtcatggaaaccaccacatgagaactgcccatgccactttgatgaccttcctatttccagaatctagt

SEQ ID NO: 653050 - DNA, 551 bp, Homo sapiens
tggacccagccatgggtgacgactctgcacatcatgagctatttgtggacttggcccctctagggagggttaaattgagaccttgccatcctgagacagtgccacgctctattgagtcatgagggcgttattacatgagggaagcctggtccgtagctttgggctcgggcatcttcctcaggatgtcagtgggtttgtgtagaggattctctgggtcacccaaacttgcacactttgggaacccagcaaactttctttctttttttaaaaaatctattctttttttcaaarttcagtaacttgcccatcttttgtggtttgatttgttttgttttgtttttgtttttaagagatggggtcttgctctgtcacccaggctggaatgcagtggtgccatcacagctcactgcagccttgaactcctgggttcaagagatcctcccacctcagcttcctgagtagctaggatcacaggcgcatgccaccatggccagctaattttaaatatttttttttgtagagacagggtcccactatgttgcccaggctgg

SEQ ID NO: 653051 - DNA, 566 bp, Homo sapiens
tttcaatagagaggattatgtaactcatgttttagttaggggaggtaacagtaattaatatgttatctgttaaattacataaacttttttttaaaaacctctagcattagtcaacaacaacaaaaaagtaacctcaatttatggctgaatatgcttgacttcacaatgccaagaaaggttgtgggctcatttattttttcagataactagacacatactatgacaaagctttttttagtaatattaccagggaactaatattctgaatttactgtgattggcacaggaaaatattaagagtgagagtgatcaggagtgattttaatgaaggtgaccagaaagcaactatatgattaccttttaaatagaatgctattgcaaatgtcaaactttaaaygggacatttggctttatacactaaaaaaaaaaaaaaaaaaaaaaaaaaaggcattagtagtttcccaccaagaccgctacaaataaattcagaacatttatagaaatccaacattcacacttccctgtaactctaacctattgaaattagatgtaaaaggaagaaaaaa

SEQ ID NO: 653052 - DNA, 537 bp, Homo sapiens
acttgttaaacatattcacttcctctctctaacccttcgcttatctctttgggatgcttaacctctcaatatatctttctcttctgtcttccaccctccctaacctatacagatggaccttttggctcaatggggaactactattaaatgtatatccaaaggcctttttcttgatctctcagtctctcatgacccagtacaccatcctatggggcttccctcaactcctatgcacccactcttaagtcctctattcacttcattcattgcattcacattgcaagccccctcacacttgtctcagcttctcaatcataatctcaaagacttacaatttccctggtcctctgccttgatcagatagtaagtaacttgctcttatgttcacctgatttaacctcttctcaagaagactctatatcagaaactttgtttataaaaggaaatattgtaaggacaaatttgtaataataatttactgtttmaattactgtataaaagataaatttgtaagaataaattactgtttccttaggc

SEQ ID NO: 653053 - DNA, 663 bp, Homo sapiens
gattgattactatgcatgtagcaaaaacctaaagcaatgctttgtataagctgcaacagagcattctcctcaggcctgggccgaaggctagcctctgacttttcctgacatgccccrtgccccacaatctaattcaagggatcttaataccttctggcaagtcacataaaggaataagtcaaggcagggggacactttagagaccctgccaatgacagactttgaatctatttacccactcagctgcatggatatggaagaaagagaactctgaccagggtttgtgcatccccccagcattatggcccactgtggtgctctcagtcagaccagcggcttatctttccttgactggtagctaagtggaaggcatggaaggcaaatagaggttgacttggtgaaggaagaaaagaaactgagttatttatgtctgcgtatactatatgcaaggctctgggggaaagcaaaaataaatcagatttttatgcagactagctttaaaggggctggctcatagttttataggacagagggagagagaaatcttaaatttgaggttgaaaataattgatttgagatcatcaacagctgggagagagagctcagtagtgaatttcttgatattgaattccatcataaagcatttgcctctaacacaaggtt

SEQ ID NO: 653054 - DNA, 595 bp, Homo sapiens
caaatgcattttcaagtaccgggtgtaattcaatacacatgatcatgaaaaataagaaaataaaaaacttaatatgtgtctctgagctactaagaaaataagaaaaataagaaaataaaaaacttaatctgtgtctctgagctactaagagtgtattacagtatatttaaatcactgataaaaagaatggttctcaaccttccttaggatttctaaatttttttctgatctgtatagggccaactgagtcaaaagtttttttgtttgtttagtgttgttttgctttaaagatggaagctcatctacaggggcaggaagcttacaacatgaaatatataagtattatctctttattttatatcccaacctacagacaggataatttttataataaaaactccagaaattgttactgcaatgtacagctgcaaggacccaaatcttgttctttcaartaggtatcaaagaatagacctgggttcttcaggagccctggaactaccagacagccctgacaggagaccttctcaaaaagtttggcattggtttgagttctagaaattcttgtcctgatgtaaatgactggaaaatgagt

SEQ ID NO: 653055 - DNA, 518 bp, Homo sapiens
aaaattcacacatgtgtggtattctctcagttctcttaaccatatattagaattttaaaaaggcaaacatttctgtttatagaaaaatgtcaagttgaatacagcttaatttactgactccctaaacaggttctcaaatgaaaatagtggataaactattacttaygtgagttcaaacactagggggatttgtgaaatggaaagagaaaattgtcatattaaattatgttttacaaatttcacaggcatgaaacatagtgctgtctcttaacaaaatatataggttttttatcagctattaagggaatgaaaattacatgaagaaaataggatacaagaactatgtgtttaacagtgagttatcctgttttcaaaaaacaaagcaatccatgcctggttatatatccaagaaaaatgaacacatatgtccaccccaaaatttgtacgtaaatgttcacagatgcactctttacagtagtcaaaaagtagaaataactcaaatatccatcaacacataa

SEQ ID NO: 653056 - DNA, 570 bp, Homo sapiens
ctacatttttcatatatatatatatatatatatatatatatatttacacacacacacaaayaacagaaaaacaaaagcaaatggaaaaacaaagtgcttaaggccaaagctttatttttatatttgcttttgtttttcagttattaaaaatttaactgcacctttatttctatacctaatctatggcaatacatattggtatggctggactgaaactatttatgttgatgtggggaacctaggctgagaattgagttacctaccagtttcttcagtagtttctaagaattaaataattgatgtgctgtgaggaagcggtgaaaagcgaaagaagcacaccaattcaaacagatctaatggctaggtagaaatgtaataaatgtctaaagcctactactccttaggcttcaaggcaataaagacattcatggttttgaaagaaagagaggccttggtatttttcccacattagatgactggagaccttagaaaattccgtttcaataaaatgagatgagtttaacatagattgaaatctgtcagagatagacaaaattaggctgggaaaaa

SEQ ID NO: 653057 - DNA, 350 bp, Homo sapiens
ggaagtggcgatgagtccacaaaacaagtgaatgtgctcatgtgaaacaagactcctgcccatccatgtgctatgccaatgtaccaatactcaagactctggattcctctttaggagaaataaaaggtcctgagattgctttcaaggtctattcaaggccattccctacrccagcctttttgaaggtggactggtgtgtacaacccttggtcaaagggatgtctcatgaggagatgctggacaaataggctgcagtatcttggatgtaacaaacccctcatccagcaagatggaaagaggggtggaaagagaatgaaattggctatgacctggggcctctttccaatcct

SEQ ID NO: 653058 - DNA, 350 bp, Homo sapiens
ggaagtggcgatgagtccacaaaacaagtgaatgtgctcatgtgaaacaagactcctgcccatccatgtgctatgccaatgtaccaatactcaagactctggattcctctttaggagaaataaaaggtcctgagattgctttcaaggtctattcaaggccattccctacgycagcctttttgaaggtggactggtgtgtacaacccttggtcaaagggatgtctcatgaggagatgctggacaaataggctgcagtatcttggatgtaacaaacccctcatccagcaagatggaaagaggggtggaaagagaatgaaattggctatgacctggggcctctttccaatcct

SEQ ID NO: 653059 - DNA, 491 bp, Homo sapiens
atatgtagacttttcagactggcttctttcacatagaaatatgcattcaaatttcctccatgtctaatcatgactggatggcttatttttttacccctgataattatgtcattgcatggatatagcagagtttgtttatctaattaaggaatgattacctattaaaggataagctgggtgcttctaagttttagtaagtaagaatatagctgcacatgcaataaacatttgcatgcaagtttctgtgtggtacagtatactatttctttgttcttaaatacttttcactggtgtgaaccaatgagatgctaacattgcattgctcgtacttggttggtttctaaactttacttacttttacaatttttaaagagaagtttctattgccagttttttaaagtgatatgctctgctggccttgacataacaayacaccatcattagcttttaagtccttaatatgctcaaaaaattagcgagcaactatatcc

SEQ ID NO: 653060 - DNA, 394 bp, Homo sapiens
tcttaccaaacatttaatcaggaaattatatcgattctgcacaatcaatcacttccaataataaaagtaaaaaacaagttattctggaaagagggaccatggcacaagaaatgtttggcacagcacaaccagtccccagagaccaaagctgggccatgtcttcaaagcccagagtgtgcatagcytgagtcaagctgaaggaaggaataaaaaaaaatggggagaaagtcaggggatatatgatgaagcaaaatcttttatgtctgatgttctcagaatgaataaaattataaaatgcaaagtgcatatatcacagtttcagaagcaatattggtcccactgctgattttctaaaatggagaacagatcaacctctacacaaactgatagtgag

SEQ ID NO: 653061 - DNA, 628 bp, Homo sapiens
tctcaattctcgcaaccttttgtaagttgtcctcattttatggaaaaggaaactgaggctcagagatactttaccatgtccaaaaatctaagctctacagaaaaactcagacaagcaaaactagatgtacagggatgtatatggtgcattattatagcaaattaattgaaaacataccagatattcatcgttaggtatttgttaaataaattatgatatatttatacaatggaacactgcataaccttttacaaaaygagctagatttataagttctgataggaaaatgagtttagaatatattgagtgagaaaaacacaagttccaaaatgatatagatagtacaacttcaaaagagtttcaagagactccaattttatatacatatagatatattatatatattgtatatacaggtagtcctaggattagtaagatttaacttaggatttttcaatattacgatggttcctatacaaccattctgactttcactttcagtacaggattcaataaatacaaaaagtgttgagctattcaacactttaatatacaataggctttgtattagatgattttgcccaactgtgggataatgcaaatgttctgggcacatttaaggtagact

SEQ ID NO: 653062 - DNA, 552 bp, Homo sapiens
tgatagtgaggtggaatttcaactctatagccgaatttattatgcccaagatcttgatgatgtcatcagggaggaagaacatgaaaaaaagaactctgggaatttggaatcttcgagtagtaaaccaaatcagaagaagctaattgtcctttcagatagtgaggtcatccagctgtcagatgggtcagaggtcatcamtgtctgatgaagatagtatttatagatgtaaaggaaagaatgttagagctcaagcacaagaaaatacccatggtccttctgcttttcttcaatctaatgagctgtttgataagaaatgcaagagtgatattgaagagagatcaggtgtaatccaagaggccatgattatagaggtcagttcaagtgcagaggaagagagcaccatttcagaaggcaataatgtggaaagctggatgctactgggatgtgaaatagatgataaagataatgatatccttctcaaccttctgggatgtgaaaactctgttactgaaggagaagatggtataaactggttcatcagtgacaaagaca

SEQ ID NO: 653063 - DNA, 593 bp, Homo sapiens
atgtttggtggctatgagactatagaagcatatgaagatgatctttatagggacgagttatctagtgaactgagtgttgatagtgaggtggaatttcaactctatagccgaatttattatgcccaagatcttgatgatgtcatcagggaggaagaacatgaaaaaaagaactctgggaatttggaatcttcgagtagtaaaccaaatcagaagaagctaattgtcctttcagatagtgaggtcatccagctgtcagatgggtcagaggtcatcactgtctgatgaagatagtatttatagatgtaaaggaaagaatgttagagctcaagcacaagaaaayacccatggtccttctgcttttcttcaatctaatgagctgtttgataagaaatgcaagagtgatattgaagagagatcaggtgtaatccaagaggccatgattatagaggtcagttcaagtgcagaggaagagagcaccatttcagaaggcaataatgtggaaagctggatgctactgggatgtgaaatagatgataaagataatgatatccttctcaaccttctgggatgtgaaaactctgttactgaaggag

SEQ ID NO: 653064 - DNA, 356 bp, Homo sapiens
gtaggaagagaaattaacactaagaaaaagtcttcagtatttttcaacttttttttttacattgaaaaggacaataactataaatttacatccagcttttctcgctgctgaagttgttatcagaatcttcctttggacaaaacatcacaagctgactgtaaaaacaaaagcgccatcattgaagccctgaagaggcagggaattgggcttcagcaaaatacaggtaaagaatccatccggtataaatatcagaagacagatttcctaaaacaagtgaaagagacatcaaaaattttaacrtaatcacaatgaaatcattttttaccacttttacagtgatgtttgaagtggactgt

SEQ ID NO: 653065 - DNA, 549 bp, Homo sapiens
tggaacctccagggggaggtggcagatggtccaccaggtggactttgacagtccacagaactggccaaactgactggtggaccaggcaatttttagcgatgattgcagtgtgagccagagtgcaccagccatatggcacagtgccagtcatcactcctagtgacattccaaccagagaagcaatacattcattgctggaagggggttgagaggcaccggggagaaagtgaagaataggcaggcaagcggsatggaatagaacatacccacaaccccaatctaacaggttccaacatgtctgaacaggtgactagtaaggtggcttaacctttgttgtctgcacacccgggaacattgccctctgagcaagattttatttactcaaagaagtaattaaatctggtggcatagtgctaatcaggatagcattcagcactcggagctggaaaattctttctctcccctttgtaaatgcccaaaccctgggcatcttattattcaagtttctaattaaaaagaaacaggaacggttcaataacctggagcaat

SEQ ID NO: 653066 - DNA, 533 bp, Homo sapiens
ggttttatgcagaaatgtggagatgggggtaaagttacagtaatatttttaggttttatggctggcttttagctttttataggggaaagggatttctggtttctatgacctgtcttggggaagaggaattccagtttctatggctaacctcaggtgagaaggaagagtcagaaacaggagggcaggaggtcagagagagctgcttctgataccattcattttggggtattgttttctgacagcccacatcactttttggycatgatgaataatggcattgtaaacatttgtataaaggtttttgcatgaaaatatgttttaatttctcttaggtatatactagaaagaaactcttaggtatatgctgggtcatatagtaaatgtacattaaaccatttgaaggaacaaccagctttttttccaaagtggctgcatcattttacattcccatcaggagtatatgaagatttcagtttctccatatacctgccagcacttactgtttgactttttgattctaaccatcctagtgg

SEQ ID NO: 653067 - DNA, 417 bp, Homo sapiens
tctgcaaatttgggaagcgctggtctggttgatctatttaccaatacagttgtaactcatctcattgtgcggctgtgattgacctgggtagacagtgaataatgaaatgccctataacacttttaaggacatatcctgctgcattgaaatagactatatgaattacaaaataggaaataatgattcatgggttcatcactttctagttaataaaaggtatttgcaaggctgggcatggtggctcatgcctgtaatcccagcactgggaggtagaggcgggtggatgacttgaggtcaggagtttgagaccagcctggccaacatggtgacactccgtctttactaaaataatayaaaaattagccaggcgtggtggtgcaagcctgtaatgccagcacttcgggaggctgaggcagg

SEQ ID NO: 653068 - DNA, 396 bp, Homo sapiens
agaattccagagacgagacactgagacttgcctagctttatcctaagagtgagtgacaggttactctttctacctcattgggccactttctgagtgatgactgctatgtatcccagatggcaatattcacrtttctgaatctaagcacttttctttcttttctccttgcccgatcagctggacggccaaccgccatgtgatgtaagcctccatacgaaagcactgttgcagatagaagaagaggtggttgctgctcatgtagatctataaatatgtgttgtatgtcttttttgctttttttttaaaaaaaagaataactttttttgcctctttagattacatagaagcattgtagtcttggtagaaccagtatttttgttgtttatttataaggta

SEQ ID NO: 653069 - DNA, 559 bp, Homo sapiens
ataaatggaatcatacaacatgtgggcttttgtgactgacttctttcacttagcatgttttcaagtgagccaagttgtagcatgtattagtacttctctcctttttgttgccagataatattctgctacatgaatgtaccacattttatttatcagttaatcagttgatggacatttacattgtttccactttttagctactatgaataataccatacaatgtcgaataagtttataaaaaygtatgtccacagaacacaagttttctgtgtggacatatgttttcatttctcttgagcatgtaggtttggaattgctaggtcatgtagtaaccctattctttatctttggacaaacttccaaaatggctataacattgtatattcccaccgacagtgtacaagggttccaatttctccacaccctttccaacactttactatctctctttggatgtgaaatagtataatattgtggttttgatttgcatttctttaatgacaaatgatactgagcatttttgtgtgtttattggccatttgtatactatcttaaaaga

SEQ ID NO: 653070 - DNA, 582 bp, Homo sapiens
agaagaatgttcagctaaggaatggataccattcagatatgtggatggggtagtgggaggaagaggaaagagagcagtgaacctgccataaacaaaaatgctaggagagaaatgagacagtatatggcaagaagaccagaaaggcggagtaggatgaaatactgggggacatgcaaaaaaggcacagccatttctgtctatatggccttgtatgtttctgtctgtaggggccttgtatgtcaggctaaggaatctagacattatttggtagggaataaaaagctattgaagttaggaagtaacataaatagagatgataatttactcaaattatccaaaatttaactagggtaggccagtgattttcaaactttaatgtgcatatgaatcacctaggaatattaaacatgtctgactcagtacctttggagtggggcctgagattaggcgttgctaataagctccctgatgctgatgccactggtctttggaraactctttgaatgtcaaggatgcatttatctgaggtagcctgatggaggagaacgatggggtaggaggtaggcagacaagatggccaga

SEQ ID NO: 653071 - DNA, 332 bp, Homo sapiens
aattaagttttttaagagatgaggtctcactctgtcgcccaggctggggtgctgtggtatgataatggctaagtgcaacctcaaactcctgggctcaagggatcctgcctcagcctcccaggtagctaagattacaggcacgtgccatcatgcctggctttttttttttttttgcttttttgtcgattcagagtctcatactatgttgaccagactggtcttgaactcctggcatcaagcaatcctcctgccttggcctcccaaagtgcttggattacaggtgtgagtcaccactcccagccaactgctgkcatttttatctttgttcctat

SEQ ID NO: 653072 - DNA, 586 bp, Homo sapiens
ccagtagtcaaagccttcactgtgaatggatgaagggatattttcttgaataatttaagttgacttatttcagtggttcaaaamatttcttcaacgcttaaccatgactcaggcacctaactattatactatgtcctgtaacagattgttgtgcattcatttattcaacaggtatttgtgcagctaatttattgagtacagcattgaatcgttgatggcttaggccacagttgaacattccattttttatgttcattcattcattcatagcatattccatttttaaattttcagttcattgcactttaaagtttgaggttcttgcgaagtacagacttttgggtttaagttttgttatttaatgtcaaccaccacaggcgcattggccagtctgcttttagaattttcagacatacatacacaaaacattctcacaagacaatctacttattttcttttttattcctgtgtttcttaacacaggattaatgttcagatctcttttggagcaaaataatcctctgaatttttgagatgtacccagtgacctcagtctgagtatgtatactgcattaaaaaatgtaac

SEQ ID NO: 653073 - DNA, 599 bp, Homo sapiens
caggaactgaatctgctggcattttggtcttaaacttcccagccttcataatggtggaaaataaatgtctcttaagccacccagtctgtggcatttttttccagcagccccagctaaggcacagcccatatctaagcagttgggaaggaggagatttgggacttatactccrgcaatcttgctccatgctgcagcatctgtgccctttgtggcatgagtttagcgctaaaatgaggagtcagtggaaaggtgcttgtttcagctcttcttaccacttgtgtaggaatatcacttttatgatttttttgggcccagatgtattaaggagacagagaggaccatgaaagtccatggaagatggtcagactaaaaagattcaagatgaaacctccattacacatggaatattgtgatatggggagatggtgcacctaaaagtaatggaagattctttgaagcaaatgaagctatggggaatatggttttgtggagggacatcctaaacacttgggcatctgctgaattagcaggcaatgctgactgaataagccaacgatgtcacaaataaaaacataacacacaacatctgcttacaaacc

SEQ ID NO: 653074 - DNA, 650 bp, Homo sapiens
gcacccaggctgaagcacactcatgcagaagggtgtgccctggcaaatttttaataaatggacagttagatacataaaaagttctctttcttgattcttggtgctcaccratcactgaggaatcccttctttgagcagcacaaaacaagaagagctggttgacaaaacattttcttacaaaggtgtgtcaaccctgagcttggaattaagaagttaaaatctgtgatttatatatacatagatataaaaatagatgatcatactaagactaaaaaagtgaaagaaatctccatgtcaatactatatatatatattttttgtcttgactttttttttctgttgtgagttgttttgtaagagaatgcccttgtgatgcagaaaccaactgacacaaagtaaatagttaaaaatgaaaactcaggaatggatctaattgtgtttcaattcattaaaaaaactattgttttgggagggtaatgagcacaggggcagaaacgtctagttaatgtcaaacctgtggcaaaagcagagattgtatcatcaaagattattttcaattgagactcttgaggaaggtgaattgatgggggtagctactagtaattgaagatgaaggggaaaatctgtgccaattggatacagcggacaga

SEQ ID NO: 653075 - DNA, 642 bp, Homo sapiens
tcctgcatatgagaagggcaggagaatgaagggattatagacatgtgagagctgggcaaatgaagatggttttttggtgggggagggggttgtttaattcttttaactaaaaggcatcttctcctctactgggattttggatttaagagtagcatagcacaatggggaaaatcatcggtttttggaatgaggcacacccaggtctaaatttcagctctgtgatcttggctaaattacttgacttcttggcctcagtttcctcagctgatattgtgagagagtttgaggtgactatatgtaagcactcaataaatgacagctaattggtcttgaactctagaggagtcccagcaaggcctaatggagtggaaagaaaccaggctggctgtttagggacttgttcaagggggagaaaggttcttgcytttgaggttttttccagattgtctaattcatttccctaagttggaataagttctggagagaagctcagtctgcttctgttgaaacatagcttaggagtaaagaaaggaggttgagggagttgtcacaagtgagacacttctgttttctgtctttcagacaagatcagaacaacccttcagctacaaagcaaacaaattaactcagagtggagagtga

SEQ ID NO: 653076 - DNA, 531 bp, Homo sapiens
tttgtggccaagattaaataagttaatatatgcagaatactttgaataggtcctggcacatgataagcactcacatccyaagtgttagctattgttgtttttgtcattagagctgtattgttcatacgaaaggctagtttctctgtaaatattactatcattagatcaaaatcaataatttttagacagtcactatctctgggcatttgagtctctgggatctactaccacagctcacctagaaaacagtggtcaggttgtgtgcaccatacctgcaggagagacagcccaagcccctctgcagcctggcagttgagagtgccattcctgggctctcctgctgaatgtctcttggcagagcacttcaaagcagcggaatgtggaaaatgaggctcattctgctccctcttcagggctgtgggagttctagttacagtaattgatagttgagaacgtgcaaggtccactcggctctctcccatttctgcccaagcccctgctcctgcttgataacatcttagtaatgtgcct

SEQ ID NO: 653077 - DNA, 531 bp, Homo sapiens
tttgtggccaagattaaataagttaatatatgcagaatactttgaataggtcctggcacatgataagcactcacatcctaagtgttagctattgttgtttttgtcattagagctgtattgttcatacgaaaggctagtttctctgtaaatattactatcattagatcaaaatcaataatttttagacagtcactatctctgggcatttgagtctctgggatctactaccacagctcacctagaaaacagtggtcaggttgtgtgcaccatacctgcaggagagacagcccaagcccctctgcagcctggcwgttgagagtgccattcctgggctctcctgctgaatgtctcttggcagagcacttcaaagcagcggaatgtggaaaatgaggctcattctgctccctcttcagggctgtgggagttctagttacagtaattgatagttgagaacgtgcaaggtccactcggctctctcccatttctgcccaagcccctgctcctgcttgataacatcttagtaatgtgcct

SEQ ID NO: 653078 - DNA, 582 bp, Homo sapiens
tgctttctaaggatgcaactccatgatttcttcctcctcagaattatttccccccttgaagaatatagaaacatctggctcatttaccaagtcctctggcaacctctgaaatttctaaagcagaatagctcgctagatacatcaatttaaaaaattctaaaaataaatacttccacctaaaatcagratttgcgcctagaatatttttctttctctcccctttcttctaccctcttttccccccactttcctccttgttttccttccactttttttctctctactgacctctttcctttttaaaaaaaaaactaatgtatacatgacctttgtattgactgtctgcattgcataagatgctctgaatacatgggggagcaagacagacactaccccatagaacctaatgtgtacatgtgttgggggtaatctaataatttcaaacatatatagttatatactgagatacttaccaggaaagaaaagtactaagagccaggaacatttataaagggaacctgatctggtccagttgtaggaaggctttccagggtatgtggctcttgagctttcctctgaaag

SEQ ID NO: 653079 - DNA, 582 bp, Homo sapiens
tgctttctaaggatgcaactccatgatttcttcctcctcagaattatttccccccttgaagaatatagaaacatctggctcatttaccaagtcctctggcaacctctgaaatttctaaagcagaatagctcgctagatacatcaatttaaaaaattctaaaaataaatacttccacctaaaatcaggatttgcrcctagaatatttttctttctctcccctttcttctaccctcttttccccccactttcctccttgttttccttccactttttttctctctactgacctctttcctttttaaaaaaaaaactaatgtatacatgacctttgtattgactgtctgcattgcataagatgctctgaatacatgggggagcaagacagacactaccccatagaacctaatgtgtacatgtgttgggggtaatctaataatttcaaacatatatagttatatactgagatacttaccaggaaagaaaagtactaagagccaggaacatttataaagggaacctgatctggtccagttgtaggaaggctttccagggtatgtggctcttgagctttcctctgaaag

SEQ ID NO: 653080 - DNA, 582 bp, Homo sapiens
tgctttctaaggatgcaactccatgatttcttcctcctcagaattatttccccccttgaagaatatagaaacatctggctcatttaccaagtcctctggcaacctctgaaatttctaaagcagaatagctcgctagatacatcaatttaaaaaattctaaaaataaatacttccacctaaaatcaggatttgcgcctagaatatttttctttctctcccctttcttctaccctcttttccccccactttcctccttgttttccttccactttttttctctctactgacctctttcctttttaaaaaaaaaactaatgtatacatkacctttgtattgactgtctgcattgcataagatgctctgaatacatgggggagcaagacagacactaccccatagaacctaatgtgtacatgtgttgggggtaatctaataatttcaaacatatatagttatatactgagatacttaccaggaaagaaaagtactaagagccaggaacatttataaagggaacctgatctggtccagttgtaggaaggctttccagggtatgtggctcttgagctttcctctgaaag

SEQ ID NO: 653081 - DNA, 453 bp, Homo sapiens
ttattatagaaatgtcagaagagaaggaacacagtattccattagagttatcttttagtttggtgtgggagattttatgtatgtattgaacaaatcaaagctttacctaaatagtttttctagataaacttttctaagatataaaggaaatatgggtaccctcaaggctaatattagtggggtaaaatgaatattggttttcctctatttagtgaaatgagatagattatagtattcataaggaattctaagtaaatttctttagagagggtcgggcaggtctcctgacagttttctttctttacaggatggggaacagggaatgaattaatggtgaggttttagtgtgaaatgaaattgtggtatttactaatgtcttaataatattttcttagtcttttgacattcaggctaaccatatacaggatatgaackgagtattcaaggcgtagg

SEQ ID NO: 653082 - DNA, 537 bp, Homo sapiens
taataggtttctgtaacatggaaaaaattcatctccttcagtacttagagaaaattaataatcagtcacactaattgtgtctttattgttatgtgtgacagactcaacattttaaaaaattatactgagacaaaatattctattttcctctattacctgctattaatttttgaaagtgttgttaaggataaactctacaacctagcggtctctggttaatccaggagaacccctgctgagatagcaacaaaagaagagaaactttgttaagaatcagtaaacatggtgcttgctccatgtgctcatggtcagaggacagttctcacagtcagaggacagttgtcacctagttttcccatttcaagagagttctctgaactcagaaaatcaactatgtgagcatagtgtcaggtggtccctatttgggccagtaacagtctgttactgagtgtgaggaaccttcatgccacagagtgctgccctacagcctgagctcctggcacttcccatarattctctgtgcaaaacatcagatct

SEQ ID NO: 653083 - DNA, 586 bp, Homo sapiens
ttggggattacagtgcaggaggtcagtgatgacacacctcttcaagatactgtgcagacaggcaccaggactcttctttttgaggatatggactgggactcagtttgttatgctctgtaaagtgctgtccagtacagcagccactrgctctatgtggctatcaagcacttgtaattaaaaccaatccccattaaattgtgccatgaagtctacaaaacacacaagatttttaaaactcagtattaaaaaaatgtaaaataactcaataatcttatatttattacgtgttgggttaaatgaaatacatgattaatgtcacctgtttctttgtagttttccatgtggctattagaaaatgaatgttacccacattttgtttctattggacagcgatggtctagaatcacagagtttcaacatcatgatacagtacatgtgaagtatacatacgaattcaacaaacatatcttgatagctttcatttagaggtaatggccatcgccataggcagaatagcagaaagttctcagttttcacctctcaggttagcccaacagagctgtaactggaaaaaaaaaaaaaaggt

SEQ ID NO: 653084 - DNA, 553 bp, Homo sapiens
tcagttgtctctgtgtgcagaggtataacaacattggatagtaattcaaaggctgtctgtgtggtaaactaagattaatgagaattaaatccctgactgattatatgctctccagaactagaggraaaaaaaagagtttttattaaagttgcaagtataaaggtttgagaaattttcactttaaaggttaacataacccactgaagggagggggaaaactgtcctaaagaaaaataagccctgaacatctgaacatatatcgttgacatttctgctaatgtcacttgaaggaaggctactgtaatccatcccttggacaaaggacatagagagactatgtgtctgtcgcagcacaaaagcagagaaaaagacaacgtcagaagtgatttagaaaataaataaactgttctttgaagatgtctttagaggaaaggttattgcaaagtatgatagttacaaacactttctcagcaaatctagatttgagtgatattactcctagggtttttgaaggattttgagcacaaatatgttctgcctttggcaattatag

SEQ ID NO: 653085 - DNA, 444 bp, Homo sapiens
ctgcttctgtgtccaaagttcagataacaaatcttacatagttttttagtactttgagcaaagcagtgttcaaggtgccatagagtatgcaaggaagaatcagatataaatcctgctcccrcaaaaccagtgtctgaaaataaaaacataaaccaagtgtcatgagaggtacacatagactgtcttgggtcttctgatgagggaaagactataaccagctgaagaggtcaaggaaccctttatggaagagatgccctttgaattaggccttgcatgaaggttgggaattagggagagagaatgcacaaatgaaagactataggagtgttaagatttcaagcttaggataatggtggcaccaatacataaatactaataggtaacttaaaggaagtatagttggtttcagtttgagtgacttaattttagtggttataaactgct

SEQ ID NO: 653086 - DNA, 439 bp, Homo sapiens
tccaaagttcagataacaaatcttacatagttttttagtactttgagcaaagcagtgttcaaggtgccatagagtatgcaaggaagaatcagatataaatcctgctcccgcaaaaccagtgtctgaaaataaaaacataaaccaagtgtcatgagaggtacacatagactgtcttgggtcttctgatgagggaaagactataaccagctgaagaggtcaaggaaccctttatggaagagatgccctttgaattaggccttgcatraaggttgggaattagggagagagaatgcacaaatgaaagactataggagtgttaagatttcaagcttaggataatggtggcaccaatacataaatactaataggtaacttaaaggaagtatagttggtttcagtttgagtgacttaattttagtggttataaactgctgctaac

SEQ ID NO: 653087 - DNA, 439 bp, Homo sapiens
tccaaagttcagataacaaatcttacatagttttttagtactttgagcaaagcagtgttcaaggtgccatagagtatgcaaggaagaatcagatataaatcctgctcccgcaaaaccagtgtctgaaaataaaaacataaaccaagtgtcatgagaggtacacatagactgtcttgggtcttctgatgagggaaagactataaccagctgaagaggtcaaggaaccctttatggaagagatgccctttgaattaggccttgcatgaaggttgggaattagggagagagaatgcacaaatgaaagactataggagtrttaagatttcaagcttaggataatggtggcaccaatacataaatactaataggtaacttaaaggaagtatagttggtttcagtttgagtgacttaattttagtggttataaactgctgctaac

SEQ ID NO: 653088 - DNA, 590 bp, Homo sapiens
aagttccacagagtcccttgtagcagagatttcttttcatggaggaactaagaaaaggtggttggatatgctgagaggattatttgactttgactttggtgaggtgtcagtaaaatggtggaaaccaaaagcaagattatacttgcttaaaaaattaatgaaagacagtaaataaccttttcaaaraatgtgtcaggccaggtgcagtggcttgtacctgtaatgctagcacttagtagggaggctgaggcaggcagactgctgagcccaggcattcaagaccagcctgagcaacatggcaaaaacctgtctctacaaaaaattagcaggtgtggtggcattcaactgtagccttagctactcaggaggcagaggtggaagaatcacctgagcccaagaagttgagcctccagggagccgtgatcatgccactgcactccagcattggcaatggattgagaccctgtctcaagaaaaaaaaaaaaaaaaagtgccagtaaaggggatgctagagtggtattagcttaagcatcataggattgttcatttctgggtttaagacctgagcctatctgtagaaagaggaggag

SEQ ID NO: 653089 - DNA, 550 bp, Homo sapiens
tggcgcgatctctgctcactgcaacctctgcctcctgggttcaagcaattctcctgccatatgtctgctctttaatccagtggaaggaaccattgtcttccagggctgttcattatatcagagktccccaacccctgggccacggactggtacttgttcatggcctgttaggaacagcaggaggtgagccagggcaagcaagcattactgcctgagctccacctcctgtcagatcagtggccatgttacatggtactggtccatggcctgttaggaacagcaggaggtgagccagagcaagcaagcattactgcctgagccccacctcctgtcagatcagtggccatgttagattctcataggagctcgaaccctattgtgaactgtgcatgcgagggatctaggttgtgcgctccttatgagaatcgaactaataatgtctgatgatctgaggtggaacagtttcatcctgaaaccacctctccaccctggcccatggaaaaattgtcttctacgaaactggtccctggttccaaaaaggttggagacc

SEQ ID NO: 653090 - DNA, 468 bp, Homo sapiens
tattttgtaactaggagaagctacctcatgagaaaatctttactacagctgtcacccaccactccatatctagggatgagcccaagggtcaataaagtttttctgtaaagagccagagtgtaaaaattgtaggcttcatggtccatatggtctgcgtcacagctactcaactctactgttgtagtgcaaaagcagctgtagaaaatatgcaaatgaacaggtatgactgttgatccaatagaactctattgataaaattaggtagtagacccagtttgacccacrggccttgatttgccaacctctagactagatctggaatctttgccacagctgcctagaagaaccaaggcttttgccatcttccatgcagaaaatctgatccttgtacttgtggctgccacctgatgttactgtaatccacttcccaagtctcatacttatctgcatggcaaaacctagattgca

SEQ ID NO: 653091 - DNA, 498 bp, Homo sapiens
gggatgattggggttgagagggaacagagggaggcctgcttctaatctgtagaatttcccaagctgtgcacaacctgcaggcaaagactagacttcaaacagacttctagctttgggtgctggtccatggagttgtccagacataatagaccagaatcttaatgagtttgcaatttactggacttctagagaaatcccaatcatgggaattaaaagcctgatttactcaacccccaagacaatgatgaagttttgagcctacaccaacaagaattggattgccaaagacatgtaactgtcaaaggagcaaccttcatgatccagcagtaaaggtsagcagctgagggggatctccccagagagcagaaacaggggcaaccaaacatggctaagcaaggaactcatccattgccaggaggaactcctagaggctatgcataagctaaataatgtgaagtgacagtcttatgttgtttcctcttttcccaaagggatttt

SEQ ID NO: 653092 - DNA, 611 bp, Homo sapiens
tagatcatgtcctttacaggggcatggatagagctggaagccattatcttcagcaaactaacacaggaacagaaaaccaaacagtgcatgttctcacttataagtgggagctaaatgatgagaacacatgaacgcatagaggggaacaacacacasttgggactattggaggaaggaggtaggaggagagagaggatcaggagaaataactaatgggtattaggcttaatagctgggtgattaaataatctgttaaaaaaaaaaaccatggcaaaagtttacctatgtaacaaacctgcatgtgtagccctgaacttaaaataaaagttaaataaagaataattttaaaagagtatatggcttttttagaggcttgcccatgtacacgtttggggatacaaaagattcagtaaccatatctagatttcagaacatctacaagtggagctaaatgattttttgctagaagataaatttttcttgaaagaacttgactgtcatttcagcagttgacagctagcattcattaaagatgctaccttcaggcttttaaggaaaaggaagaaaatgaaatctaactggttggaatggagggtaaacataaattagag

SEQ ID NO: 653093 - DNA, 417 bp, Homo sapiens
gaattcccatggataatttatactactgtgattttgctcatgctatttccttctgctgaatgttgtattggagctcagaaactgatactccaaaatatggcattttgacatgctgaacagaagaaggctcaggtctccctgacctcccccttcttccaccatttctcccamagaagctgaagtttctttatctacctaaaatccagacccaccaaggagaacaactgttctttcttcctctccctattatctcattatctattgcagaaaagaagaccaagatgtgactacacctgaacagactcttttacaagcatagtgactgtccaaggatcatctgcattccaaagaaaactatttactatttacaaggtaagctctgttccccatccaatcactcttcatagcactcactta

SEQ ID NO: 653094 - DNA, 417 bp, Homo sapiens
gaattcccatggataatttatactactgtgattttgctcatgctatttccttctgctgaatgttgtattggagctcagaaactgatactccaaaatatggcattttgacatgctgaacagaagaaggctcaggtctccctgacctcccccttcttccaccatttctcccaaagaagctgaagtttctttatctacctaaaatccagacccaccaaggagaacaactgttctttcttccyctccctattatctcattatctattgcagaaaagaagaccaagatgtgactacacctgaacagactcttttacaagcatagtgactgtccaaggatcatctgcattccaaagaaaactatttactatttacaaggtaagctctgttccccatccaatcactcttcatagcactcactta

SEQ ID NO: 653095 - DNA, 539 bp, Homo sapiens
tctcactagactaaaatcgaagtgttggcagagctgcactccttctggaggctctaggggacaatctgttttctcgcctttcccagcttctagaggccgctcacattcctgggctcatggctgggctcatggccccttcctccatcttcaaagccagtagtgtaatatcttccaatctctctctctcatcttccagcctcgctcttataagggcccttgtgatgacattgagctcccctggctaatccaggctactcctaccatctcaaaatccttaacttaatcacacctgcaaagtccttttggccrtgaacggtaatccatccacaggttctaggggttaggacgtggacatccttggtgggggcatcactctgctgaccataccccagacttccgttccagaaaggagtcaggatggtgtgcataactggatgtccacctcccattagacagagaactcttgaaggcaaggatatggtctactcatcacaaaccccctcagccccatccttaacatacaaaaaaagtgacaagta

SEQ ID NO: 653096 - DNA, 494 bp, Homo sapiens
tgcctgcagggtgccctggcagtgcagacctctgcagcagcacatgaggatgcagcgggcagaaacgcaggctttgcagccagagggttacacagaaaggcccatgggagctagacagtgtcaggggaacccagagggaggaagctggagaagggaaccccctaagtttgtggtgtgaacctgtacatattttgggctcaccccaaactgcatgcacaaaagagattcaaaggagcacagtaaaggctctgataactgaactatggtgcaaacccctgccatgtcgagactaacccctgaggggtgcacctgcaagacacacccaaacgacatgcaaccactgcttatagaaggtgacagagaattttcagaccagacccaaactgccaaaacaaagcratgctctaaaagttttaacaagacacagtgtactagttagctctggctgccatacaaagtaccccagactgggtggcttaaacagcagagattta

SEQ ID NO: 653097 - DNA, 609 bp, Homo sapiens
agcaaggtaggtcctcgtttcaaccctccgcccccaccccacacaccatcggcactttcttttcttctttggtggacacggctttactgctgcatctcatttcctgcccaaaaaacaaggagcacacacaaagtagattaaaaatgtaggtaatgaaaagagattaatagcctgagcaggtagttgggcggctgctttgggggaagctgatcactttccgttataggctamggtcattgtgataatgttggtcaaaatctgcccagaggaagcaaactgcttttaactgtactgctgttggttagcaaaccatcatactggttttgtgtttgtttattaattctccattaaatctggataatactgttaagcataaagcagtaagcttaaaaatcagaaatattttggaattttctctgaaaccataacaacatatcttaaagggcaacagaaagcaaaattgggtttgtcaaagctagacatttctgctagaaaaaattgagatttataagataaaccaaaaaagttatatcttgctagtctgagattcagaacaaatgggaaaaagagtctaaagatcttagtactcatgtaataacttattcgatg

SEQ ID NO: 653098 - DNA, 466 bp, Homo sapiens
aacagcactctttcaaaatgatagaggccccagctatttgacatggtttcagtcagttcaggcctgagtgcaaaaagattcacaatagcctggagacactgcctggcttgataattacatgatcccctaaagaatgtcatacttaactggaaartgaaacacttaaaggcaccatcatattctttctcagttttcttttattttcaatattgtgactttgtagaatagcttcttcctttgatctatctataagaatgtttacagataaattccatgtgttcctgtttgaatttgagaggggcttatgctgcatgtttcaagttgattaaatataaactctttaaatccatgccttaaagcaaatatttcagagataaattcctaagaaagatatattttcaactgaaacttataattcatcttcataggaagacagccagaggttatttcaattttggataatttt

SEQ ID NO: 653099 - DNA, 574 bp, Homo sapiens
caagttacagtaaagtgccacagtatgcgtaaatctattgtatgtgcacgtgtgtgtgtgtgtatttaattatagcctgccaacttgcaagtgaaggtttgagaaatctctgaattccagtacatgtagagactacagttgctgaacctaaacatggacatggtctagcatttgactgcactgcttagtcaacatgaacatgatccctttcatatgacttgggaagcagagacgtcacatttggatgtttccctccacagacatctagtgcaaaggtatcattgctacagaaagcaaactggaatgtagaaaactctgtttaggaaattcagtrccaaagttgtcctgttggtttgacttttaatcactatgggccctaaagtacatgtaatcagcatgagatgaagccaatagtgtagctacagacagttttagaaatcaacagtcaggatagaagactacaggacctgcacttctacctcccttgacagaaatagaaattgtaagtgcagaacaatggcaggattaggccttttcatggctgactcagatgttacagtttaactccccagat

SEQ ID NO: 653100 - DNA, 666 bp, Homo sapiens
gctttttcatgtagattttagagagagctcaccagtttttacaaaatgccagctgagaatataattgaatttgtgttgaattgctagattggtttggaaataactgacaccttaacaatattatttctaaaatatgaacatggtatattggtccatttatttaggtcttctttaataacagcagtacttaatagttttcttttttttgagacggagtctcactctgtcacccaggctggagagcagtgccrtgatctcggctcactgcaagctccgcctcccgggttcacgccattctcctgcctcagcctcctgagtagctgggactacaggcgcccgccactacgcccggctaatttttttgtatttttttttagtagagacggggtttcaccgtgttagccaggatggtctcgatctcctgacctcatgatctgtccacctcagcctcccaaagtgctgggattacaggcgtgagccaccgcgcccagcctagttttcgttgtttatatctcatatgtctttgttaattcagtacattcctaattatttactatttttgatgttattgtaaatgacatcaaaaatcattttccaatggtttactacagtatattcactttatttttgtatattgagtttctatccccagaccttgctaaattc

SEQ ID NO: 653101 - DNA, 666 bp, Homo sapiens
gctttttcatgtagattttagagagagctcaccagtttttacaaaatgccagctgagaatataattgaatttgtgttgaattgctagattggtttggaaataactgacaccttaacaatattatttctaaaatatgaacatggtatattggtccatttatttaggtcttctttaataacagcagtacttaatagttttcttttttttgagacggagtctcactctgtcacccaggctggagagcagtgccgtgatctcggctcactgcaagctccgcctcccgggttcacgccattctcctgcctcagcctcctgagtagctgggactacaggcgcccrccactacgcccggctaatttttttgtatttttttttagtagagacggggtttcaccgtgttagccaggatggtctcgatctcctgacctcatgatctgtccacctcagcctcccaaagtgctgggattacaggcgtgagccaccgcgcccagcctagttttcgttgtttatatctcatatgtctttgttaattcagtacattcctaattatttactatttttgatgttattgtaaatgacatcaaaaatcattttccaatggtttactacagtatattcactttatttttgtatattgagtttctatccccagaccttgctaaattc

SEQ ID NO: 653102 - DNA, 486 bp, Homo sapiens
atatatatatataaggttaagaaaaagtataagaatacatatacatatatagaaggaatatacatatattcctttcagtcctttttttcctgtataatttttaaattatatatatgtatgggccttttccttcctatttctattttattttgcattttgttggattttatttctgttttctgtatccttactgtggttttctatggtatctattattcttagtatttcctatagwttagtcgtcattttggacctggctttgtatttttcttctgtttctttcatacgttccgtcagttcttgtttcatgccctcctgttatctactgtcatgtcttcttgtgtagccatctcttctctatgttttgatatttatccttatagtttcaattgatgcataaaggtttaaaattctcagttggaatattaggttgcactttttatctgccatctgtcaatgatttatctggtgttttcattgtcttta

SEQ ID NO: 653103 - DNA, 598 bp, Homo sapiens
cagtgataaaaaaagtcacttatcaaagaaaaacccaggatctgatgtcttcactgttgaattctaccgcttactaaaagaactgatatcagttctactcaaactatttcaaaaagtggaagaggagggaaaacttctaaactcggcttrggaggacacccttataccaaaactagatagggaaacacacacacacacaaacaaacaaaaaccaaaaacaaacaaaaaaagaaaacaacaggccaatatccctgacaaacatagatacaaaaatcttcaacaaaatactagcagatcggcttcagcaaacattaaaatgtcaagaaacaacagatgctggcaagtttgcagagaaaaaggaacacttttacactgttggtggaaaagtaaattagttcaaccattgtggaagacagtgtggtgattcctcaaagatctagaaacagaaatatcatttgacccagcaataccattactgggtatatacccaaaggaatataaatcattctattatgaagatacatgcacatatatgttcattgtaacattattcacaatagcagagacatggaatcaacccaaatgcccatcaacaata

SEQ ID NO: 653104 - DNA, 598 bp, Homo sapiens
cagtgataaaaaaagtcacttatcaaagaaaaacccaggatctgatgtcttcactgttgaattctaccgcttactaaaagaactgatatcagttctactcaaactatttcaaaaagtggaagaggagggaaaacttctaaactcggcttaggaggacacccttataccaaaactagatagggaaacacacacacacacaaacaaacaaaaaccaaaaacaaacaaaaaaagaaaacaacaggccaatatccctgacaaacatagatacaaaaatcttcaacaaaatactagcagatcggcttcagcaaacattaaaatgtcaagaaacaacagatgctggcaagtttgcagagaaaaaggaacacttttacactgttggtggaaaagtaaattagttcaaccattgtggaagacagtgtggtgattcctcaaagatctagaaacagaaatatcatttgacccagcaataccattactgggtatatacccaaaggaatataaatcattctattatgaagatacatgcacatrtatgttcattgtaacattattcacaatagcagagacatggaatcaacccaaatgcccatcaacaata

SEQ ID NO: 653105 - DNA, 541 bp, Homo sapiens
atttggggtcttttgtggttccacataaattttagagttttttttttctatttctggaaaaatgacattagattttgttagggattgcattgactctgtagattgctttaggtagcacttacattgtaacaatattaattatttcaatctatgagcatgggatatctttccatttatttgtgccttcttcaatttcatcaattttcagtgtatagatttttaatttcttatttaaatgtattcttaaatattttattctttttgwtgttattggacattggattttcttaattttttatgtgtagttcattgtcagtatatagaaatactactggggtttttgtatgttgattttgtatcctgcaactttactgaatttattagatttaacaattttttggatgaaatctttagggttttctctatataagatcatgtcatctgcaaatagaggcaattttacttcttcttttccaacttggatgtctttcatttattttttttacccaattactctgcctaaaacctccagtactatgtt

SEQ ID NO: 653106 - DNA, 552 bp, Homo sapiens
gaattcacaacattaagctttttgaaaacagtattagtggtccagtatgggtgttgcaatttgttgtagaagagctgggtgctaggtcatgttgtgttatgccagggtggagggggatgatcattctgccatgcagagcagccstcgtttgtgatccattaatcttttgcctttggccttcttgtgagtggatgaattgcagtacaaaaatgtgaacattttataatgagactcagtttgttctgaaaatgaagaccataaatgagtgtttttcttcttttgatgggacttcaaattgagacaaaaataaatgctaggaatatctagaaattggtcctagaaattgaatatgatcactagctcttttaattaacatttctgttaacattgggacctattccttattctctccacacggaggcttcttcttttgtcagagattaatgttccctcctttttcatgcaaaagattaaagaggtcatataaatataaaacatttgcttttcattaaccagagttttaatatatcttcttgatagacatcaaaagac

SEQ ID NO: 653107 - DNA, 389 bp, Homo sapiens
cctgtgtggtccctggatcaagcacacatgggcttatgaatgtgttgaccactggcatatgagaggtaattgtctattaggttatgtggctcttcctctttctatttataactccaatgtttctgaacgctgaagtagttcattgaaattattttccaggattagacaaacygtacctgcaaaccaaggagatgaattttggcctatgtttggcagaagtctcttgcaatggtggggagtaacctctcatgaacgtataattagaaatctgtcaaccactctaggtaacttagcaaatgaactagctgaagccatagctaccaaataaagatcttcagactctttagacaggatagtcatggatgacggaataactttaggctacatag

SEQ ID NO: 653108 - DNA, 294 bp, Homo sapiens
tctgcttcgttggggtcccttagtaccttgtcaatttttctagtgtcactttaccacctgacctgcacatcatgtctttacatgttgacccctttgctgctagactgtagaggataatcttttgaatcatctttgtataarcagtcttaattttgctaaataattacttattgagttcctgctaagtgttaggcactggggaataaggaaggaaaatagaagctgtcagggatggctttcctaaagatcatccatgagctgagacttagagagtgaggttagccagattaagcg

SEQ ID NO: 653109 - DNA, 445 bp, Homo sapiens
tcttgagccccatattttgagaccagactggacaacatggcacwtttggttagaagtgtttgaccataactactattccagaaaaagatctactcattagaactacaaatcataaaattataagttctacaaaaacaaatcaaccttatctaccacccagttctacccaattatatcatgttagaacagaaggtctcaccgtggactcgagagctgatatgagaaatgtcaccaccatcctgctctccacggaataatcttcaacagactcctcatcttccatggactcctcatcttccatgggcagggtggaaactgcaacttgtgccatgatccctgtgcaaaaaagtagtaagaaattgaaaggtagaaatgcagggtcctaaactcacatccagagctgtgagagtttctcaccggctgccaaattgttttttgggtcaga

SEQ ID NO: 653110 - DNA, 227 bp, Homo sapiens
tgctaactttattcaataaatgtgactaaactgagacgtttgaaatgtctttaaaagctgcatttaagttaggttttagaaattgcatgttattgcctgataactgatgatatactttgagatgctytggcttactctctaattgattatagtttagctgtggttcataccacattttttttttcttttttttgaggcagtatctcactctgtcacccaggctggag

SEQ ID NO: 653111 - DNA, 227 bp, Homo sapiens
tgctaactttattcaataaatgtgactaaactgagacgtttgaaatgtctttaaaagctgcatttaagttaggttttagaaattgcatgttattgcctgataactgatgatatactttgagatgctttggcttactctctaattgattatagtttagctgtggttcataccacattttttttttcttttttttgaggcagtrtctcactctgtcacccaggctggag

SEQ ID NO: 653112 - DNA, 264 bp, Homo sapiens
ggtgggtttaaatagcctcgggcgcagcctagcagcggaaagggtggakcttcactcctcctttccatcagtcacccccaactttcccaggctacacctcgtaggaaactgttctcctgctttgatttcatgcgccacctttgagacaatctaagaacttacaagttttcttagccagatatattaggaattgtatgcactgaaacactgaaaacccactagtggttctgtggttcccacgttgtggttttgacaccagcagca

SEQ ID NO: 653113 - DNA, 264 bp, Homo sapiens
ggtgggtttaaatagcctcgggcgcagcctagcagcggaaagggtggatcttcactcctcctttccatcagtcacccccaactttcccaggctacacctcgtaggaaactgttctcctgctttgatttcatgcgccacctttgrgacaatctaagaacttacaagttttcttagccagatatattaggaattgtatgcactgaaacactgaaaacccactagtggttctgtggttcccacgttgtggttttgacaccagcagca

SEQ ID NO: 653114 - DNA, 502 bp, Homo sapiens
aggtgcacaccaccacgcctggctaatttttgcactttttgtagagatgggatttgtcatgttgcccaggctggtcttgaacccctgggctcaagggatccacttgcctttgcccctcaaagtgctaggattacaggcatgagccaccatgcctgccttgtagctaatactttatagtaaaggaatttttgcagtttggttggctataattattttgtcyttcactatattactagatcaatcaatagacaatgaagatatttgccgtttgaaaccacacaatatttagacaaagagcttttagttggaccatgtattcaaatagatgaccatctgtaaggaaatattttactgtgtaagggaaaatagactcaaatttcctcccactctgattctatttctctctagtactcttaaagttttactactttttccacttcttgtatcttctaattcttacaatattcaaagaaaacctcatagtgtaattgtcaattatact

SEQ ID NO: 653115 - DNA, 568 bp, Homo sapiens
tttaaatttaagactagtaagtcatttaaaagtatttttggtcaaaacaaaacttgacagtaagtggggtgactagggactaggcatattgagcagctaagttgcctatacctatcatgctgctagaaactagcattatctcattactcctggaaattctgacaattgtggcattactgttcccattttagaaatgaagaaattgagacagtgagaggctaagcttttccaaggttatgcagttagcaaatggcagagcaaagattggacrtaggtctttccaattcttttgactatagcacctgcctctcagtagtataaaaccatgttcctggtttcttggtttaaattccaactgtctctaaagaaactatcaaaagtgttttagtcaatttcagaaatgctgaaataaatgtaatctttccaaatctatatataaaaaatactttgcatttgaatacataaattttgctatgttaattataaaatgtcttatagtttagtcacgtcatctcccttttcttactgaataacagtgctgtactataaaaaaacagtgcccccaaat

SEQ ID NO: 653116 - DNA, 633 bp, Homo sapiens
cctcaattttcatagaacatggaaaacccccttgcctcctgagagtgtgagaagagagaaaatggtgaaagaagagcccaaggaggcctctgttccctgacactcagaggtatgaagacaaagagttaaatatgaagacattgagaatgttagagcttggtttcctggggaaagcctggggtatgttatcaacctcccaaaggagctccacgtttggctggaccctagatccaaggcagcatgggagcaattgtacagcaagtttgggagaagatggctggatagagagctgagaccgcactgctggttgtccatggtcaagatgggatgcagagtagtgggagttgcttcctcccttgctaatagaaccaagagacactgagaggtcaactgggctaacaaaagcctgcatcagaaagaggagacaatcaggaatacaaacattaataaccatggacaatggtagatagcagggtgagacagaacctgtcacacctcactggattcagcccatcttctctggcaatgccrctgacattcagagacctctaatcatctctaattcaccatacaaccccccctccccactcctcctcaaatagcaaaatgatatcttttcagaagcagagagag

SEQ ID NO: 653117 - DNA, 505 bp, Homo sapiens
tacagtgggcagatcgtggtgcacctcatagaacttctaactctacatagtccaaaagcatctccatcttggtggcttggtagagatttttgtgccctcaatttatagtctgaaaaatgaagcaaacttagctcctagactcttgtgtaggttgggtcctggtggcccccatgtgcttgtggggcagttccaactatatttttctgtactctgstcctaattcttataacattatagttattacctgttatatatatatatatatatatatatatatatatatatatatatatatatatatatatatatacacatacatatatatatacacatatatatatatatatatatatacacacatacatatatatatcctgaccccaacttactcaatatttttagctacagatgggtatggtggctcccaccttaacactttgggagcctgaggtggaagaattacttgaggccaggagtttaagaccagcctgggcaacaaaggaag

SEQ ID NO: 653118 - DNA, 505 bp, Homo sapiens
tacagtgggcagatcgtggtgcacctcatagaacttctaactctacatagtccaaaagcatctccatcttggtggcttggtagagatttttgtgccctcaatttatagtctgaaaaatgaagcaaacttagctcctagactcttgtgtaggttgggtcctggtggcccccatgtgcttgtggggcagttccaactatatttttctgtactctgctcctaattcttataacattatagttattacctgttatatatatatatatatatatatatatatatatatatatatatatatatatatatatatayacacatacatatatatatacacatatatatatatatatatatatacacacatacatatatatatcctgaccccaacttactcaatatttttagctacagatgggtatggtggctcccaccttaacactttgggagcctgaggtggaagaattacttgaggccaggagtttaagaccagcctgggcaacaaaggaag

SEQ ID NO: 653119 - DNA, 629 bp, Homo sapiens
gtatttttagtagagacagggttttactatgttggccaggctggtctcaaactcctgaccttaggtattccacccacctcagcctcccaaagtgctgggattacaggcatgagcccacactttcataattattagaattatactttcagcagttaaaaaataataaaaataaaaatggggtattaatgtgatgcacctttaactgataacataggaataaaagacaattatcatcttcaaatggtgttatttcattatagcgatgagttcyatatgagaatgatagagccctttttaaggttatatgaaaggtagctacccaaacaatgcataatttacaaaatgcatttgagcttgccctttgtcttgtcacaattcaagaaaatgaagtactttttgaaatttaaaggcaacaatactgaagcagataaaacaaggtgatttagtattttccaggcacacagcaccttgtatcccaaagagctttacgacataataatttgcatttccatagtactttttttgtgagatatttcaaagcctattgcattaatatgaattcaactatgatgcagtcccttgaagtagggatttattcttcatatccctgttttacaggcaagcacctt

SEQ ID NO: 653120 - DNA, 325 bp, Homo sapiens
tctctggtgccttgtttttgccttatggttttgccttgttttcttctatataaagctcgagatgcaacgtctgcatattttatttgtgctgttaacttcttgaagaggaaccctatatcgatatctgtatctaggctcagtacagcgttctgcatataaatgcagctctgtaattattatttatagatttcaaaggttcagtcattttaggaatgagacctctaaactaaatcctatagtcaaactagttcttaccccaatttttytttctttcgacatggatgccagcattcaaagtattatgatgtcaagaaaaaaatcacag

SEQ ID NO: 653121 - DNA, 418 bp, Homo sapiens
ctatgtaattcagtgagccagtgttttccaatcagcaatgcatgttgttataaaatcatgtatgggtaaagatttattcaaagtgcaagatacactaatggattgaaattcaacagaataaaaatgtttattaatatggtatcagattgcatattataataacatctaagaaactaccacattgagttttagtataatttyaaataagaatattctgatgactcacgcctgtaatccgagcactttgggaggccgaggtgggtggatcctgaggtcaggagatggagaacatcctggccaacatggtgaaacctcatctctactaaaaaaaaaaaaaaaaaaagtacaaaaattagctgggcgtggtggcatgtgcctgtagttccagctactcaggaggctgagtcaggagaattgc

SEQ ID NO: 653122 - DNA, 577 bp, Homo sapiens
ctgtcttgtgggaagcatggagggatgtctgccagtgcttgtgtaggaaacaatgataccacaaaggaaatacactggggkgtgtgtggagacttcaggttcaagaacatcttgcctaccagaaagccactgaaacttctactgaccttggtggcaggcgttgtaagaaactgaaacaaatatatcctgaatgtataatttcttacctgtcgtttaaaatctagtgctataaggaaggaaacccttactccttccagtcccaaagacagttgaaaccaagtctacaggctacccctaagaaagcaagtgattacttactttcaagtaacttccagagaccctgcttatcccctatttaatttcttttcaaagtagtttacagcttttttgtccaacttttcccatcctgacacttgcttgtcatttagctcttcattcggcaaatacacagttcatatcagcacttttctggtggctaagcatataccagtatataagactatgccaaggagtaaatattgtagaaaggtaaacagataaatactaatttataacaactcagatgtttataactact

SEQ ID NO: 653123 - DNA, 579 bp, Homo sapiens
aaaaaaccaaagtacacaggcaacaaagagcacaatgaatctcacatttcaatacttaacattgaatgtaatttgaaggccttaatgctccacttaaaagatacagaaccacagaacggagaactcaccaaccaactatctgctgccttctggagacttacctaacacataaagactcacataaacttaaagtaaaggggtggaaaaaggtatttcatgcaaatggatgaccaaagtgagcaagggtagctattcatatatcagacaaaacaaactttaaagcaatggcagttaaaagagacaaagaggggcattacatagtggtaaaaggctttgtccaacaggaagatatcacaatcctaaacatatatgaacctaacactggagctcccaaatttataaaacaattattaatacacctaagaaatgagacagacaccaacacaataayagtgggggacttcaatattccactgacagcactagataggtcatcaagacagaaagtcaacaaagaaacaatggatttaaactataccttggaaaaaatggacttaacagatatttatagaacatttc

SEQ ID NO: 653124 - DNA, 439 bp, Homo sapiens
gaacttgtttgaacatttagattgagacaggcctaaaatcagctgtacctcttcggatttcctaattctatcagtgaataaattcacttctgtgtttaaaatgttgtgaacagggtttctatcacgtaaaatttggtttccctttccaataatccagaataatggttttgaacatgtacactattgacgtggattttgcttaccctrtttgctggcttactgtccctcttttatatgctgatgggcatgccatatttattgacctagcattggaattaaattataaagactttgcacagaatagtctcccagaactggtccagccatgatttaccttcaatgtgaactgtgagctttctacctatggttgtgaaaaagcagccctgatctgtatgtgtcagttagaaatcgcacaaataacccacaccagtacgactac

SEQ ID NO: 653125 - DNA, 572 bp, Homo sapiens
aatcattttttagcttttgatttaaagcaagatacgtgagattcttcccttcactcaaatatatagaagccattgtagggttattaattagcctaatattattatatctcaggaaataggaagtcccatggagaggaagagagacaaaggaagggccacacagtggagaagtcagaaaacacacaacatttatagattcattgtattgtcttatctaggaatagtttgtggtggcccaaaacaattacaataggaatatcaaaagtcactgatgacagatcacctaaacagatttaataagaacaacttggaaatattgtgagacttgtcaccrtattgtcaccaaaatgtgacacagagacttgatgtgagcatatactgttggaaaaatagcaccaatagactggcttgattcaggattgccacaaatcttcaattttttttaaaagcaatgtcagcaaaaatgcaataaagtgaagtggaataaaacaaaacttgcatgtttctctctgttacatgcttttctttgattttggtatattgtatttgttttaactttaagaaagcatttc

SEQ ID NO: 653126 - DNA, 597 bp, Homo sapiens
tgaatgacagagaaggaattttctgttttaagtacattccctgtataaacacattttataccaaagtgtggtttacttgattattttcctaaagtattagatatttcattgtgtttaatcagaaagataatagtcacttggggactctgcttcataaagtaatacaaggacctgctctctctaattagctgccccagcttaaaaaaattttaatagtgttatcaaaatgtatctgacattaattactactttgctaggatggggtcaaaaggttcaggttctgttacaaattttggaggcaacagataatagcgctaatgcttcagtcattagttaatcaaaaggttgcattagcaaagcctaaactaggtaagctaagcacaaggaaaacgtgaaaacattcagtaacacaatatggtgaatattttaaatcttggggtgaaaagrtgctgaaacacatttaaattaatttgatggctaaagaatttcaacactgatataaatatgtcagtaaatagattatgcaaactgagtttgcaggtatttgtgatcaaagatgacctgttttctcaatgtagaatgaatccaaatacacca

SEQ ID NO: 653127 - DNA, 655 bp, Homo sapiens
aatcaataatgagtgtgtctaacaggcaataagggcctcttttgggggcagaaagtttactgcaatgaaaagagcagagattgcataggtcagctgaccttgtattagacttcatttctgcaacttttgtttgtctggccttgggcaaatcatttaaccttcctgagcccatcttgtaggtaataccttcagttttatagtaagggttagtaaaaatgtatgtaaagcatctaacattatgcctggtacatggtaatgacttatagattgcattctctatgatccttcttgtcttacatgatagtatcatttagtgaatgagacagaaccaggtctgaatatgagatttaccccctttgtagctgtatgaatgaaaacaaatttctttccctcatwaaacttcagtttcttcattttataatggggaaaacaaaaattaccttataggaattacttgatcatgaaatcaaggctcctctgatacaataaagtgcctaagagagtttctgacctataatagtatccatttgtgtcatttctgtacacacacttccacagcctggggcatagatgaataggaaatcttgtcaagggtctttgttaaatctagggggacaatagagccagatttgagctcggccttaagacagaacta

SEQ ID NO: 653128 - DNA, 597 bp, Homo sapiens
gtgccaaggagatggtcagggattctgaccttttgtaatacccactaagacctcctaagccaccacaaataaacatattatctgagtagaatagtgcacttgctctgcaaatgcacttttgaggcaaatctcttgactcccttctagctagactgcagtctcaaagcccttcttgtgtagagcctgcgagctgtcagtggatagcatcaaatcaagcggatggattcttgaaagctaaatgtcatcatttgacagagctactatgaggaaaaatatttttatttttaaaaaagttttattgatcgattgatttgagatggggtcttgctctgtcacytaggctggagtgcagtggcttgatcatggctcactgcagcctcgaactcccgggctcaatggatcctccaggttcagtcgatcctccgggctcaattgattcttgtgcctcagcctcctgagtagatggtactacaggcacgcaccaccacacctggctacttttttgtattttttgtagagacagagttttgtcatgttgcccaggctgatgtcaaacccctgggctcggccaagtgcagtggctcacgcctgtaatcc

SEQ ID NO: 653129 - DNA, 548 bp, Homo sapiens
gccaggcacggtaactcatgcctgtaatcccagcactttgggaggctgaggtgggcggatcacttgagattgggagtttgagaccagcctggccaacaggctttactaaaaacacaaaaattacctgggcgtggtggtgtgtgcctgtaatcccagttacttgggaggctgaggcattagaattgcttgaacccgggaagtggaggttgcagtgagccgaggtygtgccactgcactccagcctgggtgacagagtaagactgtgtctcaaaaaaaaaaaaaaaaagaaagcttataaagtgactttaataatcacatatgataaagcatatgaaaacaataaaattgttgcatgaaatctgagtttacaacatgaggttttaaatatcataacattacatgactaagtaaatattataagtagacatatggctctttcatctacattctcatatatatatattgaccagacatggtggctcatgtgtgtaatctcagcacgttgggagccagaggcaggaggactgcttgagcccaggagttcaaga

SEQ ID NO: 653130 - DNA, 548 bp, Homo sapiens
gccaggcacggtaactcatgcctgtaatcccagcactttgggaggctgaggtgggcggatcacttgagattgggagtttgagaccagcctggccaacaggctttactaaaaacacaaaaattacctgggcgtggtggtgtgtgcctgtaatcccagttacttgggaggctgaggcattagaattgcttgaacccgggaagtggaggttgcagtgagccgaggttgtgccactgcactccagcctgggtgacagagwaagactgtgtctcaaaaaaaaaaaaaaaaagaaagcttataaagtgactttaataatcacatatgataaagcatatgaaaacaataaaattgttgcatgaaatctgagtttacaacatgaggttttaaatatcataacattacatgactaagtaaatattataagtagacatatggctctttcatctacattctcatatatatatattgaccagacatggtggctcatgtgtgtaatctcagcacgttgggagccagaggcaggaggactgcttgagcccaggagttcaaga

SEQ ID NO: 653131 - DNA, 548 bp, Homo sapiens
gccaggcacggtaactcatgcctgtaatcccagcactttgggaggctgaggtgggcggatcacttgagattgggagtttgagaccagcctggccaacaggctttactaaaaacacaaaaattacctgggcgtggtggtgtgtgcctgtaatcccagttacttgggaggctgaggcattagaattgcttgaacccgggaagtggaggttgcagtgagccgaggttgtgccactgcactccagcctgggtgacagagtaagactgtgtctcaaaaaaaaaaaaaaaaagaaagcttataaagtgactttaataatsacatatgataaagcatatgaaaacaataaaattgttgcatgaaatctgagtttacaacatgaggttttaaatatcataacattacatgactaagtaaatattataagtagacatatggctctttcatctacattctcatatatatatattgaccagacatggtggctcatgtgtgtaatctcagcacgttgggagccagaggcaggaggactgcttgagcccaggagttcaaga

SEQ ID NO: 653132 - DNA, 546 bp, Homo sapiens
gtgaggccaggcacggtaactcatgcctgtaatcccagcactttgggaggctgaggtgggcggatcacttgagattgggagtttgagaccagcctggccaacaggctttactaaaaacacaaaaattacctgggcgtggtggtgtgtgcctgtaatcccagttacttgggaggctgaggcattagaattgcttgaacccgggaagtggaggttgcagtgagccgaggttgtgccactgcactccagcctgggtgacagagtaagactgtgtctcaaaaaaaaaaaaaaaaagaaagcttataaagtgactttaataatcacatatgataaagcatatgaaaacaataaaattgttgcatgaaatctgagtttacaacatgaggttttaaatatcataacattacatgactaagtaaatattataagtagacatatggctctttcatctacattctcatatatatatattgaccagacatggtrgctcatgtgtgtaatctcagcacgttgggagccagaggcaggaggactgcttgagcccaggag

SEQ ID NO: 653133 - DNA, 622 bp, Homo sapiens
caccaccagcatttcttcccagcttctcatcatttgctactggggctaagattgttttgagcctagcatttgcaacatttgccaggcacatggatggtgtgactatgaagtaattagaccagttttcaacaaagggatcaaatgaatttatcaagtaagttttgcattaatccttccaggaaggtcatacgcattttccaatgatacgaccgtgcctagccccgtccttgtgaacagcacaagaaaaggaatgaatcacttttcagaatgaaatgtttctgttttttttttttttttcagttaaatgtcacccagcccgtcacctggctgatatttaaggacacgtcatcagagaagttacatttccttttggcagagaggaggaggaaggggaccgccacacacagaactgggtggtgactttaccataggtgcaggagggctgaraagggacctatcaaagttccaggggtcaccaggtctggacagagacaccctggatgccactaataggccaccttgtatatgaatttacagagtttttgaggcctttcggtgccgggactgctcatagaaacccaggttcaatttgacaaaacactactcctccatgtgtcaagtg

SEQ ID NO: 653134 - DNA, 622 bp, Homo sapiens
caccaccagcatttcttcccagcttctcatcatttgctactggggctaagattgttttgagcctagcatttgcaacatttgccaggcacatggatggtgtgactatgaagtaattagaccagttttcaacaaagggatcaaatgaatttatcaagtaagttttgcattaatccttccaggaaggtcatacgcattttccaatgatacgaccgtgcctagccccgtccttgtgaacagcacaagaaaaggaatgaatcacttttcagaatgaaatgtttctgttttttttttttttttcagttaaatgtcacccagcccgtcacctggctgatatttaaggacacgtcatcagagaagttacatttccttttggcagagaggaggaggaaggggaccgccacacacagaactgggtggtgactttaccataggtgcaggagggctgagaagggacctatcaaagttccaggggtcaccaggtctggacagagacaccctggatgccactaataggccaccttgtatatgaatttacagagtttttgaggcctttcggtgcygggactgctcatagaaacccaggttcaatttgacaaaacactactcctccatgtgtcaagtg

SEQ ID NO: 653135 - DNA, 622 bp, Homo sapiens
caccaccagcatttcttcccagcttctcatcatttgctactggggctaagattgttttgagcctagcatttgcaacatttgccaggcacatggatggtgtgactatgaagtaattagaccagttttcaacaaagggatcaaatgaatttatcaagtaagttttgcattaatccttccaggaaggtcatacgcattttccaatgatacgaccgtgcctagccccgtccttgtgaacagcacaagaaaaggaatgaatcacttttcagaatgaaatgtttctgttttttttttttttttcagttaaatgtcacccagcccgtcacctggctgatatttaaggacacgtcatcagagaagttacatttccttttggcagagaggaggaggaaggggaccgccacacacagaactgggtggtgactttaccataggtgcaggagggctgagaagggacctatcaaagttccaggggtcaccaggtctggacagagacaccctggatgccactaataggccaccttgtatatgaatttacagagtttttgaggcctttcggtgccgggactgctcatagaaacccaggttcaatttgacaaaacmctactcctccatgtgtcaagtg

SEQ ID NO: 653136 - DNA, 415 bp, Homo sapiens
acactatgataggtactgggtagttacaaagtcaaataagatatcgtcaggccaggcgctgtggctcatacctgtaatcctaacactttgggaggctgaggtgagagaatcacttgagcccaggagttcaagaccagcttgggcaacaaaacaagactcttcctctactaaaagttaaaagaataaaaaattagccagrcatggtggcacatgcctgtagtcctagctactccggaggctgaggcgggaggatcgcttgagcccaggagttggaggatcgcttgagcccaggagtttgaggttgcactaagctgtgatcatgccactgcactccagcctggatgacagagtgagaccctgcctctccaaaaaaaaaaaaaatatatatatatagtcattatcctcaaggagctta

SEQ ID NO: 653137 - DNA, 415 bp, Homo sapiens
acactatgataggtactgggtagttacaaagtcaaataagatatcgtcaggccaggcgctgtggctcatacctgtaatcctaacactttgggaggctgaggtgagagaatcacttgagcccaggagttcaagaccagcttgggcaacaaaacaagactcttcctctactaaaagttaaaagaataaaaaattagccaggcatggtggcacatgcctgtagtcctagctactccggaggctgaggcgggaggatcrcttgagcccaggagttggaggatcgcttgagcccaggagtttgaggttgcactaagctgtgatcatgccactgcactccagcctggatgacagagtgagaccctgcctctccaaaaaaaaaaaaaatatatatatatagtcattatcctcaaggagctta

SEQ ID NO: 653138 - DNA, 430 bp, Homo sapiens
tatttacttacctaggggtacatttttctcctaatacattatggaggatttatcaggaaattagactactcaaaatgcgatggtctgtgggtgctttgctgaatatatatttttaatgactggagtaagcatttgatatttcagtaagtggcgttgggacaattcactctcaaatgaaagagaaaagaaaaaaaatcgtaaagaaaataaaattcctacctattgcccccactgaaatacattaaagaggtactaaagactggaacatggggaaaatacactaaaactgtcagaagaaattataagagaatacctttttgaattttggagagaaaacgttttttcttttcttttcttttcgtttcktttgatatagaatctcactctgttgcccaggctggagtgcagtggcacgatcttgcctcactac

SEQ ID NO: 653139 - DNA, 588 bp, Homo sapiens
cagtggacacaagaagagtcccactaaacaaaactacagctactgtcctattttggactccatgaagggggaaaaaaaagcagttatataatggtaggggtaactgaccactattataaggaagtagggctgctgctacataatgggacagggaggaacatttttccactcaaaaaccattacctaataaagacatggtagtacagaatttagatccctcaaagatgacgttttgggtcacttcattgggcaagccacctacactggcagcagggctagttgaggaccaggcgcagtggctcatgcctgtwatcgcagcactttgggagtcagaggcaggtggatcacaaggtcaggagatcgagaccatcctggccagcatggtgaaaccccatctctactaaaaatacaaaaaaaattagctaggcgcggtggtgcgcgcctgtagtcccagctacttgggaggctgagggaggaaaatcacttgaactcaggaggcagagattgcagtgaaccaagatggcgccactgcactccagcctggcaacagagtgagactctgtctcaaaaaaaaaaaaatggggggct

SEQ ID NO: 653140 - DNA, 415 bp, Homo sapiens
gtatatataaaaattggtgtgtctactcatgctaattttgcaattcaaagcaaatgtaggaaagctaccctttaagatcgctcaacataatgatattgsattattacatagttggaaaggctgtttgatacattaataatgtagcagggctggtttatgattaaacactggtttaaaaccaagtaatggtttcaaggcaaaggcagaggagaagcttgattctagcaaggctacgcagtggctgatgaagtggtggaaaatacagcctggactctaattttaggcctcttctgcagtaccttttaattttctatgcctaatagttgcctttgtctctctgttgtgggtcatccgaaagccatgtggtaaacagacaaaatactaatgagattgaaactggggtatgtagcacttt

SEQ ID NO: 653141 - DNA, 415 bp, Homo sapiens
gtatatataaaaattggtgtgtctactcatgctaattttgcaattcaaagcaaatgtaggaaagctaccctttaagatcgctcaacataatgatattggattattacatagttggaaaggctgtttgatacattaataatgtagcagggctggtttatgattaaacactggtttaaaaccaagtaatggtttsaaggcaaaggcagaggagaagcttgattctagcaaggctacgcagtggctgatgaagtggtggaaaatacagcctggactctaattttaggcctcttctgcagtaccttttaattttctatgcctaatagttgcctttgtctctctgttgtgggtcatccgaaagccatgtggtaaacagacaaaatactaatgagattgaaactggggtatgtagcacttt

SEQ ID NO: 653142 - DNA, 595 bp, Homo sapiens
tatgtgacttctcatatttaatgttaccttatataaaaagcaattgctggctatcaaattaatgtgactgtgtccttagacataactgatttttctgtggctatgattaatactgaatgattcactgatattaaaagtggtacccatttattagcatttttcctttgagatcaactccaaggaggcaaaagcaaagtaacagttatccttcaatagctttgtcctggaaccaacaggctacatygtagtttaaactgtgatacaaatggtatttttcttggctactgtctattccatttctgcattcttttagtggagagttccctgttctagcagtcaatagaatcaacaccattgtttcaccctctcttcttctccatcaaaatctattactctacgtctgcttcctctgtgggtccactccatcaacagtcaagattcaagctaagtgtcaaatctaggaataagattttatttattttattgaaggacatttcatttactccagaactactgtatgtttcctattttatttccatttaggaaacattgattgaacatttagaatacattggaaacaaaactgactcagcag

SEQ ID NO: 653143 - DNA, 543 bp, Homo sapiens
gcacctgtagtctcagctactcgggaggctgaagtgggaggatcgttggaacctgggaggttaaggctgcagtgagctgtgattgtgccactgcactttagctggggcaacagagtgagaccctgtctcaaaaaaaaaaaaaaagaaaagaaaaaaaatggaacccagaacttctgacaccttaatttctgccttgtgagactccatgcagaattgtgctgtacctgaacttctggcctacagatctgggagataacaaatttatgtgtttttaagccactaactttgtggtaattatctgcagcagcaataggaagctaatattctgcctgatgagaaacttggagtgcagggctcagcaatctgttttaaccagctctgcaggtcattcccatgcattctgtagaaagatcctgctttgcagtccaacatcaatgaggtgcctccgcttaatagctgttgtttttgtagcactggccaatcttcygaacatccttaatcttgagttttttttcatgtataaaatgggattaataaaacaaa

SEQ ID NO: 653144 - DNA, 583 bp, Homo sapiens
caggcttctgcctccatgggtgatggactgaaggaggcactgccttttttgccacgaggtgtcaccagcattggttcaaggcaaaaagcacctctgatctgagagcaccagattktcatgactgctgagcaaaccctgttgctcttcatcacaaagatcccaatccactgagatgctaggacagagggtactggcaggggctgcattttcagtgactttgaaatactgctgcagctttggagggaaaggggtccccatgagctcaaggagtacactggaaaaagccccaaatgcatctgaagtcctatcagccttttggttgtggaatttcaggcgtcattttcaagtctgccctatatggttgtgcacgtggcttactgcacaaggcagtgattagaggttgaaatctagtctgcactttgcttgccaagccatgcaccttggaacagggctacatcagcctagagaaaagggcgcattttccttgttctcacaaagacattccatgggccagtggcagccctggtctattgcctgtttagaactgcagtttttctctgtatgaaataagagatttttaggg

SEQ ID NO: 653145 - DNA, 648 bp, Homo sapiens
agcacaggttgtggcatgagcttctgaccaaccaactataaattgagggttcccctgaacccttcctcaggttcaattaatttgttagagtggctcacaaaattcagacaaatacattatttacatttactgatttatcattaaggtaattataaaggatactagtaacagccagatggaagagatgcatagagtgacgtatgagagaaggggcatggaggttccatgccctctccagtcatgctagctccaggaatcactgtatattcagctatctggaagctttccaaacccatatggaagcctcattacagaggcatcattgattaaatcattggccattagtgattagcttaatctttagtccctctccccatcctggaggttgrgtgggtgaggctgaaattctcagccctctaatcatgccttggttttttctgtgaccagtccccatcctaaagacacctggagcttccagccacctgtaattagcatacaaagacacattactccagagattccaagagttttaggagttgtgtgtcaggaagtgggaagaccagttaatatttcacaataccatcaaaaaggagagagagaattataatgaaataatggcaaatatttcccaaatttgatgaaaaacat

SEQ ID NO: 653146 - DNA, 389 bp, Homo sapiens
gaattcataccacttacactgcactccagactggaataactggaatctcaagaaccragttgctttcatcgtggaaagagtgctggttttctgacccccagcatgtagtcgcccttatttttgatattgctttgtggctttgccctgtgtccttgactaatataaaagtctcctttttttagatatgttcaaagcctttggagaataataaataaagaaaaaacaatatgccttccagtataattgatcattctagattgagccccctgtgcagtgtctctgatccctctgcaggttcaggggaaacctcctccttccagcaaagatatctctgtcctgcctcagcgggatgtgcttttgtttttgaggaagtctcttcccactcactt

SEQ ID NO: 653147 - DNA, 597 bp, Homo sapiens
aggcatttcctctgtgaaacaccacgatgtggtatccaaactccctgcctcattccttggccttccctctcccccttccacaccctgtgtatactccagccacytcaaagccggtgagttaggacccccgaagctgcccccaggctgttggacaggtctgtggtttgcttatttcatttcctctgcctcgggtgtcctctccatgtcccccacgctctacgccaccttcaagacccccctcaagggcatgcttccctgcagaacaccccccgccagcctccttcccagaaaaggtggcagcctgctcgctctctgccaccatcgtgccctgcacctgcccacgcacactttcttctccatggcccactcagcagtccacctgcatgcattgaattgtgtctccctaaaagatatatccaaatcctgactcctggtaccagtgactgtgaccaaatttggaaatagggtctttgcagatgtaattaacttgagcatctcaagatgagatcatcctggatctaggacttgtgcccttgtaagagaaaggagagggagatgtaacacagagacccaggaaggcccacggagaaggccatg

SEQ ID NO: 653148 - DNA, 597 bp, Homo sapiens
aggcatttcctctgtgaaacaccacgatgtggtatccaaactccctgcctcattccttggccttccctctcccccttccacaccctgtgtatactccagccacctcaaagccggtgagttaggacccccgaagctgcccccaggctgttggacaggtctgtggtttgcttatttcatttcctctgcctcgggtgtcctctccatgtcccccacgctctacgccaccttcaagacccccctcaagggcatgcttccctgcagaacaccccccgccagcctccttcccagaaaaggtggcagcctgctcgctctctgccaccatcgtgccctgcacctgcccacgcacactttcttctccatggcccactcagcagtccacctgcatgcattgaattgtgtctccctaaaagatatatccaaatcctgactcctggtaccagtgactgtgaccaaatttggaaatagggtctttgcagatgtaattaactkgagcatctcaagatgagatcatcctggatctaggacttgtgcccttgtaagagaaaggagagggagatgtaacacagagacccaggaaggcccacggagaaggccatg

SEQ ID NO: 653149 - DNA, 541 bp, Homo sapiens
acaaattgttaagacctgctctgagaagcatgtaggtgactgggatgccccaacactaggtctcatcctgtgatcagggtttgaggagtagccccaaaggctgcagcttcaaaggccttcagaaccaaaagccccagaacagcgtggtttgagaaggtgctttgtctgctcacagggcgaggggtaggtgggtaaagatggcaggaggcactagtatggaaggcagccacaggaggggtctcatggtggattgaacagtgactcccaaaaagctgtgtccacatcctgttgcctgctctgaatgtggaccttatttgtaaaaagggtctttgcagatgtaattcactgaaggatctcaagatcctgtattatccaggtgggtcctaactccaaytgtgggtccttacaagagacacagaaaagagaacagatgccgagaaggccgtgtgaagacagaggcggagattggagtgatgctgccatgagccacggaacaccaggaaactccaggaaccgccagaagctggaacaggcaaggaca

SEQ ID NO: 653150 - DNA, 541 bp, Homo sapiens
acaaattgttaagacctgctctgagaagcatgtaggtgactgggatgccccaacactaggtctcatcctgtgatcagggtttgaggagtagccccaaaggctgcagcttcaaaggccttcagaaccaaaagccccagaacagcgtggtttgagaaggtgctttgtctgctcacagggcgaggggtaggtgggtaaagatggcaggaggcactagtatggaaggcagccacaggaggggtctcatggtggattgaacagtgactcccaaaaagctgtgtccacatcctgttgcctgctctgaatgtggaccttatttgtaaaaagggtctttgcagatgtaattcactgaaggatctcaagatcctgtattatccaggtgggtcctaactccaackgtgggtccttacaagagacacagaaaagagaacagatgccgagaaggccgtgtgaagacagaggcggagattggagtgatgctgccatgagccacggaacaccaggaaactccaggaaccgccagaagctggaacaggcaaggaca

SEQ ID NO: 653151 - DNA, 546 bp, Homo sapiens
ctgaatcaactttttcagaactctgaatttaacctaaaacttgcaccactcagggaggcattactttaaaaaccatctgaatctcaataagaacaatgagctttgtgacacttttcatataccctagtcccatccctctttctccagctctatgattttcttgaaaaccaacagcctgacagcccctgaaaaggaaagaatagactgacagccactagaaggaaacaatawgactggagttgcctcagaacctcattccccccaaaattgccattatttgaactgtcctatggttccctggaagaatgtccatttgacctaacttggagcttgccgagtgcaaaaggagtggtagctgggagcatttgtcagaaaaaaaaataattacaggcaattgtttaattctgcagctgcctgaggtggtggataacaattagggcgaacaatagactaatcaaaaagctcaaaagaaaaagctggggaatgagattcccataggggctttgaaaaactctgacacattactggaaatctagaaggctaagc

SEQ ID NO: 653152 - DNA, 546 bp, Homo sapiens
ctgaatcaactttttcagaactctgaatttaacctaaaacttgcaccactcagggaggcattactttaaaaaccatctgaatctcaataagaacaatgagctttgtgacacttttcatataccctagtcccatccctctttctccagctctatgattttcttgaaaaccaacagcctgacagcccctgaaaaggaaagaatagactgacagccactagaaggaaacaatatgactggagttgcctcagaacctcattccccccaaaattgccattatttgaactgtcctatggttccctggaagaatgtccatttgacctaacttggagcttgccgagtgcaaaaggagtggtagctgggagcatttgtcagaaaaaaaaataattacaggcaattgtttaattctgcagckgcctgaggtggtggataacaattagggcgaacaatagactaatcaaaaagctcaaaagaaaaagctggggaatgagattcccataggggctttgaaaaactctgacacattactggaaatctagaaggctaagc

SEQ ID NO: 653153 - DNA, 515 bp, Homo sapiens
cttctttttttattattattttataattttattttattttaattttttttagagatgaggtctcactctgacacccaagcaaagggcagtggtgtgatcatagctcactgcagcctccaaactcctgagcgatcaagtgatcctcacacctcagcctcccaagtagctgggactacagacctgcgtcaccatgcccagataatattttaaaatgttttktttttttttttgtagagacagggttttgctttgttgtccaggctggtctcaaactcctggcttcaagcaatcctcccacttcagctctggttgatgggaagtagtgggatttgatctcagttttctgttctcagtttgttcagtgtgtctaggaaatggggctgatgcatctaggatagatcaaaaagaatgcactcatttcaatacaaataaattgctgcagcctcattctgctagggaggtggagtcctgatgctttcccccagctactctggagaacaagaccaaaccaatcc

SEQ ID NO: 653154 - DNA, 473 bp, Homo sapiens
taaaggtataatatttcaaactgtggtactacatcaaaatggattttaaaatacatactttcagggggttgttattaccaaaccacagttcctcctttcctggaaggagtaactatttaggagtggctacccagcataagctacagtgtttgtgycccctccttggaatcttttgcactagagctgatttcagaatgtgaaacttcttgacttggtaaaataagttattctgtgataagaaagactagagtttactcacagcagggaaaagatgagaaaagagagagtagtagaggtggcatttgggttcctggggttccatttattcctttgattgttcaacctttgtcacaggtcagactctccaacagcagatgctaagatggagttaggagtgcagaaagtttattgaaagtgatttatctgttttgtctgatttgcctttcaccataaagttgtctgcgattgataca

SEQ ID NO: 653155 - DNA, 473 bp, Homo sapiens
taaaggtataatatttcaaactgtggtactacatcaaaatggattttaaaatacatactttcagggggttgttattaccaaaccacagttcctcctttcctggaaggagtaactatttaggagtggctacccagcataagctacagtgtttgtgccccctccttggaatcttttgcactagagctgatttcagaatgtgaaacttcttgacttggtaaaataagttattctgtsataagaaagactagagtttactcacagcagggaaaagatgagaaaagagagagtagtagaggtggcatttgggttcctggggttccatttattcctttgattgttcaacctttgtcacaggtcagactctccaacagcagatgctaagatggagttaggagtgcagaaagtttattgaaagtgatttatctgttttgtctgatttgcctttcaccataaagttgtctgcgattgataca

SEQ ID NO: 653156 - DNA, 617 bp, Homo sapiens
atgcaggtacgtgatgcactgggaagggcacagcatcatttgtgtagtattctgaccaacactgcgtaacccgaatttaatcaggaggaaatatcaagcaaactgagtgaagaacattccacataataactgtcctgtatttgtcataggccaatgtcatgaaaagcaaaggctgaggaactgttcyaagttaaaggagactaaagagacatggtcactaaatgcaatgggtaaccctggactgggttttgtgctggagggtagaaaaacaaatgctctgaagtacattattgaaacaattgaaaaaactgggatatggcctctggattagatatatataaatattatacacatatatttaaaaatacatactgaaatattaaggggcaaagggatatggtatatgcaacttattcatctgtagttcagaaaaaataaatacacacacagaatgatacagctgtgctgaaatgttgaaattcacaagtctgggtagataaaggatatataggagttgtctggattactctggcgttgtctggattgttctctaagtttgaaataatttcaaagtaaaaggttttttaagtattggagtacagtaaataaatggagcc

SEQ ID NO: 653157 - DNA, 542 bp, Homo sapiens
tatcaataatattcaaggtaaatggattaaactctccaatcaaaagacacacattgccttaatgaattaaaaaacaagacctattgatttgttgcctataagaaacacacctcacctataaagacacacatagattgaaaataaagaaatggaaaaaaatagtccatgcccaatgaaaagcaaaaaagagcaggagtcactatacttctttcagatacaatagatttcaagataaaaactgtaagaagagacaaggaaaaccagtrtataatgaaaaaagggtcaattcagtgagaggatataacaattttaaatatgtatgcatccaacacaggagcaaccaaatatataaagtaaatattattagagctaatgagagataggcttcaatacaataatagctggagaattctacaccccactatcagcactggacagatgttccagacagaaagccaacaaagaaatattggactgaatctgcactatagaccaagtgagtctaatagatatttacagaacatttcattcaaaagttgcag

SEQ ID NO: 653158 - DNA, 589 bp, Homo sapiens
ttggtgcagtgtgaattttaaacagtaacagttttctttacatagaaggtctcccattactaaacatcctgcccctacataatagaggggctaaaacgatgtttagcaatctactcaagccatcaaagagtatgcattgcccaagggtatagattggctccttttagataacatgtctagggaaggttgctgcatggaggaccttacactggtaaatcgagtcaagrcattattgttctggctgtaaaatagtacacatttgtaagtatttgcaagattacacatgctgggtctgagaatcaagctgaagggtcattattcagtttcatcatgactcagagctacttcaagatccagaaaacctttcaaatcagtaacttgaaaaaatgcattcaccatagtattagggctaagttacattacattttatttcaatgctgtgagaaatgaaagttatatgttgtatatacagcaacatttaattaacaagaaaacaaaattaaccaagaaactcaggctgctacaaatttattatcaactacagtttcttcatcttcaaaatattcctaatatactctttggtatttcc

SEQ ID NO: 653159 - DNA, 596 bp, Homo sapiens
aaacaaaaacaaaaasctacgtaagctggaccataaaggatatgtaggaatttgcaggatagaggagaaaaagagcattaaagaccagcatttacaaaggtcaaaataagctccttccagtttggaacagcccctcatatacccacaacctaataaaaaatttacaaagttttaatttgtttttcagaattattcttgtgatgtctagaggtttatcaactttcttaagttagacaaatgcagagtctagttacttcatctatcccaatacagtttactgtaattccaacagaaatatagtaaagggaacaaagaaattgttagccagtgatgaatcagaaaaggcactataaggaaagttcaaattgaagctaccatgaatgagtaggtagatatgtgtttactctacaggaagccaaggtgtaagaaatgttggagaacaaacttcatatgtacaaaaacagatatagcccaaacatttggaggcattgtgggaagaaaaaatggtgtctcatctaaaaatagctcgggatatgacccactaattgcaaaactaattgttgaatgtctagctgttgaggcattctgctagattt

SEQ ID NO: 653160 - DNA, 578 bp, Homo sapiens
ggttaaattggtttctgttctccaggagctcacattctacttggggagacagatgtgtaaatggctgatcacactgacaagggtcataaattatgtatgacttgagtgttgtgaggtcccaaaggaagaagcaacttcttgagggtgacaccactgaggtctctagtagtgactggcttgtatctctaggtatagtagagaatacacataatacacaaaatgacacataccatcttattctcttatagcatcctattcttttcctttggaacagttatatcaactgataattatgtgtgtgattawttcattaatgtctgtctttatgactagactatgaaaacctggaaggtagggactggtctgtttttgcttaccatccccggggcctattatgatgctggcacataatagatagtcagttattgtttggtgactattgaatgaaggaatatgtgttttcaagctatgggaagatatttattatgggaaacttcactacaatattattggctaccactttgcccttttaagaagcttattcttggattttcattcaaatagttcacccatcccca

SEQ ID NO: 653161 - DNA, 548 bp, Homo sapiens
tggttctatagggctccaaaagataaaaccagggcctatggttaaaaactattgggatattattttcaacccagttcaaaaatgactttccagtagtcagatctgatttgacagagaatgggctaccgcctcaggagataatgaagtctctgctattaaaaatattcaattagagaagagttcaagagaaaacttaaggatcaaataagcaaaatgagatttagaaaccttttccactcagggattatctgatttttaatatgctttgccttctcaactactctataaatttcttaaagacccagactatcacatcactttccatccttggtaygtatttctttatctcaaacatagtagatgctcattaaacatttcttgatcaagacagaccctgatatcaatactgaaataaaactttaaatgtttgagacaatttttggaaagcagttaactacattaacaatataattaaaaatgcgctctgaatattccacaccatgaagtatcatgcaattattactaaccctaacagtatattaacaata

SEQ ID NO: 653162 - DNA, 647 bp, Homo sapiens
tgatctaatgttgatcatcttggcaatacttgctctgggaggcatgctgtactcttgaattcagggtaaaaaggagaaaggtgaaggaagagtgggagaggaaaaaagagcagatcaccactccacttctggaaaatatgatggagtgaaaagagcagtggcctaagacacctggactcaggttcccagctaagccacggctatctgaacaacattaggcatgccacttcagttctatagtcttggactttttacctgcaaaatggaccagaccctccccagtccagcattctgtggctccatcttagactatgtctgtccataaactgtcctacttaaagttatatgtagaaagagaaaaggagacaggggcactaagatttttaataaatgtctactcggctggatactttaaatatatgagcaygtgatattcataagtcatgagaaaaatgaggcataggcaagttaaggtcacaaaattaggaagcaacagagcggaggtttgtatccatgcctgtctgattccaaagcccatgctttctccaaacttaccatgttggctgaagagaaggagatctgagaagcccagagagactctcacttcttaactaagggggaagaagcttctctgttactggccccat

SEQ ID NO: 653163 - DNA, 575 bp, Homo sapiens
atcaagtagaatgacttttctcactatattcttttttcagaattgttttggctattctagttcctttgcctttctacataaattttagaatgatcttgtctgtatctgtaagaaatctgctgggtgtggtggctcacacttgtaatcccagcactttgggaggccaaggcgggcagatcacttgaggacaggagtttgagaccagcctggccaacatgatgaaaccccatctctgctaaaaatacaaaaaaattagccgggcatggtggcaggtgcctgtaatcccagctacttaggaggctgtggcaggagaatcgctcaaacccaggggtcrgaggttgcagtgagcagagctcacaccattgcaatccagcctgggcaacaagagcgaaactctgtctcaaaaataaataaataaatcttgctgggattttggtaggaattacattaaaactgtatatcaatttgcctttttttaattgggtttttgtcttattacacattgtaagggttctttgtatattctggatataagtcctttatcaaatatatagcttgtaatatttttcttctag

SEQ ID NO: 653164 - DNA, 469 bp, Homo sapiens
gttagctgaataaaaaatgatggtggttatttgattgtrttgtcttagatggcaggttttagccagaagagtgctgggctaggaagcagaattgttttcctctcttgggagaagagatgtagcagcagggttttggggcttgttaaatacgaggtgcctgttaggtatccagatggatgtttcaagcagttgggggtttatgcaggtctggagttctgtggggggccagtccaagctggagatacaatttgggattcaacaccctgtagttaatatttagaactaaagagtctagctgtatagtcccagctacttggaaggctgatgtgggaagaccgcttgagcccaggagttcaagaccagcctgggcaacatagaaagactctctttaaaaaatgaaaattaaaaaagataaataagaaataaaagtacaagtctccatgagatcgcttaggaaatgagtgtggat

SEQ ID NO: 653165 - DNA, 469 bp, Homo sapiens
gttagctgaataaaaaatgatggtggttatttgattgtattgtcttagatggcaggttttagccagaagagtgctgggctaggargcagaattgttttcctctcttgggagaagagatgtagcagcagggttttggggcttgttaaatacgaggtgcctgttaggtatccagatggatgtttcaagcagttgggggtttatgcaggtctggagttctgtggggggccagtccaagctggagatacaatttgggattcaacaccctgtagttaatatttagaactaaagagtctagctgtatagtcccagctacttggaaggctgatgtgggaagaccgcttgagcccaggagttcaagaccagcctgggcaacatagaaagactctctttaaaaaatgaaaattaaaaaagataaataagaaataaaagtacaagtctccatgagatcgcttaggaaatgagtgtggat

SEQ ID NO: 653166 - DNA, 469 bp, Homo sapiens
gttagctgaataaaaaatgatggtggttatttgattgtattgtcttagatggcaggttttagccagaagagtgctgggctaggaagcagaattgttttcctctcttgggagaagagatgtagcagcagggttttggggcttgttaaatacgaggtgcctgttaggtatccagatggatgtttcaagcagttgggggtttatgcaggtctggagttctgtggggggccagtccaagctggagatacaatttgggattcaacaccctgtagttaatatttagaactaaagagtctagctgtatagtcccagctacttggaaggctgatgtgggaagaccgcttgagcccaggagttcaagaccagcctgggcaacatagaaagactctctttraaaaatgaaaattaaaaaagataaataagaaataaaagtacaagtctccatgagatcgcttaggaaatgagtgtggat

SEQ ID NO: 653167 - DNA, 596 bp, Homo sapiens
agtatttgtcttctgaaagagtataagtctggttgaagaaagagaacattaatatcttttaaatgagcatagttgattaatactctacttttttcataaagtaaatgaaaaaaattcaaatggaaagaaataattttaagtgagtgaaaagtgaagatatgaagaatgcattatcatgctataatgaaccattatctatgtcaaaagattcactccttaacaccaatcagaacttgatactcttttcctttaaccagacattcaggaactgtgctatatagtctgtgcaattgttttagtgaatagagagccacaggccctgaattataaaaatacattttagtaatgataaatctttttcatcattaaaatayggattatttcatgatgctctggaagccctataactaaaagacaattgctagtagcagacaaatgtggacaataaatatgatggcaccaaatatttttgctttgtatttagccagcataatggaaacatatctgattttagagacacaaacacctttccagaaaatagtgcctgtgacttcaaacctgcttcaaccttctctgctctcaaatttggtgcataa

SEQ ID NO: 653168 - DNA, 589 bp, Homo sapiens
atttttagttgagattccaagtaagaagtgtttcttctatccaaagggagtgctgatggggcaggtagataactttaaagaccacagagaaragggtctctctggacagagctgagatccttgccatggccacactggttagggggatcactggctcttctgagagaagaatctgcagagtaacccaagagctccagatgtatctttactcagaacttatttcaaccagggctcttttaatagtaaaaggggtcactactaataatttacccttgtacaatagacataaagtgggactgacctgggcaaacatagcagtattatcactccactcataaggtgattgcatgaaagtccagataaaatatttaatattgccctgttccgatttaagaaggttaatgatgttactctagatcagcaccacccaatagaaatataacgtcagccacatatgtaagtttgcattttctagtagccacattaaaaaagtaaaaagaaaaaggtaaaattaattttaataatatatttttagaccagtaaatctaaattattaccatttcaacatggaatcattattaaaaaatta

SEQ ID NO: 653169 - DNA, 589 bp, Homo sapiens
atttttagttgagattccaagtaagaagtgtttcttctatccaaagggagtgctgatggggcaggtagataactttaaagaccacagagaaaagggtctctctggacagagctgagatccttgccatggccacactggttagggggatcactggctcttctgagagaagaatctgcagagtaacccaagagctccagatgtatctttactcagaacttatttcaaccagggctcttttaatagtaaaaggggtcactactaataatttacccttgtacaatagacataaagtgggactgacctgggcaaacatagcagtattatcactccactcataaggtgattgcatgaaagtccagataaaatatttaatattgccctgttcygatttaagaaggttaatgatgttactctagatcagcaccacccaatagaaatataacgtcagccacatatgtaagtttgcattttctagtagccacattaaaaaagtaaaaagaaaaaggtaaaattaattttaataatatatttttagaccagtaaatctaaattattaccatttcaacatggaatcattattaaaaaatta

SEQ ID NO: 653170 - DNA, 596 bp, Homo sapiens
actgacctacaataaagaaagtaatcaataatcattctacaaaggaaaaagagatgaagaagatgggtatttggtaatttgatggtttctatttgcctctctggctttgattttacggttgggaaggatgtgaatgttattacatggcaatgaggttgctatggtaactctttattgtttaatataagatgagctaaatcttagataagttactgggagaaaaattaatgctgccaaaggccagatccagtttttgattccctttttttatttaacatttatgcctgtttccccttcataacctgcccttctcctataggacatcaaacacatatcaaaatgaagaacagttcagccattgttaaagggatcctgtactatagaaaatcaactaggacccattggtcaggaagaaagaagttaataacacatgttagtatctgtgcctaggataactcaaaatgtggctcaattctagctttgcagtcaacattccttttctgcaatcccagctttactacttagccattctgtgaccytgggcaattacattttctggacctatttctcaatattcaagatgagaataataatga

SEQ ID NO: 653171 - DNA, 405 bp, Homo sapiens
acaatatcaaagctgagctccaagacggcagattcccaatgcacattttcacttttcatccaaaccaatcccttagtacagagtgactctagacaagttttccaaaactcagttccctgaatgaccagtttacaaaaaacaaacaaacaaaaaatccaagcaagtaaaaaggtaatcaaacacacaataaaacagaaaacatttctcaaaattatatatagcttccaagtaaatcttggtatctagtagrgtcagtcagttctctttctttctctcctcctctttcaaagatctttggcttttcttggccgtttcctgttgcacctgaattttaggcccagtttgtcaatttgtctaaaaatccctgttgggattttgattggagtagctttgaatctataaatc

SEQ ID NO: 653172 - DNA, 644 bp, Homo sapiens
ttgacttggttctgaccagtagaggctgtatttttcaaccaaaggctacactgtctggggaagaaaatggtaatatgcatgagttgtccacgactgtagaagtcagatggatgaggtacttagccttgctatcctgagtacattccatgctgaaggtgggtcccagcagcctgagccccccagggtcagcttctggggcaggcagccaatgttctgatgtagctgccatttttcttggatgattcatgtgtgaaaawgtctcccccaaaagaatttgggtcatcttgttctttttcccaaagccaggctcttatcagaccagaagagtctcttcatacaaatggatcccagttgggaagtttatgaatgttaaggatagttgctcattccaaaatacataaccctttttgtctgtggcatcttatatttgactatattgctttttctactcaacagaattggatcttagaatcctggagctggtgtatgtgtgacttcagagataacttaaaaatgatcacgtatttctgtcttctaaattcagatggtttaactcattatttcttttttcttgtgaaggcatagccttgaatttgaacacagcttttgcttttgtgtgtgtgtgtttgtgtgtgcgtgtgcat

SEQ ID NO: 653173 - DNA, 644 bp, Homo sapiens
ttgacttggttctgaccagtagaggctgtatttttcaaccaaaggctacactgtctggggaagaaaatggtaatatgcatgagttgtccacgactgtagaagtcagatggatgaggtacttagccttgctatcctgagtacattccatgctgaaggtgggtcccagcagcctgagccccccagggtcagcttctggggcaggcagccaatgttctgatgtagctgccatttttcttggatgattcatgtgtgaaaatgtctcccccaaaagaatttgggtcatcttgttctttttcccaaagccaggctcttatcagaccagaagagtctcttcatacaaatggatcccagttggsaagtttatgaatgttaaggatagttgctcattccaaaatacataaccctttttgtctgtggcatcttatatttgactatattgctttttctactcaacagaattggatcttagaatcctggagctggtgtatgtgtgacttcagagataacttaaaaatgatcacgtatttctgtcttctaaattcagatggtttaactcattatttcttttttcttgtgaaggcatagccttgaatttgaacacagcttttgcttttgtgtgtgtgtgtttgtgtgtgcgtgtgcat

SEQ ID NO: 653174 - DNA, 642 bp, Homo sapiens
ccagggtcacacagctaggactcgatccctagccttctggtcctcaggccagccaatgttctttctaggctggctccctagtgccatccatccatccatccacccatccatccagtaaatataaactgagcaagattctgctacatgacaggtactggggtacatgttttttgtcctcaacaaactcacagtgtggaaggaccaaagttctttawgtttatttttacttcattccctggggtttcccatctggagggcactttactaactttgctagcccacgatcacagcgagttcatccaggagtctcccagaatatactcccatcatgtattctctgtgcctcttgggtctattctttcctaatatttgtgataatccatgttcatattgaatctcccctgggagatccttgaaaccagggactgtgtgtaagtcattgcttttacttcctagcacggaatctgtcacaagatacttctccaataaatgtctgcttttctagagaatttacttcactccttagaatctcaagtgagagctgtgtatcagttagctcctgctaggtaacaaaccacaacaaacatagtagcttccagcaacaatcatgtattattattctctctcctggttctgagagtt

SEQ ID NO: 653175 - DNA, 509 bp, Homo sapiens
cctaacactgatttcctattttatgactaccatttgacttctcccttttcccagctagaccgggacttctctgaaatattaactgtattattatttctctatcataaacctgtagcacaatataaccacagttgttactcaatgtagatttttataaaagaagtaaggaaggaaagaacgaagggggwaaaaaacaggttctggggcagatattcagtctggtattgaatccttctaaacctgcagctctgacttaggttgatgctgaaaagtcactgtgaccctcagccaccaatatctacttgccaaagcagaaaaaggatatcagcagatttaagaaatcttccttatattgcatttgcttgtttctttaaaaaaaaacatttattgagcagttattacattatagatatggggctctagatgctgtgataccactgtctgcagcataccttgcaataatgctataaggtaagtataattgtcctcacttcacctaaaagagagag

SEQ ID NO: 653176 - DNA, 596 bp, Homo sapiens
ttttaagtaatatattttaagatttttaacatacattaccaagttgttctctttaaatgctttacattccatcatttacatgattttcatcatgatcttattaaaaggtagatttttttaaatgccaattttgataggtacaactttttaaaattaaatgtgttttattaatgagagtttcattttttcatatgactacactcatttatattgcttccttatgacttatttgtttatattctggcccatattttaagtaaaaaaaaactcatgtttttataggatttacaataattcttccaagtgtattaattccttctcactaacattttaatattagtttgttagggtttttgtatgaaataacatcaaactcccaaacagctaaaaaaaaaaaactaattcttcttatgttctatgtcttattgtaraaaataaacatgtttttattagtaaacctctattaataaacaattttgtggggagaaagtcattggactagtttatttctgttgttagggtgataatatacctgctaaacataaattatctgtgtttgaaaaaaacaaatcctggggtttttcttgctagcaaca

SEQ ID NO: 653177 - DNA, 621 bp, Homo sapiens
atgatattatgagaggcaaaaattgataatgcaagcaagagaatgaatgtgagtgagaagggacagagtccagagccttagtggccaaccagccttgcacaggagcagggcagccctscttataacagaaacaaactcagagtacctgtgtacagattcagggtaggtagatctgctagggagacgaggaacatgctcttctgatggcttccattgtccctgtgcaatcagaagcaagctcatcagctgagaatgagaagagtaaacaagggtaaagtttgaaaaggtgtggaagagccttcagagagtgaattgttaaggccagcagtgaattatctagtggattttccagaacagcgctatctcatagaaatataatgcaaaccatccatggaatattaagttttctagtacccatattgaaaacatgaaaagaaataggtacaattaattttagtggtatattttacttaacccaacatattcaaaatattatcatttcaacacgtaatcagtataaacagtatcaagatattttagattctttttttttagtaataagttttcaaaagccagtgtgcattttacattttcagcacatctcaattcagatgagccaca

SEQ ID NO: 653178 - DNA, 610 bp, Homo sapiens
ggttggtgaaggggtaaaaaaaaaaaaaaaaaggctaaccaattgcagccatctgactcacaacaagaactagaaataagattaaaggaagctgaaagtttatttaacaaaatagtaaggagggaaccagataactgagcaaaaacaatatgaacaattagaaagtaaaggtataatttcacaggtattataaactttctgccatcactgtgggaagtgtgaggaatctcattaaaaacatgaggaaagcctgaggtaaatctaaaatgccacttatagatccctcccatctttgagtatccattaacctgaaagttctccttccaatgaaataacctcagtttcactcatccatttagaaagcagcagaagtttgaaacattctatgatgttttcaaacagtcatgcagcagaagtccctgacttaaacctaagctttgtttggattctggycttgcttcagcatgactacattctcctccaggaatccacttccctaaggaccacagcgcctcccaggaaaggcagtgaacaaggtcagagtagaggtgacctgggtacagcacagctgtctaccactcaggttgacccaagcccagactccttcagt

SEQ ID NO: 653179 - DNA, 538 bp, Homo sapiens
tctttgtaacttaaatcaagaggccttgccttcccctgatcaggtggtgggtacatagtccaagccaagccaaacaggccctccctccttcctggaatggaattgggaggatagtgatgaaaacaccatgcaaggctggygttcactggccccagtgacccattgagcaattcctgcctcaagaccttcagtgctacctaatccctgccctttcggagctgcttctctctcctgcaggccctcctctattgttccagtaagttctcttttgatttaaattaacaaaagctagtgtctgttacaaaccaccaaagatcccttacatcctaatacaactccaataaattggccttcctggaaatttgttttcagaatagaagtaccaataagaaaatagcggccaggcacagtagctcacacctgtaatcccaacattttggaaggctgaggtgggtggatcacctgaggtcaggagttcgagaccagcctggccaacatggcaaagccccgtctctactacaaatacaaaaattagctg

SEQ ID NO: 653180 - DNA, 538 bp, Homo sapiens
tctttgtaacttaaatcaagaggccttgccttcccctgatcaggtggtgggtacatagtccaagccaagccaaacaggccctccctccttcctggaatggaattgggaggatagtgatgaaaacaccatgcaaggctggtgttcactggccccagtgacccattgagcaattcctgcctcaagaccttcagtgctacctaatccctgccctttcggagctgyttctctctcctgcaggccctcctctattgttccagtaagttctcttttgatttaaattaacaaaagctagtgtctgttacaaaccaccaaagatcccttacatcctaatacaactccaataaattggccttcctggaaatttgttttcagaatagaagtaccaataagaaaatagcggccaggcacagtagctcacacctgtaatcccaacattttggaaggctgaggtgggtggatcacctgaggtcaggagttcgagaccagcctggccaacatggcaaagccccgtctctactacaaatacaaaaattagctg

SEQ ID NO: 653181 - DNA, 562 bp, Homo sapiens
ctctgtgtagctctttcttctctgtgcagtgctcttctctaaggcatcctgccttgtaaattctagcttccttggccttctcaaattctcaactctgtctcgtcaactcaggaagaccatcaagctctctttgggttctccctccctgttctgtagcctgaaaattacttsccctgtttcccttcccctggggattactttctgtattatctgttttctaatatctgaaaggtattgtttcatatgttttgtctagttgtttaaggcaggagagtaaatccaatccctattacttcatcatggttcaaatataagtccttatacattttttaattaaaaaatattttattgtagtaacatacataaaatttaccattttgatcatttttaagtgtacagttcagtggcattcattacattccctctgccttagttttaagtgaaaaaatgtgtcatttttcgtctaaccattattaagcacttagcaccgagtgttgcagtagatagtgattacactcatcttacagacaaggaacatgaagctcagaagggaacttgccca

SEQ ID NO: 653182 - DNA, 551 bp, Homo sapiens
ctttcttctctgtgcagtgctcttctctaaggcatcctgccttgtaaattctagcttccttggccttctcaaattctcaactctgtctcgtcaactcaggaagaccatcaagctctctttgggttctccctccctgttctgtagcctgaaaattacttcccctgtttcccttcccctggggattactttctgtattatctgttttctaatatctgaaaggtattgtttcatatgttttgtctagttgtttaaggcaggagagtaaatccaatccctattacttcatcatggttcaaatataagtccttatacattttttaattaaaaaatattttattgtagtaacatacataaaatttaccattttgatcatttttaagtgtacagttcagtggcattcattacattccctctgccttagttttaagtgaaaaaatgtgtcatttttcgtctaaccattaytaagcacttagcaccgagtgttgcagtagatagtgattacactcatcttacagacaaggaacatgaagctcagaagggaacttgcccaa

SEQ ID NO: 653183 - DNA, 562 bp, Homo sapiens
ctctgtgtagctctttcttctctgtgcagtgctcttctctaaggcatcctgccttgtaaattctagcttccttggccttctcaaattctcaactctgtctcgtcaactcaggaagaccatcaagctctctttgggttctccctccctgttctgtagcctgaaaattacttcccctgtttcccttcccctggggattactttctgtattatctgttttctaatatctgaaaggtattgtttcatatgttttgtctagttgtttaaggcaggagagtaaatccaatccctattacttcatcatggttcaaatataagtccttatacattttttaattaaaaaatattttattgtagtaacatacataaaatttaccattttgatcatttttaagtgtacagttcagtggcattcattacattccctctgccttagttttaagtgaaaaaatgtgtcatttttcgtctaaccattattaagcacttagcaccragtgttgcagtagatagtgattacactcatcttacagacaaggaacatgaagctcagaagggaacttgccca

SEQ ID NO: 653184 - DNA, 482 bp, Homo sapiens
  misc_feature 373: n = A,T,C or G
agatcttcacagacaatgaaaaggtgagaaccacaagttgaggcaccaaacatgaaaacactcagtactggtaagtgttttatggaagacagaagccaatttctagataccaacactgtggttactgctcaaaagctctatcaatgaagttattacatactaaaataatgtggtgtgtgtgtgtgtgtgtttgaaatattgtgtgtgtctgaggatgtatgtgtttgagagagactgtgagtgtgtgtgtgcatatgaatgtatttatactgcaggacamataccactcgtgggtcagactcgctggattatggctgtaccactaattgcatctggtttctatgactttgctcaggcttccacagaacaaagntagacacaatcttgtcaaatttgatccctatgaatttcatgaactggggaatcacagtaaagtctgttgaacacttgcctttagctcatactaattaattagcacaagt

SEQ ID NO: 653185 - DNA, 613 bp, Homo sapiens
ggcctctgccctctcttctgctgggcatggagtggaaaagcctggaaagcaggaagtcttccactggccctggttactgtgtaggtaggcttagtagtcttgctgtcaccagggtagcaatctcatcaagggaaggggcactgagcacatagtctcaacctccccttgcaaaacgtggaggagttcctttctgggctttgtctgtgactactgcaattctcagtcaccttggctggtgtctgtgttggaaggaaactccccgaagaatagcaaacatcttcagtctgactcaagctttggctctcctgatcttccccctgtaccctgtccattaaagaaaacctatgtgatagggtgtctgaagatggcactttgaattcgaggacctggactgaccttctgttgctgagggtcacagtccctgggtttctttttggtttgttcttggtttataatttatgttttattttcttgaaaccttttgtctttctccttttgttttctttttcctcctcctccttgttattattgttaagtgktttttagcttctgaagatagaatttcaattgttcttatttgctaattgataactgtttcaatgcttacatagga

SEQ ID NO: 653186 - DNA, 576 bp, Homo sapiens
taaaagaatttgaacaaaacagacgggtcatctgggttcaaattcctgtataatcactgatttttataagctagctctcacttctccaagaaaaatacagtttcaaatgagtcatgattaaaacttgatttttcttatctttcttacaaaatgaatcaaactacacagccaagttctcagagtctaattccaaaaggtgcagatcctatcactttggtttagttggctgaatcttaggagccccttcctgtacctttctccctacactctcaaccaagcaatggtggcctgaggctggttcttatgaatcctccctccaggagctgctgcagagggtgagccaggccacctcctgcacactgactatgatgtcacaactgggtatgtctctgaggtgcaccatttcccaagctcattcctacatcagcaattattctacaggctcccagatctttctggaaatcctttgtcaactccacaaattgcatggctrcccccagcccatgagatacaccattttgatggaaagctgagttatcaaaatcttagggctcagttcagctcctgaaagcagca

SEQ ID NO: 653187 - DNA, 533 bp, Homo sapiens
ggctacccccagcccatgagatacaccattttgatggaaagctgagttatcaaaatcttagggctcagttcagctcctgaaagcagcagaactctgaggagtctgaagaatagaggaaaactaagttcaccttayatgtttctctaagtcctttggctttttacttgaagaatccatattctgtttttgtggtatttccttttctgtataaaggatactgagtggttttatttcaccaaaaataacacaaagtaaagtaaaaagtagtaataattcaagttttctctcttgacttatgatttatgcctctttccttagtgattcccctttcctgtgcttaaaattcatctgttcagatcagacatactgtaaatatcaatctttaaactttgtcaaagacaaggaaattgatggtagacagctagaacaaataagtactcaaagactaaaggaagagacttggaagggtagaaaggtgcctccctgcaattttcaaaggagcatgaggtatgtgctggggacaagaacacggc

SEQ ID NO: 653188 - DNA, 552 bp, Homo sapiens
aaacattttggagtgctcaccacatgcaaagtcttgggctggatgaatcagagaaaacaaagtggaatataacaacctcaggacacaccccagggtcacagtctrgttggggaaacagacactatcaatatacaatttgcggtggctttagtggagattacatggggttttatttactttactatggagtagacacttaaaacatttatccctaaaggtaactattagattagtcaatcacaccagacttttaatacaaacattgagaatcaattttgaggttaaagcaggtagaacctgaatctgtggtgagaggagtacaacttttagaaaagaaaattattcgactacataatcagacgttaatggagaaagcatattactaaacctggcgggggcggcagtggttttttgttgtttctgttgttctttgggcttgaaataggatattctggctatctagcgttccggcaaactaagagttactgtataggaagtgtgaaaacaaagtcagtaagattgattccaaaaaagacattatgaaatccatgt

SEQ ID NO: 653189 - DNA, 583 bp, Homo sapiens
tgggaacaatcctcagaggatattgccttagtagtgtggttaaattagccctagactaaatattgctctagacttacactgataaggtttaaaagcaagctcaaaagtatccaagtgattctgagtgacttcactatgcactagaacaaatcacaacattattcaaaggaatgtaacaaaatccagcaacaaacaatgaaaaatttcagtactgaagaattcagtttgcatcattcactaagaacacgttacccccaaagaatttgtcactcaattttctcattgtatttaatgaggtggtaagaattgtaaaatgtgtcaacaaaagtggtctgaagacttgtgaaccaatctttgatgaaaatgaaaccatttatgactgacttacacagaaaagaaatttattgggaagatttcaaggaatcaacakaaagtatgaagaatcagattcagaaaacaagcaggaaacaaagagatctgggcaattaatccccaggaacaccctgcaaggacagtttcgccatcatcatggacattacacacaactcctgatccagccaccactagacacagggtgctgtta

SEQ ID NO: 653190 - DNA, 530 bp, Homo sapiens
acactacaaatcctttaataatattctgaatataagagttatgcttataaataaaaccaacatatctgagcaagacagaagtttatggaactctttgggtaaatgtcttggccctaggaagcatatttttatccaaaaatattttaacatacttttttctaattataaagataatatgaagaaaatgtttagtctttacaaaagactaaagaaagtaaaaacactcaaaatcagtagaaattacccaaatcccatcctccagaagttatcattgtaactatggtgctagacattctgaacatctgtgtacatacaaagacatacacacacaaacacacacaacttaatattgatggaattgtccttcctayagagttgctttctattgcatttttttaatttaaaaataatatgctattgaaatatctttccatgccagtgactacagttatgactgattctttttagtggcaacatacagtttcattgtatgaatgcataatgatgattttgatccatcctttattgat

SEQ ID NO: 653191 - DNA, 589 bp, Homo sapiens
tgaatgaatgtacatggtggttaaagaacagaaagaaggccagtatggctggaatgtagttaacaaggaaagaagaagtatcaagtgccatcggagagaataggccagggccaactgtgcattggccttgcacggttgggaatgtgagggacaaaaaggagtactgaggttaggtaagttgaagcatcactgggttggtgaaagccaggcasgtttcttactatgggatttctcgaaaactttaaaatataatgctcattgtaaattttcaagtcagtaatacagatcacagcattttccaaatacatttcatcatgacatcctttttttcagaaacgagctcttgagactgttgtttcaaggaaaatgcgttgggttacacaggtcaaaaacaaaaacaagcaagggctggtaacctatagctttcaggccaaatccagcctaccacctgtgttttaccatctgtgaactaagaatagttttacatttttaaacagtctttaaaaatcaaaagaatatttcacagcaagcaaaaattatatgaagttcaagtttccgtgtccataaagttttactgggacgcagccac

SEQ ID NO: 653192 - DNA, 607 bp, Homo sapiens
cactttctctaagaaccactgattaaaacagggcagggcaataacaccaccccaaaaggaggacaaaatatacctgtagcttccaaatagtcaaaatcacaattaattattaaaaataataacagaaaattaaaactccattaaatagttacctaatgtttctcctgcagcatcaggcattgtgctcctttagcatggtacctgaagtcaggacagattaaatgctcactgagcccctaaatcaatcactgttgttttaatcattaacgaaatgtggttcttaatatttaaactcagaaacaacagtgatatgctggacttaaaggcaggactttattttactttaaagcaccaatgtcatttcggggtttttttaattccaaaggtttttgaatgacagctattgtctcattttgctgcagcccagacactaaagtggccactgattggcccatccatgagtctgtgacactcacagtccaggagtttccaattaagctacccgacataccatgtttagacccctgatatgaatcttcagatatatgaygagagaactcagctttagttctcttgggacagctttatttctctccccacattttag

SEQ ID NO: 653193 - DNA, 613 bp, Homo sapiens
ggcctctgccctctcttctgctgggcatggagtggaaaagcctggaaagcaggaagtcttccactggccctggttactgtgtaggtaggcttagtagtcttgctgtcaccagggtagcaatctcatcaagggaaggggcactgagcacatagtctcaacctccccttgcaaaacgtggaggagttcctttctgggctttgtctgtgactactgcaattctcagtcaccttggctggtgtctgtgttggaaggaaactccccgaagaatagcaaacatcttcagtctgactcaagctttggctctcctgatcttccccctgtacmctgtccattaaagaaaacctatgtgatagggtgtctgaagatggcactttgaattcgaggacctggactgaccttctgttgctgagggtcacagtccctgggtttctttttggtttgttcttggtttataatttatgttttattttcttgaaaccttttgtctttctccttttgttttctttttcctcctcctccttgttattattgttaagtgttttttagcttctgaagatagaatttcaattgttcttatttgctaattgataactgtttcaatgcttacatagga

SEQ ID NO: 653194 - DNA, 563 bp, Homo sapiens
acttcttccagcttctattcctctttacctatattcttattcaaagtaatctcaccattccccatggttttaaataattcctataatgttattttttccaaatatatcctgtgtcctgatttcccctctgagttccagaaccttatatctatctgcttcttgatatctatatttagatgtttaataatatctcaaatataatatatccaaaatggaaacctaatktaacccaaggaaactactccctacaaccttattttccccatctcagggactaaaaagttcgcttaagagttactactgtggcattacttttcccatgctgcaatatccaattcactggtaagtctatagtcaaatatatcctgaaaatacacgcttaacttgatctccattgtcagttccctagaccaagactctattaccttttgcttgaaatgcttaatttcccactacctggtatctttgttgtctacaacaatgttccacttattgtatccagaacagagctgagaactattagctctaaggtggcacttgttgtataaattaatgaataaaat

SEQ ID NO: 653195 - DNA, 614 bp, Homo sapiens
ataatcaaaagctcagctttttactcattagctcttatatttgaagtgagaattagctttgaaatcagtatwttataatattactctaataataatattcaaaatgctttgcatgtaaactgagtagtaaatataccagaatgtaattcatgttagtattgtaagtctgaaaagtccccaagaattgttttctagtttcattgttttatgtaatatacatagcatgtgttttcagatgccaatttccacagtttaattacaggcagaagggacaccaaagtagaatgcattattataacttctgcttggagtagtaaatatggtgtactacaatattgctaccaatgaaactgttatctatttgaaattaaattaattgtattgaagcaaggaaggcaaatgcataagatactatgttacacacatttcaatagtttattcgttattactaaccctttgggcaaaaatggtggacatttttcttacccacttgttaactgcaaagacatttggatattgtcattcaggaatccttcagtaacacatatttttttttctgaaatactacaattacatttggataacaaagttataaattgttttgctaagatgta

SEQ ID NO: 653196 - DNA, 563 bp, Homo sapiens
ggtgtcccagtaattgcagtgcagtctggcagagtctgaaaagagcctcccacttttgtttttttttttaaccacactaagaaaatctgatgctaccttataaaaatgtgttgaaatgttttaaacaagaaagtcaaaactgtgttttggattcaaaatttcaccatagagtggaagacagtttgggaagataaagatgaagacctagggatgggttaagatcttcttctcaaaagtagagcaatattttagaaaataartagctagatttttggggaataatagcattggattacctcattctatgcaagaggggttaataacataaggttttgtaatagctaatggaagtaaaatttgttactttatagtgtaagaatgtatagaatttcatgccaccatttcttaatactgactctttaggggcataaatggagatcacatcagcgcaagttgattctcatgtgtcaaacatatgtgagttcagctgttaaattagtcaatatttatcttaacattgctgagagggacctactgtaaatgtgacatcctcacacttccca

SEQ ID NO: 653197 - DNA, 563 bp, Homo sapiens
ggtgtcccagtaattgcagtgcagtctggcagagtctgaaaagagcctcccacttttgtttttttttttaaccacactaagaaaatctgatgctaccttataaaaatgtgttgaaatgttttaaacaagaaagtcaaaactgtgttttggattcaaaatttcaccatagagtggaagacagtttgggaagataaagatgaagacctagggatgggttaagatcttcttctcaaaagtagagcaatattttagaaaataagtagctagatttttggggaataatagcattggattacctcattctatgcaagaggggttaataacataaggttttgtaatagctaatggaagtaaaatttgttactttatagtgtaagaatgtatagaatttcatgccaccatttcttaatactgactctttagggkcataaatggagatcacatcagcgcaagttgattctcatgtgtcaaacatatgtgagttcagctgttaaattagtcaatatttatcttaacattgctgagagggacctactgtaaatgtgacatcctcacacttccca

SEQ ID NO: 653198 - DNA, 569 bp, Homo sapiens
tttatgtcttagccataactcccgctgtacaactcaattgccccattctcttttacggttcaaaatgtactgctgaccttgggtttgttttacttttttctttttcctgttaggttttatttggggacttttggtagtttaaactttctaactttttccttgctgtgtatgaggaaagctaaagctgttatcagcttcttattctacgataccaasacaggttttcaatgtttgtttgtttttattattattatttattttgcgtgatgtgaataccctcttccatcaatatttgtattatggtgctatatattggtaatgatcctttaatattgggaagggatttttaaaatactctgattaaactggggttcttcctttgattttcatattttaaataaagccacagtcatttatataaaagaaaagcatctgcccctgggcaaatcttttgaggacagaagtgaaagtaaactgaataaggttttcacatcatttctgcatgtgtttgatatgtagatcaatatctatataaatttgatcttttattttcttggtaacttgtggtc

SEQ ID NO: 653199 - DNA, 495 bp, Homo sapiens
gacagaagtgaaagtaaactgaataaggttttcacatcatttctgcatgtgtttgatatgtagatcaatatctatataaatttgatcttttattttcttggtaacttgtggtcattgagaaagtgtttgaaacttcctcatgacgtgtttatataatggcgtgaaaaattcctttggagaattttatgttcctttcattgttatctaattgcaaatgtacagtatgtatgtgaaaagcattaaaattataacttttgtgcaagataaaaataattcataaatttaccctttataaaatgttaaaatgaacaaaatatatattcctccaccaattactaactctggaaatttggaaacatttcttcactttgattttctcatcggaaagaagggtaataattctgaaaaaaaacacatatcaaacsattaaaatatagtgagagcataatcaaaagtattatttgtaataaagcaggagaaaggaagatactaacc

SEQ ID NO: 653200 - DNA, 579 bp, Homo sapiens
aataggttttaattaagatattgaaaagaacaagttcacttaaagaataaagcaagtatatttggggcaaattattctttgaatattaaaggagcagagcctttaatgagctaaaaaattaccattatttgtctcaaacattgttttctcattggcttataatagaagaaaaagcctcatttttggatatgcaaatttgcaagaaaagctaacaggtcacaacttttatcatttaattcatttgaaggagaatactccaattaaagtaaaaatggttcacagttttagtcagaaacatgagtctgtggcccatccaccagattaagtattgagagcttaattagccaattcagtactaatttccagggaagtatccagctgaagtcaaaaaacgaggaaagactattcaagggaatgttcttctctattaggccttacaagtgaatttaatagttctgaatttaaaaaccttaaaataaatgyttttgctatatacaattttaagttatgttatattactttcatctccaaatatatctatatctaaaaattaacctatttaacttgtgcaaaaattta

SEQ ID NO: 653201 - DNA, 609 bp, Homo sapiens
tatctgttctgggctaacaaaagaacttctgcccagaggccattgcagcagatagctgtggctaagcattttccacagccattaactacggtgcagcatggaaataaacgacaatatctctctgaacagagagtcaggaatcccaggacagggatatgatagggaggtggacattgtttttgcttgcccgggacttggagctagtgcagtcccctctccccttgcagagaccacagtgcatttcaccacaggttccatctcccacttccataaggggcagtgctagtaattatgacatctgagagcagctttgtccctctctccaaggctaagaaggaaactcagggcatcaggcatgcattccacagaacaccccactgcctgagacaacagagaggtccttctcataaacaaagatggaacagtataccgatttgcttctgctacagcttttacccataaacaccacctactggcctggaggtagaactacataacccaataaaaaayctgctaacaaaagtgcacagcactgggtgtaagataagcttcctgagctccgcaatctcagtcttgtggaaggtagtcagtctgctcatacaaccagtg

SEQ ID NO: 653202 - DNA, 513 bp, Homo sapiens
aaatatgtatagtgttgacagagaaagaaaaaaacatagaatactgtactctatgaaattatccttcaaaaatgaagcagaaataaggactccctcagacaaacaaacattgaggaaatttgttgccagtagactttccataaaagaaatgttaaaaataaattctttagagagaaagaaaataataaaggccagaaatgcacctctccataaagaaggaaataaaacagaagataaaataaaaattttaatttttcttgttcttaattgatctaacagataacttttaaaaataataatagcaaaaatctgttcaataatctatgcatatatatatgtgtgtgaaatgaatgacagcaatgatgtaaggaacaggagagaagaattagaattattttgtcattataaaaaactcacaagggagagaaaatagagggaagggaggggaggaagaataggaacatgggggagamggaggaagggaaaagagaagggggtataaaatagaaatat

SEQ ID NO: 653203 - DNA, 656 bp, Homo sapiens
tgtgtaatgtcctagatagtagatattccatattcaccagaataacttttcacgctttgtgctgactttttaaaagatgttatgctataaagaattactttgaattatcttatgttccatatttatttctgtaattattttaaatagatttattgaaatatacrtcaataaccatacaatgtacccttttaaagtatataattcaaagggttctagtgtgttaatgtagttgtacaataaccaccacaatcgattgttgaacattttcatcacgccaaaaatgaaacccccagtccatcagcactcactccctacttctcccaagccttcccacctgacccaagtcctaagtaagcactagttcttctttctctgtagatttttctattctggacatttcataccaatggaatcttataatatggagtctctctgactggctcctttcattagtgtgatgaagattcatgcactttgtagtacatatcattactttattcctttttattaataaacaatagttcactgtgtatataccatgtttatttatggatttatcagttgatagttccctgggttgtttccatttttgggctattatgaattatgctgctataaacagttgtgtacaagtatttatgtggatatatgttttc

SEQ ID NO: 653204 - DNA, 575 bp, Homo sapiens
gataagccctggccttctgataccaatgcctatatgaaaatgaacaatctgacttaggtgttttctgaagagcattagataagaatgtcaaggtgaacagagacagatcccagtatactgcataactgactgataacctaaagttatcaacaacagaggagatggactaaaagttaacagtatatcccattgcattcatacttataaattactctgtattgtcagcaatatgatayctatttccaagacttataaacagtatgtagttttccctaggcttaattaattcctttttttccttcataacatttaaaaattaaagaaccacatcagaaaacacttaagatgaggtacctgaaatttttggtttaaggcatatttgtgtaatgtttattttgatatccaaaattagaagtcagataaggcacaagtctacacaatgattttgaccaggacttgttcttagtataaatttgtatctacctactgttattatatactgtttactatccactgtcactatctactgagcttttgagcttgaaaaacatagaacctaaaaaaaaaaaactaga

SEQ ID NO: 653205 - DNA, 579 bp, Homo sapiens
attctgaaatttcagtaatataacattcattgacattaatggaaactgccctgctaaaacatcatatgatgtwttcctaatgcaccctacaatccccagtgaccaatatggccataacatattgattcactcattactgcctgaagctgcacaagaagaataaactagtgaactgttagttcctagttttattattctgcttcaaaatgaaaaacaaatacccttttctactattaaacttgcaccctataacttaggaattacaaataaaaacaattacatcataattcatgttaaaagggcaatactgaatttcgtcttattgaacaaactcttgccacatcaagattgaagacactgaatactagccatgatctcatgaccattgagtaaatattgctttattgcaaactgggattctgaagtatacagcaactgacctgaaatcctttcaagtacaatgatctaagaaggatgtttaaagcaatccttccttatgtaagaatttctcagatgtctgcatctttttccttacctagtacttataaaattgtgttcattatagcacaaaatgccttg

SEQ ID NO: 653206 - DNA, 601 bp, Homo sapiens
attatatactgtttactatccactgtcactatctactgagcttttgagcttgaaaaacatagaacctaaaaaaaaaaaactagaactaatgtcaccccattgtttaatttaaaactataacaaaaagctgacaaaattatttttcttgtggctagctgcatctccttaaaatgtacaccctgtaaaggatacttttaaatcatattctgaaatttcagtaatataacattcattgacattaatggaaactgccctgctaaaacatcatatgatgttttcctaatgcaccctacaatccccagtgaccaatatggccataacatattgattcactcattactgcctgaagctgcacaagaagaataaactagtgaactgttagttcctagttttattattctgcttcaaaatgaaaaacaaatacccttttctactattaaamttgcaccctataacttaggaattacaaataaaaacaattacatcataattcatgttaaaagggcaatactgaatttcgtcttattgaacaaactcttgccacatcaagattgaagacactgaatactagccatgatctcatgaccattgagtaaatatt

SEQ ID NO: 653207 - DNA, 579 bp, Homo sapiens
attctgaaatttcagtaatataacattcattgacattaatggaaactgccctgctaaaacatcatatgatgttttcctaatgcaccctacaatccccagtgaccaatatggccataacatattgattcactcattactgcctgaagctgcacaagaagaataaactagtgaactgttagttcctagttttattattctgcttcaaaatgaaaaacaaatacccttttctactattaaacttgcaccctataacttaggaattacaaataaaaacaattacatcataattcatgttaaaagggcaatactgaatttcrtcttattgaacaaactcttgccacatcaagattgaagacactgaatactagccatgatctcatgaccattgagtaaatattgctttattgcaaactgggattctgaagtatacagcaactgacctgaaatcctttcaagtacaatgatctaagaaggatgtttaaagcaatccttccttatgtaagaatttctcagatgtctgcatctttttccttacctagtacttataaaattgtgttcattatagcacaaaatgccttg

SEQ ID NO: 653208 - DNA, 579 bp, Homo sapiens
attctgaaatttcagtaatataacattcattgacattaatggaaactgccctgctaaaacatcatatgatgttttcctaatgcaccctacaatccccagtgaccaatatggccataacatattgattcactcattactgcctgaagctgcacaagaagaataaactagtgaactgttagttcctagttttattattctgcttcaaaatgaaaaacaaatacccttttctactattaaacttgcaccctataacttaggaattacaaataaaaacaattacatcataattcatgttaaaagggcaatactgaatttcgtcttattgaacaaactcttgccacatcaagatygaagacactgaatactagccatgatctcatgaccattgagtaaatattgctttattgcaaactgggattctgaagtatacagcaactgacctgaaatcctttcaagtacaatgatctaagaaggatgtttaaagcaatccttccttatgtaagaatttctcagatgtctgcatctttttccttacctagtacttataaaattgtgttcattatagcacaaaatgccttg

SEQ ID NO: 653209 - DNA, 597 bp, Homo sapiens
gcccagatcagccgcaaacaagagcagagctttcaatgcaaattttaaacaagtgggattaagttcctgaagacatttttgaaaaattgtaacaggatatgagacatggctttaacggtaatattctgaggacaaagcaaaatcaaggtaatggctatgtggaggtggaagtagtcaagtcgaagcaaaagtgaaccagccaagagcaaagatgatggcaatcgttttctgagatgtcaagtcattttgtttgttgactttctggagggccaaagaaaataatatctccttgttacaagagcattttaagagagttacccaaaagcgttagcagaaaaatgcccaagagaacttcactagggagtccttctccaccatgacaatgtgcccgttcattactctcgtcaaacaagggccattttgcragattttcaatgggaaaaaatccaccttatctaaggtatccaccttagagtcctgatttggctccttctgacttctttttgcttcctaatcttaaagaaaacaaacaaacaaaaatactttaaaaggcaccaatttttcttcagttaataatgtaaaaatactgcattgaca

SEQ ID NO: 653210 - DNA, 647 bp, Homo sapiens
aataccattacataaacctgtgcagcacacattctatttttttccaaaatgccttccttttaagcaaatacrtttaatcattgagaagtgacacatgatagaaaactaggagtaaaggataagtccttcttaggattcacaggtgagtgtcacgagattgagacaaattgttttttacaaaactttcagcacaaatattcatgtaaatatacaatggtctttggagattagattttacataaaatcaataataggagatgttcacattatagatgaaaaaaagaatacaaaattgtattatggtagagccaatagccaacacggtatatttcataagctccttgattttactcaaatatttatttattagacatattctagagcagaaacataatatgtacatagcctatgtgtcaggtaaggttatatgttcaaccacttccaagcacaagtacattaaatgaaagggccgtcatggcttattccttaatgaatttgaaaatatttcgtttttgttttcagacatcatgaacataacagtcaccaagtttgaaatggatgaaattaggttgtagagatggttataattaaaaaatgcagaaaattaaatttgtactttatattctattgttatctgataagtaaca

SEQ ID NO: 653211 - DNA, 638 bp, Homo sapiens
aaggactcattcctaattgccttgaatttactcttccagccctggattgctctctaacatgtttaaactactactattttgaaaagtctgttatttatagccaaactaatttcaattggttacagtgtgattttaaatcattaaagcatcaaatatgaatatgctaaaatgattagaaaaaaacatagcatgcattcaagtctatatgtctatagayactttagatactttttgtgtgtagctcttttctgtaaatttttcaaaaagttaaaagtaacttgggttctttcaatagtaaatcatccacattagtgattagtcatagccataaaagttatctactaattgagaagtttttgacaggtatagctgtaagctgtaacaaaaattactaaaaacaaatattatatgatgattaaagtgaataaacacatttagcctacatctgtcatctatcagcaggtaggcactgttcattcagtctctgaagcatttcttgatagtaacttagataggagagattattatttcaaaccagctaaagaaattcttattttaaaaaagccattgagcccacattccctaactataagaatgtaaaataataattaaaaaaagcttaccaacatggttattgg

SEQ ID NO: 653212 - DNA, 436 bp, Homo sapiens
ttcagcagtgtcatttgtgataatgtcaaactggaaacaaccaagttgcccactcagagtagaacagaaatataaattggagagaacaagaaaatactacaaagcaatggaaatgaataactaccactccagcagtaacatgttgcttgtaagcataatgttgacaaaataaagacacaaatgagtgaatactctggattttatttatatataaatttcaaaaccaaggacatatttaaatggtgatggaatcataactaaatgcaaattaagtgattagcgtaaacgtgtgcactatgtttatttgccagtgattggagggaatgtagtttccatgggacatatagkatttgaaggtactggcatgttcaatttctacaccgaaaagcaggctgcatggcagtcattttataattactcattgtactacacatgt

SEQ ID NO: 653213 - DNA, 585 bp, Homo sapiens
gccaaatcctatctagaatagtggcttatgtattacagatgttcattaaatatcagctagctctggaaaatcctaatatatcagcagggggaacartatggtaaccatagatcacagattatatttgcaaaatgatcaattgaaaatttgtacctcagtttagtgactcagccttccaaagttttcaagtgatagtgtaagacctgttattctttgatgtgacatacatgtctttataaataatataaagaaaatcaaataaaaacaagtattgtgaattttgagcttcagtttttcaacttgaaaattctgagagttatttgtagcaaaaagtattggcttagaagtctgacatttctgtataaaaagtggtttttaacattaaaattttgtttttaaggttcggagaagttcagactcccaaagctttgaccatataaatatatttttcccagttgctttatctgtagaaattatagtctaaagtaattgaggaagaattaatgcaggaaagggtgctggtgtggatgtgtatgtatatgtgaattaccaactcagattgaattgtgatctttagttatcagc

SEQ ID NO: 653214 - DNA, 567 bp, Homo sapiens
aaatatatttttcccagttgctttatctgtagaaattatagtctaaagtaattgaggaagaattaatgcaggaaagggtgctggtgtggatgtgtatgtatatgtgaattaccaactcagattgaattgtgatctttagttatcagctgagaagtagctctaaaaaatttatcaggagttaaatacatagagmatgctgtaagaatcttttaaatagtaaacatgaacatgggtattactaaactatattagtcatggaatggataattttattattaaaagttgttactaaggagaagaaacacaggatgacaaatggcctttctggctgtttttcctactcatttgttgcttgtcaattatttagtttccaggcctgtcaacttgttttattctaaatgtcttgtgatatgtaattcgtgactactggctgttggtgatcaaacttgctttcagaatgatagttactctttattgaacacttaccatgggccagatactttcataacaatttatatacattaacttctcttaaaatttaaagctgttatgattattgtatagcta

SEQ ID NO: 653215 - DNA, 559 bp, Homo sapiens
tttattgaacacttaccatgggccagatactttcataacaatttatatacattaacttctcttaaaatttaaagctgttatgattattgtatagctataaagctttctcttaaatacttttatgttgacactatttttctttcttagacctccgcttcagttctagcagaagaattacataaagtgtaagcctaccttttcacactcttataattgtgtagtcaccactaactgatacttgttagatgcgacacttatgattaactttatacctctgacgacctgttcagaaaatactctgaactagatttggagcaacttttgctttttttttttttttttcctttttcccattagtgagttgggtccctaaacattatatattctgcttttatttatgtttttattataacaagagttggggagactttcatttgagtgttagcaattatgtgraagaggtaattgtttagaaagtagtggaagtaaattagtttttgtgtcttataagtagttgtagttcttctgtgtccagctctgtggtagtatacccaaaaca

SEQ ID NO: 653216 - DNA, 595 bp, Homo sapiens
tctggtcatggccaaccaagtgctagggtgcatctctgtgtccagtgaaatttgaattatgtcagtgtataattcacctgtcactttgaggactgaaagctgagataaaggtttgattgttcaaaaacccattcaaatgattgctttattaccttttttcttaataaaacagtaaattgagactctttcttccagattctaaatgaccaaaacaaagcattaaaatcagaagttcagaagctacagactcttgtttctgaacaggtaaggcttttcctaaattacaaagtagaaatacttgttatrtaacaagatctggttcttcttatttaggtaccaaattactaattgagaaattttgcttaagcttagatatggctgttattgcctttctattcatcctgtatctaaattcaggaaattttttctccctgaggtgaagctaatgccaatctgctcaaaagcacattccagaaaaataaaaatgtgtaataggatgcataaaaataatttaagccattttgatacatttgactttcagaataaatgtcctgccttagacttggagcctcagctttttcttttagggagcatg

SEQ ID NO: 653217 - DNA, 619 bp, Homo sapiens
cttatttaggtaccaaattactaattgagaaattttgcttaagcttagatatggctgttattgcctttctattcatcctgtatctaaattcaggaaattttttctccctgaggtgaagctaatgccaatctgctcaaaagcacattccagaaaaataaaaatgtgtaataggatgcataaaaataatttaagccattttgatacatttgactttcagaataaatgtcctgccttagacttggagcctcagctttttcttttagggagcatggtgtctttaaaggttgaaacttattactagcacttaaaagcagtgtgatgttgatcaaatagcttaacctttgtgacacctctcattccaagcctttcacatggagattatattatatttacaccataaagttgttagatttgaaaggagaagcttatgtatggtgcctagtctagtgctttgtttatgacaggtatctaaaccttaattcttttcccttagagtatttattttatccatctcatctccatcccctgccrccatcactattcattttatatttatagcaagacatcaaaactatatcagctttgaataagcatggttccataaattagagcccagtgg

SEQ ID NO: 653218 - DNA, 654 bp, Homo sapiens
gactaggggacgagctagtcaaggtgggtttcaatacctatatttttatataatatgtattaatacatatgtagtaagtaagtagtggagctggattcaaaccagtgacctctggcagttgaaatatacattaaatacataaatttatatatatttctttaaataaactggcaaacatgacatgataatgttgagatgttgataaaactagtagaacacaattgtttattattctctgaactcaattgtatatttgaaacagattatgtcatttttaaaaagtgaagcttggacccaaaagcaaaagaacaaagagraagaaagaaaagaaagcaagcactctggaagcagtgcagcccaagacagggagctgggcgatagaccccgagatgtcctccaagaagtggcgtgaactggtgcagtggcagcaggaaagggaggccgtgggaagcaggtggactgttgggtcatgggaagtgggggaggcggtggaatccaaatgactcccagcattttggctggtgtggctgagtgggtggacaagccaatcaccaagaaagggaatgtaggagaagtaacaggtttggctgggttgtgatgcacaaagatcagtttcagacttgttcagtttgacattcttccaggaagaaacat

SEQ ID NO: 653219 - DNA, 654 bp, Homo sapiens
gactaggggacgagctagtcaaggtgggtttcaatacctatatttttatataatatgtattaatacatatgtagtaagtaagtagtggagctggattcaaaccagtgacctctggcagttgaaatatacattaaatacataaatttatatatatttctttaaataaactggcaaacatgacatgataatgttgagatgttgataaaactagtagaacacaattgtttattattctctgaactcaattgtatatttgaaacagattatgtcatttttaaaaagtgaagcttggacccaaaagcaaaagaacaaagaggaagaaagaaaagaaagcaagcactctggaagcagtgcagcccaagacagggagctgggcgatagaccccgmgatgtcctccaagaagtggcgtgaactggtgcagtggcagcaggaaagggaggccgtgggaagcaggtggactgttgggtcatgggaagtgggggaggcggtggaatccaaatgactcccagcattttggctggtgtggctgagtgggtggacaagccaatcaccaagaaagggaatgtaggagaagtaacaggtttggctgggttgtgatgcacaaagatcagtttcagacttgttcagtttgacattcttccaggaagaaacat

SEQ ID NO: 653220 - DNA, 454 bp, Homo sapiens
acaaggcgtttctcttcttcctatagaaactcagttgattgtaaatacatgtgtgtggtagaaaaaaatgtatttttytgtgtgcatattatgagtttacacaaataatattttgctatagataatgcatattttactcaatattacacattaaaatttatccatgtagctatatgcagattgtttaatatgtcagactgctgcataacatccaaatatatgctttcggaacattgtagatatccgatcccttagtgatagatggctagaaatctgttctgtatcctgtgctctttctataatgtcctgaactaccattatgtccccaatcctccacttaaaagtaaacgcatttttttctccaaggatcgtgtgtgtgtgtgtgtgtgtgtgcatgcactacattctagcatccttcaacctctctcttgcttatgtggcatctgtaagttga

SEQ ID NO: 653221 - DNA, 454 bp, Homo sapiens
acaaggcgtttctcttcttcctatagaaactcagttgattgtaaatacatgtgtgtggtagaaaaaaatgtatttttctgtgtgcatattatgagtttacacaaataatattttgctatagataatgcatattttactcaatattacacattaaaatttatccatgtagctatatgcagattgtttaatatgtcagactgctgcataacatccaaatatatgctttcggaacattgtagatatccgatcmcttagtgatagatggctagaaatctgttctgtatcctgtgctctttctataatgtcctgaactaccattatgtccccaatcctccacttaaaagtaaacgcatttttttctccaaggatcgtgtgtgtgtgtgtgtgtgtgtgcatgcactacattctagcatccttcaacctctctcttgcttatgtggcatctgtaagttga

SEQ ID NO: 653222 - DNA, 496 bp, Homo sapiens
ctggtgttaattcacaacagcaaaaactagtaacagcctgaatggttaacaagagggaaacgatgtataagatccatataaaagactgtatgaccaaactcaaaatttttagcacattaatgaataagaaaatatctacaatgtcaagcaaagaaagcttggtatgatgtcacatctgtccccaaaatatatatggccaagtaagatcagaaaaaatatgcatcaagacacttcaaaagaagttgaataaaagtgaggattcttgccctacaaggtagccrtaataatttaaaaagtatgagtgctgggttagacaaagtaaccaagagaataaaattgagagttaaggaacagctgcacacatacatgatatgttgatacatgctagaggtggcatggcagatcaagtgagaaaataaagtggagctacaaaaactggctatgcaaatgggaaaaaaatggatccttacctcataccacacatcaatatgaattc

SEQ ID NO: 653223 - DNA, 579 bp, Homo sapiens
tacatccttttctagatgtatgcttttatttttgtcattttaaatggtgttatgttaaatttttatgtttcagttgtttagtgtcaatacatagaaacataactgaaaaggtcaaaatatattgaccttttatcctaaaacttgtcaaagttattcagtttgagtagcttctttgcacatatcttgagattcttaaatgtatttgaatatgtcaactctgaataatgggagtttcacattttttgtttctaacatgacacataaagattttattttcttgacttaagagactgaccattcttgccttaccctcaatttagggagaggaaattaatacttcaacctactgcttgatattaactatacattttttgtggctgcttctttttcttgctcaagtttccttctatttctaatttaatgagaatttttaccatgaatggggttgattatttttgcaattgttttcatgtatttttgagataatcatatgtttctctcctttattctgttgttaattatattggatcatttaagtatgaacctgyctttcattcccagtataatactcccttggtc

SEQ ID NO: 653224 - DNA, 243 bp, Homo sapiens
aatgtgtggaattcctcttgtatttacttcctcatagtgagcacagtattcaagtcttctcagtagagggcaccggagagatgttgtagaggaaagggctctcctatggtgcctggctccttacagtgagtgggyggtgtgagtgtgagaacatctagaggtgctatacttcagaatctgaggtccctcaggaatcttacagctggggctggcttcctgcagccttctcagcatggacaccac

SEQ ID NO: 653225 - DNA, 462 bp, Homo sapiens
tcccatgaaattgtgttccagtctctggccaccactcctaagttatcattgtatgccatttttactcattggaaattaaactctgtatatctcttacctcattttctgtgcattcctcaagcaattgaaatatggtttcatgtctactacattattaaaatgtcactttccaaggtcaccaataatctctaaattgccaaatccaataaatgctttttctgcttattttacktgatgttcaacagaccagtgagcccttcctcctctgaagatttctttctacttgttcttgataacagctccatttcctggttcccatgttagggcacagtgagaaggtagctgtttgcaaaccagggaagagagccccaccgggaaccaagttttccagaaccttaatcttagacttttcacttccagaactgaactgtgataaaataagtttctgttacttaagccaca

SEQ ID NO: 653226 - DNA, 304 bp, Homo sapiens
tttttttttaagttcaagaacatacgttagcttcctgcagttgtgggtgtagctacattctgtggttgacgatatagctactaatacattagagaagaagctgcatcatctaatattctgttctcacttatttggcaaacattatttgagtgttgctatgtgtcaratacagtgctaagcagggattacactgtgaacaagttaggatcattaggcacaaatccttaaggaggttatactccgatgtatgggtcacaaactttctgttaggggccagacagtaaatatttaagctttacaggtc

SEQ ID NO: 653227 - DNA, 621 bp, Homo sapiens
ctgaacacccagcatctaatgtcttcatccattgttctttaaatgaattattgactgttcaaccaaataaatgaataagtcaggtcagtattgatggtgttacactctctttttcttcactaccrtcatcctagtcctcctaaattccttaccaccaccatcatttaaaactcatttaagagttcatgagcttgtcatgtgtcatggtcattcagagacactactgaaaatgttgccgtggtttgttttataaacttgctatataaaaaaggaataataggagtgatattttgtaaatttgtatccaatgctgtggccatctgttttccagaaattcttatatcattacctttccccccgagtctggtttgagagaatgggttctaagaaggttaagaaaaagtgcagagacagttcaggcaccctgagtgcagttccaggggtcactggagcaaggaggagcctgatgaggataagcacaggggaattttggacttgataactgttgtataatcaaaatgtaaaagcctctgccatgcctctagttctttcacttttatgttttttttcttttgaactgagactaatttgcttttgaaagagaacattagcaggattaaa

SEQ ID NO: 653228 - DNA, 455 bp, Homo sapiens
attgaacacctcactataagcaattaatgaagcaaaaacctgattttctttcctgcaaaaatttgggtaaatccttgttttctcggttccttaccttttcctttttaaaaataaaagtggtgtaaaagaacaaatatcaatgttagatttcattaaaatttaaacatttctagttaagaggatgaaatgacaagctacagacttgaaaacatgtacaaatcccatatctaataaayagctaatatctaggatgcataaagaaatataaaactttaacactaaataaaaacaattagaaaatattcaaaaaacagaaagagaagctttactgaaaggtgatctatagatgacaaataagcacatgaaaagatgtttaacatcattagccattgtagaaattcaaaataatgccacaatgagatatcactactataaaaatggcttaaataagatat

SEQ ID NO: 653229 - DNA, 363 bp, Homo sapiens
gtgccacaccaaggcatttgttaaaatcttattgtttgcagagagagaagtaaaatgcttatcagaaagctgctgaaaattagggcagaatattcagcaatctcacacacacaaatgagaagataaaatttattattctggactctgcaggaagaaaagaccttattaaaragtcaaggcccacaggccccacaggtcctacaacataggaacagggtcatacaaggaatacatagagtcttgtaaaattttaaaattagtctccagtcatttccagcctgtgactggattagatgatttactcttaccctatttgctttccagtagacaggatgtatcctctctaaaggaagataacaaaac

SEQ ID NO: 653230 - DNA, 529 bp, Homo sapiens
tagttttcttctcctttctgaacatgtgggaggattattctttcttgtgaccttatagtaaggcagggccttttgattagttcttgtcaatgggccatgagtgaaagcaatatgtgtcatttgagggcatttgtctgttgctgtgagacactccatcgctaagatacatgtctagaaacagacttgctagattggatttcaaggtacgtctctgactttattatagagtgtccaattttgctctccataatgggtgtgataatttacactttgaccaacatgatatgagaggcctcatttctaccatcattgccaaatttataagccttaaaacgctttgcatctaatggtataaaatcacctgttttttggaggtaaaattttgcatctccatsattactagtgatattggtaatcctttcatatgttttttttttgattttgtttttgtttttgttttgagacagaatctcactctgttacccaggctggagagcagtggtgtgatctcggctcattgcaacctgtg

SEQ ID NO: 653231 - DNA, 560 bp, Homo sapiens
tcttctatcatgcaacaacagagagtgtttggagagatgggccagtaccatcctgagatcatttgctgtcctttcaaaataaaatatgagaaatgctagcatagttttgatgctgattagatttcccatgacctatgttcagaaaagtcataagcaatggcacttgtcttgaaaatctttttctgatacagactcgtgaagtaggaataattttgatatctatgtagaatgttaactttagtgcaatagaaaaattaatgagcacgcaccatgcaacatgtaagtgttcaatgagtccttacaacagggatggtagcagaggtcaaatgtttatagcaatacttctragagtaactcatggcttaattcttttattaacacttctagtcataattcccgaacaagcaagacagtgagtaattgacccaaattcaatcttcattgcatttttccccacatctttcattctcaaaagaccagtcagcttgatttttaattttttgggatatctcaaatagacagacttcatataaagtatccattttaagcacatagtgaat

SEQ ID NO: 653232 - DNA, 605 bp, Homo sapiens
tctgcattgggacctgcttttgtcttattgtttcccaagactaaaaagggttttcagcgcaagtgttctcgtaatgtttttgtccccaagattggatgtttttcagttgtattatctccccatatttctgacatgtacagacgtgcccagctatgataktctgtgtggatggtcttaaaaatgagttatcattatgaatagtttgatggaaagatttcccaggaagcattatgctttgagtgttggggaagagaagccaccagatgtcgtgtaggcccttgtccctttactgcctttcctctctgtttgtacccctgtacaaggcagctcttgtggttacgatttgttaacaatttgagtagctcccttatattttgcttctagagtaattaaacattgtttcttagaaatgtaaacatgggacttagaattacgatgcagtaatgcatttggcagctgaactgtgtactgggaaaagaaaaatatcctggagcgggtttaagtttcgcagataagaaaaatggctttatttagtgaattggaacaatacaagacctgtgccctgaagtcagtactttctcttcccagatgagtttccccaggca

SEQ ID NO: 653233 - DNA, 193 bp, Homo sapiens
taatccattacgctcaagaacaataagatctggtgagttccaagaaggagaaaatgcttggcctaagacagaaggcgcagtgttgacactccattttacagaagctgactgtcctggttaatggaaagctagacttygctttatctttcccagtgatttcttgattggctgtggttttactgcttaatagaac

SEQ ID NO: 653234 - DNA, 430 bp, Homo sapiens
tgcagtggggtcatagctccccatttgtgatgccrgaagattgcctgtggaatcacaagacctcttccaatgttctgttatgctataaaaagaccagaacttttacattttaaattaaaagaatatctgtgcatttttaaaaaataataaaaccagtagttgtggcagtagtagctggtagtggtggtaacagtaataacaggactgggggaaaaagttaaatgcctattttagttttcaaaattaaactttttaggctgggcatggtggcttacacctgtaatcccagcaatttggcaggccaaggcgggcagatcgcttgaagccagtagtttgagaccagcctgggcaatatggcaaaaccccttctctaaaaaaaaaaaaaaaaaaaaaaaaattagccgggcctggtggcacacacctgtagtcc

SEQ ID NO: 653235 - DNA, 464 bp, Homo sapiens
ttgtaggtgttgcttttggcccattagatttataagaaactcacaaaagttttgatggtactatattgacaaaaggatcaccagtttatactaaaagatattgagactattcaaaatgtaagaaaacctctaggtctctaatttccacaatctggaaacaggctaagaaagttgtttaaagcacacaggagtagccaagggggtagaaaagacaacccagatggtacagaacacagccttagaaaacaayggactgggaagtcacttccacgaggcagaaccgaggcctaatcaagaatattccctcctctggaagagaaggtcctggcagcattttcagggatggaattcaggattgctatgagccagtgcctcttactagctttccattctttccctttttgaataagattgtctactatacttattctgtcctttcttaccctattgcattaggtttgaag

SEQ ID NO: 653236 - DNA, 570 bp, Homo sapiens
aatgcctttttgtatgttattataactaacagtgtacttacagtctgttctccagtacataaaactttacttagaagaaagtgtatttcctactttcttatccacgtcttgtactcttacaaccacacagtgttgtgcctggagctgaattaaatttcataagactaatgtgcactaaagaagaaaaatttctggacatataattgaaggccaagttgacactatgaaatrtgcatatttatactatagtcaaaacacatcttcatttatttgacaattaagtccaagatgctatttgtaggagtaatactaatatagcagtaatcactaatacatcattctgttctcacccactgtacacatacttattcaggcagacatgaccaaacaaaatctttgagatctacttttaaatacctataaagaatgtatcatattgttctctatggcatggaatcatatatctgaaaactgagactgagatttttggcaattttctaattccaactaaactatgcttttgatgcattaggcttcaagtctgataattcctcttaagacacagttctg

SEQ ID NO: 653237 - DNA, 570 bp, Homo sapiens
aatgcctttttgtatgttattataactaacagtgtacttacagtctgttctccagtacataaaactttacttagaagaaagtgtatttcctactttcttatccacgtcttgtactcttacaaccacacagtgttgtgcctggagctgaattaaatttcataagactaatgtgcactaaagaagaaaaatttctggacatataattgaaggccaagttgacactatgaaatatgcatatttatactatagtcaaaacacatcttcatttatttgacaattaagtccaagatgctatttgtaggagtaatactaatatagcagtaatcactaatacatcattctgttctcacccactgtacacatacttattcaggyagacatgaccaaacaaaatctttgagatctacttttaaatacctataaagaatgtatcatattgttctctatggcatggaatcatatatctgaaaactgagactgagatttttggcaattttctaattccaactaaactatgcttttgatgcattaggcttcaagtctgataattcctcttaagacacagttctg

SEQ ID NO: 653238 - DNA, 568 bp, Homo sapiens
ctcctgttttgttcacgttgtttgttcctcggacgcattttgattcagctaaggcaagctgaccactgtttcaagacggtatttgtcaaaggctgggcaactgctgtgtcattgtctcttcttggtattatgcaaatgtgaccatgtgatatgtttttgtgtaaacaaaaaagtaacaccattaaggaccagaacagggggaacagaatcaacaaaggaaagctctgtaacttagtgcactatcattccgtatctgattcatacctttgagcttcctacttarcatttgtcttaattattatatatgtcttgaaagcataatatagtgtttatctgttctgtctagaggaaagcaatcacagcatatcaaataaacttccaaaatcaatggtcttgctaatttaattaaaaactgacacataaaaccttgtgtactacaagaaaattgtgtaaagagagaaggatccaaattatgaagaaggaaacatcaatctagttctggttggaactaagttttaataaaacaaaatgagtgtatattccaatacatgtctggataatggatata

SEQ ID NO: 653239 - DNA, 667 bp, Homo sapiens
  misc_feature 250, 291, 335: n = A,T,C or G
cacgtaaatactaggtaagtagtagttatactgtattgtttttaaacttgtatttttaaaatttttgttttttttattattttttttcaaaatacttttaatctgttggttgaatctgcagctgtggaaccagtagatacatgaggttactgtatttttgcatatgatataagataataaacatgtgtcatataattattgctattattattatgttgggaaaaatagaattatgaataacaattagccnaagtctctaagccttcaataggggtgagatgtggggagaanctacaatgtgaaccaaagcactgggtagggctcaaaggataganaaagtacttaactgagagggatttctggatccatcatttatttataaagcaattcttatgttctttctttagctaaaaaattttccaatcttcatacatatttctacatgtattatacaaattatggtataattattgtattgtttgtaggtaatatgaggtatagactaaaaataagtagttaaagcctactattctgtgccaaagcaggacaaaaagtaattttcagtgaarggtgggtaggggattttaacgtagttcatatatcagcaactttctctgcagtgcataatttcctataggtctggacaaattatgtaagtttataaaac

SEQ ID NO: 653240 - DNA, 573 bp, Homo sapiens
aggaagccaaaatcccctggaaactatttctccactcagtagttccagctggcctgygtgtaagggaaggcactgggtagctgaaaaatcaccatggaggtggctcaacacagtgctggctttggcactggcagaacctaatgtgactatcacagatgctgttgcccaatctgagagaacttggtgtacagcaattgacatctcaaatggcttcttcagcataactgatgaattgatcctaatcatccatctaggtgatcaggatcaatttgcctttatttggaagtgggagcaacatgcctctaatgtccattcacaaaggtaactaacctccttgtctacctgctatcggtgggtatgccatgccctagtaaaagtcctgcttcccagtggagcactggcctttcactctgttgatctcttggttagcccagacaagggaactgcctggtaaaaagtggatatcctgttgacccatgtgcagtaacagagctaggccattaacacagacaatgtagaaggacttagtacccaagtgaaattgctgggcctaatctggaaaggggaagaatg

SEQ ID NO: 653241 - DNA, 599 bp, Homo sapiens
ggcccatgggatggagaccctgagattgatgccctttagggagggcactccctggagtacctaagctgccttttatatcagggaacctccttttgcacatcaggaaacagctcaatagaacccagagaaatggtgcacctccagcatgatatacccaaagaagagtaagtgaagtaagtcagtctttttttggcttttcttgggggaaggggaaatgacagaatrccactggttggttaaaactattataaatcctggcagttagagtgttaatttaacacaacccctcctttcccaaccaagtgctctttcttagacccgtctgataatgtgccttcagttaatgaaccttctttcctcccttccttcctcattactccactccctttccccaagggcattttaaaaaattttcttgtagtttgtaatgaagctttgcttcttcctcatcatattagaacctttctacttttatgcccaactactcagtgacaaaaatgtctttaccttgctctgcttaatgtcttctactacccaccacccccagtgtccagttaggatgtatgaaaatttcacttataccagtgtcatcattaggg

SEQ ID NO: 653242 - DNA, 602 bp, Homo sapiens
taatctgttttccgagttatattgtaggttataaaagacattggactgggatgtagtatggtctctttcctcatggaccttatgtgaccccacggaaacatattttttagagcaaacttttgaatacagccagtgaggatgatcacttgggtctggggatttagcagagggcacactattgttagatgaaggctggkaggttaaaaatgcatgagggagagaggaagccatgctgacagctgttgttagaagagacctaagattatcctatgtgaaactcacactgggctctgtagtccactgcctatgtatattccatttaggctagaattagcctctaggacaactcttctgtttgtttgtttttttttttccccgaggtggagtcttgttctgtcacccaggctagagtgcggtggcatgatctttgctcactgcaacctctgcctcccaggttgaagtgattctcttgcctcagcctcccgagcagctgggattacagatgtgtgccaccatgcccagctaatttttgtatttttagtagagacggggtttcaacatgttgaccaggctggtcttgaacttctgacctcatgatctac

SEQ ID NO: 653243 - DNA, 602 bp, Homo sapiens
taatctgttttccgagttatattgtaggttataaaagacattggactgggatgtagtatggtctctttcctcatggaccttatgtgaccccacggaaacatattttttagagcaaacttttgaatacagccagtgaggatgatcacttgggtctggggatttagcagagggcacactattgttagatgaaggctgggaggttaaaaatgcatgagggagagaggaagccatgctgacagctgttgttagaagagacctaagattatcctatgtgaaaytcacactgggctctgtagtccactgcctatgtatattccatttaggctagaattagcctctaggacaactcttctgtttgtttgtttttttttttccccgaggtggagtcttgttctgtcacccaggctagagtgcggtggcatgatctttgctcactgcaacctctgcctcccaggttgaagtgattctcttgcctcagcctcccgagcagctgggattacagatgtgtgccaccatgcccagctaatttttgtatttttagtagagacggggtttcaacatgttgaccaggctggtcttgaacttctgacctcatgatctac

SEQ ID NO: 653244 - DNA, 589 bp, Homo sapiens
ttttagtatgaccactcttaaaacttttaaagcattctttgaatatttaattaacttgtttttttaattaacttatttctttatttaccgtttttcaaagttcacaagtarttttgtgttctacttttgaaaatcgaattcattaaagactgaataaaaattttgttaacaaagtcgatgtgcctatttatcttctcattcacacaaacatacatgcatatatactatcctatatgctatcaatatatataccttaaatttaactcaatttgcagaaaatacaatgtatactgaaaaaaattaataacaagccccttagactaacacactcataataatccatggtgtgcttcaaataaggagagtgaggtcctgatattttttgtataggtactagaagaaacatgtccctggaaattccccaagcaactttgattataggtctttttagccaccaagagctgtagataaaccatgaggttcaaccactactctttgaatttgctcattttaagtaaattggcaatatatttcatatgcttctggcattatccataacagcatctggaagctgcttctgaggattact

SEQ ID NO: 653245 - DNA, 612 bp, Homo sapiens
catctcactcccagtgcctggtaatcactattctactctaattctaagtccaattttgtaagattccacatgtaagtgagatcatgcagtgtttgtctttctgtgtctgacttatttcacttaatgtcctccaggttcattcaagttgtcacaaatgacttgatttccttcatttttaggctcaatagtatcccattgtgtatatataccacatgtttgttatgccattcatctgctgatggacacttaggttgatcctatgtcttggctattgtgaataatgctgcaatgaacrtggtagtgcagatatctcttttgacattctcacttcatttcctttggatagacacccaggagtggaattgctggatcatatagtggttatacttttaattttttgaggaacatccatactgttttccgtaacagctgtactaatttacattcccaccaatggtatgcaaaagttccccttttttccacatccccatcaacacttaccttttgtatttttgataacagacactctaacaggtgtagggggatatctcattgtggttttaatttgaatttccctgatgattagtggtgttgggcattgttttcatatac

SEQ ID NO: 653246 - DNA, 555 bp, Homo sapiens
aaaacatttggaacaaatgtgtactctttaaaaaatatgttatattttatccaaacccaaaactgtcatgtttatttcaattttattcatgacatgtaagaatatattctatttttgctggaaaaaatattcaattgaagtcaacatattttgcctattgtgagacagaatgtgatatataaatgacatataaatcatttatcaataagccgaggattaaagaaatcattacttcatcttctttttctttttggatttattaaagaaaaaaaaaggagcagcattttgactatgccagcctgcatattatgtggagtaggtaaattacaaaaactcctgggccttcaagttggtcacccayaaaatgtagacagcactaatttaacaaaaagttgtgagaataaagagagattataaacataactggtacataatatatgctcaaaaatgtaattactatcttttcctatcctcttagagggatgagaaataggaagcgtgagttaaacactcttttctgtgtgttcaaaaatgttttcaaaatgaactttgaga

SEQ ID NO: 653247 - DNA, 556 bp, Homo sapiens
ttgatcattccagtctctttaaaaaaaagtcttctctctctttctctaaatatatgatatatatatttatgtgtctgtgtgtgatatctcccctccttttttacacgaaatttgcttcctataggtactttttttaacactttattttttttagagcagtttaaggttcacagcagaattgagaggaaggtacaaagatgtcccatatgctccctgccccctgcccccacatgcatacctttccattatcaatattcccctctggagtgayacatttgttcaattgatgaacctacaatgatatgtcataatcacccaatgtctatagtttacattaggtttcactcttggtgttgtacattctatgggtttggataaatgtgtaatgacatatatctattgttataagattatacagaatattttcattgccctaaaaatcctctgtgttcctcctagtcatgccttccctctcccaacccctggcagttactaacttttttaccgtctccatagttttggctttcccatattatataggtggaatcatgcagcc

SEQ ID NO: 653248 - DNA, 411 bp, Homo sapiens
gttgcaataagccaagattgtgccattgcactccagcctgggagacaaagcgagactccatctcaaaaaaaaaaaaaaaaaaagaatgactaaaattaagaagattgatgattccaaatattagtaaagatgtagaacaactagaactcccacatattgctgatgaaaatgaagaataatacattactttggaaaatactttggtactgatttaccatatgaccccaaaatctcacttgtagaaatttatacaggaaaaatgaaaacatatgctcacagaaagcttgtatacacatgcttatggcaataaatttatttatagttgcctaycaacaagtgatgaacaaatatattttagtatcttgatactactttctagctagaaaaggaatactactaagcaaaaataga

SEQ ID NO: 653249 - DNA, 586 bp, Homo sapiens
agaagcccagccatatcaggatgacatctaccatgcatcagtcctcgtgtgtcttcagcgcctctttcacatgtctgtgtccttagagcttgctggaaccatctttgcttgtctctgtgtattctgagtctgtgactatttggctctaggagtcttctcaacaaagtacaatttctgttgtctttttccaaaaaactttatgaataaaatgaaaatatgagtaatataaaatcaaaatatattttgatttctcatttcaaaattatctacctctgtagtttaatagaactcaattattggccccagaagataatttttttccctaaagtattttctaaataataaccagtagttgacctacgtcctttatatatatcacatagaagatctccacagtacattcttcaaattcagctcagataatccatggaatgctcaagttccctgtaacaaattgagctcctatatctctgtggacttataattgactaataaaagtaagactkgtttgctaatgataaagataatttgtaaaaaataaatcattttagtttgaccatgagacgcacacatctattatcattaa

SEQ ID NO: 653250 - DNA, 503 bp, Homo sapiens
aagatagtaattttatttgccagttttttggaaactttatatctgaggaagatctgctggaagatgtcatttggggtaatrcaaaatatttctggaagacacaagtaaaatgggccctcattgaccaagtagtttgtatagatgtagtgattaaactattaagtagaggggaggttgcaaaaatatttgacaaaatgaaatgtgtgcctgcagtgcaaaaccactgatcctgctcacaaacaggcatagtgagaaagatttctatatgcctggtagaacaacctctgtgggccatcttaagcactggtgattaacacttttatgcattctattacatctgaatttcaccacttaacatgatacttaagctgaattaaaatgccttaatactcttgccttaatattcttccaaggtttagcacctggtccttttaataaaaaaaaaaaataggttatggttacctttttttgaaaaggtactcaaatatgtcaactttattgtt

SEQ ID NO: 653251 - DNA, 529 bp, Homo sapiens
gattccctactctagcattctcagaaggatcccatccgttagacatgcagaaactgcagcccatccaaatgtgatctgtttaatcaataatcaacagttcatattgaagacagtatttttgctatatgtgcttgtcataatgaaggacggtgtacaaagaacaagttgaaccagatgaacactttaattttgatgccaaaatcaatcactttttgtcataacaccaggcatagataatggttgatccagtgcacactgtctgtattaccccataatttcctgcagcagacatgttrtaatttgacatactccttgatcattaacacattgcagtagtcagatatacttgtcaagattaagctaaatgtcagtagaagactcagtgaaggcttgaaaatcttgcagcttgctctcagagacactgccaactgaaatgataaatgtcattgggctgtggtactattctcatcgacgtatcaataaataaagggatgctggcgaaaaaatgttcttccagatacctgcccac

SEQ ID NO: 653252 - DNA, 529 bp, Homo sapiens
gattccctactctagcattctcagaaggatcccatccgttagacatgcagaaactgcagcccatccaaatgtgatctgtttaatcaataatcaacagttcatattgaagacagtatttttgctatatgtgcttgtcataatgaaggacggtgtacaaagaacaagttgaaccagatgaacactttaattttgatgccaaaatcaatcactttttgtcataacaccaggcatagataatggttgatccagtgcacactgtctgtattaccccataatttcctgcagcagacatgttgtaatttgacatactccttgatcattaacacattgcagtagtcagatatacttgtcaagattaagctaaatgtcagtagaagactcagtgaaggcttgraaatcttgcagcttgctctcagagacactgccaactgaaatgataaatgtcattgggctgtggtactattctcatcgacgtatcaataaataaagggatgctggcgaaaaaatgttcttccagatacctgcccac

SEQ ID NO: 653253 - DNA, 545 bp, Homo sapiens
tgttgaaatgaaccctttaccattatgtaatgcccctctttttttttaatctttgttggtttaaaaatctgttttgattgaacctaggattacaacctctgctttttactgttttccatttgcttgttayatttttctccacctcttgattctgagcctaggtgtgtcattgtacataagatgggtctcttggagacagcattccaatgggccttggttctttatccagcttgccaatctgtgccttttaattggggcagttagcccatttacattcaaggttagtattgatatgtgtggatttgatcctatcaatcatcttgatgttagatgattatttcgcagacttgtttatgtggttgtaaagtgtcattgttctgtgtacttcagtgtgtttttgtagtgactggtaacgatctttcctttccatgtttagtgcttccttctggagcccttataaggcaggtctggtggtaacaaattctctcagcatttgcttgtctaaaaaggatcttatttcctcttcatttatgaagtttagtttt

SEQ ID NO: 653254 - DNA, 581 bp, Homo sapiens
ttggggaggatctgctactctctgtgcctagattcactcccatggcagtgtgagcacaagggcaggatgctggtggggatggggctgcctggctgtatcccagccaaggctccgtctgcaatggtggtgtgcaggggaggggaacagatgaactgcactcctgcacgctggaagggcaaggaaagcaaaacctgtccatgtgaccatgtgctagcaaaatgatgtggggagatgccatgsgcctgggggaagctgcagtgcagggaagaattacgcaggctggtgtgtagccacaggggccaccttgctggagctctgtgctggtcaggcatagtcaaccaattcagttgctatgatgtggcacccggggttgtcctgcaaacacatgtggcctggctggaaccccaggagaggccaccagaccaagtagtgctcaggtcagaccaaccccatctgatggacaagactgccctgcagagggtccaacagttcacctagggctaaagtcacttatgggagcaagtcaagcctaaggggacagccttccctggctgtgctccactacagatggtcccacacca

SEQ ID NO: 653255 - DNA, 584 bp, Homo sapiens
gtttctttttttttcttgaaatgtctttggttttagtattaggttaagcctggcctcataaaatgagctaagaagtatttcctctggttctatcatctggaaaaaattgtgaagaactaataaaatttctctcttaaacgctggtataattcactagtgaacccatctgggcctgatgctttctctttggagaggttattagttattgagtgtatttcttcattgggcctattggcattatttcttcttctttgaattgtggcasattgtgagtttcaaggaattggtttattttatctagattatcaaatgtgtgagcatagagttatttagagtatttttaaattatccttttaatgtccatgagatctgtagtgatgtcttctctttcatttctgatattagtaatttgtatcttctttcttgttttcttagttagcctggctagaggcttataacttttattgatcttttcaaataatcagcttttaattttgttgattttctctactgatatcctgttgtcaagttccttaatttttgctctaattttaattatttttttacttctgcttacttttgat

SEQ ID NO: 653256 - DNA, 615 bp, Homo sapiens
catccagggcaaaaatgccctgctcttacccagacagcaagcacaggagaagagaataactcttatgaggttactttacctggcttccccactgttttgtaacaatgcaggtatgtcttacattaaaaaaattaagcagaatgggatgcagtaagacaaaagatgatcctgaagatgatcatgggtcttgaatatgattgtgatgggaggtctggtcctaagtttacttaccccagttgctgacctgcaagttagagcactggraagaacattcactttttaagtaaatataaggatgagaatttacagagtaaggaaatggggtcgaaggagggcagatgagtgtataaatgttagttccagaatatgaaggaacgggttggagataatgcattctttggaaatagcaaatgctgttgaagcttttcaaaaaaggaaataaatcataaaagaatttggaatgctttttatgggttgaagtagaagaaaattgaacatcaatatgattctggaaagaaattttgtgtcactgcattatttaaatgttaggggaaaatgatcaaagcagccaacattcaaaaaggaataatctctttggaaaacttaatacacaca

SEQ ID NO: 653257 - DNA, 443 bp, Homo sapiens
gaattcctgggctcaagcaatccacttgtctcagtcttggtaagtattgggattacaggcatgagtcaccacacckgaccttgacggtgaacttcacatactgtctctgccccttggatttttccccccaccttaggtgggacaggatggctagtggaagctggaattaagtctcacatatttgtcagagtcctatgcatacatatgtaattaagatgatttttctcttgttaatttatcatctgtcaatttaattcatggcctagccaaagaacctagaagggtagagggaagccatttcccctcccatgaaaagcaagagtagagcagtgtgtacagttttctatttacataaccagatataaaatgggattctatctttgttttaacaaagcatcaataaaataattattcaatgccaaagcacatgtgaaacagatctt

SEQ ID NO: 653258 - DNA, 606 bp, Homo sapiens
acagtgaccctaaaagatgtattatcagttgcattttacaaatgagaaactaagacccagggatgctcaatattttttcagtgtctcatggccaaaaaagcaaagagcagagattcaaacttagatcagtttaatctcaaatttcatattcttcaattttttttccacaactcttagctattttcttccactcctgatgagtaaaattctactaaagtcacacctatcacagttcaagcaagttgaatgttttgtcctttttatggttgttcatgtgaatggctggaatgttgtgcctagtgtccctacaaaataagttgggtatatggaacctggtctccatttaaagatcaaaaattatctgtgcatttggccatgtgttataaattttttaactatgttggaatttctgctattaattgtgtgcaacagcttatattacaggyctagaagtgtcaattccacatgcatgtaattgccatggatgtacatttctttgttctcagcattctatagcattccctatatttttgttccaagaaaaattctgatgattagaaaaatgtgacctttttttctattattctatgctagatttggaaacaa

SEQ ID NO: 653259 - DNA, 596 bp, Homo sapiens
gtctatttacatggtaccatatttctcagagattttgtttacatttttttctttatttttgtctgactgagttgatttgaagaaccagttgttgaactcagagattctttcctcagcatagtatattctactgttaatactctcaattgtattatgagattcttgtagtgaatttgtttagctctagaagttcagtttggttctttcttaaagtggctcctttaagctcttggatcattttactggattccttaaattccttggattgaatttcaactttctcaatgagtttctttgccatccagattctgaattctatgtctgccattttagtaatttcagactggttaaaaaccattgctggggagctagtgggcacatatggtggtaaggggacactggctttttgaattgccagagttcttatgctgkttctttctcctctgggaggattagtgttcctttcactgtggtgtaatttaagtatactcagttggcttcatagatgtttcaagagggccaaggccctgtgcagagtctttatttgtggctgaattcttgccgttggtttcacaggggcatatattagcaaagta

SEQ ID NO: 653260 - DNA, 589 bp, Homo sapiens
gtaatccaatgagaaagagctaatacttttctagaagtagtattacaacatctgagtatgcatatgaaaacaaatgagctttatctcatggtatatacaacatttaattctaaatggatcaaaggtcaaaatgtaaaagcttctaaatatgaaaattctaaaacttcctaaagaaaatacacgagggaaatttctgtgactttggagtagacaaaagatttcttagggcacaaaaggcatgacacacgaaagaaaaatactgataaattgcacttcatcaaagttaaaacatctggtcttcaaaagactctttagaaaatgtccagtttacaataatttgttaagttttaatcttatgttttatatactcgygtatatgtattatatatctaaaaactagagtttaataataatttatattttaccttcaatagttatttaatattcatctgaagtgaaagttataaaaatattgagtgttaattctgtatctttgacatgtttatgtttatattattactaatctgtctgttattcttgaaattttccactattaaaatgtatataaatatcatgtagcaagataaca

SEQ ID NO: 653261 - DNA, 550 bp, Homo sapiens
tgcatcaaacatctgcctgggcatccagacatttccaaacatcctctgaaatctaggcacaggtttccaaacctcagttcttgacttctgcacacctgcaggcccaataccacatggaagctgccaaggcttggggcttgtgccctctgaagcaatggcctgtgctctatgttggccccttttagccatcactgggacacaggggaccaagtcccaagactgcaaagagcagcaaggccctgggcccagcccacgaagccattttttcctcctaacactccaggcctgtgatgggagggctgctgtgaagacatgcsctggagacattttacctattgtcttggtgattaacacttggctccttgtcacttatgcaaatttctgaagctggtttgaatttctcctgacaaaatgaatttttcttttctatggcatcaccaggctacaaattttctgaatttttatgctctgcttctcttttaaacataagctccaattccaaaccatatctttgggcatatgtaaaatggaatgcttttaacagcaccca

SEQ ID NO: 653262 - DNA, 550 bp, Homo sapiens
tgcatcaaacatctgcctgggcatccagacatttccaaacatcctctgaaatctaggcacaggtttccaaacctcagttcttgacttctgcacacctgcaggcccaataccacatggaagctgccaaggcttggggcttgtgccctctgaagcaatggcctgtgctctatgttggccccttttagccatcactgggacacaggggaccaagtcccaagactgcaaagagcagcaaggccctgggcccagcccacgaagccattttttcctcctaacactccaggcctgtgatgggagggctgctgtgaagacatgcgctggagacattttacctattgtcttggtgattaacayttggctccttgtcacttatgcaaatttctgaagctggtttgaatttctcctgacaaaatgaatttttcttttctatggcatcaccaggctacaaattttctgaatttttatgctctgcttctcttttaaacataagctccaattccaaaccatatctttgggcatatgtaaaatggaatgcttttaacagcaccca

SEQ ID NO: 653263 - DNA, 659 bp, Homo sapiens
atgggcttagtgccccacttgtgcactcatgatgcagttcccacactcaacacactcatgggacagtgggaagtggagagggatacacaactacctaaaacaaatcataatattatataatatgtacaataaacattcatagtgatatgagaatatagagggagtggggagcaaattctgtctgagagaatyagggaagttgttgcaaaggatgtttgagtatacttttttaagaaggaaaatgagtgttccacatatgcgcatgaagaggcatgtgagtggaattacgtgtcaccatgtggctgaagatgatacatagaagagttttgttttgccattgacaaaacaagagggaataattctgtgactataattatgcattttcccatattattgagaaaatcagtacatttctctgtcaaagggttagcacagctgtgtctgtggtcctccacctttctctgtcacacctgaaacagacttcagggctgaagcttcctaatgcttcataggataacccaagtcaggatgtaaatgttctctcctcccaactttggaacactcacatttattcaatgtaaatcttttgctcataatttcctgttataaaacatttttgtagcatctcaaaacagctaacagactttcttatacttaat

SEQ ID NO: 653264 - DNA, 551 bp, Homo sapiens
atattgtggtgggaatgtggtctactgggggtttctcacttaccctttcaccacactggggagtctctcctggctcccagctgatcccagccaagcagcctaccttactttcctctccttccttgccttaggtgtttcctgtcacttttctgttgacttccagtgttctctcagatgatctatttaaaatgtgatttatttactcactattttggtttctcgtagtggagaaggcaagtacaaaatgcatctagtcagtcatccttcctcatacaacacacttttaaaatgggcaaaatatttgaacagacactttaccaaagaagatatatgaatgatgaataagtacatataagtacattaaaatatattcaacatgcaatcctctaaaagacttargaaaattctcatatgatggtgatgacatgattttaaaaatctttccaacccatcacccccaccctgcataaaaacagcaactaaagtggcaaatgggtacagtgatatgtgcctgtactcacagatactggggaggctgaggcgggaagatc

SEQ ID NO: 653265 - DNA, 551 bp, Homo sapiens
atattgtggtgggaatgtggtctactgggggtttctcacttaccctttcaccacactggggagtctctcctggctcccagctgatcccagccaagcagcctaccttactttcctctccttccttgccttaggtgtttcctgtcacttttctgttgacttccagtgttctctcagatgatctatttaaaatgtgatttatttactcactattttggtttctcgtagtggagaaggcaagtacaaaatgcatctagtcagtcatccttcctcatacaacacacttttaaaatgggcaaaatatttgaacagacactttaccaaagaagatatatgaatgatgaataagtacatataagtacattaaaatatattcaacatgcaatcctctaaaagacttaagaaaattctcatatgatggygatgacatgattttaaaaatctttccaacccatcacccccaccctgcataaaaacagcaactaaagtggcaaatgggtacagtgatatgtgcctgtactcacagatactggggaggctgaggcgggaagatc

SEQ ID NO: 653266 - DNA, 637 bp, Homo sapiens
gttacagaatttcccccaaatttggcatagaacatttaattcagattcagaaaacttaatgaatgtcaaacagaactaaaacaaagaaaactattcgtaagcaccttgtaattaaactgytgaaagccaaagaaaaaaaaatcttgaattcagctagagaaaacacacacattaattacaggagaagaaggctttgattgactactaactctcctaagaaattatggagcctggataatattggaatgacaaagcaaatggctacacatttaaacaattggtcaataattaattctatgcttagtgaagctatccaaaaaaggaagatgaaatcaaaacatatttagataaatataaagtgagaaaatttattaccaggaggatagcattccaagtaatgaaaaagatgtacataaacatcttttatatacaggctatatcaacatatttttttctcttaaattctttaaaagagaaatgattgtttaaagcaaagacaacttatttgtgtttatattgtagatacaaatgacaaatattattatatatatagctcaaaagccagaaagtaaatggaaatatacttttggaatgttaatggcattaactctgagtacattgggttaagtttaaaatg

SEQ ID NO: 653267 - DNA, 637 bp, Homo sapiens
gttacagaatttcccccaaatttggcatagaacatttaattcagattcagaaaacttaatgaatgtcaaacagaactaaaacaaagaaaactattcgtaagcaccttgtaattaaactgctgaaagccaaagaaaaaaaaatcttgaattcagctagagaaaacacacacattaattacaggagaagaaggctttgattgactactaactctcctaagaaattatggagcctggataatattggaatgacaaagcaaatggctacacatttaaacaattggtcaataattaattctatgcttagtgaagctatccaaaaaaggaagatgaaatcaaaacatatttagataaatataaagtgagaaaatttattaccaggaggatagcatyccaagtaatgaaaaagatgtacataaacatcttttatatacaggctatatcaacatatttttttctcttaaattctttaaaagagaaatgattgtttaaagcaaagacaacttatttgtgtttatattgtagatacaaatgacaaatattattatatatatagctcaaaagccagaaagtaaatggaaatatacttttggaatgttaatggcattaactctgagtacattgggttaagtttaaaatg

SEQ ID NO: 653268 - DNA, 232 bp, Homo sapiens
atgataggtggggagagattatatttgaatcctgaaaataatcttccaatatttttctgaaacaatttaccactttgatttaacttaaagccacttcaaacgtgggaattgcgggtacagttttcctggacactgagttaattttattatccattcagggrcttatataccagtttgttatacagttcatttagacaaaagttgaacagttgatagaatatattgttaggcc

SEQ ID NO: 653269 - DNA, 642 bp, Homo sapiens
tggtttctgctttttctctgagtatactgttggaaagataacaccaagtggtaagtggaaagacaagcaatggactgaaagataaaagtaggacaagattccccctgtggctcagtgtgtggcccaggaataagctcttgagtctaacaaaactttatgtagcatggtgttataggctgaattgtgtgctctcaaaattcatatgttgaagttctaacctccagtagctcatagtgtgactgtatttggggaaaatacatttaaggtggtaattaaggtagaatgaggtccttagtatggaacaaaatccagtataactggtgtcattataagcagacatcaggacatacacacacacacacacacacacacacacacacacacasagagagagagacagagagagagagagacagagagagagacagagagagagagaaggaaaatgatatgaagacacagggaaaaaatgacaaaccaaaggagagaggtctcagaagaaataacctcatttacaacttggtcatggccttccagctccagaactgtgagaaaaaaaatttcgatcctttaaaacacccagtatatgaaacttcgttgtggcagccctagcaaataaaaacatagcatcgccttttttag

SEQ ID NO: 653270 - DNA, 396 bp, Homo sapiens
gctgaatcctaaattgcccactaacttccttccatttcttccctcccttcctctaccctcctgctccaccccagagcaaataaatcttccctgtcctatgttacagagttgtgggaacaggatatatgagaaggctttgagactattcagtgcccccagtacactcttgttttcctgtgtgccctgcattccatcagtggatgaaagaaggcacaactcttgagcctaggtagsttccagtcctttgtgaggctcactcacaggtggaaaggacacatggccatgctcttggtgttcagaggggagagagactgtgtgatctgtaatattctaggaggatactggagaaggtggtctgaggttgcacctgaaatgacatccatgggcttaatggaa

SEQ ID NO: 653271 - DNA, 491 bp, Homo sapiens
gcctgaagagggaatggagtacaaaaaacaagtatgcaccatagcttctgacctcaagcaacttaatttgaattaatagaaaagacatttctgtgaacgacataaaacagcatttaggcttcaagttgtgtttggggttttaatccactagagtcaatatttttcttctttaatttgaattgtmagttaggagaaaaactaggcccaagagtctgaggtttttctaactggcagggaagcttaagcaatttacttagtgctcaatctgattaacacagtccttttacaacttatatgagcaatatattctaagattaagtgaaaaatttaatgtcaaagttgaatgttactttccaggaagattaaaggaaagccctgtgtttctcattgaatgactagcccagggagagatttggactaaatatcccaggaagcttttcagtaaaattataggaaataaaggctgggttgaaattttaataatatctttt

SEQ ID NO: 653272 - DNA, 589 bp, Homo sapiens
gattaatgatttgatatcacagattaagtaaaagatggtttcttttgcattacttaagttttagtgtcatttgaagaagtggctgtactggtcctttgcagtgatttttaattttattgttacgtggaataaatatttcattgtatgtggtagaatctgacagcctatcgaagaaatttcttagaacattaacaggtgagtctgtaagctgtgsctttgttggggcagctctttggcataaaccaatgggatttgagtaatgggccatatgtctgttacaattctgtaaaaaaattggcttacttcagagatggaaaaatgatgccatcaagcaggagttgacaatgttttcttttctgcaaaaggccaaagagtattttaggctttgcaggccatacaatctctctcgcgactactgaactccactgttgtagtgtgaacacagtcataaacaatacataaataaaaggagcatgtctgtattgcaataaaacttcatttacaaaaactttaattacagtctgaattaagcctgtggaccagtgtttgttgatcccctaacatagaccatttaatatgtgattcaatc

SEQ ID NO: 653273 - DNA, 511 bp, Homo sapiens
agcaaaactccatctaaataaataaataaataaataaagagtaagagaaagaaaggaaaaaaaaaagtagcaaccctagttcatgggtccatcagacatatcatcagcctatttctatattatcagttctttttcatacttttgcattttgcttctaggccagaaaaacagtcttctgctttcaacaggcatgctagctttcttcctgactacactgggttgaatagcgtccctcaaattcatgtcctagaaccttagaatgtgaccttatatagaaatagggtctttgcagatacaattagttaagtgagattatcctggattagggtgaatcataaatctaagatgattgctgtccttataggaagaggggaaaacacacagacagacacagacaggggaagaatgcctcatgatgatraattcagagactggaatgatacagctacaagccaagaaatagcaagggttgctggcaaccaccagaagctaggagaaaggcatgcaacac

SEQ ID NO: 653274 - DNA, 572 bp, Homo sapiens
atatttacatctttctccaacccctcccgtgataacacttggcattgtccctacccaagggaataaactgaaacgcgggaaaggtggtggaaacagaaacaatcaaagtggaaaaggcattagtgaacaagctctgagacttctcagatgtgtttttttcctcttgccaaggagagacactggatatattttctatgttccaaatgttgccaaataccctcccacaatgtggcacccgaattgtaaaaacacatattcaaatgcaaatagggtaaaagccccagatgcagaacgttaagactattatataatacagtgaaattatcattttttctcatctcaagatctrtcattataacctctgcaagtgaggatgcttaattggcaaagctcccagaggagagagagcatcacggtgagcctccttctgcatgctgactaagtgtgggctgacttggcaccgatacagaaacatccactttattccagtataggctgcaattacacccttcactcaaagtctattcactgacagtgaccatcactctgagaggctgttttctggagtgcta

SEQ ID NO: 653275 - DNA, 578 bp, Homo sapiens
taatgtatggtgaaccttgctatttgtgacacttggagcctatgttgtgggtgttatccttctctgctaacagtatactttcactgtaacagttatagttccactgtattctactcaaaccttgtctgccatgccaactgtcaccacagaagaaagacccttacaatgtggaaggtaaaagttcaatttctaagctctgggcctgttcttcagaggctaaagaatctcctcatctccagtgaagccatccctggaatccctcactgattcagctggagtatggaggagcttaagttctaaagacctattcacttcctttaattccacctatacttcacaactgagaataccacaaacagttgggccctagaagaaagaagagctcacagatcttgcacttctaggtctgaattgtccaagtgaagaacgctmatttactccacatcccacagataactatctctcaagtgatcccagtatgaaagtctggagtatgagtataatatactcactgtaatatctgagtacaggaagttcacttcagagtcttcattctctcaaataagacagacactttt

SEQ ID NO: 653276 - DNA, 426 bp, Homo sapiens
ggtgatttttttcccctttccacctacttttatattcacataatctttcagtttcttttctttacaatgtctatttttgatgattttaaaagaagtacatgcctcgtagaaattttggaaaagagaaaagtgtacagagaaaaataaaaataatytttaaaattctaccacctgaaggcaacattgataaagatttgtatgtatttagttgttcttcagtttatttgcctgtgtgaattctgcaaatggaaataatattgaatgtaacagttctgcatcttgcttttatttacactacggaaatcaaaggttgtgaggaatatatttttagaggaagagaaagagtcagggaaggaggagcaggagaaagaggcaggtgggaggaggaggagaatttctcagcagcattatagacctgttgaggat

SEQ ID NO: 653277 - DNA, 426 bp, Homo sapiens
ggtgatttttttcccctttccacctacttttatattcacataatctttcagtttcttttctttacaatgtctatttttgatgattttaaaagaagtacatgcctcgtagaaattttggaaaagagaaaagtgtacagagaaaaataaaaataatctttaaaattctaccacctgaaggcaacattgataaagatttktatgtatttagttgttcttcagtttatttgcctgtgtgaattctgcaaatggaaataatattgaatgtaacagttctgcatcttgcttttatttacactacggaaatcaaaggttgtgaggaatatatttttagaggaagagaaagagtcagggaaggaggagcaggagaaagaggcaggtgggaggaggaggagaatttctcagcagcattatagacctgttgaggat

SEQ ID NO: 653278 - DNA, 426 bp, Homo sapiens
ggtgatttttttcccctttccacctacttttatattcacataatctttcagtttcttttctttacaatgtctatttttgatgattttaaaagaagtacatgcctcgtagaaattttggaaaagagaaaagtgtacagagaaaaataaaaataatctttaaaattctaccacctgaaggcaacattgataaagatttgtatgtatttagttgttcttcagtttatttgcctgtgtgaattctgcaaatggaaataatattgaatrtaacagttctgcatcttgcttttatttacactacggaaatcaaaggttgtgaggaatatatttttagaggaagagaaagagtcagggaaggaggagcaggagaaagaggcaggtgggaggaggaggagaatttctcagcagcattatagacctgttgaggat

SEQ ID NO: 653279 - DNA, 507 bp, Homo sapiens
tttctcaggtgactgctctgtgcttttttatctaaagaagggcaagtcacccacgggtactaaccctcccccacccacatcaagggagaaacactcctctactcttttctggacattcctgttcagagtcgaggtaagggttgcacggccccgcccctccgttaccaagccttccctcgcctgcctcgcagcctcaggcccttagaacccaggcggggcggggccgggaaaggtgaggctgctggcgggaagcgggggcggcgcgcagcggtacctagcggcgctgccccgctggcagccggaggacgtggcactgtccgagaatgcagggaggggattcstctttctcctccccgcgaggaggagcctcgacatcctgcagaggcgggaggatccttgagggcactggtgcgactttcaggtgaggtcttagcagatgaaagcggctggctgtggcccgcgccagtagtgctttctgctccgcactcgccgtgagccaggtgtgca

SEQ ID NO: 653280 - DNA, 507 bp, Homo sapiens
tttctcaggtgactgctctgtgcttttttatctaaagaagggcaagtcacccacgggtactaaccctcccccacccacatcaagggagaaacactcctctactcttttctggacattcctgttcagagtcgaggtaagggttgcacggccccgcccctccgttaccaagccttccctcgcctgcctcgcagcctcaggcccttagaacccaggcggggcggggccgggaaaggtgaggctgctggcgggaagcgggggcggcgcgcagcggtacctagcggcgctgccccgctggcagccggaggacgtggcactgtccgagaatgcagggaggggattcgkctttctcctccccgcgaggaggagcctcgacatcctgcagaggcgggaggatccttgagggcactggtgcgactttcaggtgaggtcttagcagatgaaagcggctggctgtggcccgcgccagtagtgctttctgctccgcactcgccgtgagccaggtgtgca

SEQ ID NO: 653281 - DNA, 507 bp, Homo sapiens
tttctcaggtgactgctctgtgcttttttatctaaagaagggcaagtcacccacgggtactaaccctcccccacccacatcaagggagaaacactcctctactcttttctggacattcctgttcagagtcgaggtaagggttgcacggccccgcccctccgttaccaagccttccctcgcctgcctcgcagcctcaggcccttagaacccaggcggggcggggccgggaaaggtgaggctgctggcgggaagcgggggcggcgcgcagcggtacctagcggcgctgccccgctggcagccggaggacgtggcactgtccgagaatgcagggaggggattcgtctttctcctccccgcgaggaggagcctcgacatcctgcagaggcgggaggatccttgagggcactggtgcgmctttcaggtgaggtcttagcagatgaaagcggctggctgtggcccgcgccagtagtgctttctgctccgcactcgccgtgagccaggtgtgca

SEQ ID NO: 653282 - DNA, 578 bp, Homo sapiens
gtgaattctgcaaatggaaataatattgaatgtaacagttctgcatcttgcttttatttacactacggaaatcaaaggttgtgaggaatatatttttagaggaagagaaagagtcagggaaggaggagcaggagaaagaggcaggtgggaggaggaggagaatttctcagcagcattatagacctgttgaggattagcaagaatgaatctagagtctctcttctcagtgcggttttataacatactaaaacaacactcatagaatcctctaggattttaaaataaaattgactaagggttaccaagccgggagatggttaaggcagttagagattctaaagcagcgttgagaacacgattcaaagagctgactctgacgtctaggttcagtatggaggtgaataaacagcagatggcctggaagatacagagagttgaggaactggaatacatgacgcagtaaacaacattcagaaagaatgaggaagtggggracttgacctgtggtcaagaagtataatttcagcattaaggatcctaagggtggaaaatctggaagaaagatgagctacaaaaga

SEQ ID NO: 653283 - DNA, 576 bp, Homo sapiens
tgctttctaatttatatggcacaccacctgaaggccagcacagagaaatatatgacctgtttaaaacgaaaggaagtgtacctgggcacgaccaagaatctatcaaaaaagcatcagaaagctccatattaaggttaataaaaataggtgaaccgcacatttcaaaggagagtctgggacactattcaaataacaaagacttaaagcaggctgggttcactgcccagaataataggcacacgcatttacagaatggggggattttgtccactgtacgcatgctcattcacactcacatctaaccctacaacaccagctccgagaaagtggatgcaatgaaggaaatgttaacatgagcagtgaccctagtgtacraacaatatcaaattttagattctttttgtttccatgatagtctaatctgtattatcttttggctatatcaaccttgactttgaaatctccaaataaacatttcaaccaaaatgtacggctatattgtaatttcagcaagaagggttttcattgtttgcacatatcttcaaaaagaaaaaaaagtgtgcttggtagtaatca

SEQ ID NO: 653284 - DNA, 575 bp, Homo sapiens
ataaggagattctcctgaattttttgggtgggtccagtggaatataaacatcctttaaatatggaggaaagaggcagaaagtcagaatgttacaatgatgcagtgttcagaaggattccactgtctgttgctgactgaatttggaagagggctgctagccaagaaatgcaagtcacctctaaagcctggaaatgacaaaaaaaaaatggattctccccttgagcctccaaaaggaaccttaattttaggccagtgaggcccattttggacttctgactttcaaaactgtaagacagtcaacaagtttgtgctacttttttagagtagccattaaaaaattaatttagcaaatgaggaaactaacataccacccataagactgtaccattgtcatcattgtttacattgtcagaatccttgacatcatcatcattatcatcatcaagactttatttcatggctattrttaaaaaaaaaaaaacagatgctggtgaggttgtggagaaaaaaaggaatgcgtatacactgttggtgggagtgtaaattagttcaaccactgtggaagacagtatggt

SEQ ID NO: 653285 - DNA, 573 bp, Homo sapiens
tccaagaatcaaacctggggaatttgtgtttgattctgccttcccctcttgttccaaaattcattaatattcttattaaaacattcctattgctttcctaacatatattttggtgatctttcccactttcttggcttggacgcttaattaactgattttgattctttcatacttggtggtgaagctatttaagatacctgccattctgtgcaaatctctgatttcatctcctactatctttttgcctgtatttgactcatacaaaattagtcatactttaactagatttagatatgactcatctgcataggatgcattgtagttggactttgtttctttaatagagctgacaccatctttttaaaatttaattctgtccttatgttattttctaatcaatatttttaataattatgtatggttttattccctcatttatctaattctttttgcttgtgtgcytgtatgcttgtttttgtgctccctctgatccttttataatgtatgtgctatatggtctatgtgcttttccctaaataatttggagggcatagtcttttaaaaattatatcg

SEQ ID NO: 653286 - DNA, 588 bp, Homo sapiens
tttgcagtaagtaaatatttgttgaatgaatgaacatgtatgcataagggaccattcaaaaactcatccatagcatctggggatgccttctctgtgctctcytcccttcaaggctaagaactgcagactcaaaatgcatctgacaggctcaaaattgacatctgatataccctccagaccattagtggaattttttttttttaattcgacttgaactctgtgaggtcaagattcaaatgtttacttttatagccttatcacttaacatggtgcctggctcagagtagacatgcatatatttgctgtgtacactgcaaaataagatatgttggggaggaaaggatctatgtagaattggcaaacctgcccagagtggttggagaaatttaggaaccaacattatataaataaatccctgtcgctactcctcctaaagagtactgcaaaaaactctcacctgagaaagatcttcatcagaaattagcaactgcaatttgaagggcctacccctatgaatttcccattgggatccacatctgaaattctagtctggtttctctgtccttgatcttttaatctgtgtggaac

SEQ ID NO: 653287 - DNA, 655 bp, Homo sapiens
ctcactatgaacatatgaggacaatctccttttctagactatcgtcaacccaaatttgaattctggttgtgctgtttattaaaatgtgggtgtcatctaaccaaaatgggcttcataatcttctttatctgctaattacaagttattttattttatttcattttattttatttactatttattttttatttttttgaaaccgagtcttgctctgttgctcaggctggagtgcagtggtatgaccttggcttactgcaacctccgcctcccaggttgaagtgattctcctgcttcagcctcccaaatacctgggattacaggcacgaggcaccttgcctggctaatttttgtattttcggtagagacggggtttcaccatgttggccagactggcctcaaacttctgacctctggtgatccaccagccttggcctcccaaagtgctggggttacaggcgttagccaccgcaccaggcctgattacaagttattttagaagaaaatacattttatctrcagcatcctctaccagatcaaagcactctcacacatgttatctgatatgagctacacaataactttgagccaagacaagacaaagaaaactgttcccatttttcagagaaagaaattgagtctgtgatcacatggcttt

SEQ ID NO: 653288 - DNA, 519 bp, Homo sapiens
aataccattcaggacataggcatgggcaaggacttcatgtctcaaacaccaaaagcaattggcaacagaagccaaaattgacaaatgggatctaattaaactaagtctacttttaaagtatactattttattctaatgcaagtactttatagcagagaattcccaattcttacttcttatctctgataatactgtcatttgtttcatacrcttatatgctaccatcacccaatccattgttactattatcattataaacagttatcttttagatcaattaagaatagaaaaaataaaaatatatctattttaacctcatttagttcttctccaacacctcctttctttatgtggatctgagtttctgacctatcatttttctgtacctgaagaatttcttgccagatagtctactggtgataaattccctcaggtttgttttcctgtgaaagttatatttttccttcacttttgaatgatgattttgcagaatataagatactaggttgatgtttttct

SEQ ID NO: 653289 - DNA, 519 bp, Homo sapiens
aataccattcaggacataggcatgggcaaggacttcatgtctcaaacaccaaaagcaattggcaacagaagccaaaattgacaaatgggatctaattaaactaagtctacttttaaagtatactattttattctaatgcaagtactttatagcagagaattcccaattcttacttcttatctctgataatactgtcatttgtttcatacacttatatgctaccatcacccaatccattgttactattatcattataaacagttatcttttagatcaattaagaatagaaaaaataaaaatatatctattttamcctcatttagttcttctccaacacctcctttctttatgtggatctgagtttctgacctatcatttttctgtacctgaagaatttcttgccagatagtctactggtgataaattccctcaggtttgttttcctgtgaaagttatatttttccttcacttttgaatgatgattttgcagaatataagatactaggttgatgtttttct

SEQ ID NO: 653290 - DNA, 609 bp, Homo sapiens
tgctgacaaaatgcacattgattatgaaaaatgaggacttctaaaatattgatagaactttttatgggggagggaattaacttagaacttaaagcatgaataatatgttttgatgatatagcaattaagtcagttttattgttttggaactgttaattttctactcattcaagggaaaaggaggcctttgttttctgaaataaaaattttcaactgtcaggttttgtaccacaggccacaagcccttttgacatcagcttttcgtgaggcgcttttgaagtaaatgtgttattagtacaagaaaatcatgactattgtaaacaaacaataactattagtttttcctgcgtgtgtttgacacatggttatggagccattgtarcactaagccacttgaaaagtcattgatccaaagcacagcattttcagggcagctcttgtaaattcttccataacagagtcatattgggtagtttatgacaagctctgaagcagtcgctggtggtaactggaaaacatacacagggcaaaagcaggaacattcatatagggcccagcagaagtcagagccccattcacagggacagcttgggattaatatgatgctgt

SEQ ID NO: 653291 - DNA, 624 bp, Homo sapiens
atatgcccatgtagcaaacctgcacatgtaccccttgaatctgaaataaaagttaaaattatatattttttaaaagataagtgtggtcaaatgacttcatagaagatagttttccagaaaaggtttgtaatggctgacagtaagtaaacctcctcatctcctctttccaacccttttttattgtggaaatcgcattaccaaagagcaacaagactgattgaagaagtgaggggcaggggagctccacactggaaagcactcagatgtccatacataataaaatgaataagtaattgggatttattcaaacagtgaaatttaacacagcaatgaaaatgaatgcatcrtagcacacaacaccatggatgaattctaaaaacataagattgaataaaagaaatcagacacaaaagatacatattcaatgattccatttacagaaagttcaaaaagtcaatatttaggcgtgcatagtgatgatcataaaagtgagtcgtgattcctgtggcatggaggaactgatgatgggaagagacatgtgggtgtggtgggggatatttctggaattctgccaaaatcatatttcttggtctgtatgatagctacctgagtatttgcacgtaa

SEQ ID NO: 653292 - DNA, 519 bp, Homo sapiens
tttccacatatctctccgtgtgtcttcaccaactcaattcccaacatcttccaatcataaaaggttgaaggataattataaataaatgcagattactgcaacaagcactaaggatattctcacagtgcacatgagggatctgattctgcttagatgggaacaacaaaacctggataatcaagatgatgaaacatattgttgagagatgctcttttttgaggagaaaagtgatgaacatatgttctaatttagataatctgctcctygtctatttcagactctaagtttactcagctaacctttttacagaaataggaaaaagtgctggataataatgattcagtacaagtccattctcatgttccagttaatggctcatagcaacagctattctactgatccatttgtaacattttaaacaagaaaagtttttctggcctaaaactagtgactttgaaactatctgccctgtaatgttgaccttcttcagagaaacaatttaaatgtataaatataaag

SEQ ID NO: 653293 - DNA, 475 bp, Homo sapiens
actcacaatggcccattttccacatgactcctactcacatactgttacaagacactatgtgtactttgtatcacacaatgcaaagatcctgcgtttcaattattttctctgttccatactgtccctattctgaatgccagagtgtaacaaatgagcatatattacggataaatagacacatccaggcagtgttctctgcaaatttgcttctgttcaattatcttaaatatgtatacatttataaaatccactcatcaatgtaaactactagattactagatgtctttcaaaggtacatgctgtaagatttctaacagattgacttctcaaacatgatcttttgtctgtcaagtatttattaaaggaagatcttctctagattttctrggtcagcaagcacttgattattttgttgtattgtgaccaatttacagatttctatctgatgtgtgtatataaagggagtgagtgagag

SEQ ID NO: 653294 - DNA, 557 bp, Homo sapiens
tctcttggtaagaaaagggcctggatggtcccacagtgctctatttcaggatacagaatcagaattctctccagaaaagaagcccaaatccaaggaggttcgcattcaagtcagccatggtttgactgtgtcccccaaatttcatgtgttggaaacataatccccaatgtggcagtgttaaaaggtgagggctttaagaagtgactggatcatgagggttctaccctcatgaatggaatccactcatggattaatgggttatcacaggtgtggcatcgaggctttctaaaaagaggaagagccacctaagcaaccacgtgagcatgctcagcacccctgccatgtgatgccctgtggcaccggagtccccactggcagaaggctctcaccagatgtggccctcaaccttagacttctcagtaactataagaaayaaattccatatctttataaattacccaaattcagccattctgttataagcaacacaaaacagactaatacaaaatcccaactacatgaaaagcaaaatctagacacttggagattatatttcc

SEQ ID NO: 653295 - DNA, 571 bp, Homo sapiens
aaataacctgccttaacacccccactgccactcagactaacatcctgtgttgctaaaacacaacatggcaggtccctgcttgtctgggagtaggacctgggtattcccaaggtagtctttacgtatttactatgcttactccagcacttacactgctgtattgtaatcattggcttactcacacgtctytcatacaaaactggagggcagaaaatgtgtgtcttttctaagattatgcttcatatagaaagtattcaataaatataactataaataagcatataatattttgtaaatacaaactatgatttataatcatctttcactcaataaataatacattcaagacagcatgcaggcaataaaagtgtttgggtctactttagaacatccctcaaaaaggtaactcagctggtcttggtcacttataatcctagcactttgagagcctgaggtgggagaattgcttgagggcaggagttcaataccagcctgggcaacataatgagacctccatatctacaaaacataaaaggttagccaggcatgattgtgagcaactgtgaccccg

SEQ ID NO: 653296 - DNA, 571 bp, Homo sapiens
aaataacctgccttaacacccccactgccactcagactaacatcctgtgttgctaaaacacaacatggcaggtccctgcttgtctgggagtaggacctgggtattcccaaggtagtctttacgtatttactatgcttactccagcacttacactgctgtattgtaatcattggcttactcacacgtctctcatacaaaactggagggcagaaaatgtgtgtcttttctaagattatgcttcatatagaaagtattcaataaatataactataaataagcatataatattttgtaaatacaaactatgatttataatcatctttcactcaataaataatacattcaagacagcatgcaggcaataaaagkgtttgggtctactttagaacatccctcaaaaaggtaactcagctggtcttggtcacttataatcctagcactttgagagcctgaggtgggagaattgcttgagggcaggagttcaataccagcctgggcaacataatgagacctccatatctacaaaacataaaaggttagccaggcatgattgtgagcaactgtgaccccg

SEQ ID NO: 653297 - DNA, 609 bp, Homo sapiens
acattttgtgggccgggtgcagtggctcatgcctgtaatcctagcactttgtgaggctgagacgaggggatcacttgagatcaggagttcaagaccagcctggccaacatggtgaaaccctgtctctactaaaaatacaaaaattagccagaaattgcttgaacccgggagatggaggttgcagtgagccaagattgtgccactgtactccagcctgggcaacagagtgagactctgtctcaaaaaaaaaaaaaagaacacattttgtgacaaaaatattaaattgtaatgtctttaaaataattgtgtacatacatacacatacattcatatatatacacacacatatacacatgcacacacacatatgtacacatagtcatccctcagtaactgaggggcrttggttctaggaaccctcttagatacaaaattcacagatattccagtttctgatgtaaaatggcatagtatttgcatataacctatgcacatcttcccaaatactttaaatcatctctagattactaataatacctaatacaatgtagatgctatgcattataaataggtgttatactgtacaatttagggaataatgacaagaaa

SEQ ID NO: 653298 - DNA, 501 bp, Homo sapiens
aggttgcagtaagccgagatcgcaccactgccctccagcctgggcgacagaaggggaccccgtcaaaaaamaaaaacaaaaaaaaaaaacacctggctcttccatttcagttttttcatgtctctggaattttttgtttgttttgaaacagagtatcactctgtcacccaggctggggggcgtggcatgatcacagctcactgcagcctctaccccacaggctcaagagatcctcccacttcagcctccagactagctggtactaaaggtctgcaccaccatgcccagctaatttttgtattttgtagagatggggtttcactatgttgtccagtctagtctcctgggttcaagtgatcctcccgcctcagcctttcaaagtgccgggattacaggtgtaagccaccatgtccggcctggaattttttttttcttaatccttcttccaggccaggcacagtgcctcacacctgaaatcccagtactttggaaggtcaaggt

SEQ ID NO: 653299 - DNA, 478 bp, Homo sapiens
tttacttttaagtaatagcatagttaagtagaaagtactgggcatataaaacattaacataacagttaataaaatgtgctcttttgggtctttgtccaaaagtaactaaatcatccaaaattcaaacctgtaatttttttttacaagattcatatgatcagtgttttgttgtcatcatctttatcattgatgaaaatgagagagagctggagtagtcagtagtaaaagggcagtggacagagaaaggattgaaacaagtggacaaatggaggaatgaaccatttttttcaaatccaaaagccaaatcaaattggacagccagatatacgtagcaagcaaagggcagagcyagggctagaacccggactgccctaccagtgctcttccatgacactgcgttgtgagaatagtctggtctcactgtattgcaatggactatttggatttctctcttctgaatgcacccaaagcaaggttg

SEQ ID NO: 653300 - DNA, 550 bp, Homo sapiens
atatcagttggaactaatattatcatcttcattttccaggtaagaaaagtgaaacagattttaagaaacatacccaagatcatacaacttgtaaatggcagagccaggggttccgacccaagcagatggtcccaaagtccacaatctgaatttaatgctacagctgacttaatgaaaaataaacttctttttttwaaaaaaaaaaaaatatattgactctgttcctggctgaagggagatctttcacagtctgtaaatggaggtgtttgctttcttttgcatgcatccctattaaatatcagatttggtttgggtttctcctccttctccttttaaacttctatacttcaatatattggctatttttctccaggttgcatcatcttccaaggtaataatatgctttctagctgttcctctttaagctgtcaacaacaacaacaacaacaacaaaatatatatatatacacacacacatatatatatatgactaacaaagggcctggtgacataacttgattggtagcaaaaaatagtgtaaaggttgacc

SEQ ID NO: 653301 - DNA, 568 bp, Homo sapiens
tgagaattctctttccttaataataaccagacttaagagaatgagaacaagatgcaagactactgaaaaatgaagggcaatcatctgtatatcatattttttcatctaatgtaaatatccaaattccaaaggcaattggttttatatataatttaattgggaagcattccatcaggtatttgttattaagaatcagagatgtatcaggaggacttgattgtttcaggaagaacaccaacaggatttagaagtttctttgaccaattactgaagtgcctggcacataattgatgctcagtaagtatttggatgaaggcataaaaatatattcacctgtgacaatgatgatccacactgtcacatgcagtggactcagtcagctaactatatttttaaaatattgtrtaatttaggttctcttaaaattccaaaccagatggagattaaatgagaattggttaaaattaatgcataatgtttcctgaataaaatagctcactcaatctgagaggccttttcctgtttgctggaattctgtttcccttattattttttcagttccaggtaa

SEQ ID NO: 653302 - DNA, 533 bp, Homo sapiens
atccagtcttattcataccccctgacacttttggtacctgttagctgggtcatcagctctctttgagtttaagccctttcttcccttataaggcccagtgcaacctcagctgggtgatgctggaatttaaacctatactagtatccgggaaagaagctggggctcatcctgggtggagggcasaagtgtcttgaagggaagaggcctctgcattgtcttcaagcaatggggccgggggtgggctggctcttgctatggagggatagcccacatttgtggggttggagggtctagaggaaactagaatttcaaggggtagggcatcaacacagatgtttgcatcctgtatttcacagtcctgttcttccccaatcagggccctgaacttgacacagcagatctggcatggttgggagtgtcaccttctttggtctcagatgattaattcttagccctggtcctcagctttctctggcctcccaatgcaaaagagagtttctctgtacacttccaaagaggttctctggcattca

SEQ ID NO: 653303 - DNA, 324 bp, Homo sapiens
gtccatggtgggaatgtggactgctgagggtcacccacttaccctttctgtgcactaggaggcctctctgggctcccagccaagtaggctgccttgcctccctctccttccttgccttaggtgtttcctgtcacttctstatggaattccagcattctctctcagatgatctatccaaagtgtgattatcaacttactattttggtttttcttggtggaggaggtgagtaccagatgcctctggtcaaccatcttgaagcatttgactcaagcacttttgaagtcaagtgaaatctgttcaattgaaaagaatctctataagca

SEQ ID NO: 653304 - DNA, 623 bp, Homo sapiens
gacctggccctcccaccctccctaccgctccctccagcaggggcagtggagcgagcaagaggactgtgggcagccagggccatgggtgccactcctctgccaggagcagccctaccgggaaactctacaggcaggaaggagtttggctgtgttctagaaactgacattccacatggtgtggagtgggcccgggggggcagtcgggtgggtggatgagctgtggagaggaggagagagamgccatcccacaaggccccaagagccacatgaggacacttatcattccctgaccaccgtcagcagccacccttcctcccatctgggggcagagggagagagctagagggactggactcatcctttctctctctccctttcagctaggatttgccacataacctggcttggctgactgctcacttctgccctggactttgagtctcaagtggccaaagatggaaaaaagtcaggctccctctcagtggtaatgggggagctttgggggtgttctgcataggctgttcccactaacagatgcctcttacctgttttccaaatctagagcctcctgtcatcacttctgagccccccatttcttttcttaagatagccagaagcagggg

SEQ ID NO: 653305 - DNA, 562 bp, Homo sapiens
tgattatgatgacagccatcctactaggtgtgaggtggcatcttcttgtggctgtgatttgcatttccgtaatggctattgatgttgagcctcttttcatgggcttagtgaccaatgtatacttctctggagaaatgatcattcaaaaactttccacatatttatattgcattatttctctttacaatattgagttgtaaagagtgctttatatatttgggataccagtcccttaccagatatgtaatttgcacatattttttccatgctgtaagttgtcttttcactttctaaatgacattctttttgaagcaaagaagttttacctttagaataagtcaaatgaaactatttttcttttgtcaatattgccttagcatacactactttagcagtcttagccaaaccccaagkcacaaagatttacttccatgttttttttctttctttcccttccttcctttttcctttttccttccttccttcttccttccttcctttccttccctttccttcctaccttcagggcttcttttcttccttccttcctttccttcccttt

SEQ ID NO: 653306 - DNA, 563 bp, Homo sapiens
attgctgggtatctatccagaggaaaagaagtcattatatggaaaagacacttgcacacatatctttatagcagcacaatctgcagttgcaaaaatatggtccaacctaaacgcccatcaactaacgagttgataaagaaaatgttgtatatatacaccatagaatactactcagctataaaaagaaatgaaataatggcatttgcagcaacgtggatggagttgcagaccattattttaagtgaagtaactcaggaatggaaaaccaaatgttgtatgttctcactaaactatgaggatgcaaaggcataagaatgctataacggactttggggactaggggaatggtggaagtggggtgagggataaaagactacacacattgtacacagtgtatactgcttgtgtgatgggtgcacaaaaatctcagaaatcaccactaaagaacttctgcatgtaaccaaaaactacccrttgccccaaaactattgaaataaaaattttaaaaaataaaaacaagaaaggaaagagtactatcccagtctccacatattggccctaac

SEQ ID NO: 653307 - DNA, 584 bp, Homo sapiens
tggtccctcccagcttttcactaaatccttatgactaggcagaaaaaaagagaaaaagaaaattctcgttaatgtaggaaactaagatgggccctcaagttaactccagaacctaacagagactgagtgtaattcaaggctgctgatacaggtggttggaaaacaaacaaacaaacaaacaaagaaaccctacccaggcttatgtgcaaggcatactctccttttggttcaggttcaagagagaagaacttttcaaacttgaatgtgcacaaatcacctgtggactttgttcaaatgcaggttctgattcagcagatctggggtggggttgagaatctgcatttctcaagagattccaggtaaggcggctgctattggaccataytttgagtgacaaaaccttagagtacttttgaccaggcactggccaaaggaggaagctccaactacagctgaccagatagatgttcaccaggtgaaagcctgtttgaatctgggggccgaattgaaatcttggtagaccgttctgtatttaccattcgtaatattagaggcccctttatggaggaggataatactctcct

SEQ ID NO: 653308 - DNA, 611 bp, Homo sapiens
tcattcctctgatgagacctcaatgcatagttatagaggacggtttcctaagctggcactcaaggcccaccatagcccagagtgtgtctcacccagccgatggtctttctttccatatacactgtattctaggcaacttgtactgtagatgagtgctatgattaagtccagcctgaaagacctgggcatgaatcacccacctgccctttactgaatttggaagagttgcttagattccctcatcttccatgtcagtctctgtaaaattgtgataaaaatggatcccagccagagggattactgtgagcagtgatgaaggtgaagtgtgccaggctcctggcatagagcttggtacatggaataggtgctcagtaaaagctcctaatactgaccgtctcctgggtgtttgtgccatcctcatctcagtcattcctaccgtgtcaatttatagcgtgctcttccctgccctcacttacctgtcaaaatccttaccgtcctctggacctatctattaaktctcccatactccactttgttgttttctgggcaggaccctgtctccgtcacctgtgaatccccagggccagcagcatgcccacgcagagcgtgtg

SEQ ID NO: 653309 - DNA, 490 bp, Homo sapiens
ggtactcaaaccaagttgatagaaattaaagaaacaacggtatgtttggatttcacatctacttttgtcctacatgctgggattgctttaaaaggattgcaactaattgaagaatggataccactgggaaaaggtatgttgtcagtgaaaccagtaatttaaattctttatataatggcaaaagattgagttcactaagagacaaaaaattcattatctctctgggagatcttacaaagataaagatttttgtgtaaacagctacaatgcctatacattagtcattgtactccttagaaagatctacatcatagagactggacaaagaccagcgccctggggtcagtgctgctgcattgagtttggctccatagctccccaccagctgtggaggacctgggataggttcgtcagcgtttcccagctgyaagtttcttttcagttaaattcattgactccactcatttgtaaacatttgtggtttgctggg

SEQ ID NO: 653310 - DNA, 400 bp, Homo sapiens
cccactgggattttggtagactgaagagaaaaaacaaactagtattcaagtttaggccaatgggctggttacgcatgtctaattcaggcgtgtggggtccatcaataacactgaagcactctcagggcagggaaacacctgcatgtctttttatctgtaacaaattgggggtctgaaatttaaaggactagaattacatttttaaaagggaattggatcagtgatttctaatttctctctaaacactaacatgtaggattccatgattctggtctctttcagggatgtcaaagtggtggcaactaagccacttgaattttcagaaaagtwcaattccaaatgtcctgcaccaattttccattcagaactcagtttctgtatctacagtgttgatggcaaa

SEQ ID NO: 653311 - DNA, 605 bp, Homo sapiens
gaaacgctacttggaaagaaagatagttctactatagcctgaggtgttaggtgagactggaaatcagattagcattaaaaactrgtgttcttttaagcgcttgtcactctcagtcacctttggaaaacagctgatcactgatgtctaccctccagtttttctccttctttccagacttgttgtggaaacattatctctccatctctgagctgccgggactctgggtgcctgtttgtggcctgtcattgtgggttggaagggagttggtgccacagtggtggcggtgcttgtcagcttgctgaggcatgtattttaggtattgctgttgtttctttgttgttgttttattttagagaatttcaaataacaagtgaatccaaaaatttatcgttgatgtaatctctgcattgctagctcttgaccttttcttacaaagaaaaaattgcattccctgcaacattctccctcaacccaaatgtgctgtgtggcacagtcaaatgcattttatatgaagaaggagaacagggttgctgtacctgcctggaactgctgtctttccatggggctcccactttccacacaaagtttacctaaccatagtttac

SEQ ID NO: 653312 - DNA, 517 bp, Homo sapiens
catatgtttaccatagaatagttttgccatttatgttagcatgttgcttataagccttgttttaaaaacacataagatctgtaggcatttttaggatttggcttttgggggaaaaayagaattccacaagataattttctcaagctatttgtaacaaagtaactttttagcaatatattcttttttaaatgagagactatgatcaaacttgcttattctacaaaagaactaacgtcaaatctttggtcattagttgaacagcttccataaaagaagatacttttatcagcaacactattcatttatctgtcctattatttcactgtggaaggatgtattctttttaaaagtctttttataccgtatgactctcttctcaggtaccctcctaggtttcctaatcttggtggtatctcaaggaacttccaggtgcactaaccttgtggttgtctcttgcacacattagaataagtatttagaccaggaggacataaagaaatgctgtcatggtgcacat

SEQ ID NO: 653313 - DNA, 517 bp, Homo sapiens
catatgtttaccatagaatagttttgccatttatgttagcatgttgcttataagccttgttttaaaaacacataagatctgtaggcatttttaggatttggcttttgggggaaaaatagaattccacaagataattttctcaagctatttgtaacaaagtaactttttagcaatatattcttttttaaatgagagactatgatcaaacttgcttattctacaaaagaactaacgtcaaatctttggtcattagttgaacwgcttccataaaagaagatacttttatcagcaacactattcatttatctgtcctattatttcactgtggaaggatgtattctttttaaaagtctttttataccgtatgactctcttctcaggtaccctcctaggtttcctaatcttggtggtatctcaaggaacttccaggtgcactaaccttgtggttgtctcttgcacacattagaataagtatttagaccaggaggacataaagaaatgctgtcatggtgcacat

SEQ ID NO: 653314 - DNA, 603 bp, Homo sapiens
ccaaaccacactttgaaaacagttggtttagaccaactttattatattttattattcttatcccctatatatctaatttttgygaattttatctgtcacaggctaaaaaaaccccatgaaaatgtcctaccttttgttgatttttgttcttttgaggtgttttgctttatgtaattgtgattgtgtataatgtggtacatacatatccaagacaattttatcgtttatattttttttttagtggcttaaaacagtaataactggtttctttttctcacaaatctgcaatttgagcagagctcaggaggtaggaggagggcttgtctctgctccacacagcatcagctggggcagctcacctgagagttggaggatccattcccagtgtgcacactcacctggctggcaggctcatgctggctatcagctggtagtgcagatggggccaagtgtcagggcctcagttcctctccacatgggcctcttcatgtgggcttctccatgtagcccaggcttcctcacagcaatgtggctgatttcccagggggaatatcagaagaaagaaaatgttagtccattctgaattatgctattgctttgaat

SEQ ID NO: 653315 - DNA, 480 bp, Homo sapiens
gaatataagtttggatagaagcaagtgtattaacataggagtacttttctatgattcaaggcttaatatcatacaaagcctttgtaactggtcataatacgctgctgggataggcttgacatggcaatgtcctagaataaaatatatggggatgctgaaactgtgttactgtattttgaggaaatggtcaaaaggcttatggaagtggaagtgttacaatatatttatgagagyctaagaacccccccacatgattctgttctccagaaggatccagaggacattaaagaatgcattatttattttcagatatgggaacagcagcataaaactataatccctacaagtgaattgcgccctacaactgatccagcttattgctagaagcagtttccaggttacagcacagggaagagtacccaaatagagcccaggagtctccttgaattgaacaaatagaaactaaactttagggaaatt

SEQ ID NO: 653316 - DNA, 496 bp, Homo sapiens
catttaaaaaatatattttttttcattttcactaacttgactatttttgtttatttcttcaagttcccttttatactattagctaaatctattatcttattggcatgtggtaattaagacttcatttctttgataattttgaattttttcttaagattctttcaggttgaatcagatctctttttataatatagcttttaatatctgtgtctgttctgagctttttattttctgatatgaaatgctttaactcatattttaaaatacttgttaagataattaatttaaattggagtgctatgttacagatttctattgcctcatgtttttatgtagggacatttttrttagtcaaaatgttatgattctcattatcttttttctttttggtaactactgtagtttggatatgatttgtttgtccccaacaaatctcatgttgaaattggatccccattgtggtggtgttgggaagtggggcctatggtaggtgttt

SEQ ID NO: 653317 - DNA, 626 bp, Homo sapiens
aactatggcaataaaggagatgacagatgttgcaacctcatatcccttatacaaaaaaaaaaaaaaaaaatcattaataagaaataggtggcctggttgaagcagagaggaagaaagggtatcaatgtgccaaatgtaatttctttcaattatttgccccctcaatgtatttaaactattaaagtacaaycattaaggtacagttgtagagagtaatcatgaagcttcatttcattttgaggttgggaatagataacttaaaaacaaattttatagggggatacagaagctctgctttcctttctctttatatattttagtagaatgattcagtagatttaagtaggatagacctaaataacttgacattcttatgatagaggagaatgtctcctctatagatgaggagaaaattacagttctggtcaattctccagtttctattgagcaatcactttttttccctctcctctcatatagtttcttcttttttgcttttacatctctgtcttctctttctcaaactccttcttcgttctattttctcctttcttttctgaaccacattgttttgaaatgtaaaagcaaagaaaaatcattaatcactctgcaggatgcagtgctta

SEQ ID NO: 653318 - DNA, 534 bp, Homo sapiens
ctaagagaagagcaatatgctcagatataccagacaagagtgggcaaagatgttttgttgtggtaaatacagagataactatgtattcttgacttaatgaagcatatcaacttgcctgcaaagaagtgtccttgcaagtaaattttagacttttctcagaaaacgttctgaatctcttagtgttattccaaatcctggtgatattatgataacctgagactatttgtagacaacactgagttctagtctcctccacagtttctatgtcctttatgcttaggaatttctaaacctttattaattgtatgtatgcatatgtggtttattcatttgccatccatttatccaacaaacacttattgaaagaaatcactaatctttagcactagcggagataaccaggttgagtaagacatgtaactaaaaaacctgctagataaaatgaagtatcagacaayttaggatagatttaaatacaagttataagaccaatacaagcaaattgttagaagaatgtaaacaaaacaaagatta

SEQ ID NO: 653319 - DNA, 510 bp, Homo sapiens
agtaataaccgatttaactaagaaacagtaccttttgtatgtagccactagcttcatgctttgctacatcctttctttgcagaatctgatatttagagtttctgtaatgaatttaaggtcacagaactattgaaaaagttatcagttgcacaaataaaattactgtatttttaacattaaaagtcagcaaaagaaattatatcgtggttgttgttttcctgatattattttaataacaattactacaatttacctgaatcaataactacagtagtatttattaccaaaacgaagattaagaactaggattgtttagtcagccacaatttattacccctagaaaaatacgtatatacttataatttgtgaattttattaaaagatttcacaaaatacccaatgatatcctagctctcaaaggccttgattaggtaaggcccaatgttagtccatttgtgctaatggccaagagggcgtgttargttttacagacaactctaaaaaaaaaaa

SEQ ID NO: 653320 - DNA, 515 bp, Homo sapiens
gtctttggattccccctctacatatatatgaacatatatttgagtatcaaggagctatactaggagaaaagtacctaggtagtaccttaataatctaagaaatgtttaatattttaacaccatttagtgtagacatcattgaaacaagcagaaaacgtaaaaaggtggagttttggcccatgtctgtcccacagtgggctcagtgtcaacaaacctatttcatcattatagtttcttatcaagtgtattttattgtactgcaaaacgaattgtatttcccaaatttccttgaggctaaggtttcgtacgttaattaaataaatttgtgctsactcgaagtacctacgtaagatttgaaggaaaggagaataaatgccaaccatcagctacaaccattgtagtaaccattaaaaccaagcaacaaaataaaataagctgaggcaagagctttgaaataatttattatgaagtataaaactaaaatttccaaaatttttaagtcacacagacaaaaa

SEQ ID NO: 653321 - DNA, 639 bp, Homo sapiens
aagtcacatgtcacgtgtccttgctctgtcccctgttaacagcaaagatcctgtcaaatgcattcagtaagggattagtaaactagagctgacacacatagttctggacccagagggtctttgatagaaccctgtagttcattcatctacctttaggaagagctgtggggatatgacctgcgttgttttcttaaaataaggaaatagggacatgtgggaggagggagaggagcagaaaagataacgattgggtactgggcttaatacccaggtgatgaaataatccgtatgacaaacccccatgatgtgtttatctatgtaataaaytttcacgtgtacccccaaacctaaaataaaagttaaaaagtatacaaataagggaagtatcttcaggatgtgtctgtggcttttaatccatgtgctttctgttttgtaagaactaattgtgctgaagtccagctctgtgacactgaaggtcaccagttcccttgctggcttcgactgaatgattcccctgtgaagtcccttgtttactgtatttgtaattagccaccaagaacttgagtaaccggtttccgaggagaacatatatcctgaatcagttcctggacatttgtttgaggtcttgtaagggaaact

SEQ ID NO: 653322 - DNA, 609 bp, Homo sapiens
aagctatcctaagcaggaagaacaaaactggaggaatcacattacctgacttgaaattatactacagagctatattaacaataataacatggtgctggcataaaaacagacacatagaccagtagaacagaataaagagcccataaatatactcrtaaactcacacatctacagtgaacttatttttgacaaagattctaagaacatacattggggaaaggacagtctctacaataaatggtgctgggaaaacggggtattcatacgcagaagaatgaaactagacacctctcaccttacacaaaaatcaaataaaaatggattaaatacttaaatctaagacatcaaactatgaaactactacaagaaaacattgtggaaactctccaggacattggaatgggcaaagacttcttgagcaataccgacaggaacagacaaaacaacaacaactacaacaaaaaacaaaccagaaatggacaaataggatcacatcaagttcaaaagcttctgtacagcaaaagaaacaatcaacaaaatgaagaaacaacccccagagtgggaaaaatatttgcaactacctataagacaagggattaataaccagaa

SEQ ID NO: 653323 - DNA, 609 bp, Homo sapiens
aagctatcctaagcaggaagaacaaaactggaggaatcacattacctgacttgaaattatactacagagctatattaacaataataacatggtgctggcataaaaacagacacatagaccagtagaacagaataaagagcccataaatatactcgtaaactcacacatctacagtgaacttatttttgacaaagattctaagaacatacattggggaaaggacagtctctacaataaatggtgctgggaaaacggggtattcataygcagaagaatgaaactagacacctctcaccttacacaaaaatcaaataaaaatggattaaatacttaaatctaagacatcaaactatgaaactactacaagaaaacattgtggaaactctccaggacattggaatgggcaaagacttcttgagcaataccgacaggaacagacaaaacaacaacaactacaacaaaaaacaaaccagaaatggacaaataggatcacatcaagttcaaaagcttctgtacagcaaaagaaacaatcaacaaaatgaagaaacaacccccagagtgggaaaaatatttgcaactacctataagacaagggattaataaccagaa

SEQ ID NO: 653324 - DNA, 609 bp, Homo sapiens
aagctatcctaagcaggaagaacaaaactggaggaatcacattacctgacttgaaattatactacagagctatattaacaataataacatggtgctggcataaaaacagacacatagaccagtagaacagaataaagagcccataaatatactcgtaaactcacacatctacagtgaacttatttttgacaaagattctaagaacatacattggggaaaggacagtctctacaataaatggtgctgggaaaacggggtattcatacgcagaagaatgaaactagacaccyctcaccttacacaaaaatcaaataaaaatggattaaatacttaaatctaagacatcaaactatgaaactactacaagaaaacattgtggaaactctccaggacattggaatgggcaaagacttcttgagcaataccgacaggaacagacaaaacaacaacaactacaacaaaaaacaaaccagaaatggacaaataggatcacatcaagttcaaaagcttctgtacagcaaaagaaacaatcaacaaaatgaagaaacaacccccagagtgggaaaaatatttgcaactacctataagacaagggattaataaccagaa

SEQ ID NO: 653325 - DNA, 415 bp, Homo sapiens
acttacctaagtcagggacttcaggtaagctgactagggaaagtgtgggataagaaatcctcttataaatagattgtaatacttcaacatctcatttactgtttctatcctctctttcttttctttcttcccacaaaaaattcttttaaaaaatggtaatttctcagatttttaatctcctcagatcaaccacartcctgcattctgtggtttaattggccatgggagagaccactagctgtccgaaacaaatttgcgctcctctttacacagtgggcagctgcccagtgagactacacttcccagaagcctttgcatcaaggcagggtcacatgactagttttcaccaacagaatgtgagtggaataatatactcctcttctgggctagggttttaagaaatgtttgtgtgttc

SEQ ID NO: 653326 - DNA, 570 bp, Homo sapiens
caacccaaatgcccaacaatgatacactgcataaagaaaatgtggcacatataaatcatggaatactgtgcagcygtaaaaaagaatgagttcatgtccttttcagggacatgaatgaagctggaaaccatcattctcagcaaactaacacaggaacagaaaaccaaacaccgcatattctcacttataagtgggagtagaacaatcagaacacatggacacaggaggggaacatcacacaccagggcctgtcacggggtgggggggcaaggggagggagagcattaggacaaatacctaattcatgcagagttgataggtgcagcaaacaaccgtggcacatgtgtacctgtgtaataaacctgcacgttctgtacatgtatcccagaacttaaagaaaaaatttaaaaaatattgacagtgttttacaattgccatagaccaggcaggaattttgatgtagttgtcattgcctgtcattgcatacacaaactagatcatagctactcatactgttgttactgcagtggactcgtgtaccttgtcagtttagttgctattttaaatatc

SEQ ID NO: 653327 - DNA, 458 bp, Homo sapiens
tatttgttcattcagtacagggcttcactgcgctaagcatcctctgtaatcctttgcaggtttatagtttgctcayatactctgagtgaattaacaggcactgataatagcaatagagtctatttaagctttgttatgttgatcagttcaaaatcagttgacagctaattagcatctctaccttacttccaaactcttttgtctaggcacattgtcccattagggagtggctttctaacaaattatcaagatgcccgtgggtttgactttctacatcagcctataactatcataaggaaatagatatacacaagatgttttcatacattatttacataatttttatcattaccctgtaggaaaagaactatcccctctgttttattaatgggaaattctaggtttaaggaggttaagtgacttagttgaaggtcactcagtaaatgaagaaacaggat

SEQ ID NO: 653328 - DNA, 468 bp, Homo sapiens
ttttaaaagcttccctgggggcttatttgttcattcagtacagggcttcactgcgctaagcatcctctgtaatcctttgcaggtttatagtttgctcatatactctgagtgaattaacaggcactgataatagcaatagagtctatttaagctttgttatgttgatcagttcaaaatcagttgacagctaattagcatctctaccttacttccaaactcttttgtctaggcacattgtcccattagggagtggctttctaacaaattatcaagatgcccgtgggtttgactttctacatcagcctataactatcataaggaratagatatacacaagatgttttcatacattatttacataatttttatcattaccctgtaggaaaagaactatcccctctgttttattaatgggaaattctaggtttaaggaggttaagtgacttagttgaaggtcactcagtaaat

SEQ ID NO: 653329 - DNA, 651 bp, Homo sapiens
tttttaccttgcaaattttcaatgtccgtcttaaaactgtaacccagatgccagagttacttctgaaagatcgagtctgcctcttttggaagtggctgaaactagaaacctcttctatccttctccagttcactccatgaagaaaaagtaagtaaaaaacaaaattctaaaacacaagtctgctctaaataggtgcttctctatctactaaatgcctgcattacatacatatctctgcctttatgtctatgtaaattttctttcatttctgctttctgccttcttccctatttccctccctttctcctcatctttcctatctcttttatctactaataatgrttttcattctttcctccgctcataaagaatctacccttttttcacatgtaattagttccagacacacctcctcagtttttccctttcttatgaattcattaattgctgagaaatattggctttactaaactttaccatatattaatttttcattataaaagggtcttactataagatgttaaaaaaataagaaattttacctagacatatagctaaccagggaagtaaaagatctctacaaagagaattacaaaacactgctaaaataaatcagagatgacacaaacaaatggaaaaatattctaagtt

SEQ ID NO: 653330 - DNA, 553 bp, Homo sapiens
atatacatttttgaacgctaaaataagttttatgaacattactcatttttttccttttcttgtactttgtcttttccaaccagaaaatcatttcaatgggaaaatatgttgrcatgtttgttttattagctaatacattttctcatgtgatatcagttcacggcaaaagttaaggaataaaaaaagaaaagatctttcttctttccacctactgaattctgcctgaacctctcccactcccatacacacaccaacacgcccactgttccacagcaatatactgcttggcattctggcagggaacagaaagacaaagcatcatgggaagaaacggttagaaaaaaataactgaaagatgtggaaatttttatgctcagaggctcttggcagtcaatgagaaataggagattggaatggaaactataaaggggtaactctaatttctttccattcctctttgtgtcttgcagtattctcttctagcagtggaaggaggagacacgatcaaatcatttatagctttaggatcttccagttgtgcttccctttacct

SEQ ID NO: 653331 - DNA, 318 bp, Homo sapiens
gtctccagagcacactcctttgagcctctgcttctttgatgatgttatcaagacttcgtctgggtctgggctttgtctgttactgcctttgggatgagtcagcctaatatagaaagcttatttttctctttttaaaattttattmttctttctttccttaatttcctgcctcacagtgagctatgatcacaccactgcactccagcctgggtgacacagcaaggccctgtccaaaaaataaaaaaaaaaaaatctgtgaagtgagaaagatgaaggcccatgggaggaagggggtggggaggccagaacctgaggacc

SEQ ID NO: 653332 - DNA, 566 bp, Homo sapiens
ggtggggggaacttctagagggtacaggggcagcagggccaggcggccccgtgggcagggacataagactaaattgctacaagtcaaaatgcgaccagtcaaccctggacaagtccttgctcaaaatgctgagtgtttgtgagagagaggagggggaatgaggtcctatggggaggggaggagggggggaccttctagagggcacagggcgggatggccgggcggcctcatgtgcagggacctggcatatagaaggctgccatgagttgcaggactgactagggattaaccctagacagggcccggatggaacaagtgacgagcatctctgaggtcagaggtggggagggctgcaggcctggggtccactaggtcctggggcacaggggaggatggaggcccggggtccctgaggcctctcctgcagatgccgtggagtggccggccctgtagaccaaaaggtgttgtggatggtcatggagcagagaggggtgatgakatccctgggtgcaagcaggtcaggacaggggaggcggagccaggtctgtgcccacaatgggggttcc

SEQ ID NO: 653333 - DNA, 627 bp, Homo sapiens
tgggaagggaggggtcagacacgcctcgttataagccctcctgcctttggagttcaggcacagctgaccagcattacattaaaacggagaccttaagatggacaaacagactctttgcagcaataagataccaaaattccaacctgactctaatatagtgtcacatgacagatagcagaccctgaaggaaatcaaagtatttaccccaaaatatrtttttgacatggtcctgcacagctgcctcttgtgggggaaatttgcctttttagagaaactctttcccttactgggtcttttccagagagcctgataatctttgaaaggtctcaacaggaagtatttgccatctattgcctctaagggcagccacctatgagactcatctacataataaaaaccttggtcttcacaaccccataccttatctgaacccagacattcctttctactgattccaggtctttaggcaataacttaactctttcaaccaattgccaatcagagcctttgaagccacctgtgatccataagtcccctgcttcaaattgtcctggctctccgacccaaccactgtatacctcatatgtattgaccgatgtcttctatctccctgaaactgaaacgtgt

SEQ ID NO: 653334 - DNA, 625 bp, Homo sapiens
taactgagcacaaatgatgtgctgactgaagtttggtaaaaagcatgtagttgagattcaaaagtaaatgctgtctcctctctgagttgcttgtgattgttaatagactgaaaactgaccaaattggcaagaaagcaaatagttttacttatatggctatacaattatcctcaattactaaattcagttggtgagcaccataattactttgtaatataaagggcaacctggggagaagagatttttttttttkttgtttggaggtaagtggccataaataactaaatcagaaaggatacagcacggatatacagtttttgttgttgttgttgtttttaagtatcagaaaaataaatacaacctttcaggatgctttgcaaatgtagggattttgtcactaatagaagtctttgaaatacatatctggaatgacagcaatagtcagtcagtgtgtgcttcaggatgaatttatgacctgaatttggtttcccatgctttctttaacactgtgctactatggcaaagttatcatttcttttttttaacacctaaccatttttctggtggatggcttcctatgtccccctccccccagctctttccccacagcccataaaaggttttc

SEQ ID NO: 653335 - DNA, 683 bp, Homo sapiens
tgcaagccaagcaatgcccaggattgacggccaccaccagaagcttggaagaggcaacgacagattctacttagtgtctcagggagagcatggccctgctgacacatcttgatttcagacaacctgatttgttttcagaactgtgagaataaatttctgttgttttaagttacccagtttgtggtattttacagtcatcctaggaarctaatacaaatatgtttttattgtaccagattcaatcagtaagccccagtatggcatacagagtgatacatgaatatttcgttttatctgtcccttcccatcttattggtaactgctaatgacagtttatctcctttctatgcatgtatatttatgttagtttttatataatgaacctatattatattcattttctgctattcttttttttctttaaagcttactggtatattctggagatctctaagtatttggcttaaaaatttttttttcaattgcggtaaaatacagtttatcaacttggccatttttaagtgtacagttcagtggtatgaagtgcattcacattgttatgcagccattaccaccatccatctttagaactcttttaatcttgcaaaaatgaaactgtgtgtgtatattaaacaatcacgccccattacttccttcccctggcacccactgttctattttct

SEQ ID NO: 653336 - DNA, 683 bp, Homo sapiens
tgcaagccaagcaatgcccaggattgacggccaccaccagaagcttggaagaggcaacgacagattctacttagtgtctcagggagagcatggccctgctgacacatcttgatttcagacaacctgatttgttttcagaactgtgagaataaatttctgttgttttaagttacccagtttgtggtattttacagtcatcctaggaagctaatacaaatatgtttttattgtaccagattcaatcagtaagccccagtatggcatacagagtgatacatgaatatttcgttttatctgtcccttcccatcttattggtaactgctaatgacagtttatctcctttctatgcatgtatatttatgttagtttttatataatgaacctatattatattcattttctgctattcttttttttctttaaagcttactggtatattctggagatctctaagtatttggcttaaaaatttttttttcaattgyggtaaaatacagtttatcaacttggccatttttaagtgtacagttcagtggtatgaagtgcattcacattgttatgcagccattaccaccatccatctttagaactcttttaatcttgcaaaaatgaaactgtgtgtgtatattaaacaatcacgccccattacttccttcccctggcacccactgttctattttct

SEQ ID NO: 653337 - DNA, 526 bp, Homo sapiens
tgaattcgtgaaatttttattaagaaagcctcatacaccaataaacaacgtgtgcacagactccatagcctctctgctaacacattgctcttgtatatcaggaaggtctccagcatcaaagtgagtcagttattgcacagagtcccaaccttgccagctttttgccaaatggtcaccatcctgtacatccttccttcctggaagtgatagaaatctctatggctatttttgctacaaggagattatggcacagcatatggagtccttactctccaggggcaaaagaaaagtcttgtctttgcttaagcaagtcacacagtagatgccacaggcttagggcaactgtgtgtctgcatgattcatgggggactgcacgggggagccgcagcacacggagcagctggtcttagcagcatactaacctgatgtttcccataaacgttgygcatggaatttcccccatttgtcatgctgagttggctctgtcaatcctatacaaatccctgcgtgcattaatatttccttg

SEQ ID NO: 653338 - DNA, 400 bp, Homo sapiens
gatttgctgtgaaatatgttctgggaaatataaggcattgctgaccccaggaacaaatgtttttctgccagtaagtaagaattctaatcctgtttgaaaccaattccaggtttggagagtcaaggagatcattgagtcaaagtctcattatgtctaacagaacaaaatcatatttttagccttctacttcatcacatctgtgttttctatcttctgacattcttacttcacctctagtctctcttgttggctcagtatttcttcttaaagaaatattcttcccactcactacattaatttgtaagcagccactggrcaggactaagctatccatgcaattatccactggtaactgcagaacttctacccaaatgaagcatggtaggaatggaatgatgac

SEQ ID NO: 653339 - DNA, 400 bp, Homo sapiens
gaaaatttcaaattctaaattgtggaaaagagtgtatttgttatatccatcatgattctataaacatctctcttaaagatttaaggatgagttttttaaagtcatgaaagtagagaaaggaattatcagggacaatctcaatgtaaatctggaaaaaccagtaagatacaggacctccctgaagtttccctggggtttccttcggtctactgtttgctgcgactgcttccagagcatgctctcctgaatgtctgaaaagagatatgacagggagggggaaccttgagaaagagaaaaaaggcaggcactcaacgaaatcaagataatggaaggtttatgtctcttcccctaggaatgacagaatygggtatgtgagacttcctcagaactgtctaatctg

SEQ ID NO: 653340 - DNA, 603 bp, Homo sapiens
gaagtgctagataaatgttagctattattattattacctgatttaccttaaatattagctcttgctcctgctaattagagactataaaggcagaaaaraactacaataatgttggaagatgcttgctttcatgttttcagagatgaacatccaatatgttctacttaaaatataagatattaggaatccaaggtttccatttcaaaagccaattagaagtggtaagagattttaatttgggaggtaacacaaggctcattctaggattaccctaatgaacatctcgttacttttgctttgaatgtgctgttgcagaaagagcttggagaaagtgctggacaagctgtgaagataaagtgtaagtataaaaattttccatacataacacacacacacacacacaatctgaagaattgaattttctgtctgctcggaacagttacctctttgtgctacccctaaatttgctgaaatgtttcccttaatggtggtgcatttgaaaaggagatttaaaaacatgtaatttttgtcttcatgaacatgacagagccagtcatgtactggaggccacagggagagtccaggggcctttgtggctgggat

SEQ ID NO: 653341 - DNA, 603 bp, Homo sapiens
gaagtgctagataaatgttagctattattattattacctgatttaccttaaatattagctcttgctcctgctaattagagactataaaggcagaaaagaactacaataatgttggaagatgcttgctttcatgttttcagagatgaacatccaatatgttctacttaaaatataagatattaggaatccaaggtttccatttcaaaagccaattagaagtggtaagagattttaatttgggaggtaacacaaggctcattctaggattaccctaatgaacatctcgttacttttgctttgaatgtgctgttgcagaaagagcttggagaaagtgctggacaagctgtgaagataaagtgtaagtataaaaattttccatacataacacacacacacacacacaatctgaagaattgaattttctrtctgctcggaacagttacctctttgtgctacccctaaatttgctgaaatgtttcccttaatggtggtgcatttgaaaaggagatttaaaaacatgtaatttttgtcttcatgaacatgacagagccagtcatgtactggaggccacagggagagtccaggggcctttgtggctgggat

SEQ ID NO: 653342 - DNA, 603 bp, Homo sapiens
gaagtgctagataaatgttagctattattattattacctgatttaccttaaatattagctcttgctcctgctaattagagactataaaggcagaaaagaactacaataatgttggaagatgcttgctttcatgttttcagagatgaacatccaatatgttctacttaaaatataagatattaggaatccaaggtttccatttcaaaagccaattagaagtggtaagagattttaatttgggaggtaacacaaggctcattctaggattaccctaatgaacatctcgttacttttgctttgaatgtgctgttgcagaaagagcttggagaaagtgctggacaagctgtgaagataaagtgtaagtataaaaattttccatacataacacacacacacacacacaatctgaagaattgaattttctgtctgctcrgaacagttacctctttgtgctacccctaaatttgctgaaatgtttcccttaatggtggtgcatttgaaaaggagatttaaaaacatgtaatttttgtcttcatgaacatgacagagccagtcatgtactggaggccacagggagagtccaggggcctttgtggctgggat

SEQ ID NO: 653343 - DNA, 453 bp, Homo sapiens
tttattctaaagaatagctaatgggtagtgaacattctaagcactgttctaggtgctgaggaggcattatttctttaattctcacaagaatcttgcaagttagggagatcattgcctcctctgttcaggttaagaaatgatgatcagagaatttaggcaatttgcccaaaggcatattgctggtacgtagagaatccaagaattaaataaatccaggtgtctaactgcaaagcccgtgctgtagaacgcctggagggtgacaggggtaagctgtttgcacaggagagagaagtggagagggaacctggtaaaaagaagtctttttctaagaaagaagggctcaaaaacctaaaaactgagaccagggaattttcagaccatgtgacagggacaatctgtcactgcttagcaccgttgctcccgtgtcctctmaaacactgatcagacagaata

SEQ ID NO: 653344 - DNA, 634 bp, Homo sapiens
aattctcctgcctcagcctcgcgagtagctgggactacaggcgtgtgccacgaggcccataaatttttgtatttttagtggagacagggtttcaccatgttggcmaggatggtctcaatctcttgacctcatgatcctcctgcctcggcctcccaaagtgctgggattacaggtgcgagccactgcccctggcctctttttgatccaggtggagacttacagcaaaatctcccttttcttgaagtatcacgagtgactctctgtttattgtgattcaaaagacgtcacaccacaacatcatcttatctagagttcatgtaaaaaggctaaggactgccaacttacattaggcaatggaacttgataatttgatattcaggttactgacattgatccttttgataatgaaatttgagcagatttggagttagcagtgttgtaaagcattatgtgcatgttggcctgctttcgtggagccagaagtttgtatctctccctcaaccatgctgatgtaggcactctcggcagctggctatggactcagctacagaggacacactcaccagcagacaacagacaaacctgtgttgctcagaggtgactggaccattccagtctagggtctcttaagaac

SEQ ID NO: 653345 - DNA, 576 bp, Homo sapiens
taaaaaaaaaaaaaaagctagcttgtagcatctattggtctagacgtagaagaggacacatttaataaaatgttcatttcatagaggaaataaattgggttcttttctctcataaatgaatatttctttaaatggtaagtgttggagcttagttaagatttctgacttttctgttgtgtatttgtagcttgcttttggtcaacagcagatctttctggcatattgacgttagccaatcagaacacaagaactgaacacaagagggaagacctctttgtgtaattgaccagtgactgagcaaagaaaaaggttaataggaacttacatttaccaggcgggtggatgttttgtaaatcaacagttttgattttgtgggccttaaagtgtttaattctcccattgctatgattcagctgcaaccttggctttaatgcttttgaaataaatgaaaaatgtcattttatcttattatttatcttaagggaatagttacaacttctgcctcctagctggtgcackttcctaccttaattgttgactgtgggggtcagttccatctgggcagagctgtgtgtc

SEQ ID NO: 653346 - DNA, 581 bp, Homo sapiens
caatcaagtcagccaagcccaccctggctcttagtgggttggcagatggcacagccagattgtcccaccagcctggagcaactcactaaaacaattacattcaagagaggataaatccatgctacaatcagattcttaatattaactggggatgatggggtcatgtcctaattggtttaagttgtgagcaaataactctgataagagatgcacagagaaagtcacacgctggcttctttaggaacacaagccatcaacgctctgagaaaatcaagttaacwcccctcaccactctgccatccccccagccctaccatttgataccatttgagaagtgtttttacctttactcatgtctgtttccttgaaatcagagaaagcaactgtggggaccttgggtacatagagtctagaaaaacagacatagttttgatgggctcatgctgtgtttcaagaaaattgaaagtgtgaatgagttgccaacagttaaaaattgagaggtttggtgtaatcaggatttgaggcttttagaaaaattacatctagcaagagtgaactgtcattgtcacatggcaacaatc

SEQ ID NO: 653347 - DNA, 259 bp, Homo sapiens
ccctacaaaaatacttgctatttgttgacttttttgcctccactctgctcctatgttgagtgcagcttgttgtatttgaagcaagactgctggagtgataaccgtgaaagccaacttcagtttatttttttctctcttttttaaaaaaaatcattatgaggaaccagtaatcttgtcartaaactatttttttttttttttgctggagagagttgaatatagcaggaaaatataaaccatcttttttgtgtttttcttt

SEQ ID NO: 653348 - DNA, 623 bp, Homo sapiens
tgtctctttaaaatacctttttttggaggagaggtggagcaagatatgtgtaactatagttttttctttttttgcttagatggtttaaagaattctgcatgtcatagttgacattccatcattatcctgtgttccacagtcaaggccaaaggttaaaaataagttcttaaaggaaacaaaattaaagcaagagggaattacctctgaattgttttagggactcctagcattttgcatgagtttctgttggtctggagaatagaaggaagcatgaaaggtttcattccttgcaaatcaagtgaaactggctcctaccctcttcttcaatacaaacatgaaacagaaaaagtagactggaagaccagaaagggcacagatttttataccattttcatcaggattactatgttcatgttatggaaccaatttgtaagttttgggtaacagcttaaatagaaacctatagaactgaggcaaccttytgtttctcaaagacagatggtgaagcaacatttataaatgctttacagttagagagcatatgctctcgtccactgttttttgtctttgtgatcaaagaaggatttgaggaatttcttttaaaaatcagtctgtacaataac

SEQ ID NO: 653349 - DNA, 471 bp, Homo sapiens
ttctgacctgataatgtttcccagagggacatcgcagatgcccttttgaaaggtaaatgttcctgacccacagaaatgtttccatctttggaaagtttgggagggaactgtttccatgcttgtgaacagatgacctgcaaaagaacttttgactccacaaaggcagaaagtaggaacactatatttgaaccatcaaataccttaagttttgtatagatcataaaataatcatagatgttgaagcaggatgatcatctaattcagaacaacaacaaaaagcctgatagctcttaggcctgcagacagcctgtaggtctattcatttggcacagatgtttttaacattgaaactgaaggcatttrgtgctgtggtgctccagtttgccacagacccctccactccctgttatgaaaccaactctcttgactcattacttgcttggacctgggacattttaaattttgtgacac

SEQ ID NO: 653350 - DNA, 634 bp, Homo sapiens
gggtgctctaaaggttagtgatgtctaaatgattgaccaatcaattaaaacaccgtgcccagttagcaatcatctccactgagagatgcctgctttaccaggctaaaaaaatgatctttatcatggcatagagactataaaagctgtgtccttttattttcattaacctaattagaagtcaagctaattgtaggacttcatagaactggcatcgggaatagyatgcaactgttaaaaaaatcatggtcttgatgactaattatatcaggaaataatatgcaatataaatgaaaagagaagtgtatgttttttactttttcctttctgtttttaaaacatgctataaaatgttaagtataattaggacacaaaggaaaaattaaatctagttaacattaccttgaaaacttcttatttgccctgaaatctccagttctttggaagctaaaagcttgagacttctatatctggttgtcaggattagggtgattttatttgaattttctttattttcttctcaattttctatctatttactttgtaattacatttgaactatggatatgtaattagttttataaatagaaaaatcaaagctttataaaggaaaatatagcatcagcagacctgattg

SEQ ID NO: 653351 - DNA, 526 bp, Homo sapiens
ctctctctctctccctgcagttcttcccctctggaaaactgtggcaatctctctctgattcccacctcctaggacctctcttactcctcagtatttcttatcagcagactttgagtccccagatgtctttcatttgagcctggagttttgggctcttactgtcacctcacctctattggaattcagttctgtatttatattcattctactcattctagtgaggaaaatctttttagataaagatgaaagtaaaatttaacagctctcttttccctttgtcatctgctggcattattccttctgctgcaagaagtaggtctcttctctcttgatttgcrtactgcagagactactacaaattgtcatttgttgtttgtatagtccttgtttattcagtacatgccagccatgggaatgctcagtatattagtaactttcacatcagactttggctgtgagccctcacctgggactgatactggctctttgagctttttagtcatgtgcttgtctcttctcttactta

SEQ ID NO: 653352 - DNA, 502 bp, Homo sapiens
ataaaaaacttggtaggagcaatataaaattcagtaacaaagatttactgtttgacacagagatttttaaaagcttctctgataagggacatttgagcagatgaacaaagacctaaggatgggaggaggcagctccatgtgaatatctgggagaagagtgttctaggccaagtccttggagggagagtgcgcagtgggatcaaggagcagcagagggaccagtgggctggagcagatgaattcgggcgtcatgggcgtcgagggcccaagcctttttgttttctttctgcaatacagaatgctaaccacatgtgttgagcatttgtcctgtaaggataaactcctctgtttaattgtatcttctgtatgacagttgcacaaggtaagtggcattatccttattttgcagacaaaggtcagtgacattatcctatatttraggctctgggaagtgaaaggacttgttcaaggtcacacagtatgtggtggaatctacaattcc

SEQ ID NO: 653353 - DNA, 406 bp, Homo sapiens
tggaatggagttcaaagttatatacccttcttctttcaaagcatgaatatccaacatctgccgagcagtcatttttttcygtacttaaacacctataagcaaagaggaacttatacttcctccactttcagggatgtacggcttttggaaatttcgcctttctgttgactcaaacattgtttcccagtagcttcagttcactggttctggaccacctataaggggtagacttaaaaaaaaaaatacagctctcttacaagaaagctgtggagatatgtgaaggcagtctgggtctcccaatctagtttacctgttaacaaaggaaatactattagcctgatagtcgctcgttctggctgtttcttcaggattactgatttctcagtaatccataaaccatccatgt

SEQ ID NO: 653354 - DNA, 406 bp, Homo sapiens
tggaatggagttcaaagttatatacccttcttctttcaaagcatgaatatccaacatctgccgagcagtcatttttttccgtacttaaacacctataagcaaagaggaacttatacttcctccactttcagggatgtacggcttttggaaatttcgcctttctgttgactcaaacattgtttcccagtagcttcagttcactggttctggaccacctataaggggtagacttaaaaaaaaaaatacagctctcttacaagaaagctgtggagatatgtgaaggcagtctgggtctcccaatctagtttacctgttaacaaaggaaatactattagcctgatagtcgctcgttctrgctgtttcttcaggattactgatttctcagtaatccataaaccatccatgt

SEQ ID NO: 653355 - DNA, 430 bp, Homo sapiens
tgtgagttagtcagtgagcagctgcttaaagatttgaaaaatcctagaatatgtcatctctgtaggctttatcctttaattaatkatggatttttatctgcatatatgtgaagctaatgattgacttggttcggacactgaattgtcggcttaaacctgccattccactgggcttcatcactatgttctatgggtgtgaagcctttgttttttcagagacccatttccaccagcgggtttgcactgtaagtgtttccacaggaactctgccctttgccagtgtcactgttgtggctatgcagcagaacccacagggcggaggtgtttcagccctcactgaaaatgcaacagatcttaacatctcttgctgcaaattttccagtgtgttctggtctaccttggtatcttaaaaccaggctcactgactacc

SEQ ID NO: 653356 - DNA, 574 bp, Homo sapiens
ggcgagtcctgcgcgagtccccgggaggcgccgcgcgcttggaagggacggtcgggcttccccggcccgctgagggctcggcggcgggctcccctcctttccacctcgggagggagggaaggaggggagggaaaagtcccacggaggaggcagaatggccagtcgaggggcgcttaggcgctgcctttccccagggctgcctcgactcctgcacctgtcscgagggctggcctgagacgggactcccggttctcccgctgcgaagcagcgcggccccccggggccggggcagcggcgccggcatgtcgtctggcaccatgaagttcaatggctatttgagggtccgcatcggtgaggcagtggggctgcagcccacccgctggtccctgcgccactcgctcttcaagaagggccaccagctgctggacccctatctgacggtgagcgtggaccaggtgcgcgtgggccagaccagcaccaagcagaagaccaacaaacccacgtacaacgaggagttttgcgctaacgtcaccgacggcggccacctcgagttggccgtcttccacgagacgcc

SEQ ID NO: 653357 - DNA, 587 bp, Homo sapiens
aactcccaattctatggcatatctgcacatctgccatctttggtcagcaaccctccaggactgccttcttcacacctgtgcgtgaacttccaagctatactgggcaggttggtgctgcccgtttctcccatgctatttaacgattactccatgcagttactgttcttcttaaggcctctccacccgcctcactcttttaacatatgactgtgtgtctgactttactaagcaacttgaaacttcttagaatgagctcctccatttcctgtcctgatgcctgcaaacttatgtgtagtcacagttatcttcatctggttttctccaggggtatcccatctgctcctgcatcctcctaggccttgctctgttagtcattgtccctccctctctttctaattttcagccacatttatttactgtctgtttctccctccaatgtgttactgtctctttctccttggctgtcaaatgttctctgcgtttyccatttttgtgcttctcgtacctactaatgacttacctatttgtcaactccagtggacacgctatagtccttatctttctggagcttcttcttgtatttaacc

SEQ ID NO: 653358 - DNA, 450 bp, Homo sapiens
acaggaagcagatcagtgggtgcctaaaaatggagagtggaggtaagggaggtggattacaaaggaggcagaaacttttaggggagatgaatatttgtgttattctgattgtggcaatgatttcacagttatatacatatgtcaaagcttattaaatagttcactttaagtatgtgcatgttactatatgacaattatacctgaataaagctgtggggaaaaaaaccaatcagcgcttatccatattttactgaaggtgttaagtaagatgctagtaaatgacagaatttcagctgagccaagtctgactcttgaaaactacatttcctctttagtgcagaaaatatttatgagaatgggagcgtagaaaaaatgaaatcacaataaaacaaattagtttctgatttttggacayggtctcattttctaaattatcactgtcagtttttt

SEQ ID NO: 653359 - DNA, 554 bp, Homo sapiens
cataggagccctgaaattctgtcttctctctccatccctttttcagtatccttcatacttgaagaggaggggttggggtccagtatagaatgggattttaaagtccctttattaatcattatttccagaggcgagactgctccttaaggatagacgtctttgaaagggcttccttcctgttgtctggacccaattgctttaccacatagaaccgtcattactttccctctttttggcrgtcttttttgagctctcattgttggtctaactgaaagcacctgatttctagggctttaactgaaagcacctgatttctagggctgtcagtgcagcacagcagagactgctcttcaaatggtctggcttagtggtttctaacccttttgattaagaagaccactgctaaatttcccagagcctcacctaagtgttgtactttgtgtctcttttgactaatcatatacttaatgacaaaaatttggtaaattagtgaagcctttaattgggcatatttttaatttatgaaagtatatcggcacttgtgcatatgttag

SEQ ID NO: 653360 - DNA, 554 bp, Homo sapiens
cataggagccctgaaattctgtcttctctctccatccctttttcagtatccttcatacttgaagaggaggggttggggtccagtatagaatgggattttaaagtccctttattaatcattatttccagaggcgagactgctccttaaggatagacgtctttgaaagggcttccttcctgttgtctggacccaattgctttaccacatagaaccgtcattactttccctctttttggcggtcttttttgagctctcattgttggtctaactgaaagcacctgatttctagggctttaactgaaagcacctgatttctagggctgtcagtgcagcacagcagagrctgctcttcaaatggtctggcttagtggtttctaacccttttgattaagaagaccactgctaaatttcccagagcctcacctaagtgttgtactttgtgtctcttttgactaatcatatacttaatgacaaaaatttggtaaattagtgaagcctttaattgggcatatttttaatttatgaaagtatatcggcacttgtgcatatgttag

SEQ ID NO: 653361 - DNA, 529 bp, Homo sapiens
tagttcaatcaaaagtaaatctatcttcaaccttcctagaagacttttgtctagcacatcagagacttttgggagaattggactgaatatacttcagaggtcactctgaaggcaaaattgtttgaatatgacttgtaaggcaccattaagtaatctaattaaggcttagatattttaagaataaaagcaggtaactattttctcacaataattacccactcccttctaattgctattgagagagttaaaagttcaccatatatatttgattgagatctatttagaaagtttcatagagcayagggcacggtggttggcacctgtagtcccagctacttgggaggctgaggcaggaggattgcttgaggccaggaggttgagaccagcctgagcaacatattgagaccctgtctctacaaaaaaaaaaaaaaaaattaattagctgggtgtggtggtacgcacatatagtcccagttgctcagaaggctgaggcaggaggattgcttgagcccaggagctctgcgctgta

SEQ ID NO: 653362 - DNA, 586 bp, Homo sapiens
tcagctttatgaaggcaaggactatgaatctttggttcactgctctaaccctagaacmtggaacagtgcctgaaacagagtagatacacaataaatattgattgagttaatccattcattcaccaagtgtttattatgtacttattgtgttccaggccaagagttgttgagtgttgttacccaagattacatgagcgattggccacagagccagaatgagtgcacaggtctctccaatgcctctcctatgttctctccagtaggttctactgtctcctgcttgggaactactatttctggtaatttcctagatgaataaacagattttttcacaacctatttaactgaaaagttgcaacgtgacacccacatggcatatcatattattctacattctttaaatcaaaaagtaagaagacaatagactacatagtgaaaaaaaaatctgcattttcaagtgcatcaaagaaatgtaaaatgatgaaactaaattttcctgtttctttgcattttgacattggaatatggataagtgtcctggtccctttgaaaggtatgagacagcaaagactcggaaacaggaaaa

SEQ ID NO: 653363 - DNA, 586 bp, Homo sapiens
tcagctttatgaaggcaaggactatgaatctttggttcactgctctaaccctagaacctggaacagtgcctgaaacagagtagatacacaataaatattgattgagttaatccattcattcaccaagtgtttattatgtacttattgtgttccaggccaagagttgttgagtgttgttacccaagattacatgagcgattggccacagagccagaatgagtgcacaggtctctccaatgcctctcctatgttctctccagtaggttctactgtctcctgcttgggaactactatttctggtaatttcctagatgaataaacagattttttcacaacctatttaactgaaaagttgcaacgtgacacccacatggcatatcatattmttctacattctttaaatcaaaaagtaagaagacaatagactacatagtgaaaaaaaaatctgcattttcaagtgcatcaaagaaatgtaaaatgatgaaactaaattttcctgtttctttgcattttgacattggaatatggataagtgtcctggtccctttgaaaggtatgagacagcaaagactcggaaacaggaaaa

SEQ ID NO: 653364 - DNA, 586 bp, Homo sapiens
tcagctttatgaaggcaaggactatgaatctttggttcactgctctaaccctagaacctggaacagtgcctgaaacagagtagatacacaataaatattgattgagttaatccattcattcaccaagtgtttattatgtacttattgtgttccaggccaagagttgttgagtgttgttacccaagattacatgagcgattggccacagagccagaatgagtgcacaggtctctccaatgcctctcctatgttctctccagtaggttctactgtctcctgcttgggaactactatttctggtaatttcctagatgaataaacagattttttcacaacctatttaactgaaaagttgcaacgtgacacccacatggcatatcatattattctacattctttaaatcaaaaagyaagaagacaatagactacatagtgaaaaaaaaatctgcattttcaagtgcatcaaagaaatgtaaaatgatgaaactaaattttcctgtttctttgcattttgacattggaatatggataagtgtcctggtccctttgaaaggtatgagacagcaaagactcggaaacaggaaaa

SEQ ID NO: 653365 - DNA, 533 bp, Homo sapiens
atggctttattggagattcatgactaatactttgaaatgtatatggtctttcctcataactcatcttaggtttcaaatgtgttgtgtttctgagggttgctcctggactattcccatattcagtagatgccattgcctccatattgtgattgctgttaagctaaagacaaaacagtcaaggaagggacagaccggcaagcaaaatattcaggaaagtgcatgactggaaatcatggatgagaagcaaagaggtaaaaataacctttaattataagtatatatacacacacaaacaaacatacatgcaactggtaaaatgaaaaaccaaggctcaaagccataaacctgaatccaaaattcatatgacagtctcctcaaggatggctccyaaagatctttgccatttaggatttgtaatcttgtttcctccctgctcatattgtggcaaagttggtctttgtgatcaatagaatgtggcagaaatgacggtatatcatttctgataataagtgttaaaaaaaaaaacacggtcc

SEQ ID NO: 653366 - DNA, 608 bp, Homo sapiens
taacctatcattcaacaaatggtgctgaaacaatttgacactcataagcaagaaaagaaaaagaaaaatatcttaacrtatacctcacactgtatatacaaaaattagctcaaaatggatcacaggcataaatctacaagtttcatagaaatataaaacttttaggcaaagaatgtagagaaaatctttgtggccaaagtatttttaagtacaacatcaaaatacaatccatgaaagaaaaaaaatatatgcattgactatcataaaaaattaaaacatcttatgctgtgaacaactctgttaagagcagagaaaaacatgccataggttagtaggaaaatacatttatgtccaatacctgacaaagcacttgtatccagaatatgtaaagagctctcaaaactcaataataagaaaacaatacatattttttaaatgggcaaaatattaaaaagccacttcagaaaggaagatatgtgaaagtcaaaaaataaatacaaagatgatcaatgtcattagtcatgagaaaaataaaaatgaaaatcacaagatatcactatacacacattagaatgcctaaaattaacagctaaaacattatgatacca

SEQ ID NO: 653367 - DNA, 608 bp, Homo sapiens
taacctatcattcaacaaatggtgctgaaacaatttgacactcataagcaagaaaagaaaaagaaaaatatcttaacgtatacctcacactgtatatacaaaaattagctcaaaatggatcacaggcataaatctacaagtttcatagaaatataaaacttttaggcaaagaatgtagagaaaatctttgtggccaaagtatttttaagtacaacatmaaaatacaatccatgaaagaaaaaaaatatatgcattgactatcataaaaaattaaaacatcttatgctgtgaacaactctgttaagagcagagaaaaacatgccataggttagtaggaaaatacatttatgtccaatacctgacaaagcacttgtatccagaatatgtaaagagctctcaaaactcaataataagaaaacaatacatattttttaaatgggcaaaatattaaaaagccacttcagaaaggaagatatgtgaaagtcaaaaaataaatacaaagatgatcaatgtcattagtcatgagaaaaataaaaatgaaaatcacaagatatcactatacacacattagaatgcctaaaattaacagctaaaacattatgatacca

SEQ ID NO: 653368 - DNA, 613 bp, Homo sapiens
attatgcctttgcatcctcacagcttagctactactcataagtgagaacatacaatgtttgtttttccattcctgrgttacttcacttaaaataattgtctccaattccatctagattgctgcaaatgccattatttcattcctttttatgattgagtggtattccatggtgtatatatatataaattatatatatatataatttatatatatataaattatatatatataatttaaaattatatatatataatttatatatatatatatttatattccacattttctttatccactagttgattgatgagtatttgggctggttccatatttttgcaattgcaaattgtgctgctataaacatcagtgtgcaagtatcttttttatataatgacttctttttctctgtgtagatacccaggtgtgcaattgctgcatcaaaagatagatctacttttagttcttcaaggaatctccacactgttttccatagtggttttactagtttacattcccaccaacagtgtagaagtgttcccttttcacaacattcatgccaacatctataattttttcatttttagattatgaccattcttgcaggagtaaggca

SEQ ID NO: 653369 - DNA, 595 bp, Homo sapiens
gtgtttaaagttgaatatcttgggagcattttaagtcacaagattctgtgagcatttcctcagaatttgtaggccttctttacatattttttgaaaactcaataaaacatgttcactgaaattttgtgtgtttaatattttttgctcactgggaagaaaaagaaagagaaagggaggaaaaaaggaaggaaatgaactcaaaaggtgggagggaagaaakgacagaaaaaaggaaaggaaaagagagattaaggaaagaggaggggaagggcagatggggcaggggagggaaaaatgaaatgcgaaaggaaaaggaaactgaaaggaaatgtatatggtgttatccagtccttcactaagttaaaggcaaatggagggaaaaaagttaagaaagaatatacatgactaaaataatcaaagaatgatactagtttctgcttttggagagaccaagatatataaatacaagaatttattatattcaccacactggaacaattacaaagccataaaaataaaatgactctgtgagtgcagaagggatgcaatgagggacaaaggagtgaaccattagatcatggcaatggtgaagcaa

SEQ ID NO: 653370 - DNA, 609 bp, Homo sapiens
aaagaaaaataacatttgatgtctctagaatacatatattaccagagactaccttattccttgcagttccctttactgtgctctatttcactatcatagcatattttaaacattctgctagccacaccaaataattccaactaccttttaaatgttgggtgcccatcaggattttgctctctggtctctttacttctcaatttggcactcctttgttggattcaactattaactctaatgctctttacttacaaaattagaatctccactgaagtcttttttttttattttacagctccaggtgtctacggagcatctaaatctggatatcccatgggaacttcaaactcaaaatatccaagagagatccattaatattcccttgcgctgacctgtaacaccgaatcacatgcagtagtatttagttgattctactgctaaaatgtcaaaaaaatttgcccagttttatccaaccctcctattattggccttcattatctttcaccaagaccaggcaaattacctaatttctcttggccagcytttcttgctccaaccaaagcaaaactcaaattgtttaactgccttgattctataccttgcatttcc

SEQ ID NO: 653371 - DNA, 609 bp, Homo sapiens
aaagaaaaataacatttgatgtctctagaatacatatattaccagagactaccttattccttgcagttccctttactgtgctctatttcactatcatagcatattttaaacattctgctagccacaccaaataattccaactaccttttaaatgttgggtgcccatcaggattttgctctctggtctctttacttctcaatttggcactcctttgttggattcaactattaactctaatgctctttacttacaaaattagaatctccactgaagtcttttttttttattttacagctccaggtgtctacggagcatctaaatctggatatcccatgggaacttcaaactcaaaatatccaagagagatccattaatattcccttgcgctgacctgtaacaccgaatcacatgcagtagtatttagttgattctactgctaaaatgtcaaaaaaatttgcccagttttatccaaccctcctattattggccttcattatctttcaccaagaccaggcaaattacctaatttctcttggccagcctytcttgctccaaccaaagcaaaactcaaattgtttaactgccttgattctataccttgcatttcc

SEQ ID NO: 653372 - DNA, 552 bp, Homo sapiens
tttttacatattttgtggttagccaacaaactaatgtgagctcagtcaacaatgtttcaacttccttaatactgcacaactgcaatgcatttttgctgctttagagtgctgcaaaaacatatatgacatctgcatttctaaaacgataacaatttgttgtttctgmaacatatatttaagactgttcttaaaaccatgtagtaatttatacctgtctaaataatttcttattttcatagataacatttttaaagtatatgggcctttcagcaatttgcagtcttcagagaaatgacatttagattttcttgggtctattcaggacccaatcttgtaaaccatttcactagaaataaaaatctgttttgttctttattaagaaaaagaaaatatggaagaagccaattaaaatttattgcataggacagtgtttccaaacatgctttaaagacagaaagtcttactaaaaacagttaagtgaactgtgacatacaggacggatcaggtgggacaactctgatagaagccaagatagaaaatacagagccctat

SEQ ID NO: 653373 - DNA, 268 bp, Homo sapiens
gaaatccgaaatgctgcaaagtctgaactgatccaaaaattgagtgtcaatatgacactcaaaggaaatacttattcactggagtttttctcatttggggtaagggatgttcaattggtaagtataatgcaactattccacaatccaaaacttctgtctcaagcattttggatgagggatgctcaatctgtatggtactttttgtggaaagstcctgtaaaactaagccttttattgcttaaatctttattgagtgctaggtgaattc

SEQ ID NO: 653374 - DNA, 621 bp, Homo sapiens
tgtgtgaacattgtctataccttttataaatattgcccaatactgtgtttttaactagagttatgcaggcataaaatatccttggcttgcaaattttctattaacttgaacatactgggaatgcttagcagcaatgaagtgctgaaaatgccaaagaaattaatggctttgtgctgtactactgaaacatgtccgctaatatttaaaattccatgkcccaggacatcacttatatctgctgactgaagctgaatggcctggaatctgctgggtgcatcaggccatttctcaagtctctctctgttgggcttttgtttccctctctcttccatttctattttccctctctccatcctttttccctagctcacccccatttttctgggattaattgagaatgttatttataagagactagaagagagttatacatatggaataggatatgatttatcaggatttatttcagatttcttaagtttaaaaaaggtactaaatatccatgtctcattttaagtattcatatgaagtcaacatttatggaccttgaaatccattgttttctgtgtccttgagagaaattttacaggccttgtgcaaggtttatgtgttcatacatca

SEQ ID NO: 653375 - DNA, 382 bp, Homo sapiens
ttttgaaactagagtgagcttcagaagtttcatctccatgtagtatatctttgactcataggtctgactyatagtaggattttttaaaatccaaatgttttatctcagaagcttatgttctatatagacttttagaaaagaaggccactgtatatcaaccattaaaccaaagtcaaaaattttaaagtatatacaaacaaatttgatatatgtactacagacttaattgtatttattttagaatactgtatgagatttaaatgatatatggatatagcaataattggaaacattttgcattaataattcagtggagtttctttcctgaaatttggttccaagcctcaagtacttgttattaatagctgtgcagaacaaataa

SEQ ID NO: 653376 - DNA, 382 bp, Homo sapiens
ttttgaaactagagtgagcttcagaagtttcatctccatgtagtatatctttgactcataggtctgactcatagtaggattttttaaaatccaaatgttttatctcagaagcttatgttctatatagacttttagaaaagaaggccacygtatatcaaccattaaaccaaagtcaaaaattttaaagtatatacaaacaaatttgatatatgtactacagacttaattgtatttattttagaatactgtatgagatttaaatgatatatggatatagcaataattggaaacattttgcattaataattcagtggagtttctttcctgaaatttggttccaagcctcaagtacttgttattaatagctgtgcagaacaaataa

SEQ ID NO: 653377 - DNA, 586 bp, Homo sapiens
agtccccattcttaaagagcacctgttgacttgaacagtgagcatacaggcaatgaacttcatgaacaggaaacaggcactgggcttggctctggggatctcagagtctgtgtagcagatcttagagtctgtgtagcaaactcagtgataacaaagattgaatttattgccagctttttggaataggaactcaaaacacatataatttgttttaggaaattrtaagtaaagttgacattaatcctgtgttgtggcttgcaaattcttacacattaccccactcatattccataataagcaaatgcattctttgctcctgaatcaggaacatatgttctcagcagtctcatttctgtgttcttaggacccttgatacctagtgcacaaagctcccctccattaccactggaagacccccctttagaatctacatatctggctagaaagaagcttagactagtattagttataatgtgaactcatttcatacgtactcggaacattcatgaattcaattctacctgctagtattctttggtacaaccacagcttttatctggtactcgaccacagaactagtttgtat

SEQ ID NO: 653378 - DNA, 582 bp, Homo sapiens
cttcctagagctgtttcctgaccgcatctcctgggatgaattgggtgctccttctctgtgcctctgtgccatttgacacagtctgtatgatggctctggtgttgaaatgtctgtttcatgcctatcataccccttttatctctgagctctctaaggacaaggacttgacttttcaactcaaatattcctgtgcttttggcatacttcacactcagaaaaagtttgtccaataaatgaaatgagtgggtgaatgaatgaggaaaccccttgttcaaggttttatacaggtgagcacagaatcaggatttccaggccagtgtgagtcccaccatctttaatgcctgattaaaatatacgctaactctgccaataaaattatgccattgaatgccttactgggattgtacctacatcttcgaaatacagaaaaggctttttagccctaacaargctgtcttactgccccagcttggctgggagctcagctgtggaaagtcggcagcttcaactgaggccattaaaccgggcattacctgaagccacgtgccggatagcatcagtcactcagctggttttcaagct

SEQ ID NO: 653379 - DNA, 488 bp, Homo sapiens
accacagaaccaccactgccctgttgtattacaccatgcctatcaggtattttgatttttcgccttgaccctgaaggcttttgagtttgcatccctgttgaagagcctggctccagaagatacagttttgaaggaggttgttcatagaggtatactcctgtatattagggttctccacaggaagagaaccaacatggatatgtattagaaaagaagtgtgtgtgtgtatatatatatgtgtgtgtgtatgcatattgtgtgtatatatatacacatatatatgaattagataactaatgggaatttatatttatatatacatatatacatgagttaggtaattaatgggaatatatatatatgtgtgcatatatatatgtgtgcatatatatatacacayatacatacatggctcacatgattatggagggacaagacccaagatcttaaattggcaaactggagacccaggagagctgatggtgtag

SEQ ID NO: 653380 - DNA, 566 bp, Homo sapiens
gttccagtctgaatcggaaggcctggaaaccaggagggctgatgagtccaaagacctgtaggcttaagaccaggaagagtcaatacttcagtttgagttcaaagacaggaaaaacacaatgtcttaactctaaggaagtcaggcaggaggagctccctcttactctcaggcacgtcagccctttggttctattcaggcctttgactggttggatgaggcccaccatattgggagggcaatctagtatactccatctaccaattcaattgctgttgtcatccagagacacacttacaaacacacccagaacaaacacacccagaataatgttcaaccaatgtctggacacccggtggaccaatcatgttgacacataaaattaactgtcacatcccctgagattcctgatatggttttgctgtgtaccccccccaaaaaatatcatcctgaattgtaatcctcataatcccctcatggcaagggcgggaccaggtggaggtaatcagatcatgggggcagtttttcccatgctgttctygtgacagtgagtgagtcccatgagatct

SEQ ID NO: 653381 - DNA, 604 bp, Homo sapiens
ctccaccatatgaggggtggaagaaaaggcaaaagtgtgatgtgcaggagtccccagtgcatcatttcacgagaacatttccagttgttttcagcatctcttctatttattccccaaacccccacagcctttgatgaattctggaggagagaaactgcctggcattttcaaccaagtgctttgatacttgaacacagcagyggatggaaagtgacagcaccttatcagtcactgtgtcccagctgctgtcagagctccttcctctctgccaacagcgtgggctgggctccctggctcgcagagtggtgagcgatgcttccgcgaggagatgcggcatctcaaagtgcaagatgcacccattgcagctctcagcttttatgccccgtgatatttatcagaaggaaacaattaagtcccccagaacgtggaatctcccttggagctcatgggggtagtgacaaaaatgtatctgagcaaggcatctgggctgggaacctgccttaggacctccttctatgggacggcaatgggcactttacacacatgattccgttcaatgctgaatgcaatgccaggagctctgtgctggatccttacattgcag

SEQ ID NO: 653382 - DNA, 554 bp, Homo sapiens
aagttgtgtcctctctggaggactaatctggaagtttaattacataaacataggaagaaaatactgaagagcctaagggggtgacagccatagtgattttaaccagctggttagagtacagtgaagtattcagggtgagagaattatgctaggccaagggataaaaccttgcatggagaaaggatggtgatgacatgcttccagggaggccagccatgctccagaatgtcctcgcctagaatagtcgaagagtcagtcaatatagctacaagtatttttcgagcattagtgctttaggtcaggagcggagtctgggacagggactcagagacagaatgcactgagggatcaagggactgggagaagtaggacatggtgggaggaaagaggcaaggatgtagcctccgctgaagtctagcttcytctggacccatggggaactcaggaacatggcatctgttttaaagagctatcttgcatcgtgccctgaaattcagcagttgttggctctgctgagctggtcccacctcgaggcaagggttggactgctgtac

SEQ ID NO: 653383 - DNA, 586 bp, Homo sapiens
agtctttttgttccattcaggagggcaatctgctttactcagtttaccaactcaaatgttaatctcatccagaaacaccctcacagacacaccmagtgtaatgtttgaccaaatgtctgggtgccctgtggcccagccaagttgacacataaaattcgccatcacagggagaatcttccactggtttctgtgtgctgagtctcaccatccgacagagtgatgcatcatttgatggggagaatgtagcagagacattaatggtgcggactctgagccactctcagcatttgtgccctagatttatcactttctctctgtgtgaagttggtcactttgtttaaccttctgtgtctaagttatcccaccagcaagatgcagctattaatagaaaccatgttgtggtgttgtaacagaagagagtaactctgcaaagcacttagcacagtgtctcgtggataatacctgctcaagacttgtgagttattgtcattgttgttattacagactttttgcctcttcctccagagtgtgtgctaactcagcacagagaaaagtacatggggtttggacccagaaaggccaagtc

SEQ ID NO: 653384 - DNA, 586 bp, Homo sapiens
agtctttttgttccattcaggagggcaatctgctttactcagtttaccaactcaaatgttaatctcatccagaaacaccctcacagacacacccagtgtaatgtttgaccaaatgtctgggtgccctgtggcccagccaagttgacacataaaattcgccatcacagggagaatcttccactggtttctgtgtgctgartctcaccatccgacagagtgatgcatcatttgatggggagaatgtagcagagacattaatggtgcggactctgagccactctcagcatttgtgccctagatttatcactttctctctgtgtgaagttggtcactttgtttaaccttctgtgtctaagttatcccaccagcaagatgcagctattaatagaaaccatgttgtggtgttgtaacagaagagagtaactctgcaaagcacttagcacagtgtctcgtggataatacctgctcaagacttgtgagttattgtcattgttgttattacagactttttgcctcttcctccagagtgtgtgctaactcagcacagagaaaagtacatggggtttggacccagaaaggccaagtc

SEQ ID NO: 653385 - DNA, 596 bp, Homo sapiens
ggtttggacccagaaaggccaagtctgactccatcccgcacatctagagcaaatagccaaggttctctgtgcctggcactccctgtgtgtaagtagggaggatgtgacttcaatagattgcttcaagggttagagaaagcgtccatagagcatccagcccacctgagctactcaacagtagctggtttccacccccaatggcagagactgcatctgtctttcattggcatccccagtgagcaccatactcatagtaagggctcataagaggttgtttgaatgcagttgctttgccttatgagaaaacatggccctatctattcccagacaccctttctagagatcaggtccaacaggtgctcagtatcatgttttctccacacagtcttctaagaggacattgtgtcccaggtacttgtgaaactcatgctgctgccaggtctaagcgagcyaatggaaggcaaaagagatggctggtgggagaagagcaaggctgtttcccaactctgggacaacgggaagtgaatagaaaatagagaatcaattgcacttgggagtgattcagaataaattgccactgtgtcccctgagccatc

SEQ ID NO: 653386 - DNA, 493 bp, Homo sapiens
tacttgcctaagaaaaaaaagcaggtgcactttcctctattcatcctgttaagtgcaactaaaagcctaggcattgtatgcaagacaaacatacggagttcctgcaagatagaggggaaggcaaaaggctagagacctcagaacccagggaataacatggtggtgggttccttgggttttctttttgcctcatatatcccagaattggatgtgaagaagccagcactcccagaaacatgaacaggagcasacaaaatcgaagctcaaacagaatctgctcccaataactactctacattagccaaacactttacacacaaaaacttgaagcctctaacctcactcatgacagaaaagggcaaaagaagagcctagattttcagtctcatgatgttttaacaaggcactccaatattcctactgatgtcagaggtggccagttaggaagccaagaatttcattcctaccagctgacaatgagacctccttccca

SEQ ID NO: 653387 - DNA, 551 bp, Homo sapiens
tggtttcatgacactgcacatgggttcttatctggggttggtagattcaactcaattccacaggtttactgggtgttgcctcccatgcttggagccaggaggatgcagggaaatggggctgccaccatacccgctcttcttatgatcccatsacatcatggcaccctttgggacctggcaccatgctgtggcactttgcctccatcatctcctttaacctctgagctctgtcaggaaggcattactactatccctggaatacagacaggaaaactgagttggattgaggctcagagaggttaagtcacttacccaaggtcacaaagctagagagtggcaggccagcatccaaggccaggaacacgagctccctctgatccaaatggtgactctatgtttgatcagtgctctgagaactctccaaagatctttatcaactgtcatctcttcattgcccaggcccagtcagggagccacttggctgcggtcccgctgagatttaggggcaggacccctgatgtgaggtggaatgcttggtcacgctgttcaag

SEQ ID NO: 653388 - DNA, 551 bp, Homo sapiens
tggtttcatgacactgcacatgggttcttatctggggttggtagattcaactcaattccacaggtttactgggtgttgcctcccatgcttggagccaggaggatgcagggaaatggggctgccaccatacccgctcttcttatgatcccatgacatcatkgcaccctttgggacctggcaccatgctgtggcactttgcctccatcatctcctttaacctctgagctctgtcaggaaggcattactactatccctggaatacagacaggaaaactgagttggattgaggctcagagaggttaagtcacttacccaaggtcacaaagctagagagtggcaggccagcatccaaggccaggaacacgagctccctctgatccaaatggtgactctatgtttgatcagtgctctgagaactctccaaagatctttatcaactgtcatctcttcattgcccaggcccagtcagggagccacttggctgcggtcccgctgagatttaggggcaggacccctgatgtgaggtggaatgcttggtcacgctgttcaag

SEQ ID NO: 653389 - DNA, 665 bp, Homo sapiens
tatctgttctcatatgtgcgatgtccttgccttatacgtggctgaaaaagagacctaatatggggaattcccagaggggccttgcctgaagggcccacacaaagctcttcctgmcttcctgatcactctgctcggtttctttccatcatgggacttccttctgtgctagaatgcatacccccctgaacctagctcagggccaaagattgagctgaataaacaaataccagaagggagaaacagggcagattctggcaacatccgaaccacaccacttaaactaacttggggcaagtaacttctagtctcagagcctgtttcttcaccaagaacttgggggtaacaagagtacttacttcttcgtaaggcctaaaggagataatctgtgttaatcacacatcacactagctggtccactggaatcactttttggaccaactgcctttctctctctctctttttttagctttccttctttattaaattcccttaagcataactcataattcaagtttaagacagaacaaatctcacaaaggatttatggctagttctcttcttcttataaatgaacccataaaaaagcatcccctaattcctctctagtttttctaacctccttgcttttctaaaattgaaaaaaaaaattctggtgtactaaaacc

SEQ ID NO: 653390 - DNA, 665 bp, Homo sapiens
tatctgttctcatatgtgcgatgtccttgccttatacgtggctgaaaaagagacctaatatggggaattcccagaggggccttgcctgaagggcccacacaaagctcttcctgccttcctgatcactctgctcggtttctttccatcatgggacttccttctgtgctagaatgcatacccccctgaacctagctcagggccaaagattgagctgaataaacaaataccagaagggagaaacagggcagattctggcaacatccgaaccacaccacttaaactaacttggggcaagtaacttctagtctcagagcctgtttcttcaccaagaacttgggggtaacaagagtacttacttcttcgtaaggcctaaaggagataatctgtgttaatcacacatcacactagctggtccactggaatcactttttggaccaactgcctttctctctctctctytttttagctttccttctttattaaattcccttaagcataactcataattcaagtttaagacagaacaaatctcacaaaggatttatggctagttctcttcttcttataaatgaacccataaaaaagcatcccctaattcctctctagtttttctaacctccttgcttttctaaaattgaaaaaaaaaattctggtgtactaaaacc

SEQ ID NO: 653391 - DNA, 665 bp, Homo sapiens
tatctgttctcatatgtgcgatgtccttgccttatacgtggctgaaaaagagacctaatatggggaattcccagaggggccttgcctgaagggcccacacaaagctcttcctgccttcctgatcactctgctcggtttctttccatcatgggacttccttctgtgctagaatgcatacccccctgaacctagctcagggccaaagattgagctgaataaacaaataccagaagggagaaacagggcagattctggcaacatccgaaccacaccacttaaactaacttggggcaagtaacttctagtctcagagcctgtttcttcaccaagaacttgggggtaacaagagtacttacttcttcgtaaggcctaaaggagataatctgtgttaatcacacatcacactagctggtccactggaatcactttttggaccaactgcctttctctctctctctttttttagctttccttctttattaaattcccttaagcatwactcataattcaagtttaagacagaacaaatctcacaaaggatttatggctagttctcttcttcttataaatgaacccataaaaaagcatcccctaattcctctctagtttttctaacctccttgcttttctaaaattgaaaaaaaaaattctggtgtactaaaacc

SEQ ID NO: 653392 - DNA, 567 bp, Homo sapiens
caagctcgctaataagctctgttggggaggtctcagcccaggccagagctgtgaagtgagaaataagtccagtttaaatagtgctgctgggatggacttttgtggccagggaaggggtacccaggagccagtgtggccactgacccagcctcatcaatggccctaggatccagaatgccacaaacaatggagcaagaatcagatctgtgtgtctgggtaagcagaatgttctgrgaatataattcctttttccttcttttgtaagaacaatttatttcttcagttttgcatgagggcttcttaatattgagcaagaatatacatcattattgcgtgagatttagaaaattatttgagagagggttccaataaatgaaaatgaattaaggatgtctgtggagttcattgggcaacttatagagcccttgagcttttttaagtgaacattccacaagaggggaaacagtagctattgcatagtctcagagctgtctctgagcctccgtggcatgttatctgccccatctaagggttataaaggccataagcctagctttagaattttat

SEQ ID NO: 653393 - DNA, 567 bp, Homo sapiens
caagctcgctaataagctctgttggggaggtctcagcccaggccagagctgtgaagtgagaaataagtccagtttaaatagtgctgctgggatggacttttgtggccagggaaggggtacccaggagccagtgtggccactgacccagcctcatcaatggccctaggatccagaatgccacaaacaatggagcaagaatcagatctgtgtgtctgggtaagcagaatgttctgagaatataattcctttttccttcttttgtaagaacaatttatttcttcagttttgcatgagggcttcttaatattgagcaagaatatacatcattattgcgtgagatttagaaaattatttgagagagggttccaataaatgaaaatgaattaaggatgtctgtggagttcattgggcaacttatagagcccttgagcttttttaagtgaacrttccacaagaggggaaacagtagctattgcatagtctcagagctgtctctgagcctccgtggcatgttatctgccccatctaagggttataaaggccataagcctagctttagaattttat

SEQ ID NO: 653394 - DNA, 550 bp, Homo sapiens
tagtaggtggtacagccaagatgcaaactgtttaaaccctttggaatgatcaaaggaagtagatactggatctgatgagttggagggggcagatcagccatgagttggttataatgacactcctttgtatatagttagtgccatttttgcaaaggcatttacaaatatggtttaattgatactaataatacaaggcaggagtcatcgttgtcatctttatttgatggaagaggaaacaaaagcacagaaaggtgaagcatctttacccagatcattcagaggatcagcagtgkggccactgccggccactgggcagctgatggctagtaaatctcccttctgcactctgctttggaagaaggatgaccagaaaggcctgggcccattggcattccagcactgtcctcaagtgagtcaggtaccactatacagactcaattttaccttcggtaatttcctccttctgtaaagatttattttaggctataggggggcaaaaggattcctcacagttaaaagcatttgccgctcataccaatgtccactatga

SEQ ID NO: 653395 - DNA, 550 bp, Homo sapiens
tagtaggtggtacagccaagatgcaaactgtttaaaccctttggaatgatcaaaggaagtagatactggatctgatgagttggagggggcagatcagccatgagttggttataatgacactcctttgtatatagttagtgccatttttgcaaaggcatttacaaatatggtttaattgatactaataatacaaggcaggagtcatcgttgtcatctttatttgatggaagaggaaacaaaagcacagaaaggtgaagcatctttacccagatcattcagaggatcagcagtggggccactgccggccactgggcagctgatggctagtaaatctcccttctgcactctgctttggaagaaggatgaccagaaaggcctgggcccattggcattccagcactgtcctcaagtgagtcaggtaccactatacagactcaattttaccttyggtaatttcctccttctgtaaagatttattttaggctataggggggcaaaaggattcctcacagttaaaagcatttgccgctcataccaatgtccactatga

SEQ ID NO: 653396 - DNA, 454 bp, Homo sapiens
tttatatatgtataaaaatatatttgtgtatatgtatatgtgtgtatgtgtgtgtgtgtgtgtatatatatatatgtgtgtgaatctttttgagacagagtttcagtctgttgttcaggctggagtgcagtggctcagtcagctcactgcagcctcgaactcttggactcaagcaatcctcccatctcagcccccagagtagctgggactataggcgtgyaccatacctagctaattttttattttttgcagagacggggtctcactatgttggctaggctgatctccaacttctgaccgcaagtgatcctcctgcctcagccttccaaagtcctgggattataggcatgagccaccatttctggcttagtatataattttgaggtgtgtgtatatattgttgtgcaattttaaattttaaaaagcaggttgcaaggctttttaaaatttaaca

SEQ ID NO: 653397 - DNA, 574 bp, Homo sapiens
gactctcatctatggaccattgttatattctgtggtcaccacaaacatattaacaagtattgaaccattactcctaggggaaatacaggattaggtttctgtgagcctctggtcataacatttttatcaactgatcaatacataatctggttttatttatgtttctgtttaaagaagtcttatttaatatatattttgrattcattaatattgaactcacagccattgaactatccagcagtataacttgtgcctgaaggaagcctatctaacatgtatattttctccataagacacagcggagcctttttgtgcttagaaacactagacaggccagatgcagtggctcacgcctgtaatccagcactttgggaggccaaggtggcagatcacctgaggtcaggagtttaagaccagcctggccaacatggtgaaacctcatctctactaaaaatgcaaaaattagccgggcatagtggcagatgcctgtaatctcagctacttgggaagctgaggcagaagaattgcttgaacccgggaggctcagagggcagagggcagaggttgcagtgag

SEQ ID NO: 653398 - DNA, 436 bp, Homo sapiens
atcacaaccatcatccaaactaccattcatttaatatttactatgggcacagactgggctaggtactttatatacactaggttatttaaccctcatagagatcccatgaaaaattgttatttctattaaaagaaaaggtaattgggcaagacacttgccaaggacacacagcttaggaagcagcaaagctgaaagttaaagccaggtcagtctgactccaaagcctctactcttaaccataacacaacagtgctttcttctagctcagakttttcttcataaagaccactgacagctgcctgcacacagcattagatttaaaaatcattagatttaaaaattctgtggaggcatgatggtttctagttttccactgaagacactgaggtacagacaggataagtgacttgctcagtgtcccatcattagcaggtga

SEQ ID NO: 653399 - DNA, 436 bp, Homo sapiens
atcacaaccatcatccaaactaccattcatttaatatttactatgggcacagactgggctaggtactttatatacactaggttatttaaccctcatagagatcccatgaaaaattgttatttctattaaaagaaaaggtaattgggcaagacacttgccaaggacacacagcttaggaagcagcaaagctgaaagttaaagccaggtcagtctgactccaaagcctctactcttaaccataacacaacagtgctttcttctagctcagatttttcttcataaagaccactgacagctgcctgcacacagcattagatttaaaaatcattagatttaaaaattctgtggaggcatgakggtttctagttttccactgaagacactgaggtacagacaggataagtgacttgctcagtgtcccatcattagcaggtga

SEQ ID NO: 653400 - DNA, 586 bp, Homo sapiens
gcggttaggttcccaggaaaatccacaagtcttttaaatttatattgttcaagcaccatagaatctaaccatatatagaagtgcttctgtgggaaaatatgtctagaattctaacttgggatgccaggaacagatctcctcgtgctgccaggaatatgatgagattaggacaccttttatcaaaaccagccaagtacagaaaataattcccccagtcattcacagggactctcaaaggctccaaytgggcagggcctaggggaaaatatttggagggaagagcagagtgggcggaattacctctgagtaagaccagatcttttttttttttttattctgagggctttacttttttctctattagcttaactctcttcctctattagtccctgttaattctgactccaagtcttctccttccctggcccacagaggaatagaaagcagtctcatagtttctgtcttgtttcttgaagtaaacacacaattttggtgtgtgtgtgggggggggcttttgctaggagggttttttttttaaataaaggatacctataataatttatcatgtattttccatgtaaactct

SEQ ID NO: 653401 - DNA, 537 bp, Homo sapiens
tgcacagctcctgactccaaatgagatcccttccttgaagagaagagagggaatagcagggaggattttgtcttacatcttggataccagctcaggtgcagcaggatagggtaccagtcagagccatgaggcccttgttcaggccctagctcccagatgacatctatagacacaccccaaaccagaggggaacctgcctccttgaaagaaatgacccagtccttccagcatttattacctgctaactgaagggcgcttggaccctgactaaccagcagtgatayctggtactagagggccttggtgagtctctgagacttgctggcttcaggcagcaacactgccacaatggggtagagcacctagcaggttcttgtggttttccattcaaggacatgactcttgtatggcatttctggacattccctgggccagaggggagcccactgcactaaagagtgagtcccaggccaggcagcattcaccacaagctgacttcagagaccttgagtcttaagaaaacatcagtggtaatct

SEQ ID NO: 653402 - DNA, 537 bp, Homo sapiens
tgcacagctcctgactccaaatgagatcccttccttgaagagaagagagggaatagcagggaggattttgtcttacatcttggataccagctcaggtgcagcaggatagggtaccagtcagagccatgaggcccttgttcaggccctagctcccagatgacatctatagacacaccccaaaccagaggggaacctgcctccttgaaagaaatgacccagtccttccagcatttattacctgctaactgaagggcgcttggaccctgactaaccagcagtgatatctggtactagagggccttggtgagtctctgagacttgctggcttcaggcagcaacactgccacaatggggtagagcacctagcaggttcttgkggttttccattcaaggacatgactcttgtatggcatttctggacattccctgggccagaggggagcccactgcactaaagagtgagtcccaggccaggcagcattcaccacaagctgacttcagagaccttgagtcttaagaaaacatcagtggtaatct

SEQ ID NO: 653403 - DNA, 498 bp, Homo sapiens
tgcatgtatgagatctatgatatattaaatattatatgtgttcygtatacatgtctatattaaaagagagatatgaatgtacatgaatatggcagaagtgatattcatatgttttcattttaaaaattatacacaaatacattttatattcttttaaatgtcatagtgctaaaatgtccatctttaatttaccttgtttactggtttctttgagcttcatacttaattaaactcagaaataaacacatattctcaagtgcacaaacctattgttctgtttatattctttcctatagcttgaaatattaactaacgtaattcaggctcttttaatacaataaaatgctagttgtttagttaacaaaaaccatgattaacaaagacatacatatattttacccttgagctaagaaaattttacttcagctaattagatgctttctatgataaaactatcccttctttttgtttattagcctgaaagaatgtaaatgaaga

SEQ ID NO: 653404 - DNA, 498 bp, Homo sapiens
tgcatgtatgagatctatgatatattaaatattatatgtgttctgtatacatgtctatattaaaagagagatatgaatgtacatgaatatggcagaagtgatattcatatgttttcattttaaaaattatacacaaatacattttatattcttttaaatgtcatagtgctaaaatgtccatctttaatttaccttgtttactggtttctttgagcttcatacttaattaaactcagaaataaacacatattctcaagtgcacaaacctattgttctgtttatattctttcctatagcttgaaatattaactaacrtaattcaggctcttttaatacaataaaatgctagttgtttagttaacaaaaaccatgattaacaaagacatacatatattttacccttgagctaagaaaattttacttcagctaattagatgctttctatgataaaactatcccttctttttgtttattagcctgaaagaatgtaaatgaaga

SEQ ID NO: 653405 - DNA, 498 bp, Homo sapiens
tgcatgtatgagatctatgatatattaaatattatatgtgttctgtatacatgtctatattaaaagagagatatgaatgtacatgaatatggcagaagtgatattcatatgttttcattttaaaaattatacacaaatacattttatattcttttaaatgtcatagtgctaaaatgtccatctttaatttaccttgtttactggtttctttgagcttcatacttaattaaactcagaaataaacacatattctcaagtgcacaaacctattgttctgtttatattctttcctatagcttgaaatattaactaacgtaattcaggctcttttartacaataaaatgctagttgtttagttaacaaaaaccatgattaacaaagacatacatatattttacccttgagctaagaaaattttacttcagctaattagatgctttctatgataaaactatcccttctttttgtttattagcctgaaagaatgtaaatgaaga

SEQ ID NO: 653406 - DNA, 489 bp, Homo sapiens
cctttataaaaccatcagatctcataagacttattcactatcatgagaacagcacaagaaagacctgtccccatgattcatttacctccttccaggtcccttccacaacatgtgggaattgtgggagctacatttcaarataagatttaagtgaggacacagcaaaaccttatcagtggttcttactgaacttaacaatatctaaatattggtgtgacccatgcatcatgatttgaatctcttctttttaaactactctgattttgtttgtaatctcatctatattatgattttaaataccacctacattctaatggatgttacatctttatttttaaccttgactttgcccctatgctctaaaccttcatggtcaaccactaacttgacatctctgaaataaaataaatattaaaactttatatgctaaactaaactactaaaatgatatacagaagcacccccaaagtttttcctcttaaaattgtc

SEQ ID NO: 653407 - DNA, 389 bp, Homo sapiens
attttttaagctcttcagagatccacattttataacctacgtcattagtcactcagttatttgyttcttagtgacttaagatgtttttctgaatatcaaatgactctttctcacttttagttgctcattttctcttactcagtgactaccatggtaattatcataataaaccatctttcatgtattccaaggtagggattacattgccaatcagccttctccattctgaagtgaccaatgtaccatttcttttcctatcttgtgggcattgctcattttgatggctaattttagctgtcaacttgactggattaagggatacctagaaagctcctaaagcattatctgcggggtgtctctgtgagtgtgcttccagaggagactggcag

SEQ ID NO: 653408 - DNA, 546 bp, Homo sapiens
tcaattttgtaattatatggaataatttatagatgaacatttcctttgaaagagaattttgaaagagagattttaaaaatttatcctaagtacrtacttgccaatgcatgcaaaatatgtctctatcaagatgttcattttagtggaatattaattagagtaaaaatttaaaaacaacctaaatgtccaaaaaactggactggtaaaataaaccaaggtgcattctaataatattttattaactttttattatggagagatacatatgtgtgtatgcgtctatatttatatttaaatatattcttgaaatagtgttaagttataatgcaaggttgtaaagtagcttctaacagtgtaaaacaagtaacgattttctctgtctttttttctctgtgtggctttctctgtctggtcaaaacaaagactgaaagactgtacatcaaaaagttagtggtggttatttctgtccgtttgaaccattttcttcattttttgattttcactgttgtttgaacttttattaatttaatgtatatttctttatta

SEQ ID NO: 653409 - DNA, 591 bp, Homo sapiens
atttgtttgggagaaaataaggaaaaagaacaagggtctctacctggtaatccagaaaatttctttggagcttatccaagaccaccaagttggtacctctgaagtctggcaaaaccacagcattcgtgggcttggactcaggttcccttggatacctggaaagaattcccaagaaggacaggcacaaataagcccagattgtaagactacaacaaatacctaagtctttcatgccctgacaccaataaacatctacaagcatcaagatcacccaggaaaacatgacttcactaaatgaactaaataaggtgccaggaatcaatcctgtagaaagagatatgtgagcttttagacagataattcaaaagagctgttttgagaaaactcaaagaaattcaagaaaacacaaagaaagaattcagaattatatcagaaaaatttaacaaagagattgaaataattaagaagaatagagcaaaaattccacagttraaaaatgcaggtgacatattgaatgatacatcagaggttcttaatgacagaactgatcaagcagaagaaagaattagtgagcttgacgacaggctattt

SEQ ID NO: 653410 - DNA, 592 bp, Homo sapiens
tttaatctgcactgtacaacaaatggacctaatagatgtttacagaaccttttatccaaaagcagcagaatatacattcatctctccagcacatggatcattctgaagggtaggccatatttagcttacaaaacaaatcctaaaatattcaaaaattaaagtaatatcaagcatattctctgaccacaatggaataaaaccagaaattaataataagaggaatgttgaaaactatataaacacatggaaattatataatatgcttttggatgaccagtgggtcaataaagaaattaagaaaaaaattgaaaagtttcttgaagcaaatgataatggaaacacaacacatgaaaatctatgggaaatggtgaaagtagtactaagaggaaaatttatagckataagtgcctacatcaaaaagaacaaacactttcaataaataacttagtaatgcatttttaagaactaaaaagcaagagcaaatagaacttaaaattaatagaataaaataaataataaagatgagagcataaattttaaatgacaaaactatacaaaaatgaatgaaataaaaattttattttagaaaaga

SEQ ID NO: 653411 - DNA, 524 bp, Homo sapiens
gtgattgcatattgatacattatctctgatatcaaacaaacaccacagggtacattctagtcttctgcctttctattggtaacattgtgttggaactgtgagaaatctggttcctataattctcaaaagcttatttatttgcttaagttgttaaaaaatagtttcagcattttaaaagatatcacttgatatggtttggctgtgtccacgcccacatttcatcttgaattgtagtttccataatccccacctgttgygggagataattgaattatggggacgattatccctatgctgctctcacgatagtgagtgagttctcatgagatctgatggttttctaaggcgctttccccgcctttgctcagcacttctctctcctgccaccctttgaagaggcgtcttccaccatgattctaagtttcctgaggcctccccatctactcagaactgtgagtcaattaaactcttttcttcataaattacccagtcttggatatttctccatagcagcatgagaatgg

SEQ ID NO: 653412 - DNA, 595 bp, Homo sapiens
ttgttcatagtaagtgcaaactgtaagtaggctacatatagtagaattcagtctatctaaattggtgcttggaacaattgttataaattcagatgcaacagattcaaacacatataccttaacatccaacttctcaaaccctgttctgaaggacatgaacttctgtcatcttagcaaatagcagaaaaacaacctgatcagtgttaagaaaaaataccctaggtgacattactctgagttggaaaggccctccttctaaggaattagtgttctggagtaaaacttggatttcaaaaacctaaattctagcagcacacaccaccctccccccacccccctgtcacacccacacccttagcttgarttggcattttatctaagatacactatgagcaatcattagttatgcccttgcattttacccttggtttcaaaattcatttttaggcaggtttcttattctccttgctgcattgtttcatatctcactttggtttcatttatgtccagtttcttgaaatgtcaacatttagatgatattctctggcttctgctgaaatagataatttttcctattgaatatattgggtcattt

SEQ ID NO: 653413 - DNA, 595 bp, Homo sapiens
ttgttcatagtaagtgcaaactgtaagtaggctacatatagtagaattcagtctatctaaattggtgcttggaacaattgttataaattcagatgcaacagattcaaacacatataccttaacatccaacttctcaaaccctgttctgaaggacatgaacttctgtcatcttagcaaatagcagaaaaacaacctgatcagtgttaagaaaaaataccctaggtgacattactctgagttggaaaggccctccttctaaggaattagtgttctggagtaaaacttggatttcaaaaacctaaattctagcagcacacaccaccctccccccacccccctgtcacacccacacccttagcttgaattggcattttatctaagatacactatgagcaatcattagttatgcccttgcattttacccttggtttcaaaattcatttttaggcaggtttcttattctccttgctgcattgtttcatatctcactttggtttcatttatrtccagtttcttgaaatgtcaacatttagatgatattctctggcttctgctgaaatagataatttttcctattgaatatattgggtcattt

SEQ ID NO: 653414 - DNA, 540 bp, Homo sapiens
gttatgcccttgcattttacccttggtttcaaaattcatttttaggcaggtttcttattctccttgctgcattgtttcatatctcactttggtttcatttatgtccagtttcttgaaatgtcaacatttagatgatattctctggcttctgctgaaatagataatttttcctattgaatatattgggtcatttacatggattttaagtatatgagctcaaatttttatttttaacagaaaatactttaataatatgcatgggtcattttctaaaatgttttttaacaataattatatttcagaaatatatttttgatttaaaaatttcagtttctgtgaactgccatattttctcatgaaagtaatgatttttcacatttarttccttgcataaggtagattgtgcttgcctgattttggcttttatttgaataagagatttgtgcactttgaatactttaaatttattggtgaataaatggaaaaaataatatttacagtagtcttgctttattactactgagattcaggagcctgaga

SEQ ID NO: 653415 - DNA, 604 bp, Homo sapiens
atgggtttagagctcaaaagagattctgaagagttatcagtgtatttaggtgttagataagattatgggaatgatttatcaaaggagtatgtgtactttaagaaaagtggagagattaagatggaattatcaggaaataccaacaataacaaaataattgtagtgttagacgtaccttcaaaaggaatatggagaaaagaaagcacttgttttacctttaaatataaatcagaaaaccccatgagctttgattaggacacttcagtagctttctgttgtattggacataaaatccaaactcgctatgtaacctcgctatcacaatgctacttcttgatcactctgcttcagtctcaccattctttctcctgtacaaacacatcaaagctcactcaacattctgggcatttgcatttattgcttgtttttccaggaatgccttctactagacttcacattacaattttatactcaaacagaagcttgtcaaaaagtttttttctgatctacctatctaatgcaatccctacctcacagtcttttctcctagtcattctgtcaaactatgttgtcttattatsatattgtttcatgcttcctgaaa

SEQ ID NO: 653416 - DNA, 593 bp, Homo sapiens
acacttttcatgctgccgtgataacagaaagcagcataaaaaggtattgcattatatttcaagagtgagatgaaatcaaaatcaaccacgtaactgtggagtaccctaaagggattccataatcctctgaattaacacctttcctgagagatgaacaagaattaacacaagagataattgtatgtcaaccatcagggaaaataatarttacttatctaaatttggtattctagtataagaagaaaaaacaaatccaaaattatttgtaaaaaacttatgaatgttcacacaaaaccggcacacaaatatttatagcaactttgcatagttacctaaactggtaagtaaccaagatatttctcaataggttaatggatagagaaattgtggtacatttttacaatggaatattattaaatgataaaaagaaatgagctatctagctatgaaaagacatgaaggaaccaaaaatgcttgttgctaagtgaaagaagccaatctgaaaagacgacatattttatcattccaaatatatgacatttcggaaaaaggaaaatctatggagacggtaagaagatcagtagttgccaggg

SEQ ID NO: 653417 - DNA, 605 bp, Homo sapiens
acatagttgaaatttaaaataatatattaatacttatttaacccagtactgtttgtcccttggtattcatgggagaaaagacactcttctgatgccaaaatccacagatgctcaaatccctgatataaaatggcatactgtttgtatataacctatgtgtatcctcccatacactttacattctctagattacttaaaattcacaacacaatgcccacacattgtttcattcacatggatttaatgtagtacttagtctgcggcaaattcgagttttgctttttggatctttgtggaaattctttttttcttgaatatttttgatctgcagttaattgaatccatggatgcagaacccacagagaaagagggccgactgtatatccaaaatattatcatttcaatgtgtatcaatagaaaatgattagtaaatgrttagtgaactttttaaagttatttttgtattgcacacttgtagaacaacttaaattgcactagctacatgtagatgctctgtggacacatgggcctggtggtcagtgaaatcaccactagcagttctagcattttgcctctgcagtactgtgaacagaaattttatactg

SEQ ID NO: 653418 - DNA, 572 bp, Homo sapiens
aaacaaatgctgaagagaaagaaaagctactgtgtgtaactgttacctttcaaacagaacagcctttaggtaaaagtattgtttattcatgcaattgactattattttgaacatgaaatgtgcttccagatatttatactcatatcccttctcaaattgaggattatagaagactaggcctgtgattgcattagacattagcataaaatacaatgaagtttatattgattatgggacataatatctgcagattcctattacattattcaaaaataaatgggtctgtgcttggaaagagagatatatagacaaatgagcaacatgttaatataagtaaagggtatacaggagttctctatactgctttacaacgtctctgtaattatgaaagtatactaacaaaaattaaaattgttgcattgatastaatttacctaaaaatctctttcactgagtggaaggtttttcagagacaatttacacaaactaaagctggtaagcaaggaatagggataagtttgctatatacatttcatgttatcctcttggcaggaagaatcatttccagatca

SEQ ID NO: 653419 - DNA, 536 bp, Homo sapiens
atccagtcttattcataccccctgacacttttggtacctgttagctgggtcatcagctctctttgagtttaagccctttcttcccttataaggcccagtgcaacctcagctgggtgatgctggaatttaaacctatactagtatccgggaaagaagctggggctcatcctgggtggagggcacaagtgtcttgaagggaagaggcctctgcattgtcttcaagcaatggggccgggggtgggctggctcttgctatggagggatagcccacatttgtggggttggagggtctagaggaaactagaatttcaaggggtagggcatcaacacagatgtttgcatcctgtatttcacagtcctgttcttccccaatcagggccctgaacttgacacagcagatctggcatggttgkgagtgtcaccttctttggtctcagatgattaattcttagccctggtcctcagctttctctggcctcccaatgcaaaagagagtttctctgtacacttccaaagaggttctctggcattcatac

SEQ ID NO: 653420 - DNA, 597 bp, Homo sapiens
tcccccggctgtgagaaagtgccaataaatacatcatgcaaccccacggtaagaggaagcaggggacatggaggcgggactagtaggggtgaggggctgtaggggccacattcctcattgtgcagagaagactgaggccacagagggcaagamacttgtgcaaggtcacacactcaacccccagcagagctagaagaaaccagttcccagaatacctggtactcctgttgagccatccatcatgtggggagggaaactgaggctgggagagacagccctggataccaggacttactccacccctccccaggacattgctctgacttgaggaccatcaaccacttcaccctctgagtctcagcctactcctgtttgtttgtttgtttgtttgtttgtttgtttgtttgtttgttttgagacagggtcttgctctgttgcccaggctggagtgcagcagtgcaatctcagctcactgcaacctccatcccccaggctcaagcaatcttcccacctcagcctcctgagcagctggaactactagcgtacgacaccacgccaggctaattttaagctttttgtagaggcaaggtcttgctg

SEQ ID NO: 653421 - DNA, 553 bp, Homo sapiens
aaactcttccctccccctcctacctcggagggaatttactccctgcagcccaccacctttgccatcgtccaagtcctccacacacccttgctgactctgcccagatccaggtctatctggggaaatggaggcagattctcccagcaccttgtgaattccagacagaaaaagactcttccacttctcgacaaatattctatcctctgagcctcaccaagtctgctctgctaccctatgtcatccttgctgcttgagcaactgactttcgggcctgtgatacctgcctggatcaggttgtcctccccaggcctgcctgtktccctgcaaatgacctaatccatatcccaagtttaaaaaaaaaattgttcattttatttttttcatggagtcattcgtgagagcagaaatacaaaaagctgtcaagttaagaattagagtttgtagggccgggtgcagtggctcacacctgtaatcgcagcactttgggaggctgaggtggccggatcatttgaggtcagaagtttgagaacagcctggccaacatggtgaaacc

SEQ ID NO: 653422 - DNA, 464 bp, Homo sapiens
  misc_feature 112: n = A,T,C or G
ctgctgtgctgtgctgtgggcaattcctcctgggtccaaactacccagtctccccagcactggcaggggaaaaatggcagactggagctgcagtgatggctgccactccttnctaccggaactcaagtcatcttaggcagcaggaagccacagtgatggtggccagtccctcccgcaagaactcagcagccttaagcagtctccagcctagtggctgctgagaatctgcacagctctgtggtaggctctctcyagccttgtggctacacaccaaggccctggtgtgtgggctcacgaaggggatctcctgatctgtgggttgcacagatccatggaaaaagtgtggtttcctgggcagggtagcacaatcactcactgcctcccttggctgcaggtggtagctccctttgccttgtgtggcttccaggtgggccgtcacaccaccctgcttttcctcactctcc

SEQ ID NO: 653423 - DNA, 473 bp, Homo sapiens
gccagttttgaacccagcttatgctctgtaaaggactttatgacattgctcttattcccattcttcacacagaaatatgcttgatgtttgaaccagtcaggtatttgaaatatgtttgagatgtgacttaatgtgaccagaaaagtctaaatgtatttaggaaagaggccacagaattgctaagtctaattttgtcatgcaaatcatgtgcacacaaaactttttaatgcaatatttgagaaaacactacccttaggtaactggcatgacttcatctgctgtggtatgtacaaattcyttcattcgttccctcatttaatgaggacttgttggacacctgcttgtgaaagacacctgtgatgtcagggagacagtcctcaagaccacgctagcttctgacacttgcaatttgggaggattcccaagaccaccctcaggtttgataattcacttggtggactcacagaacacac

SEQ ID NO: 653424 - DNA, 473 bp, Homo sapiens
gccagttttgaacccagcttatgctctgtaaaggactttatgacattgctcttattcccattcttcacacagaaatatgcttgatgtttgaaccagtcaggtatttgaaatatgtttgagatgtgacttaatgtgaccagaaaagtctaaatgtatttaggaaagaggccacagaattgctaagtctaattttgtcatgcaaatcatgtgcacacaaaactttttaatgcaatatttgagaaaacactacccttaggtaactggcatgacttcatctgctgtggtatgtacaaattctttcattcrttccctcatttaatgaggacttgttggacacctgcttgtgaaagacacctgtgatgtcagggagacagtcctcaagaccacgctagcttctgacacttgcaatttgggaggattcccaagaccaccctcaggtttgataattcacttggtggactcacagaacacac

SEQ ID NO: 653425 - DNA, 473 bp, Homo sapiens
gccagttttgaacccagcttatgctctgtaaaggactttatgacattgctcttattcccattcttcacacagaaatatgcttgatgtttgaaccagtcaggtatttgaaatatgtttgagatgtgacttaatgtgaccagaaaagtctaaatgtatttaggaaagaggccacagaattgctaagtctaattttgtcatgcaaatcatgtgcacacaaaactttttaatgcaatatttgagaaaacactacccttaggtaactggcatgacttcatctgctgtggtatgtacaaattctttcattcgttccctcatttaatgaggacttgttggacacstgcttgtgaaagacacctgtgatgtcagggagacagtcctcaagaccacgctagcttctgacacttgcaatttgggaggattcccaagaccaccctcaggtttgataattcacttggtggactcacagaacacac

SEQ ID NO: 653426 - DNA, 631 bp, Homo sapiens
agagttcccctggctgtgacaaagacagtcagaaattcaaagaaaacctttgattcttggtgaatttctgagtcttcttaggcagttagggaagatcctaaagatgcagggatgacgtcttcatgtgtgatatgatggaaatcaggtcacagaacttgtcataagaggacatggggatcaggaagggaagatactggagtccaggtgaggaaacattcactcagcactcagcattcactcattcactcatcactcattcactcagcactaattaagcagagaagagagagaacacaggaacttattaaacattccttgcattgcatgaatgatgaagagaaattctattacagagaaaaatgatgaagaaatakttctgaccctgtattctaacttatgttgtataccagaaaagggggagggaggatgttgagtaaatgacttttgcttttttgctattgctaatgccatcttaaccttctctcagctgaatacatgaaaaagagaaaggaagtaataaagggtcccaggtttgtttctgccatcttcaacatcagaagttttgaagaatttttgataaattgaggaataatggcaaaatctgtagatatctcttattaaatatttgctt

SEQ ID NO: 653427 - DNA, 631 bp, Homo sapiens
agagttcccctggctgtgacaaagacagtcagaaattcaaagaaaacctttgattcttggtgaatttctgagtcttcttaggcagttagggaagatcctaaagatgcagggatgacgtcttcatgtgtgatatgatggaaatcaggtcacagaacttgtcataagaggacatggggatcaggaagggaagatactggagtccaggtgaggaaacattcactcagcactcagcattcactcattcactcatcactcattcactcagcactaattaagcagagaagagagagaacacaggaacttattaaacattccttgcattgcatgaatgatgaagagaaattctattacagagaaaaatgatgaagaaatagttctgaccctgtattctaacttatgttrtataccagaaaagggggagggaggatgttgagtaaatgacttttgcttttttgctattgctaatgccatcttaaccttctctcagctgaatacatgaaaaagagaaaggaagtaataaagggtcccaggtttgtttctgccatcttcaacatcagaagttttgaagaatttttgataaattgaggaataatggcaaaatctgtagatatctcttattaaatatttgctt

SEQ ID NO: 653428 - DNA, 556 bp, Homo sapiens
caaaagaatgaaattgatccctacttcacaccatatacaaaataattaactcaaaatggatcacagacctaaaagttaaaagccaaaactataaaaactctaagaaaaaatataggagtaaatctttgtgacctggtgttatagcaaaaggaaaaactaacaaaagaaaaaaataaactggactacatcaaaattaaaacctttgtgcttcgaagaacatcatggagaagtgagaagacaacccacagaatagaaaaaaacatttgcaaatcatataagggcccaaaatccagaatatataaagaattcttaccatacaataaaaaattaactaatttaaaataaacaaagaatctaaatagacatttctcaaaatatatacatgaataataagcacataaaaagatgtttgacctcattagtcatcagggaaatgtaaatcaaaaccacattaagataccacttcacatccactagsctggctataattatttttaaatggaaaaaaactgcaagtgctgttgaggatgtggagaaattagagtacttgtacgtt

SEQ ID NO: 653429 - DNA, 564 bp, Homo sapiens
gtgacaatgatagccaatgaaggaaagagatattgcaaaagcagaattagcttgacaatggactctagggcctaaaaaagagggagcaatctaagataatcaatctttttgagcttcagtgaccgtgatagggagaagtgttaggttaggaaacaggatgagaagcagcttttatgatgaagagataattatttttcagaccctttaagtttgaggtactagtgggacatccaggtgaaagtctggcagtggactctaaatgtgaaagcggagctcagggaaggaggcagagtgaggcaatgatgtggtgaggcctatctttrctgaggtgtctgcaatcctgaaattgcataagatggccgtgggaaagagcacagagggaagagaggtagtgacactgatgctgcagggcagaaggagggaggagggccagggaaggagcaatctgagaggcaggaggagaagcagcagagctgagaggggtggaagccagagggagacaagcatgcccaggagttgctaggcagccagctgacaggcaagtgagtgagaaaatgccactgg

SEQ ID NO: 653430 - DNA, 536 bp, Homo sapiens
tttgttcccttaagcatattcaaggggggaaattaagctgactacatattattcttctcagcaagtttcaggttcagtaattctgaattggggttggaaaattggaaggaaaactgagttatgggggcaaaatagctgtttaacttaattactaaaatgccttactttcctatcatgatgtccatattgtccacgcagcaattcaagcttcttttaaggttgttttgttaaaatttggtataaaaggtatgccatttattaattcatcaatatattttcatgagttcagtacatgaaaagaaagaaagtaatygttcacctagaggtcaaaacctccattatcttaagtcttggtgacttgcaaaatcctgcatggaaatgaacacaaatatacttgagttaactctgtggtaaactaaatatcctggatattaagcacacttgacaagacagcttgaggtccagaaaggatgctgggtggcgaacatgattattgagtctttggtgacagcttccaggggatggattttattact

SEQ ID NO: 653431 - DNA, 562 bp, Homo sapiens
cataaattgagaacaagaagtttttgaaagaaactctattattttgttttgtagctggactttgatttcttacttgactgaagagcagaattacctggagaagtttgtaaaaatgcagattcccagatgccagcacaatttctttycttttttttttttttttttttttgagatggagtcttgctctgtcatccaggctggagtgcagtggtgcgatctcagctcactgcaacttctgccttccaggttcaagcgattctcctgtctcagcctcctcagtagctggcattacaggtgtgcatcaccatgcccggttaatttttttatttttagtagagacaggatttcaccattttggacaggatggtctcaaactcctgagctcaggcaatctgcctgccttaacttcccaaagggctgggattacaggcctgggccaccgagcccgacctgccaacacaatttcaatgttagtttctattaagctctttgaataattctgagccccagggaagtttttgatcatactcccttgagttgctcttagatcgggtttaaaaaa

SEQ ID NO: 653432 - DNA, 562 bp, Homo sapiens
cataaattgagaacaagaagtttttgaaagaaactctattattttgttttgtagctggactttgatttcttacttgactgaagagcagaattacctggagaagtttgtaaaaatgcagattcccagatgccagcacaatttcttttcttttttttttttttttttttttgagatggagtcttgctctgtcatccaggctggagtgcagtggtgcgatctcagctcactgcaacttctgccttccaggttcaagcgattctcctgtctcagcctcctcagtagctggcattacaggtgtgcatcaccatgcccggttaatttttttatttttagtagagacaggayttcaccattttggacaggatggtctcaaactcctgagctcaggcaatctgcctgccttaacttcccaaagggctgggattacaggcctgggccaccgagcccgacctgccaacacaatttcaatgttagtttctattaagctctttgaataattctgagccccagggaagtttttgatcatactcccttgagttgctcttagatcgggtttaaaaaa

SEQ ID NO: 653433 - DNA, 616 bp, Homo sapiens
caagatacagtaggggaagtagttcatttgaataaaaggaaagaaatataaaggtaatttgtggttattacagagaggttgttgaacagagtggttaagagtaagggccccagagccggacagggcaaacaccatctctgcactagctagtaaatgacttgggcaaggtatttaacctctctgtttttgcatttcagcatcttyaaaatagaggtaaaaatagtacctactactgagaattgaatgattcaatactgtatagcacttagaccagcacctgtcatacaataagttcttaataaatgtgagctgacatcatcataattagctactggttaaacctcttattcccactttgcaagggagtcatattcttttcattttaatctgaatttaaaagtccatttccataaaaaagtttctttacagtttattagcaaatagtaaacattttcttctttaagtaatttgaagaaggtaaaatttttatgagcaatttctttagaattttttttaaaactgatttttcactatttttttactgaagtaaacaattcttgaaggtaaaaatgcgttcacaagatgaacttcaagacaacaagtactctaattttag

SEQ ID NO: 653434 - DNA, 619 bp, Homo sapiens
aagtagtagatatggcaaagaactgaagagttaagatagccctggaactatcccctcttcctacagtctttactaacaaatatagacagaaaagcattcattgtatcagcagctccataccagatgcagaaggatatgttgctttgattcagtaatgaaaccacatctgggacagcagctgtaattggagttactacctaagtataaaacaatccactcttattctctaagaccagccagtcttctgcacaggccaagtgggtgagttgatggggatgtggttgggatcaccactactgtttcatgatgctgacataatctctgcaatctacaattcctccagaaatgtcgttttattttagttttactcttttcaaaagctgaggcagttctagttgtttycatgtggcctttcctaccgtaattgcctttattccacgtatcagggaatgaatgtgaggatctatcagtggctgagcatgactattccaatgatgccttctagaactgcagacaaaaaaaaaatcacaaagtggattggggaaatccgctggacctgctttttgaaatggacccgagtcaaaactccaatggtcactggatctctgtaagctactac

SEQ ID NO: 653435 - DNA, 671 bp, Homo sapiens
tggtcttccatgcacagcaaatatccaacacaatgctgttttttaataagcaaagctcacaggcaagagcattgtccaaaataggaatgttcacatactatcagttaagagcactctcttgattttcttgctaaaacaagattattccataaaaattaatattctgaaaacatttatttacttcaataattttaagagggcttaaaatattagaatactaaaattttcctattgttaataaaccataattttgagatcccaataaaactgctgacttaatggtgatattaattatctttattagccatttattttcatggtttaaastaggagtttgtgctaacaaagggctgcacaaaagtgcaaaacagtcataaaaacccagtgttttgactctcttaatttcattacccatagaaaattgaaacaaatgtagtcattcttattttaatgatttataacggtgaactttgcaaatttaccagatacagcaataaatatttgttactgaagtatttactaaataactggcattgatcccaagaattatcctaaagggattacatacaccaagaataaaagtacaaaatttatgaatacacctgccctgtctaatacagtaaccaccagccacaagcaggtattgagcacctgaaatgtggctattgcaa

SEQ ID NO: 653436 - DNA, 567 bp, Homo sapiens
tgctcctgttgttagcaataagaagatattctagttatatattgatagaactggttttaaaaaaagcagatactggtatgtttttcctaaagtaaacaataagtacagggatgatttgttttataagagataaattaattgataattattccatttgcaaaatcaaatcaagtatgctcttagaatctctttgaataagaaaaatctgtgttgcctttaaaatatgttctttcaattaaacattacaggcatttttattaaaagtaggaagaaagacaaaataatctactagttccactcatctgaaagttccaaccaacagaataagtaaaagaaaggaatatacaattaagaaaggagctatcaatgcatcattatttgaatatgatataattgtctatgaaagacaacttaaaatctaataaaaggtcatactatgtgttagaatgtaactattaattgctcccccacatataagaaattaactttttagaaaatgtaattgaaaatgtacagcatacatcraaaattcacaatgccgaaaaatatgcaagtatctagaaataa

SEQ ID NO: 653437 - DNA, 433 bp, Homo sapiens
aaacaaaaatgcaatcagtcaaaatggcaacatgctaagattgaagaacttggccacagagtattctccccacctcagaacctcagaccttgcctaccattgccaacctaaagctgcttgcctaccattatttggggacttggctttcagctaccacaataagaagttaaatcatcttctctacagtctctcctattagtagaggaattctaaagcccataggagaaacaggtctcgactatacataaagttttcttgcatcataaaattcaaattatatgaacatttacaaaatggggattttttcttcttacttcaytgagttgatataaaaataataaaataagagagtaaaacaggagttacaaagggcagagagcagggtgggagtggggagatgtaagtcaaagggcattaagttgcagttatgtag

SEQ ID NO: 653438 - DNA, 665 bp, Homo sapiens
ttcagctaccacaataagaagttaaatcatcttctctacagtctctcctattagtagaggaattctaaagcccataggagaaacaggtctcgactatacataaagttttcttgcatcataaaattcaaattatatgaacatttacaaaatggggattttttcttcttacttcattgagttgatataaaaataataaaataagagagtaaaacaggagttacaaagggcagagagcagggtgggagtggggagatgtaagtcaaagggcattaagttgcagttatgtagsatgaataagtctagagatgtaatggatagcataagaactataatcaataatattgtattgtataatgaaaatttgccaggagagtaattttatcactaaaaaagagctatgtgatggacatattaatttgcttgataaaagtaatcattttactacatatacatatatgtatatcaaaacatcacattgtctaccttaaatacatataataaaaacaaaaataataaaataagattatgtctgttagagtgcatcataaactgaaaagtgtaacacaaatgtatggcactgccatggtaagtattaattacaacaaagggatggatttctaatggaattttaggcagcgtgacagcaggtactttggttcagaagc

SEQ ID NO: 653439 - DNA, 533 bp, Homo sapiens
ctttcaaacttgaaatattctagtcatatgatattaaaaagaaacatgcatgtaaatatagtctttaaatgtataataaatgcttgggtttgtattagcaaatatatacaaagctccaaatctctatctttcatgggctttttcctcttatggctattcatggacaatttagatctgcaagttttaaccatttaacttcctgagaaaggaaatttaaacaacaaaagcaaatatgtccccaactcacgtatggaagtagttatttcaggttaattattatcaagaactgtgcaagactaagaatgtgattaaacattagcctgtgagawatttaacagtggggttctacaataaaaacagaatattgttctttctaggttttttctaaatggtcccaaactacatatgcgaatgaagctaatgtctaaataattaaatgataatgtcattattattcaatgtaggaatacacttgagaatcaaatcgaatcagttcttttccccttgtggcacaataacaactcatgttcaac

SEQ ID NO: 653440 - DNA, 521 bp, Homo sapiens
atacaaaaattagctgggcgtggtggcgggcacccgtaatcccagctacttgggaggctgaggcaggagaatcacttgaacgcaggaggtggaggttgcagtgagccgatatcatgctactgcactccagcctgggcaacaagagcgaaactctgtatcaaaaaaaaaaaaaaagaaaaattaagtattagactttgggctttaacttacgagaaaattttacttttccctcgtttttctagaaatttgctaggaagttacatgtgtaatttttgagttgggtatctctatgagaagtggctaattggaaaccttccaaaagtggtaaaataaatagctgggctagctaaggtagtttgttagaatataaaatatgaaactgagtatctgtttttgtcatcagaagtgggacatttaggaaagggcagttgttttcctgtaacwgttttagtaaatatgaaaataacccacaatgtgggaagaaaactttgtagacaagcaattaagaaaatattcaataa

SEQ ID NO: 653441 - DNA, 563 bp, Homo sapiens
aagatcatgtgaccaattgtgcattcagttttcagaattctttgctatatgatttggattaattctatataattttggacttttaaatattaaggttaaaaaatacctgtatctaaaattgattctgttaactgttgtcttaaaactaaaggtattaaagtataaaattaaaatttgcaatttttttwaaaaaattgcaattttgattctcatgggggaaattggagataatttttttttttttgcctctggagtttaaagtttccttatggagataagttttgtgattcctgtaatagatgtgtatgttttctatttgagagttaaaacatttgagagttaaaacatttagttttaatacaacctatgtatatatacttctgtgttaaattttgctttgtcattaataaaatttaaaaatattcactaattgtgtttgtcacacaaagtaattctcaagaatgcatttaactggaattataagtacatgtgtggggggtagaatttcaaaactgtttctcagtctcactaagtaggacatatttaagcttgaaatagagctt

SEQ ID NO: 653442 - DNA, 579 bp, Homo sapiens
taggagccgcggctcggcttcgtctccgtcctctccattcagcaccacgggtcccggaaaaagctcagccgcggtcccaaccgcaccctagcttcgttacctgcgcctccagcggccctgcgtcctctgcgctctcatccttacaggggccctagacggccagaactgagcgacgcggcctcgcctcactccggcggggaccgttatgacaacccgcaactgcccgcggcacaccgcggccctccggcccacacccctccggcccgccccttagaccgttggttggtgctttccagacgcgaccgaaggcgcctgaccgccgtggccggctgcctattggtttgcagtactgtcgctcaggtgcagttcccacttccgcctstttcttccctttcctgttaggcgagagctgcgaaaggcgagagctgcgaagggccaggtgtcgggcgctgtttctcggtaagctaagaacgaggctgtagcggctccaataggagcctcccttgctcagaatcctgggtaggactaggccttcttaggaaagggaaggcgagacctatggccctcgccggccttagt

SEQ ID NO: 653443 - DNA, 598 bp, Homo sapiens
acaatgacctccataggcttgaagaaaagggatggagagaaatgtaccaagaaaatggaaaacagaaaaaagcagaagctgctagtctaatttcagaaaacagacttcaaaataacgacaattaaaaaagaaagaagagcatcacataatggtaaagggttcaattcaacaagaagaccttgctattctaaatatatatgcacctaacacaggagtagctagattgataaaacaagttcgtagagacctacagaggcttagataaccatagaacaatagtaacagatttcaaaacctcattgacagtattaggaagattatagaggcagaaaactaacctrgatatttgggatctgtactcgacattccacctaatgtacctaacagacatctactgaactttccaccccaaaacaatagcataaacattctcctcatatgcatatggcacataccctaaaatcgaacacacaagaggtcataaaacaattctcagcaaattcagaaaaattgaattaataccaaccacactctcagaccacagcacaatcaaaataaaaatcaatataaagaaaattgctctaaaccatataattac

SEQ ID NO: 653444 - DNA, 576 bp, Homo sapiens
tccctttaaagtcctatggatatccatacttcagctgtcagagataaatatgcccatctctgtatgtaggaagcccctgtggcctgcttttatgctcatccttctgcacagagtccctaattatcttcttttgtcccatgccgaaggggtttggggccatgctttgaaaagaatcccaccacagtcctctacctcaagtttcctgctcaggtctaaggctgatcttattgcagtggaactgcagacaagagctaaacaatgsttcttcttcagtagggtggtcagaccacagcagatgaccagcaggccagtcaccatcagcaaagtccaggtagcccaaggcccccacgcctcatacatggtggactgtggtcacccattactgccaagatatatgctctgtccttcctctaagtctagcacactcacattggcccttagcaaagcatccagcagtggagaagattgctagagatagctaagttagtgaggtggccaggtatggctttcagggtccctccttccagggcttgcagcctattgtagtggaggcccagactagccagggggaaccag

SEQ ID NO: 653445 - DNA, 561 bp, Homo sapiens
cagcatcacctatttttattctcacccggtttcgtaatagccctgatctcacgtgctccctgaggttttgtaaacttcaggtagaaatgtggacttccttcgttctggacatttgctatggagggggtagggcttatcttttcagaaaaagtcaaatgactggtaccactccttgaaaccctacagcactttccagacctcagagggagggagagagaggcagagacagagacagagagacagagagagagatattggggccgctctttcctggcyggttcatcctggcctattctcaatccaccaaggccccgaagctcatctcccctcctcctctgcctcctcctccaccctgtagacaagcggccattcctttctgaagaacaggctgagacctttctgggacctgctctttctggagcctctgttgctccctgtctgggtctccacacgcctccttcctggccctttttcctattgaggaatcagcttcaatgtcacctccaagtgtgaccttcactgacgacacagctcagcccagtcctgcctgcttctcattta

SEQ ID NO: 653446 - DNA, 508 bp, Homo sapiens
atgtaaacaaaagcaaaatgccaagaacaatctgggcacatagagagtgtgttacgaagtgtctgctagctctattgtggactaaatcaaaggctacacacagaggagatacaattaagtcatcctgaggagaataaggacttytgaaagaagtttgagaagggtttggaggaataactagaaaatgggctgggcaccgtggctcctgcctgtaattgcaacactttgggaggtggaggtgggaggatagcttgagcccaggagttcagggctgcagtaagctattatagcgccactgcactccagcatggggagaagagcaagactctgtctcaaaaaaaaaaaaaaaaaaaaaaaaaaagaagaagaagaaaaaaaggaaatgggcaggtgcagacttaggagaaaggatgtaatgcattttggatagaagacagtgtgtgcaaaggcagactttgaataatgtagtgtaaagcaatagcaaataattccatggttttggagcata

SEQ ID NO: 653447 - DNA, 531 bp, Homo sapiens
tgactcactaatgatgtaatagtcccttaccttattctgaactatactttatttcctctttcacagaattaatattttttcaagattttttctctgactacaaatgttgtatgtgttcacacagaaatgctgaaaatgtaaataagctcaatgaagaaaattaaaattcagaattctgcaatccaaatataatcacttaaaaattatattgtccaatacagtagccactatttatctttccaatttttaaataaatttctaacaagtactgtttcataatttgcctttcattcaccataacatataaaatttctatgccattaaatattttctttarcatcatcttttttccccagctttattgaggtataatattagccaaagggtacaaaatttcagatacaaaatgaataagttctagggatctaatgtatagcatgctgactatagttaataatactgtaattacttgaaatttgggtacttgtcattacttgaaatttgctaagaatagaggttaagtatgctcac

SEQ ID NO: 653448 - DNA, 617 bp, Homo sapiens
ctcaaaaaattttatatactttagttcaacaaatattcctccccacccytccaaaaaagaacaatgtaatcactttaatttttgttagcagtcagaaaaatttttatttaggaaaaatattccctcaatatttattagataatgaatcttatttaaatgaatagtttacttttacttttctgtgtagaccaatttaaaagtatgccactttcctttcataagcaaactgtatttgtctcattctacatggcagatcaaaaattaatacttctttctgccttaaaaattatgagattttcctcattatgaattagttgtttttatatggattactgttgtgctgctaaaaacaaatgttagtaaaagttatggagacatgggaaaaaaacaaactataatactagttaataatgaaatacattaaacattgtttaaatattaaacagtaaaatactcctatattaaataaataattaaaaattgcatttgtcaatgggaatataggccaataccaccaataaaagggatggtctagtgcaaagggtggccacaaaacaacaacaacaacaaaaaatcaaaaaccacacatacatacagaaaagaaggaagaggaaaca

SEQ ID NO: 653449 - DNA, 537 bp, Homo sapiens
gctaggattaaaggtgtgagccaccatgcctgtcctaaaaattcttaatctctcagattctaactcttgccacacatcctccttaagatggttcccagtgggatataaggagtttctaggacctgacagcagtcagggagggaaacatctatccactggccttggattgcaacacctgcttccacatgctggccttattcttacaaagcctggtcctataaggaaccctacctggagaagtccacggcacccactgcagctgatgggtgatcttgctaccatttgttcttgtctcctgtgtgcctagtcacattatgagcttctcttagataactatacccaggaagaaagaggctggatccagtatttttatgatcctgcatttcaaagaaaaagttttggcaagaaacttctgaaaaataatatatattaggctcaccttaataaaatagtctagactttgartggaattattttgtattctttatttaagaaacataatggtgctatgaagtaggcaaagatcaaatatttatg

SEQ ID NO: 653450 - DNA, 537 bp, Homo sapiens
gctaggattaaaggtgtgagccaccatgcctgtcctaaaaattcttaatctctcagattctaactcttgccacacatcctccttaagatggttcccagtgggatataaggagtttctaggacctgacagcagtcagggagggaaacatctatccactggccttggattgcaacacctgcttccacatgctggccttattcttacaaagcctggtcctataaggaaccctacctggagaagtccacggcacccactgcagctgatgggtgatcttgctaccatttgttcttgtctcctgtgtgcctagtcacattatgagcttctcttagataactatacccaggaagaaagaggctggatccagtatttttatgatcctgcatttcaaagaaaaagttttggcaagaaacttctgaaaaataatatatattaggctcaccttaataaaatagtctagactttgaatggaattattttgtattctttatttaagaaacataatggtgytatgaagtaggcaaagatcaaatatttatg

SEQ ID NO: 653451 - DNA, 584 bp, Homo sapiens
ggcacataaaggaaaaaaaagaaaaatttaattttttaacccaattaagaatttcttcacacattccatggtttggatggtgtttctattcaaacatttttctgtgcatctctgaaaattaaactacttaaaggatagagaaacagataaatttgagtaagccaatagagtataaccagtaagctaatatataaattttatgataaccaattggaatgactaaaatggcattctattatatacttcttatgcaaaaacatttatttctttgggatctaataagtgtaaaagactacataccaagtcacttccaaaagtattgacagaatgactaattayatgacaaaggttcaactttctatggagatatgagtattttccaaattatttgtggcttgaaaaatagatatgcttggaacaatggaacaatgtgacatggctaatgatattctctatacctaaatggctttaaattgttctcaattatcagtcccacttttgcttctaaagtgaattgcttcaaggtatagggcatcactggtattaaactgataaacccctcgcttctgcccttctgctttctg

SEQ ID NO: 653452 - DNA, 584 bp, Homo sapiens
ggcacataaaggaaaaaaaagaaaaatttaattttttaacccaattaagaatttcttcacacattccatggtttggatggtgtttctattcaaacatttttctgtgcatctctgaaaattaaactacttaaaggatagagaaacagataaatttgagtaagccaatagagtataaccagtaagctaatatataaattttatgataaccaattggaatgactaaaatggcattctattatatacttcttatgcaaaaacatttatttctttgggatctaataagtgtaaaagactacataccaagtcacttccaaaagtattgacagaatgactaattatatgacaaaggttcaactttctatggagatatgagtattttccaaattatttgtggcttgaaaaatagatatgcttggaacaatggaacaatgtgacatggctaatgatattctctatrcctaaatggctttaaattgttctcaattatcagtcccacttttgcttctaaagtgaattgcttcaaggtatagggcatcactggtattaaactgataaacccctcgcttctgcccttctgctttctg

SEQ ID NO: 653453 - DNA, 592 bp, Homo sapiens
aatcatatatatgtatatatataatcatctatgtctttattcaaaatatgttaatactattgtcctctctgtctcaaataacacattttaggaagctgtattgctattgtttctaaagcttaagataaataagtaaaaattgagttatctgaaacatttcactctcaatcatataaactgaagaaaatgtgataaaaagtgcttgtrcttatgctgatgaattatacaatttttcataagttccagaaaacctcatatttgattatatatgttttttaaatatgaaatttggatatatatttgcaagaactcacattcaaaagatagcattttataaaaaatctaaacattataaaattcaatattaactattgaagcttaaattaaattatgaatatgctttagtttttattttatagtttcaatatttaaaactatgtcttttaaaataaatttatataaatgaataattattttttcaaaatactatttatatttataagtttatttttccctgtgtcttaagacagagattttattttggtaaagagacaaagcaaacagttttacttaaatttatcaaatgctgaaa

SEQ ID NO: 653454 - DNA, 602 bp, Homo sapiens
tctgtggcaggacatgcctctggccagggaaaggctctattctaaactctagtcaggtgcaggtcggacaaggctgagcactgctggtaaggagaggcgtgagaagcagcgtgaagggcgagaacaatcctggctcccaacaggaacagagtgtgtgtgaycttcatgatgatagcaaacactcacatgcacagttgtaagcaccttatgcttgttaattcatttaatccacagataaacctcacgaggtcagtattcctattagtcctactttacagttgaggaaatggagacacacagaggctaagtaactcacccgaaattgcacggttagtgagtgatcaagctaagagtgagtccgaagtctgagcttacagttggtaagctagtctaccttgtgggcaacagaaacatatgggtacttaactgttggagtaaatgttggcagctcataaggctgtttgttgctgacacccttttcttgaggatgcctttagttgcttccaagccctgccttacccccatggtgccagctgacaactccgcccttcccccaggagcaggcaccaaaacaagactgtgccaacccggctggttttccc

SEQ ID NO: 653455 - DNA, 614 bp, Homo sapiens
ctttttggatgaatctttagggtttacaatcatatcatcagtgagcagcaacagcttgacttcctctttactgattaggatgctctttatttctttcttaaaagcaaggaacttttaagtcctgtaccagatgcaaattttagtaatttggaatgctctggctagcacttccagagctatattgtatataagtggtgagagtgggcattcttgtcttgttccagttctcaggggtaatgctttcaacttttccccattcaatgtaatgttggctgtgggtttgtcatagattkcttttattaccttaagatataccctttctatgcaaattttgctaaggattttaatcataaagtgatgctgaattttgtcaaatggtttttctgtgtttattgagataatcatattatttttgtttttaattttgtttatgtggtgtattgtgtttattgacttggacatgttaaatcatccctgcatccctgataggaaaccaacttgatcataatggattgtctttttaacatgctgttagattcggttggctgttatcttgttgaaaattttggatacaggtttatcagggatattggtctgtagttttttgtgttttt

SEQ ID NO: 653456 - DNA, 583 bp, Homo sapiens
taagcaaacaaacaaacaagcctcacagagcacacaagaaatttctgaagagaagtttcccaggcttttgatgaggcgaaacaggaggaccatagagcagcagaggaagaggaagggggaggatatggaggttacctgatggcctaattggttccgacaatgcactcctttgttgcagagaatctgaatcatggaagaagcaaataaataaagaaaaacatatggcagctaagtcatatcaatctacattaagaaaaataaatgagaggatattagggagaagatcctgagaggagaaaggcagatggggactcttagaaagtattcttaaaatgggcaggaaatgtgaaaagggactttaaaaagaggattgtgggatgagcaatgaataagtaaaagggtrcttaacctcatcactcatcagggtagtgcaaattaaaaccacaatgagataaaaatactaccagaataactaaacaaaaaatgatggatcaaaccaagtgttggccaggatatgcaggaattgaactgtatgacagtgccggtgtgagtgtaattagtgcaacccctgtggtaaactatt

SEQ ID NO: 653457 - DNA, 602 bp, Homo sapiens
aacttacacatgtgataaaattatatagcattaaacatgcacacacatgcaaatacacaaaggcatgtaaaattggtgaaatatgaataaggtcagtggattatattaatgtcaactttctaattgtgacattaaactcctcacataagatgtyatcattggagaaaactggatgaaagatatatgggatctctttgtattatttcttacaactgcatgtgaatctataattatctcataataaaatgttttcttttttttaaaaaaaaaaaggtttaggggagaaggaggaaatatacactaaaaagtaagagtctagcatctacctagtcttccaatttctccattcccttcactaggggtaaccactgtagtattttcatacatgtccttccagagttagtctatagtctcttcatatataaatatgcatgaatgcactcacacatttggatctatatttttcacacaagttttaacactatgcacactttcccctaccttgctttatcaacttatatttgagctttgagtagtgacagagcttccttgttttaatagctgcatagtattccattttatgaataaatcctcatttattt

SEQ ID NO: 653458 - DNA, 511 bp, Homo sapiens
aaccaatcttctcgagagcaccgtgaatgtgccaatcgttgtcaaaacactgtcaatgaccaaatgtggagatgatgtgaacagtgcccaccaagaggagtcaggggtgattttgaggtttgtgacctatgcagataaatggctagtagtgccacctactgagaaaatggttaatgaccaagtatttggggtagtgggggaggatgagcagtatccctgagctttgtcttgggcatggtgagtttgatgtgcctttgagacatcccaatggatatgtcaaggtagcagacrgaaaaataggtctggaactcagcagagcagtctcagctgaagaactaaatctgggacgcattggaggggatggtctgaagctgtggtcttagataacaccagatctccaggggagagtgtatactcaagggtatcactcaaatcaagcattcaatgactcgctgtttcatcctgctgaaccttcagctggaattgccccaaaagctgtggtaggggaatt

SEQ ID NO: 653459 - DNA, 537 bp, Homo sapiens
agatctcacccctaactgggtcccagactyctggggcgtagggcctgaaagctcctggagcctagacagaattttccttctaaagtcatcgagttgtacaggcctaggcgaactttcaaggaacccaagaggccatgtcctgactttgttcctcttggggtgaaacccagagacatggctacagcctaggtgctgctgccgctcagctgaatgcctgccccccagccccatgtttccccacatccctttcctctgtgcactgagaggggcagtagattatccctcgtcgtccaggactagggcccccagtctctgtaaagacaagctccttgggttctgtccagccccaatgccctgttcatcctccctgcagttcagcggtcactctcccaaccaccctgagtgggcactgaaaatccccctctgccaggaagccttccttcccagactaacacaacgagaagggtaactttccgaccccttgtctagtaaagaggggcctcccaaggcacctgacttttcagctgaccacccgtc

SEQ ID NO: 653460 - DNA, 568 bp, Homo sapiens
ttctgcacaccatgttaataaatcagtagggagatattttcatgataagaaatgtattgagggaatatgagagcaaactgcctaccttcgtttatgccaaagacactgaatgttaaaaatgcaaatagacacactcttttctctgcatgcctaasactatgcaaatacaaacttaggacaagggccaatacaatgtaaaagaaagtaaataagcaagcacaatctcttgacatattttgtgcttcagtgatactagtcttctgtttacaaaagaatttcaaagttctgatcttcatgtttaccccctgctgcaagatgtctggtttggaagtattttttttccagtgtgtttttacacaaagcacacatgagattacttatctaaaataaatataaatattcgtgagcacctacatgaatatgggtaaactttattatgaaaagagcattagccagcactgcaggctaatgtttaatacacactaaaggaaggagaaatcgtcaagaatttaaatttaataagtgatccgtgatattagcatatgttgaattgtaatgaatattcagt

SEQ ID NO: 653461 - DNA, 581 bp, Homo sapiens
cgttagtagaaattatgggtcagcagatgaacttgttcttggattgtggacatcagatggatgattcactttttttcttagaaccaaatagatttctaacaataatgtaagtttgatattatattgagtttttaaaaaggaaaaacagtgagatgttacctcaattcagtaccatccgaatttacttttctttttttcatcaaattttattttaagttccagggtctatgtgcaggatgtgcagatgtgttacataggtaaatgtgtgccatggtgatttgctgcacagatcaactcatcacctaggtgttaagcccagcctccattagctattattcctgaggctctgyctccccatgcacccccgacaggccccagtgtgttgttccccccactcccgatgtttctatgtgttcttatcattcagctcccacttataagtgagaacatgcagtgtttggttttctgttcctgcattagtttgctgaagataatggcttccagcatcatccatgtccctgcaaaagatatgaatctcattcctttttatggctgcatcgtattccatgttgtaaatgtac

SEQ ID NO: 653462 - DNA, 581 bp, Homo sapiens
cgttagtagaaattatgggtcagcagatgaacttgttcttggattgtggacatcagatggatgattcactttttttcttagaaccaaatagatttctaacaataatgtaagtttgatattatattgagtttttaaaaaggaaaaacagtgagatgttacctcaattcagtaccatccgaatttacttttctttttttcatcaaattttattttaagttccagggtctatgtgcaggatgtgcagatgtgttacataggtaaatgtgtgccatggtgatttgctgcacagatcaactcatcacctaggtgttaagcccagcctccattagctattattcctgaggctctgtctccccatgcacccccgacaggccccagtgtgttgttccccccactcccgatgtttcyatgtgttcttatcattcagctcccacttataagtgagaacatgcagtgtttggttttctgttcctgcattagtttgctgaagataatggcttccagcatcatccatgtccctgcaaaagatatgaatctcattcctttttatggctgcatcgtattccatgttgtaaatgtac

SEQ ID NO: 653463 - DNA, 618 bp, Homo sapiens
ttttctgcataagcttcatgatgcctgcctaacagagaacagtgaaagacaggttgtgtcagttttcaagctgagacattaagggaatggtaacctccacttctctcctttgggacacttgctgtgtaacccagctgccatgccatgagaaagcataagcagctaaacagggagacttatttggagaaaaagcaggacccccaccaagaatcccagttgaaattccagccaaaatccagcaggaacttgtcagccatatgagtgagaaaataagttccatgacatggagctaagatgaaccattcctgctgagccctgtccacatttcagattgtggcaaaataaatgattgttattgcattaaatcacaaagctttggtgrataaataccagaacacctataaacttctatgaaggaaaactcctgacagccatgaaaacaaatataataatgggagccatctaattttctctgaaggtttaacaaaaaaatgctctcatttaaatatattattatattacaagataagctctcagattataagagtatcactggataggcatttgaaaagagcttgtgttttctgcttggttgggctaaatcatagctatttgtga

SEQ ID NO: 653464 - DNA, 531 bp, Homo sapiens
tgttttaataatttgatttaggaagcaagtcagctcagccaccattctgtgagctgtgcactgcagctgatctgctccctcttgaataaaagggtcttgattgaaaatgccttttgaatccacgtagttcaagtcgtggagtctgttgtaaggcagttttcttaattaaggtaacactttctcctttagcaaatctgcctggaaatgtgcaatggctgtaacaccaraaaagttcatttcttgctcatttaacacttgtaaatggttccaagcaggcaggggtggaggagttggagtattgagaagggttctactccacagaatcattcagtgactggtttggcgtgggctctgctgccttcgccacatgatgcctgaagtcatcaaagtatttcccatctggttagaggataggaaaagatcatggagaatcctgtgtgggaatgtgtgtaggccaggctgaagtggctcatatcacttccacttctattgcattgcttccctctaacgacaagggagatcaggaaatgc

SEQ ID NO: 653465 - DNA, 559 bp, Homo sapiens
gctggacttgccctactgctccaaaaagacagaataggtagaaattacaaggaaactcattttagatcaatcctttctaataaccaaagaggaatcgaacaatatatattacccatcaattgctgtgctagctacattatagccattatcttattgagcttcctaacagtctctgaggtaggagctcagagtagccaagtatatttctcaaagtctcacagctaggaaagggcagagccagaatttgaacacagatctccctgactccagggctgaattttttttactrtacaatgggtacttccctatataagggtcaaggatcatctgccagagttattatttcatacaaaggagatttttacattagaaagcagattattaatgccaccaataacaatagtaacatgcacttcttgcagtaacatacattatctctttaatcatcacaataacattccaaggtagatcttattattatctatgttttccatataaggggacaggttcagcgaggtaatggaatctgttcaagttcatattcagcatgtaaagtagc

SEQ ID NO: 653466 - DNA, 559 bp, Homo sapiens
gctggacttgccctactgctccaaaaagacagaataggtagaaattacaaggaaactcattttagatcaatcctttctaataaccaaagaggaatcgaacaatatatattacccatcaattgctgtgctagctacattatagccattatcttattgagcttcctaacagtctctgaggtaggagctcagagtagccaagtatatttctcaaagtctcacagctaggaaagggcagagccagaatttgaacacagatctccctgactccagggctgaattttttttactgtacaatgggtacttccctatataagggtcaaggatcatctgccagagttattatttcatacaaaggagatttttacattagaaagcagattattaatgccaccaataayaatagtaacatgcacttcttgcagtaacatacattatctctttaatcatcacaataacattccaaggtagatcttattattatctatgttttccatataaggggacaggttcagcgaggtaatggaatctgttcaagttcatattcagcatgtaaagtagc

SEQ ID NO: 653467 - DNA, 391 bp, Homo sapiens
aagctttctcctaaacctattagagaggtataaattgcaggcatttcactaaacagtactcttcttacctcttacctgctaactggcatatcttatactgtcgtttagatgaaataagagattagaagcaattttagagtttgaataatttctctaatactstaagaatttagtgaactatcttatttagacacataagttttattatggggtagcatgcaagagctcttattaatctattttatggaatttggctgaactcctaaatcttggattaaaagaaagagctttttaagctcaatgttgctcaggattagagaataataaaaagtcagcagaaccccaatctgtattctctatagcctattttctgtgttgtgagcaattgcag

SEQ ID NO: 653468 - DNA, 391 bp, Homo sapiens
aagctttctcctaaacctattagagaggtataaattgcaggcatttcactaaacagtactcttcttacctcttacctgctaactggcatatcttatactgtcgtttagatgaaataagagattagaagcaattttagagtttgaataatttctctaatactgtaagaatttagtgaactatcttatttagacacataagttttattatggggtagcatgcaagagctcttattaatctattttatggaatttggctgaactcctaaatcttrgattaaaagaaagagctttttaagctcaatgttgctcaggattagagaataataaaaagtcagcagaaccccaatctgtattctctatagcctattttctgtgttgtgagcaattgcag

SEQ ID NO: 653469 - DNA, 467 bp, Homo sapiens
atgaattctctagacccatttccggccaattccttccctcttgtttgctcagggaagcatggatggagctcagggtgaacgggtcaaaactgttggggycttccttttgtggccttctcctctttggggcccacgagcctcagggggagatactggggtacccaggcctcagccttgaagagtgggaaaactggggccctagatccagaggaagttgcgtgaaggggaaggtgggggacgaaaggggacaagaagaaaacagggctcagcaggcatgaggacaagctcccaagagctggcaggctggcaaaggaggcggcagtggggcagctgctgcgctgagaatgggagggtgcgtcctcgtcccagccatgccaccaactcactgggtgacctttaggcaaactgcccattttcttactttggatgaatttaccaactcattttctgattctacagaagacata

SEQ ID NO: 653470 - DNA, 500 bp, Homo sapiens
aaatgccaccccacctgtcacactctggaatactaaacatgttttatacctgaaacaactgaaacttttggctaagccctttcccaagagctcttataaataacaggtgagctgcagatattagcatcactaatgatgtgtgcttaacctcaagcctggcaaaatgcttgtactcagcttagataaygctatccctgaaaaaattatcctcactgacaatccgatgtccactgtagacgtcttctttcttacatgtaccaatggcagggcctaatcatcccacccccgaggactcagcacctgagtgtctactctcagtgcatcctgggctcctggcccagaggttttcactggccttgtgcaatagggaaggcaaagtgggaaatggttcccgatcaagaaagacctttctttaaagctggatgggtatccccttcttcacagtgaaaacccagaaacatctggatcctgtcctccaagttagatgcagattaatatgc

SEQ ID NO: 653471 - DNA, 562 bp, Homo sapiens
ttcctgggtacacataagctctaaaacagaagtgtaactctagaggaaggaacaaaatatgaatccaagagttcaggtctatgttttgcatcattaatatgcaaattacttcatatatttataacataaattctgtgtgtcccagtgatgacagctaataagatactcattactggtccaaaactggaaagaaaatccgttggcccaggtgaagaagtccagtgaatgcgggtaatgccctgggctgccgaaagagatcaatgacgggtagagaaattcaattcccccgttaaggtgcaagacggtttctcccatgcaggaccgaggccctctggtggaggaacggaggaagtctccgccccgaaggaggccaggcaggatgaggcaacaccagccaytgggtgcgtattcccaattaagcctttgaagcaaatacaagtttttctcaaactgtttccagtttattcctggagagagtttaagattcagaagcaaattcttcctcaatctgggaagcatctgcttgtaaacaaagaagccacagtaaccacagagctgagaa

SEQ ID NO: 653472 - DNA, 580 bp, Homo sapiens
cttaaaacaaaccaatccgaacttatctatcatataaggattgtccttcacccgggaatccatatgtttatctatataccygaatgtaaagagacaaaatagagtcatggttacagaccctggagccggacagcatgagttcaagtccaagctttgccatttattaattgttgaccttgggcaagtgcctgtgccacagtttccttataaaatggaaataacaactgtacccacctcatttaaccatacccacctcactgctgtaagaattaaactagtcagtaacaactgtattgccctcattgggtaactgtacccacctcactgttgtaagaattaaactagtcagtaacaactgtacccacctcattgagtaactgtacccacctcactgtcgtaagaattaaactagtcagtaacaactgtatccacctcattgatttgttgtaagaattaaactagtcagtaaatgtaggaagtgctttttaagtatttgccattattacttctgttagcctcaaaactctatcattgtttaaaaaaaaaaaaacttttggaattctggaatctgttttccagt

SEQ ID NO: 653473 - DNA, 580 bp, Homo sapiens
cttaaaacaaaccaatccgaacttatctatcatataaggattgtccttcacccgggaatccatatgtttatctatatacctgaatgtaaagagacaaaatagagtcatggttacagaccctggagccggacagcatgagttcaagtccaagctttgccatttattaattgttgaccttgggcaagtgcctgtgccacagtttccttataaaatggaaataacaactgtacccacctcatttaaccatacccacctcactgctgtaagaattaaactagtcagtaacaactgtattgccctcattgggtaactgtacccacctcactgttgtaagaattaaactagtcagtaacaactgtacccacctcattgagtaactgtacccacctcactgtcgtaagaattaaactagtcagtaacaactgtatccacctcattgatttgttgtaagaattaaactagtcagtaaatgtaggaagtgctttttaagtatttgccattattacttctgttagcctcaaaactctatcattgtttwaaaaaaaaaaaacttttggaattctggaatctgttttccagt

SEQ ID NO: 653474 - DNA, 480 bp, Homo sapiens
tcattttcaatagaaggctctagtgtatcctaagaaaagtcataaattatcccaagatgtctcagtcattttctgggctttagctcaatctctctgcaattttctctaacagttgactaaaaatatcactgcaaaaaaagaatagagaggaaaaggatgattttttaaaaacaggtaggaaatatcccttgaaaagagctaggtccccacccccagcccaccttcgtgtaaaatactaatgsatttgacacctaaacccgggaagggaaaaggcaggtaggtgattgagcttttgctctgggccagagccagaacaggggtgcatgcttccccctcctctccttcccatccaccctgcttccccaacagatacatctggaccccctctgtgatgcagatgtcactaaattaccaagacagctccccacagtctgacaggctcagagagggtgaaacttggcttccttcttgaccagacag

SEQ ID NO: 653475 - DNA, 342 bp, Homo sapiens
gcagggtgtctgctagcacagagggtgctcctggagcccaccttctttttcacataaaaatcagcacaagggccaagcagaaagggatcctgtgtcctgatgggtctcctgtcacccttccaagccctcaaggcctagagaggccttcagctctgtcggctctcactggacttagccttaattctttctttgtctgagaagggttagcaagtggaaggaggcagtgattttgtcttcaagtgccgtcctaccctgagcttcyctcggccaggccccatgctgggatctgaagtccccaaattgagcacagcccaggctctggcctcattgaaggcccagcca

SEQ ID NO: 653476 - DNA, 633 bp, Homo sapiens
ccctgtgggcaatcaacgtgctccaatgggcttcagcctcctcagtccctacgcagctccgcacayccaatcaacatgctccaacgggtttcagcccccttcaagccccaggctcccaatcacatccctcattgctgctccagagggattcttcttgcaagaactgtgcaccttctgtgccttaacttcctcacttgccatttgctctgcaacccacaccagatggcatccatctccaccacgccactaaatccagtctcgttaccaacactcccatacatcaggtccagcaaatgcttttgtcgctacattcccaacctctcagcggcactgcccaccggccacatcctccttaaaaatcgttattttagtagttgttatgtgtttgctgttatgtggttgtcctaactctcttcatttaatagaagacatagaggctcagtgggagtgggaatagcttgcccaggtattactgctagtgtgtggcggggccagggttgtaactgatgagccagacccaggttctcgccttcaccgcatgggctccttcctgcccccctggctgccgcgatgccgtctgcgctgctttcctcccgccttgccgaccactccccttcagatgctgtggctctt

SEQ ID NO: 653477 - DNA, 555 bp, Homo sapiens
tgaatttgtacatcaaagaatatttttctttggtgtttataaaagtgagattgaaaaatcatggtttctctcataattattcaggaaaaataatacacaattatgaagaaatttttagatttattttatcttctttcacaaataataaatttacagaaccctcaaaaagaacttcttagarttataattttctcagttcaattcatattcttcacgaataaatcaagtcatggttgcctctatgcaataccaaccaactgaaaagctggcaatgatctgttgagttgagggtgtacataaagatagttctggctaaaggccccatgctggcctcatcaaatgatttttctctgttaaccacagcaccgtgaaaggaacaaaccagaagtgctagaaatcttggtatttctggagtgcattagggcaacatctgaaggatttccaacttggctaatgatgcatattcaactgccaaatttctaatgaggcacaactgaaacatatacattttaaaaaccttatttctacaacttggctaatgaattcaactgacca

SEQ ID NO: 653478 - DNA, 555 bp, Homo sapiens
tgaatttgtacatcaaagaatatttttctttggtgtttataaaagtgagattgaaaaatcatggtttctctcataattattcaggaaaaataatacacaattatgaagaaatttttagatttattttatcttctttcacaaataataaatttacagaaccctcaaaaagaacttcttagaattataattttctcagttcaattcatattcttcacraataaatcaagtcatggttgcctctatgcaataccaaccaactgaaaagctggcaatgatctgttgagttgagggtgtacataaagatagttctggctaaaggccccatgctggcctcatcaaatgatttttctctgttaaccacagcaccgtgaaaggaacaaaccagaagtgctagaaatcttggtatttctggagtgcattagggcaacatctgaaggatttccaacttggctaatgatgcatattcaactgccaaatttctaatgaggcacaactgaaacatatacattttaaaaaccttatttctacaacttggctaatgaattcaactgacca

SEQ ID NO: 653479 - DNA, 496 bp, Homo sapiens
gttcctctcacaaccagaaataagaagttttaaattaagggcagcagagatcaatccgtataaataatatctaataatttaacaatgaaataaagatgattcaattaatgtcatattataatmaagtttagggcatttctagcactttcctagtcattttctatcactttttactctgtagtcaaaagcctattgtatctttgagaataaataccttgtgccaacattatgatgttgctgagccattgtcttctctccttcttcctgacaaggtccattgctatgggccttgaatgtgtcccccaaagttcatgtgttggaaactgaagtcccaatgcatcaatgttgggagctggggcctagtaagaggtggattaggtcatgagggccatgccttcatgaaggattaatgttatagtggaagtgggttagttattgtgatagtgggcttgctgtaagagcaactttggccctattttgctctcttgctctctca

SEQ ID NO: 653480 - DNA, 469 bp, Homo sapiens
acaaactcacagctaacatcataccgaacgggaaaagttgagagcttttcttctgagacctggaacaagacaaagatgaccactcttgtcacttctgttcaacacagtactagaagtttgagccagaccaattaggaaaagaggaagaaataaaaggcatccaaatctgaaaggaagaagctaaattgtctctctttgaagacaacatgaacttgtatatagaaaagtctgaagactccaccaaaaaaactgttagatctaataaatgaatttagtaaagttgcaggaaacaaaatcacatacaaaaatgagtagcatttctatacattaacagtgrattatctgaaaaataaatcaagaaaatattcccctttacaataactacaaaaacatattaggaataaatttaaccaaggaggttaaatgtatatctctacactaaagactgtaaaacattgatgaaagaaat

SEQ ID NO: 653481 - DNA, 409 bp, Homo sapiens
acctagctatgtctggccaggtctctgcccctgaatattctgattggaactgaaccactgacatggcagcccacttgtccaaggcccttatttatatcaaagaattaaacattaggagcatgtaacagcttaaaacattcaaattaataattacacacataaaacaaatctttttctgaaaggcttgtatagtatcataaaccttgattgttccacagaagtttgacctaaaaatattgtcaaaaaagtttctttcatgaaagtctttattatccatcagctagatttyccagataacttctgatttttataatttaaagaaaatattataaattttacattattaggttctttcccaaattacatcaatgaagttccaaaaagggaagagcacaaaccaaaggtaaag

SEQ ID NO: 653482 - DNA, 415 bp, Homo sapiens
tcaacttaacaatctaatatcccacytacaggaaccaaaaaagtgagaacaaagtaacccaaaagctagaagaggaaaagaaataactaaaatcagagcagaactgaacaaagttgagacccaaaaatccatgcaaacctaacaaacccaaaagttggattcttgaaaacataaacaaaattgatagcccactagctagattaccacagaaaaagagagagaagatccaaataagcacaatcagtagcaaaaaaagttacattacaactgatcccacagaaatataacaaatcctcagagactattatgaacacttctatgcacacaaacaagaacatctagaggaaatggatacatttctggaaacacacaacctcccaagactgcatcaggaagaaactgaaaccctgaatac

SEQ ID NO: 653483 - DNA, 360 bp, Homo sapiens
ttgtctcttcagggaagaactatcaggaagataacatttcattttcctatgaataaatgctgattaatgaatggcaatcagactcttttcttgtacttctcacaaacatctccttctctttcaaaacttggctcaaatatccctcattttggtatgcatcattcacttctcccagataattactggcctctcctttgtgttccttgttcacaactttgttattatacttaatattttataccatggttatttctggatgtctttctcccactgtagagtgatgatgtgcttgagactaccaccatatcctgttcatcactgaaytaagtacagtccattataaagtaaatactgaatata

SEQ ID NO: 653484 - DNA, 642 bp, Homo sapiens
ccaaagccccatctcattgtataattattattaaaataaatatttaaatagcaacaacattagaggataagcactttacctaaattatctcaaataatcatcccaagaatccagtgatgtaggtactattatctcctttgaacagacaaaaaaatcgaaatgcagacaggttaacttgtccagagtcacatagctagtagtaagtggagaaggtaagacccagatccaattggcgcacgattctttaacgcagtgaaaaggggatgtgcaatcaaaasgatacggtgtcttgagggagggaatctagacaaggggccactggtgggggaaaggacctcaggcatggggttgggagcagctgctgtgattctagttgcggattcccagtcctttgaaaacagaacagtttcacaggatgccaaagcatgatggaaatttccgatgagaacaatctactctttttgctccaggcaataatgagctgagctccccactaggatgaagttcccctcatacatttccagtgtaactcataacttggcattctggtttcgaccagactcagacaagcttcagaacacttactgctgagaatgggtccttggactaaggaaaatactgcaaaaagtcacaagcatgtct

SEQ ID NO: 653485 - DNA, 642 bp, Homo sapiens
ccaaagccccatctcattgtataattattattaaaataaatatttaaatagcaacaacattagaggataagcactttacctaaattatctcaaataatcatcccaagaatccagtgatgtaggtactattatctcctttgaacagacaaaaaaatcgaaatgcagacaggttaacttgtccagagtcacatagctagtagtaagtggagaaggtaagacccagatccaattggcgcacgattctttaacgcagtgaaaaggggatgtgcaatcaaaacgatacggtgtcttgagggagggaatctagacaaggggccactggtgrgggaaaggacctcaggcatggggttgggagcagctgctgtgattctagttgcggattcccagtcctttgaaaacagaacagtttcacaggatgccaaagcatgatggaaatttccgatgagaacaatctactctttttgctccaggcaataatgagctgagctccccactaggatgaagttcccctcatacatttccagtgtaactcataacttggcattctggtttcgaccagactcagacaagcttcagaacacttactgctgagaatgggtccttggactaaggaaaatactgcaaaaagtcacaagcatgtct

SEQ ID NO: 653486 - DNA, 553 bp, Homo sapiens
aactgtctttttaaaatttgctcagaattaccataccagtaattccagcagttgagcaaaggacagtaccagcaaaggacagtataaaggggaaaggaacagagaagaagcaagacctataaaattatgcttataaaaattagactaataggccgggtgcggtgggtcacgcctgtaatcccagcaccttgggaggccgaggcaggcagatcacgaggtcaggagttccaggccagcctggccaacatagtgaaactctgtctctactaaaaataaamaaaattggccaggcatggtggcaggcgcctgtaatccctgatacttgggatgctgaggcaggagaattgcttgaacccaggaggcagaagttgcagttagccgagattgtgccattgcctccagcctaagtgacagagttagactccgtctaaaaaaaaaaaaaaaaaaaaaatagactaattttattatgggacatgtgccacaacatacattctaactatagatcttctttctcaattttatattacatcatgggttatcccattagaataat

SEQ ID NO: 653487 - DNA, 599 bp, Homo sapiens
aattattttttcaaagatgatatggacctgccttctacaggtaaatggaaaaccattgtacgttggctttctcttgagtagattcaaagcacttggcacttacccatccttctagcttccaaaggtgacaataactcaggaatcatgacctcatttaaaataaagtgagaaagtgactaactaccccagtcatgaaaggcagtaatgtggattttagctttgcaaggaaatttcctagcaaaccacatggcccatttctgtctcttaatgttagaacagtcccctaaaatagtctttcttacaaaaataacattcttttctcactcccaggatcttggcatctaaatgctattctaggmattttagaaaaataaatagtcaaagctatttacaacaatgactaccacgctgtggcctgagatggtgagtttcacttgaattgccaagaagggaacaagggcgtcatataaaccctggaaaacaagcccagggacaagtcctgttctggggtctggaggatttggaaggctgccaaagcttaggcagtggtggtaggggtgcgtggggaatgtgaaaaggggtcttttctccaaagtttt

SEQ ID NO: 653488 - DNA, 626 bp, Homo sapiens
tgaattccataagacaactgcaatcaggtgcggtgaacgatttttggggaaraatctcttgtacacgtataatgtctggaaaacaaatgacttccatttttcttgcatttgaagactcacctcaaaatttttcatagggagaacataatgaccacattaaattcattctaagtaataagagactttaaaagtgaatgaatcaccttcagtcttgcttagggacaagagaaaactctggacccaactgtggtctctgtcttgcctgactcactgggacataaaaaccttaccaaggcccaaatcccttgcccttgggtaagagaaaggatggagctgagctccattttgcatacttaagaaacaggcctggctggcaaaatagaacatgctagtggtgggttccagcacctacagagactgagcaggggaactggaccagagcctggacaataacaagaaaagcatcgctttcctgggggaggaaacccagccctggaatggaaagacaggcgcatgcactccatttaggagatcctggagtgaacacaaaaccgctcattattagggaggctgggttcagccagtcctgagttgccctgagcacgcggttctgccaccgacttctg

SEQ ID NO: 653489 - DNA, 626 bp, Homo sapiens
tgaattccataagacaactgcaatcaggtgcggtgaacgatttttggggaagaatctcttgtacacgtataatgtctggaaaacaaatgacttccatttttcttgcatttgaagactcacytcaaaatttttcatagggagaacataatgaccacattaaattcattctaagtaataagagactttaaaagtgaatgaatcaccttcagtcttgcttagggacaagagaaaactctggacccaactgtggtctctgtcttgcctgactcactgggacataaaaaccttaccaaggcccaaatcccttgcccttgggtaagagaaaggatggagctgagctccattttgcatacttaagaaacaggcctggctggcaaaatagaacatgctagtggtgggttccagcacctacagagactgagcaggggaactggaccagagcctggacaataacaagaaaagcatcgctttcctgggggaggaaacccagccctggaatggaaagacaggcgcatgcactccatttaggagatcctggagtgaacacaaaaccgctcattattagggaggctgggttcagccagtcctgagttgccctgagcacgcggttctgccaccgacttctg

SEQ ID NO: 653490 - DNA, 534 bp, Homo sapiens
taagcatcagaagttgcacaggtgctctgaaatgaaacaatagtacagccctctctgctaaattgagttatctattaaacaaacagagccaccaatgataacccatacaccctttgacttaggtttcatctttaccattgtatcaatgtttgtaaaataaggctagagactggagctctaacttttctcaatccagactctacctctctccagctaagaccatgaggtctttatttcttctctatgccttaatttccccaactgtgggatgaatctgcttatagtactagtcataggtaccttttaatggttattaaaaagggttgaacagtaaaacagcagagtacaaaacaggtgttatattagtaatcactcttaataatttcattgttaatcattgtcaytgcaaaaattaacagtgacctgacctatgagaagaagctgaactgtttagctcaaatgaagtctggggatgacttctggatttaagttattcacactcaacctatcacttattgccacagacacttcaaa

SEQ ID NO: 653491 - DNA, 617 bp, Homo sapiens
tcattgttaatcattgtcactgcaaaaattaacagtgacctgacctatgagaagaagctgaactgtttagctcaaatgaagtctggggatgacttctggatttaagttattcacactcaacctatcacttattgccacagacacttcaaagttcacagttctctgaaatatcataattttccagagcttccatacagacttgcatataattttccagagcttccatrcagaacaatttgaaccttgcaaattgttctcattttatcttaggtctaacaggttgggggttggggtttgtttttcttttttaaaaaaatagaacttcttaaaaaccaggtcagacttatcaacagaatctaaataaggcttggtgtgttgtgcaacctctacaacatagcaacaatgaaatttcactgcaactactgccctcatacccaatagcatttacaatacctctgacaaagtgtgtctatttccatggtacctgttgccatgggagctgagcagtgctcctcctagaacaatcatgttagtaacatagctcttagctattgccttctaagagctttgctctggggaaaaaatgggatactttgtttttgaaagaagtcataaac

SEQ ID NO: 653492 - DNA, 596 bp, Homo sapiens
ctctacaacatagcaacaatgaaatttcactgcaactactgccctcatacccaatagcatttacaatacctctgacaaagtgtgtctatttccatggtacctgttgccatgggagctgagcagtgctcctcctagaacaatcatgttagtaacatagctcttagctattgccttctaagrgctttgctctggggaaaaaatgggatactttgtttttgaaagaagtcataaacctcctccaaaatagacaattgttgcttaatagtactaaaaaggaaagagcaatccctctttccctccataccagttagagaagcatttctttccttctggagaagtatttccaagtgaaaccatgcaaaatatagggaagtgtgttttgaattccattttaaagttattttgcataaaagttaaataaaaaaggagatagttgtcattgtttacaataagtctatctttactaatttgagctaatcagtgaattcactgaataaaatacaaggttagtgccaattaccaatttcccaatgaacccaaatacaaggctttatagcatgctgtattatttagtgtgtccaggcattgccacataa

SEQ ID NO: 653493 - DNA, 583 bp, Homo sapiens
gtggtcacagacctgtgccagaggcctgcatcctctgctgaaagtcttggattttgtgccagtgttgggaattgaacatgcgtctctgggacctaaagcaacatcatggagagtggtatcctttgggaagcacacagagcaagcaaatgaggatgacaactaagcggtaatgctgttaggaacacgacatggcagacaatgtggtgtgatgtggtatgtggtgtggtatggcatgccgtggtgtggcatgacatggtatgcagtagggtgtgtgttctgtgctgtggcaagacgtgacagggagcatgggatgatgcagcagggcatggcatagtgtgtggtgtggtatgcttcatggttacagcattccatcgtagaaaaatcacaggcatcagagtyctggaattggacatccccattgaattactggcctggggttggacatccccatcaaatcagtgacctttaataagtcattaaacttatagggaggcccagtttcctcacttgcaaaaggaggataataacaactaacatttaaaatatatgctcactatgtgctaaatgagatcattaaatagat

SEQ ID NO: 653494 - DNA, 562 bp, Homo sapiens
tattctagattataaagaagactaaaaagacataaatgaaatacaggatcctaaattggacctgtatgaggggaaaataatgaacacaattaggacagctgataagactacaatgtgaactatagattagtttcaaaggtattatatcaatattcagactgtatgaatttccataattgtactgtagttatatgtaagagaatatccttgttcttagtaattacactctgaagtactaaggggtaaagagtatatatatatatatgtgtgtatgagacagaacaaaaaactcaaacatggcaaatggtaaaaattggagatttggataaatgatttatgggagttctttgtattattattgcaatctttatgtaagtttgaaattatcctctcccaatttttaaaaaatttcatcaaccatgtatacagtataatgtgcatctctcttctaagttgaactatatgttggcagtttagattaygccttgctttctcctttgctaacatgccctatatctccacagggctagtgactagtactctgagtcaggcacatgtttga

SEQ ID NO: 653495 - DNA, 623 bp, Homo sapiens
gtaagggtgatttgatgctattgtttttcatttatgtattttagatgaacagaatgtaggacsccaaggagaaacttcaagttggtctttcttaaatctatcttacttctctacaatacatctgtagggtaaagtatcaaaatggtatctagtattcccaagatggcaccaagaatttctgaaaggattttaggggcaggagctccagaaaaatcttccagaattgcagaaaacagccctgcagaggatgtacaagttcttccacagtgatgaggaatgaggcaaaatgaaggccataatctgtctcagaagtcccaaatccttcataggaatgatagcaatatcaggagtggctgctattgtgtaataaaggttgtgtattctttacccttgctaggtggaagtataacatcttctgaatcagcagggtgattgatcattgtgtccaagagctaggagaaaactgatctcaactacctccagcatctccgtcatattgtcatcaggaacaagaataacttaggaaggttaagcatttttaatgtttaaattgcattattataaatcaaaactcaaaatagatttctcttttatcccaaattttaagaatattgctatgttca

SEQ ID NO: 653496 - DNA, 597 bp, Homo sapiens
catgcaggtgccatagtaattacatacacacctagagagggtgaacttcatgtgagggtraactttacagaacttcatgtaaaagaaaaaaatacattggctttaaactgtcacacacacacaaacttcatggaggaaaagacatgagaattaaggattggaggacaaatttgtgttcccacaaaaagatttttggcaacagattaaacttttactccagaggactcatgggggagaaatagagaagaatttaggtcattgggagacatgtctaattgccagaactgacaagagtgatgtcggccattcatttctggagctaattaacacccatgcctggaagtaatcaagtgaaacttgcactgaaggtaatatagcataatggttaagagcacacacacactctagagacagactgcctgagttgaaatcccagctctgcccctttcaagctgtgcctttttgtgcctcagtttccccacttgtaaaaatggagataaaagcaatgcctataattaacaaatgtaaagtgcattagtgctatgtaagctttagactttattagtggtagtatttattggaggtgttgttgtggaa

SEQ ID NO: 653497 - DNA, 573 bp, Homo sapiens
gtctgcccctccccttgaacttcccacttagcaaatgccaccatcaccttgagttgctcaaactaaaaagccctgaacraccttaattgcctctattgtcattagtcagccagccactatgttctgtcaatccagctataaaatatttctccattctccatctgtaataagctatgtactatgtaccaggtgcaaggccaaaatagtttataacaatgaacaatgcagatgcagctaccaccctctccaagcttaagataggatccttgacgtacaatagataacactattaaaaccattattaaaacctcctacttgccagcctctacactaggcactttacagcgagcgctctgatcttcaggacaaatctgagtgcacgtattattctctgttattcgtagataaagaaattgaggtgaagaaaagttgaatctcttgcccatggtcatggtggcacagtgggggcagcaccataatgggaggcatatctgtcctcacatgaaagcccaggttctcctcattacctctagtccactgattgttcatccttgcatggggttggctttctgg

SEQ ID NO: 653498 - DNA, 574 bp, Homo sapiens
tttacagttaggtatttgatccaccgtgagttaatttttatgtatctgttaagtaaggattcaaatgtattattttgcatgcagatatctagttttcacagtaatatttgttgaaaaaattatcctattgggatgactataattttattaaagatctcttatatgtaagaagtttttctcttgctgttttcaacattctctcttttaaaagtttgattatatcgtgtctcagtgtggatctatttgagttcttctaacttggattttgttgagcatgttggatatttgtattcttgcctttcttcaaatgtgggaagttttcagcaattatctcttcaratattctctgttctcctttctctctccatttatcttctgagactcccacagtacatacattggtctgcttgatggtgtctcacagttctgagtctctatttgattttttcaatcattttttttcatttggaagactcaataatttccattgtcctatctttaagtctgctgatttttttcttttgcctgctcaaatctgcctttgaactcatctagtgatttgattttttttaat

SEQ ID NO: 653499 - DNA, 395 bp, Homo sapiens
agatcttcaatggattcctttccttcagtgaccttctttcctgcaaggagagaaactccttaacccagatgtgcaaayagctgggacatgctcaacatcctctcacctataagagttaaaagggtggctgggcatggtagctcacgcctataatcccagtactttgggagggtcacttgagcccaggagttccagagcagcctgggcaagatagcgagaccctaagttaaattaaaaaaaaaaaaaagttaagggtgaggagacctagatgagcctattgcaagggaaactcggtgtttacttatacaggaggaccagtgaaatatactacagcacatccatctagtggaatactatgcagctctaaaaataagaatgagtatgctctctatgtg

SEQ ID NO: 653500 - DNA, 554 bp, Homo sapiens
cccaggtagtctggctccagagtattcaactgctatatgtgttgaataaatgaataaatcattcctaattttttttttttttaaagatggaatctccctttgttgcccaggctggagtgcaatgatgtgatctcggctcactgcaacctccacctcctgggttcaagcgattctcctgcctcagcctcctgagtagctgggactacaggcgcccaccaggacgcccagctaattttttgtatttttagtagagacagggtttyaccatgttggccaggatagtctcaatctcttgaccttgtgatctgcccgcctcagcctcccaaagtgctggtgggattacaggcatgagccactgtgcccggcctttttttttttttttgagatggagtctccctttgttgcccaggtgtggggggcgcacgacaagacattcaagcctatgtaagaggcatgtgaggtcgaggcatggaaaaatattgaggcgctgtgtgcatgttgtttgtacacaagactagatctcctggaccttgaaaacaggacagggagtagta

SEQ ID NO: 653501 - DNA, 636 bp, Homo sapiens
tccaaacagcctattgtcctggcatctcatctggtttagaattatttatggtttctgcatttttaattaatgaatgctttggaaaatgtcctmctccactgaataaatatattagtaatagcataatacatatattgtttatggatatttttatagagctttggatatcaggtctttggtgaaaaatgcaacttcataggataaagctacttcagaaactcatttgatataatgaatgctttttaaacttagatgcgtctccaaggaattaactgaagtcaccgaagacatccatgccaagtttaaataacactttggttacaaagattttcttacattttttatctttttgaattaaacatatatctgttagaaaatctagtattttaaacaattattttgtaaagcaagattgcctattgagttctctggaaagcaggccctacagtggggtttagcgtttaagatgttttaaagcagcgtgctctgcgtatgcctgagacctctagcagggagggagagtaattggcataggaagaaagagaagatggactgagatacaggcctggcaccctcagcccaaccaggtgctttggagcttcattaggctatcacagttttcccattttaggccta

SEQ ID NO: 653502 - DNA, 669 bp, Homo sapiens
ttccagggaatgcaatcttggttcaacatatgcaaatcaataaatgtgattcaccggataaaattaaaaacaaaaattatatgattatcttaatagatgtagaaaaatctttacataaaatctaacatcacttcatgataaaaaccctcaagaaactaggtctcaaaggaacatacctcagcgtactgcatgggcaaaaagtgaaagcattccccttgaaaactggaataagacaaggatgttcactctcactactcctattcgacatagtactggaagtgctagccagagaaatcagacaagagaaataaataaraggcatccaactaggaaaagaagaagttaaacgatctctctttggggactataggattctatacctagaaaaacctgaagactccaccaaaaggctcctggactgatatatgacttcactgaagtttcaggacaaaaaaacttaatgtaaaaatattggtagcattttcatatatcaataacactcaagctgagagccaaatcaagaacgtaatccattttaatagccacacacaaaaataaaatacctaggaatacatctaagcaaggaggtgaaagatctctacaggaaaaactatgatacactgctgaaataactcagatgtgacacaaacaaacagaaaaacattccat

SEQ ID NO: 653503 - DNA, 518 bp, Homo sapiens
tatcttaaatgctaatactttgttaatggtggtggacagccatttgaaggtaaactgcagacattgtgatatttcacctctaaatactttgtcatgcatttcttgagaataaaggcatttttgcatataaccagaatactcacaattaaacacatgtgagcagtaaatctaattatatttagtccrtattttgaatcatgacttttttttttttttttttttttttttttgagacggaatctcactctgtcgcccaggttggagtgcagtggtgcgatctcggctcactgcaacctccgccccgcaggttcaagtgattctcctgctttagccttctgagtagctgggattacaggtgcccgccaccatgcctggataatttttttttttttttttgtatttttagtagaggcggggtttcaccatcttggtcagactggtcttaaactcctgacctcgtaatccacccacctcagcctcccaaagtgctgggattacaagtgtgagccactgcactt

SEQ ID NO: 653504 - DNA, 518 bp, Homo sapiens
tatcttaaatgctaatactttgttaatggtggtggacagccatttgaaggtaaactgcagacattgtgatatttcacctctaaatactttgtcatgcatttcttgagaataaaggcatttttgcatataaccagaatactcacaattaaacacatgtgagcagtaaatctaattatatttagtccatattttgaatcatgacttttttttttttttttttttttttttttgagacggaatctcactctgtcgcccaggttggagtgcagtggtgcgatctcggctcactgcaacctccgccccgcaggttcaagtgattctcctgctttagccttctgagtagctgggattacaggtgcccgccaccatgcctggataatttttttttttttttttgkatttttagtagaggcggggtttcaccatcttggtcagactggtcttaaactcctgacctcgtaatccacccacctcagcctcccaaagtgctgggattacaagtgtgagccactgcactt

SEQ ID NO: 653505 - DNA, 572 bp, Homo sapiens
aataaagtagattaatatattgttagccacagacatgtttaaattttcatatgaaagattcaaatgctatagattgaaataattttactaatatattttgtacatatgtatgttttatatataacatttaataatttaacccaacatccaacataatttaaatatataatcattattaatattttcttttaaaatatataaaagtctttacaattttatatgtatttttatccttacaacacatctcattttggtttaactacatttcargttctcagccatatgtgtatactggctaccgtatttgtgacaacaaaggctggagttaagaagtgaagtagagaggattttggaagagaaaagagtccagaacaatggcatttgtgcaaacaggatcctctctattttgttaggcctgcatttggttttataaaagtattctggatacttttacaacattgtctattgaagtttttattgaagagatatttgtcacaaacaaaagacacattgagaacacaaatcgcacattgaggacattgaacatacttagtttggagtatttttaaaag

SEQ ID NO: 653506 - DNA, 485 bp, Homo sapiens
ggaacacagcaaggatgttcactctcactactcctattcaacatcatactggaaggcatagctaatacgattagacaaaaaaaaggaaaaaagaacccagattagttcactggtgagttctagcaaacatttaaagataaattaaccaattaattttctacaatctgtcctagaaaatagaatcagagcaaatacttgctaaatctttctgtaaggccagcattaccttaatatcaaatcagaaaaatacaagaaaacactactacagaccaataactcttatgaatatagattcaaaaatcctcaaccaaacattagcaaattgccaataaygtattagaagaaatctatatcatgtggagtttattacacttatgcaaggctggtctagcatttgaaaaccatgaaatccattatgttaacaggctaaggaaaaaaagtcatatgatcatattaacagatacagaaaaaatgctggcaaaatt

SEQ ID NO: 653507 - DNA, 622 bp, Homo sapiens
cgtatataagttaggacatatcttcagggataaactgttttgaaaatgataccacaaataaatgaagagcactgataaatgtgtgaatagatatatgagatataagataccaataccagaaagatctctggaaaatttccaaatattcagaaactaaattaaacacattaaataatgagtgtctcaaggaaggaatcaaaaaggaaattagggagcatattgaattaaatgaaaatacaaatgcaacatataatttatgagatgtagcttcagttttaaatgataagaagtttattaatatttgagaaacatttttaaaagagtaagtggatattttaaaaaagaaaatctcatatttcatcttacaacactatagaaagaacaaatttaatttaaacagataaattataataataaaaatgagatcaggaatcaatgaaacagaaaacacaaaatagagaaaacaggttaaattgaaacctagttggggggctgttccaagatggctgaataggaacagctccagtctacagctcccagcatgagcaacacagaagatggaygatttctgcatttccaactgaggtactgggttcatctcactggggcttgttggacagtg

SEQ ID NO: 653508 - DNA, 580 bp, Homo sapiens
cctagctctaaaatgaaattattgacaattctttttaaataggtaatgtggtaaagaataaagaacatgagttttggagggtaggtttatgtcagatctgtcttttactggctgtgtgacctaaaacaggttacataacttctctgaaccttcctttttatgaaagtctgtaaaatgaagataataatacccacctttcaggattaaatttgataaagcttcttaagagcctttcatgatgccagcactggtggctattattgtttaatcaactaactggatggcagtcaatctataattttctctagccaatagggtaaaccgcaagatggagttataagccaaaggaaagcatgactgaagtrggcttcagttgagttgagatctgcccaaagaatcattcactagtctacagtggagtcatatcaaccatatattcaacttttgagaagttggcttgccaaaataacagacagggaatcaataatttcaatgtatagaaaacctcagctatcttaagcctaggagtcagcatgaaatggtgaatcttctttctaacagtctctgtttcaggtagctc

SEQ ID NO: 653509 - DNA, 597 bp, Homo sapiens
aaataattccattaaaaagtgagtgaagaacatagatacttctcaaaagaaggtataaaaagagccaacaaacatataaaaaaaagttcaatataattcattatcagagaaatgcaagccaaaactataatgagatacaatttcacaccagtcagaatggcctttgtttaaaagtctaaaaacagcagatgctggtgaggctgtggagaaaaggggatgcttayatattactggtgagaatatatatgagtccagccactgtggagagcagtttgaagatttctcaaggaactaagagttgaactaccacttgatccagcaattccattactggatatatacccaaaggaaaatatgtcattccattaaaaagacacatatatctacatgctcaacacagcactagtcacaatagtcactagtgcccatcaacactggattggataaagaatgtgtggaatacaacacctccataaaaatgaatgaaataacgtcatttgcagcaacatggatgcagctggaggtgcttaccctatgtgaacagacacagaaacagaaaatcaaatactgaacattcctggaagatggattcattca

SEQ ID NO: 653510 - DNA, 544 bp, Homo sapiens
attcagccaataaaatgtatcatcttttaagtctcaggtatgattctgaaattccaagaaaatagtagtgaacaaaatcatcaaggatctgactctgtcatggaattaattagcttgcagtaatggataatgcatatttactaactcattaaatgctactattagtttctccattttgtccaaatttcagagaacaagggacttaatattaaatctggttttaatttgtacagggttttaaaatttaatttaatttgtatgtctacagaggtaaagtgaaattctgattaaagatagtgtgaaggggattgaattagggtatttayctattccccaaatatattttttggctatggtttgagatatatatatatatatatatatatatatatatatatatatataaaaccatatatatgtatatatatatgtgtgtgtgtgtattctgaaaagttacatatatttactgaatatatatatatatgtatatatatatttactgaaagagctacaatcacatgtccatttgttctgatgaagtaaa

SEQ ID NO: 653511 - DNA, 544 bp, Homo sapiens
attcagccaataaaatgtatcatcttttaagtctcaggtatgattctgaaattccaagaaaatagtagtgaacaaaatcatcaaggatctgactctgtcatggaattaattagcttgcagtaatggataatgcatatttactaactcattaaatgctactattagtttctccattttgtccaaatttcagagaacaagggacttaatattaaatctggttttaatttgtacagggttttaaaatttaatttaatttgtatgtctacagaggtaaagtgaaattctgattaaagatagtgtgaaggggattgaattagggtatttatctattccccaaatatattttttggctatggtttgagatatatatatatatatatatatatatatatatatatatatatawaaccatatatatgtatatatatatgtgtgtgtgtgtattctgaaaagttacatatatttactgaatatatatatatatgtatatatatatttactgaaagagctacaatcacatgtccatttgttctgatgaagtaaa

SEQ ID NO: 653512 - DNA, 463 bp, Homo sapiens
aaaaatctgtaggcaaatagtgaagcacattttaggtggagtggaggagggcgtcatgttgaaggcagagctggggctgaggaaaaaggaaaaggaagtattcctcttagcttcacgttccccatcaccagacaccctcctcctgatgctggctccacccttcccaaacttcttacccccgacctctcacctgctactttagaccagatcagagtagctcttgtttcctggttatcacccagaactctttctcctgctgycctgcaaagggactgggcagagcaaagagcattcgatatggtctgggatgattgtgacaccacctgagtaacaatagaatcacgactatcacaactcaactttccagaccacaaatccacaagtaatcacactatttcaagcattattgtaaaacagaacaacttaaaaaatacctgaatttgacgaacaaaagccagaattc

SEQ ID NO: 653513 - DNA, 391 bp, Homo sapiens
gaattcttatagtaaataccaattctgtgattatacaattaatgcctttttctttattttaaaaacagccacttagattctaatagattttagtgaagtattttaatatcaaaacatcagaacagtctcatttcattcagctggttgctgaatgttaatttacatggggtgtaggggcagacagtcaagtggattctcttcaggttaagttaaataagcattcgatgtggaaagacttagtggctagaatagaattacattaggctacgagttaaattaccgtgcttttgcttccttcattaagataagtagtagagtatttctacttttcttcrtgcctctcttgtatttgaaaaagaataattttcttaaggtttttagcatgatggaa

SEQ ID NO: 653514 - DNA, 546 bp, Homo sapiens
gctttccttctgctcctcctcctgcctctccttgcccagctaacttcatggcatcctcagagtccagctacaacccctccctctaggaagcacttcccagctccccccccagctaacttacatctctctgtgctccctcctccgcagcacccctcaccctgtactgcaaatggtgagcagctttcttgctgtgaccctagcacctagcacaatgccagggttatcgagggtctgcaagaagtcttgtcacaggtgaagacccagggcagctcctgttagctcttctccagtgttgcttgagttccaggagctcttttgtgggtgtctttgtggagctggtggcccagcctgtgtggggcagtgttcccgtggctgcctctctccttcatgtctcagccctcctacaagtgtctgaaaggctgtgtattctctgcttgtcgccaacgtcggaaatatttargcttcttgtttttatgagagcttggggtgtgaccttggctctttccataattgcaaaagaactgtttgccccgaaaattgccctgg

SEQ ID NO: 653515 - DNA, 411 bp, Homo sapiens
gagctagaagaggtgggttcatgtcctagccacaccactcatctgctttgggctcccatgcaagtcactgctccaagctaggcttccatccccacaagtgtcccgaggacacaatgatcccttggctggcttcctcactggtttctgggagggctgcatgggagacaggatgtgaaaggtacataggaatgcattctgcaagtcttagttgttggtatttagcacccaatctatccaagacaccgcgggagacgccactctgtcaggggacgtctacacagtggctcctctcctggctctcaygtggcttctccccaggaccccatgtgcccctgcactcacctttctgtccacacaggccacagagcgtccggcaaagaggctggccacaccacgggccacgttgacctc

SEQ ID NO: 653516 - DNA, 631 bp, Homo sapiens
aggaggtagttaaagggcaatagaccagagggtttaactatatttcctgtaacaaatttgaatatattcgaacgctataaaagaggagccaaataagtgaaaactgagcagctaggtctccatacctgaggaatcagcaaccggtggaatagtacaaaagcaaagtggaagaagtagtgttaaataggaggaagcaagtcaggaaatacagatataaattacctgcaggtgtgagggctagctcttgggagatttcatgcctcaaggctcactttctttctttttttttttttttttctgtgcaataagatctgggtccayttccaacttttctccctatagctcacatacttgaagtgtgccaagaacaccagatatggcaacatcccacagatgatgaatggtatgaaaatggcctgagggttctacatcattcatatattctctgatcactagagatttattctcctatgttctctagcaaaatgattacagaaccacagcaataatagtggtctgctcaattagccaaaacatgctactgaaaccctttatttgttccacagaaagaaatgatctaaaaaaatcttttctgagggagtaggttttcctcctaagctgcatgtcattt

SEQ ID NO: 653517 - DNA, 376 bp, Homo sapiens
taatatagaaaatttctactggacctggaaaagacaataaaccagcctgatgctaaaatatgaaaaacgggatataaaaaacaagagatgatttctcagaaaacattttttaaagacttcatctcaccctccctaacatccacaatcatttgcatactcactgataactgcagaaaacccgtagaaggtcttcagtaygaaattcttggggaaagtcataaatttcaatgacatgtgggaattcacaatcactgaggtcaatatcaggaacttcatgattgtagtaatcagatctaggttcctggatgctctctctgctcttggtattccctgataactagaaaggaagaagcacgttaagtgccggttacattaa

SEQ ID NO: 653518 - DNA, 484 bp, Homo sapiens
aggaacccctctcccagaaggtggagaagcttctcaaagcaactggcccaggcagccttgtacttgcttcattctggggtcaggaagaagctgcaggccctccttcccaccctcgcttcccttctcctccacactgtcaactctgctccaggaaggggcagtatccccagtgtctgctgggccagcacagccatctctcacccacctgagttcataatgactcctgtgtagagcagacttcccttggcttcactgaaaccattccttcttgtcttagaaagcaatcagaaatatagttaacygccttaaagttcccttatcattgaaatgaactagatcacagaagtgcctatttgcattttttattcttattcactgggtttttaaaaggagccaagagaggggagaggaaatgcatttacttgctgggatttcacttgggatgttcatgttcgtctggaaagcaaaataaaggcatgaagat

SEQ ID NO: 653519 - DNA, 591 bp, Homo sapiens
caggagctgctggccacctggccccacccaggccctccccatgtgggggtgtgagatccggccccagagaggggcactgggcacactcctgagcccccacgccaccaggctggcacccagcctcaagggcctgctgaaggaagggcagagagagaagaggcgaacccrcagctgttgccctgcaggtggggagtgttgccgctgcactgaggggtctgaggctcagagaagctgtgagacctgctaagtccacacggtcagtcacggtgaaacctgagctcaggtcagcccctggctgctggtcaaaggcccccacagccttggccccacaggcaggccagtccccacccccaggaccaggagccccttcagcctcaccagcctccaccagggtcatcaggcccgagcagcccagcttacacctgggtgccgccccaggcctcccagctgcttgcatcgttaaaaatatgaaaatccttgaaaaagaagcagtgtcccttttatgccactaagcccctgcctttggctcccaggatcccagtcctcagactcggttctcaggccagagggagcccacacggcccatgcccc

SEQ ID NO: 653520 - DNA, 550 bp, Homo sapiens
acttgcttaacctctctgtgtcttgattcccttggctgtcaaatggagacaaaatgcctctattaggtttctaaaaggattaaataagaacatatatgtaaaatggtgaagacttgctgtccatacacataagcatcccataaattgtaatggtaattattgatttattattaatatcatattagtcaaccaatgtattagccaagcttcttttgattataaagagctaaaataagaactaaaatctagctcaagagaaaggtggtgatrgtaaaggcagggaggtagattattgtaagggtacaaattaactcataggatagggggcaggagataaagttgagtttcaggtgatttggaatcaggaactgaaaacctggcactaagactctttattctccatcctagagtgtcttctagaccagcgcggtccaacagaaccatctgcaatgatggaagtattctatatctgcacagaggatctgagttaaaaatttctaataatttaagtaaattaatttaaatgtaaacacattaacttaaatcaatt

SEQ ID NO: 653521 - DNA, 542 bp, Homo sapiens
gcacatgacttttatgtttgttaataaacacagcaagaattccagcactccgtgttcttttatagctattatttcaaattcggtgctatgatcatctaaattatatgtgcatgtagttaaagagccaaaaagttctacatactttggttcaaatgtcagtgattacttccccgttccccacagcttccccaaatctccgcagcgcagtttcccatggtccagagacaaccacctccaatatttttgctgattcattttgttattcacctcgtatcatgcttatattgctactttgwgatttctcagtttaggcattatcttttggctttgcaccatgaaagatgaggatttagctctgccatcagcggcctgcaccatgtgcaacatacaaatacgctttccccctcttctatctaatatagatgtaactcgatttcagccagagcagtatttttatagctggtcatctagtacgctagacttgttacttttctcacacattattttgcttgttttctttggaattattttcttatttttaa

SEQ ID NO: 653522 - DNA, 555 bp, Homo sapiens
cacaaaacttgcctccagctaaatatgtataaatatatgtatgtttaatctatgcattgtttaaaaacagcatgttgaaatatttataaatagtatattaaaaaatacagagttccaagtggcctcttttaagataaacttattaaatcaaaagcgttttgacacaatatgtacatgaactttccacctctctccttckccaaggaagaactaatggcttttaaaaacagaaagtcattgaaaatacaatgtcactctcactacggcattctttgggaatcctccccgtttgctctcttcacctctcctggagcatattaaacaatgagatgcagtacacaaaaactatcaaaagggagcacttttgagccaccaaaattgtgtgttagcctaaaaaccacaatctccccaactagagacaatgatactatcttaggtattttatgtgctaaaatgatcattaaaaattaagcaccacatataagctgccatttagaatattaatttacctttgctaatcatctttttaacttgaggctaaaagagttcacttac

SEQ ID NO: 653523 - DNA, 542 bp, Homo sapiens
agctaattgagatctcatcacaatgaacttcaaaagctgtatcattttgttgtactggaattgaattgaaaacttcttgaaatggatataacaagttactggggctttatatcttttttgttacataaatattttcattaaaatggcattcattcattagagttagtcacatgactttgcctaacttcagcagggaggaagatacagtccttccaggtgctccgaaggagaggggaattggatactgggtggtatttgacctgcataatgataagtatgttgaataaagattcacaatcatagagtaaactgaaagccacaagtatgggcaactgacactgcaacagaagtagaatatgcaagattgataggatttatcacctaggcactaacagagagrtgacatcaagtaggcaggagcagactcacatgtgggaacctcttcaccatcacattatacaggagatgactgtgtttctaaatagaaacaaattcatacccagggaatagtattgatcatttatagagttttaaaaatccac

SEQ ID NO: 653524 - DNA, 603 bp, Homo sapiens
agagccttggtttagtgtctgtgttcctgctggcctcgtgccacrcatcgttttggggctgtgtgctgacattattcggtatcctccagagctagcaccgtgcctggccttcaggaggtgcccagtgaatgttgttgaagaaatgagtatttggtaataatcaaaataattacctcaatagttctatagccaaactgaaatgtctataaagtgaataataggtagtcttcattgtgtcatcttcattgaaaaagggaagatttcatgaaaaaggtgggaatttagaatctgttaagataaaaagggagacattacttgacaggatggtgggcgaaagattacaagcctctggtggagtttcagtgactggattgggaaagaagtaggtaatgtaagaaggttcccattagctgtacctcgagcagaggtgggtggactaagtggggagagggatcgagggtgctgagggagtgtgtggaacaagctttgagatgggaagtgaaaccccagactccatctagagcagcgctggctcattgaaacaaaatgcaccacacacatgtaatcttaaggtttctaaggaccacatttaaggaagtaaaa

SEQ ID NO: 653525 - DNA, 603 bp, Homo sapiens
agagccttggtttagtgtctgtgttcctgctggcctcgtgccacgcrtcgttttggggctgtgtgctgacattattcggtatcctccagagctagcaccgtgcctggccttcaggaggtgcccagtgaatgttgttgaagaaatgagtatttggtaataatcaaaataattacctcaatagttctatagccaaactgaaatgtctataaagtgaataataggtagtcttcattgtgtcatcttcattgaaaaagggaagatttcatgaaaaaggtgggaatttagaatctgttaagataaaaagggagacattacttgacaggatggtgggcgaaagattacaagcctctggtggagtttcagtgactggattgggaaagaagtaggtaatgtaagaaggttcccattagctgtacctcgagcagaggtgggtggactaagtggggagagggatcgagggtgctgagggagtgtgtggaacaagctttgagatgggaagtgaaaccccagactccatctagagcagcgctggctcattgaaacaaaatgcaccacacacatgtaatcttaaggtttctaaggaccacatttaaggaagtaaaa

SEQ ID NO: 653526 - DNA, 603 bp, Homo sapiens
agagccttggtttagtgtctgtgttcctgctggcctcgtgccacgcatcgttttggggctgtgtgctgacattattcggtatcctccagagctagcaccgtgcctggccttcaggaggtgcccagwgaatgttgttgaagaaatgagtatttggtaataatcaaaataattacctcaatagttctatagccaaactgaaatgtctataaagtgaataataggtagtcttcattgtgtcatcttcattgaaaaagggaagatttcatgaaaaaggtgggaatttagaatctgttaagataaaaagggagacattacttgacaggatggtgggcgaaagattacaagcctctggtggagtttcagtgactggattgggaaagaagtaggtaatgtaagaaggttcccattagctgtacctcgagcagaggtgggtggactaagtggggagagggatcgagggtgctgagggagtgtgtggaacaagctttgagatgggaagtgaaaccccagactccatctagagcagcgctggctcattgaaacaaaatgcaccacacacatgtaatcttaaggtttctaaggaccacatttaaggaagtaaaa

SEQ ID NO: 653527 - DNA, 603 bp, Homo sapiens
agagccttggtttagtgtctgtgttcctgctggcctcgtgccacgcatcgttttggggctgtgtgctgacattattcggtatcctccagagctagcaccgtgcctggccttcaggaggtgcccagtgaatgttgttgaagaaatgagtatttggtaataatcaaaataattacctcaatagttctatagccaaactgaaatgtctataaagtgaataataggtagtcttcattgtgtcrtcttcattgaaaaagggaagatttcatgaaaaaggtgggaatttagaatctgttaagataaaaagggagacattacttgacaggatggtgggcgaaagattacaagcctctggtggagtttcagtgactggattgggaaagaagtaggtaatgtaagaaggttcccattagctgtacctcgagcagaggtgggtggactaagtggggagagggatcgagggtgctgagggagtgtgtggaacaagctttgagatgggaagtgaaaccccagactccatctagagcagcgctggctcattgaaacaaaatgcaccacacacatgtaatcttaaggtttctaaggaccacatttaaggaagtaaaa

SEQ ID NO: 653528 - DNA, 588 bp, Homo sapiens
aagcagttcccttgtgatgccaggaaggcagcttctggggcagtgagcaaggtgctccctgggtagaggggaagttcaaccagcacagaaaagggccttgttagagagctttaaaaggagagatgtatacctcagtcagggctgataacctttttctaagaactaaacttgtgatctttaaacgcttargaataatgttgtagaagtttagaaaaaatgtacctgtagactcaaacagaagtaagtacctaaataacaggccaaaataagagtaaattatcaaatagttgatgtgtatctacttaggaaagggcactggcttctactgaacttggctctgtgaggagaaaattgtgccagaccaatttaatttcctctcctagtacggggacaggttatgtccaaccaacaggaagcaatagtaaaaagaatgttacaataggtcagccatgagaacaccaaaatctggaatgcaaatttgataagggatttgacaaggtaaggatatatgcgggtacagctgtgcttcttctaaaagtccaacttcccctattgaaaaattacttaaacttgtgtcaggtagacagc

SEQ ID NO: 653529 - DNA, 638 bp, Homo sapiens
actgcttttttaagtgagtccttgatctacttcctcctcattgggcaggatcttccaactgcagtctccagccacttcctacaggtgtgtttgggactgcagtaggtccataccttcctagggtggagctcccagagggaggggtaagccaccatctttgctgttttgyagtcttcactggggatacctccaggtactaaaaaatttgaagcaactagggactggagcaggcacccagcataactcagcagccctccagaaaagtggtcagactattacatggttgcctgtttccatatctccaccaggtaggtcctccaggtctgggcctccagccaccccagcagagctattgaggcaacagcaactcagaaactcctgagttgacagagcctccagggtcaactaaaagcctgtatgccactgcctctgtggtggaactgcccttgctaacctcagactaacaggggagcaaagactctaagtgctttatccacacctctaacaagctgcagtcaacccaaggaataaggccagtctgtctttcatcattccccttcccaccactgttcatcaccaacagggagcccctagccagggcccccagcacaaatgctccgtcatggactgattgcact

SEQ ID NO: 653530 - DNA, 575 bp, Homo sapiens
atttaacttccctgctcctcagtttccacatttggttctggattatgatgatttaataaaatacgatatataaaagtaagtgcctaggctatgaaggtattatttcctacctctcctaaatcttttctttctatgccaggatcaatcaaacccacccagaatacaaggcaactttcatagggtatcttttacatcagtcgagggaacgctgcgatgtgatataagtggatgatggcatgagtcaggcatccaacagagcaagatgtggagaaagtgagaggtacctacaagggccctagacttcactcgcatgtgcgaaaagggcattttgayaccctttcaagaatgccccgcatactcgcggaggcttataccacgatgtgggaaaacgacggaattacagaataaaccagcagggagcctcctcgttcacccaacccgaccccgcccgcccgagtctcccatctggagcctaaaaactgagctgagatcacagcaactgaccccgtcccctccgccctctccctcccccattctgcccaaacctctcagggcacgaatggtgctgaatcatt

SEQ ID NO: 653531 - DNA, 555 bp, Homo sapiens
actctaattctaataattacctaatcttgccttagatttggtcccacttctattccatcctctatattattgtccaagtggttttgttctaataacacaaatctgatcttacctccttgatgcttaaagccttcactggcgctccatggcctctaaattgattttagactctttgtttgatataacagacccttgaaaatttgctcttgcttagctcttagtctcatcaatctcaccaccagctcctctacccaatgtacagcccccatttggaagagggtcacatctcccatcaccaagcagctctggtcatggacttccaaagaattctctatctctgtgattaattatccaaaaatttacttttaaagtacaaagtctttctcaactacatttaggtagcygtgaatatttgtgtttctgtaagttttttcaaaggcaatgatgaaatatatggagatgccttttttctgtaactctccaaatataccctgctatgagtgactgggagttctattttctctttctgcgtgaagtgggtagtggttttttaga

SEQ ID NO: 653532 - DNA, 526 bp, Homo sapiens
agtacagaaccaagaggctagcraactccagcaagtgcagtagagttaaccgtgagtgaaagattccagcagtaggaaactgagtggcatcctggggatgtgaaccatgtatggatcattctccaacaactctatcaaaatcactccaaaaaaactgagtaaatatggaatacctactatgcaagtacaacagatgaacaatataatcaactatagtgtacttgctgtgccttatcaaagcatttaattacatccaccaaacagattttaattcctaaatcctccacatagaaactagatcttaggccttgctaagaatcagtgctaatacttaatatgtgtttatataatagttggaccatggcaggctgtgttggctgaatttaaaggccacatctcaatggatctatcatcaggtaaatgatagttgaagtcttgggcacaaataatataatttagggataagtgttgagtagatgccttcaatgtcctgcccatatcccttgtatcttacttcattatgctg

SEQ ID NO: 653533 - DNA, 667 bp, Homo sapiens
tataatttagggataagtgttgagtagatgccttcaatgtcctgcccatatcccttgtatcttacttcattatgctgtgtttccaactgtgtgttagtatctgcatttctttgcttgaaggctttcaagaactcttctgggagccttgagtctgcaggcctttgcttttccaggcgtcctccctacattcccttccccctcccagaagagcaggaattgccatggaattagtactcaccctcacacccacagcagccttcaactgctggttgaccctagttgggttaactctgaagctgtgtgttttacactggttcccagactttcctaggggattaagctcttgccacccaccatgaagctgtcattatcatacaccctttattggctgcttttcctactctgtcttgcttccctgctcccctgccrgtatttctagcacttcccaaaataaactacttttatttgaatcctcatatcaaggtttatttctgggggcctcaaactaagagctcttggataacaccctcaattaaaaggtagacaggagaaaaactacatcttattttcttaattagcaattatcttttaattttcaagtacttcttggactttctacttggacatgctgttgatatctcaaacctgacgtgtccaaattgaaatc

SEQ ID NO: 653534 - DNA, 609 bp, Homo sapiens
attattgtaaatatacctattttaactactttatatttaaccttcttactaaagatataattgatttacacaccaccattgtagctttacatacagcattctgaatctgactacatacttactttcaccagtgaattttttacatttatatgttttcatattaccaattaccatccttttctttcagcttaaagaattcccttttgcatttcttataaggcaagtctagtgaacttcctcagttcttatttgtctgggaaagtccttatctctccttcatttctgagggacaactttatggttcctggtgtttttttttttctttctttgagcaagaaatttttgtttgctttttttttttttttttttcactctatccctgacctgcagggtttctgttgaaaaatctaatgatagccataatggagttctctcgtatgagatttgcttcttttctcttgctgctttcaggatcctctctttgtcttaacgcttctgagagttttactaagtcttattgtagcattktttcagctgaacataactggagacctttgagcttcctatgtgtggacatttatatctgtccctagtttatgaatgttttct

SEQ ID NO: 653535 - DNA, 623 bp, Homo sapiens
tccagaaccttatcagccaaaagacagcactagaagaatctactgagcaaaccatactatcccttatcttccattgatttcccgcgtatatttattatcctacaatttgctgttcttagtagctcaaagtccctttccttcgtcctgtcttccctctacaaaattattctttggttaaaaggatacgtaagcccaaattccaacaaacgctttgagttactaatcattgagtactctcctgtgtataagcaatccacatgttaataaatttgtttcattttctcttatctgtttcccccaccccaaattttgttaaggtacaattgacaaataaaaattggatatayttataatgcacaatgtgatgttttgatatatgtatatattgtaaaaatgattaaatcaagctaattaatgtatccatcacctcacaaacttattttctgtggtaagtacatttaagacctactgtctgaataattttcaagtatacaatactagagtcatcacactgaaatagatccgcagaatttattcatctaactgaaacttaatctgtctcttatcagtctaatttacaggaccccagagacagaacttaggagagtagagggaggaaaaaa

SEQ ID NO: 653536 - DNA, 548 bp, Homo sapiens
attactcttgctgtaaaaatgtgctctacctctctytttttttttttttgtcatctacttgttctatcagctattgatggttggtactactgacagcatcataaattctcccagtatatttggggatttgtccagttcttttgcttctatcaatttttgctttatatatactatctcactatgtgcatgcagatttaggatagtgaaaacttcctgatacaattacccttttattattataaaacatccatcttttatacaaattctcctaactttataatgaggctatatcctgagaaacccactgtaagtgaaaaatattgttaagtcaaaaatacatttcatatactatagagtgttggttatttaccctcatgactgcttggctgagtggaaactgcagcttgctgctactgcccaacactgcaatagagtattctattacatatcactagcctagagaaagatcaaaattcaaagcatagcttctactgaatgtgtatcatttttgcaccaccgttacgtcaaacaattgtaagttgaaccat

SEQ ID NO: 653537 - DNA, 548 bp, Homo sapiens
attactcttgctgtaaaaatgtgctctacctctctctttttttttttttgtcatctacttgttctatcagctattgatggttggtactactgacagcatcataaattctcccagtatatttggggatttgtccagttcttttgcttctatcaatttttgctttatatatactatctcactatgtgcatgcagatttaggatagtgaaaacttcctgatacaattacccttttattattataaaacatccatcttttatacaaattctcctaactttataatgaggctatatcctgagaaacccactgtaagtgaaaaatattgttaagtcaaaaatacatttcatatactayagagtgttggttatttaccctcatgactgcttggctgagtggaaactgcagcttgctgctactgcccaacactgcaatagagtattctattacatatcactagcctagagaaagatcaaaattcaaagcatagcttctactgaatgtgtatcatttttgcaccaccgttacgtcaaacaattgtaagttgaaccat

SEQ ID NO: 653538 - DNA, 607 bp, Homo sapiens
ggattatcaatcatgcaggatcactcagaggaccagttaaacaatggtatataaactcatcacttaaatctgggatttccctttgtatactggcttctgtgaagtttgaatacacttaataatgaagttaaactatttggaaaattgctaataatctttcaaagtttcaaagtaagtttcaaaatttcacaggaaatttcaaattaagtaaattatatttcttaaaagggccacaacattatctcatcccacgtgttctttttcagcatgactttcccctatctgttaaatctgaattggctctatgacctcttttgaccaatggaatgtggcagtgtaacatctaaggatttgtcttaagaaaactgcagctaccaattggtcacctataacacttctgtttagaatctaggtcccatgcagtgagacagcccaaacaatcatacaaagtccatgttcaagagaacatgtgaacattgtcaacagctccagctgagttctagctggcaacaagcaccaactgctaaccatgtgagtwaggctattttagatgccccagctatccagcagacaccacatcagagatggaaacaaatctatcaaccta

SEQ ID NO: 653539 - DNA, 532 bp, Homo sapiens
tttgcttaaaattgttttttattttaaataaaaatatttatctcagtagttaggayattaatgagcatactcagtgtaagaaattttctccagatttctatcactacaaataaaactttattattcttcatttaaaaaaaaggctcagtcctctgataggctcctattcctttattaggtgcttagtcctctcataaaaatctgcctttgaggaattacaaattcgttattttaaccaagtctacttatgtaacaggatgacaaatatcggtaacatttctctctttttttttttaagacagggtcttactctgtcacccaggctggagtgcagtggtgccatcttggctcactacaacctccacctcccagattcaagcaattctcccacctcagcctcccaggcagctgggactctaggtgtgcactaccacacctggctaatttttgtgtttttcagtagagatggggtttggccatgttggtcaggctggtctcaaactcctgacctcaagtgatctgcccaccccgg

SEQ ID NO: 653540 - DNA, 532 bp, Homo sapiens
tttgcttaaaattgttttttattttaaataaaaatatttatctcagtagttaggatattaatgagcatactcagtgtaagaaattttctccagatttctatcactacaaataaaactttattattcttcatttaaaaaaaaggctcagtcctctgataggctcctattcctttattaggtgcttagtcctctcataaaaatctgcctttgaggaattacaaattcgttattytaaccaagtctacttatgtaacaggatgacaaatatcggtaacatttctctctttttttttttaagacagggtcttactctgtcacccaggctggagtgcagtggtgccatcttggctcactacaacctccacctcccagattcaagcaattctcccacctcagcctcccaggcagctgggactctaggtgtgcactaccacacctggctaatttttgtgtttttcagtagagatggggtttggccatgttggtcaggctggtctcaaactcctgacctcaagtgatctgcccaccccgg

SEQ ID NO: 653541 - DNA, 532 bp, Homo sapiens
tttgcttaaaattgttttttattttaaataaaaatatttatctcagtagttaggatattaatgagcatactcagtgtaagaaattttctccagatttctatcactacaaataaaactttattattcttcatttaaaaaaaaggctcagtcctctgataggctcctattcctttattaggtgcttagtcctctcataaaaatctgcctttgaggaattacaaattcgttattttaaccaagtctacttatgtaacaggatgacaaatatcggtaacatttctctctttttktttttaagacagggtcttactctgtcacccaggctggagtgcagtggtgccatcttggctcactacaacctccacctcccagattcaagcaattctcccacctcagcctcccaggcagctgggactctaggtgtgcactaccacacctggctaatttttgtgtttttcagtagagatggggtttggccatgttggtcaggctggtctcaaactcctgacctcaagtgatctgcccaccccgg

SEQ ID NO: 653542 - DNA, 452 bp, Homo sapiens
tgaaaaggctagcaggataatcttgattggctaaatgatccaaataagccctttgtggrcaagagtggagaggattggatcaccccagggagtattcctgtttcattcattcattcattcattcactgaaagagttcttaaagccaactggataacagtcacaagacatttgaggatgaataagacatgatttaaaaaaagaagataggcagataagactttcttctaggtttcaggctgcctattggccttccctatgttcatgttacacaggaacgtgaagcaccaaacagatctccatcttcctgagaaagcttgactctccccactggtgcctatccttgttaaatggcaccacccactgtccacatcagaacaccgggcagcatcctgtatttcttcttcccctaacaatctcagatatccagttacttacaggttctcttatccct

SEQ ID NO: 653543 - DNA, 436 bp, Homo sapiens
gaattctctgtagtccccatagaaatcccatggaatgcagtttcctgctggtttgttacactgcatcagaataatgatratacgaggatagcctactagattatgcaatgaaacaaaactcacacaccatagtccaaccagagagactttaacccttctcttctgcaattaaagcttcctacttacatcgaaaggttgtttgtgaataatcccaccagggagtcaacccaacaaaaataaatcacccagtgctttccgacaggccgagtccaatgcctggcacctagtacaataagtatttgttgaacaaatgatgaatgctgacccatttatcctgactgatttttccttctgccccaaacctgacttacactctgctaaacttgtctctcttacacctttcatagaacacttcagtacatttttctgcatttta

SEQ ID NO: 653544 - DNA, 441 bp, Homo sapiens
ggaacgaattctctgtagtccccatagaaatcccatggaatgcagtttcctgctggtttgttacactgcatcagaataatgataatacgaggatascctactagattatgcaatgaaacaaaactcacacaccatagtccaaccagagagactttaacccttctcttctgcaattaaagcttcctacttacatcgaaaggttgtttgtgaataatcccaccagggagtcaacccaacaaaaataaatcacccagtgctttccgacaggccgagtccaatgcctggcacctagtacaataagtatttgttgaacaaatgatgaatgctgacccatttatcctgactgatttttccttctgccccaaacctgacttacactctgctaaacttgtctctcttacacctttcatagaacacttcagtacatttttctgcatttta

SEQ ID NO: 653545 - DNA, 436 bp, Homo sapiens
gaattctctgtagtccccatagaaatcccatggaatgcagtttcctgctggtttgttacactgcatcagaataatgataatacgaggatagcctactagattatgcaatgaaacaaaactcacacaccatagtccaaccagagagactttaacccttctcttctgcaattaaagcttcctacttacatcgaaaggttgtttgtgaataatcccaccagggagtcaacccaacaaaaataaatcacccagtgctttccgacaggccgagtccaatgcctggcacctagtacaataagtatttgttgaacaaatgatgaatgctgacccatttatcctgactgatttttccttctgccccaaacctgacttacactctgctaaacttgtstctcttacacctttcatagaacacttcagtacatttttctgcatttta

SEQ ID NO: 653546 - DNA, 655 bp, Homo sapiens
ttcaccttcattcgctttctcaacatcttcacttgtgttggcaaattctgcctggctctaaggatagttccattactgctgagacagtgggtctaagtctacaaatgagactaartaaggggggagagtaacttatttttaaggagatttaagaggacagtcaactgaaaaggaaattatttccattaaacagaagtaaaacaaatcctccattatggtctgccgtacgcataaagaaggaattggccatttaagaaactgcattaaatgaattatggataccttatcagttataattgctataccagaaaaaacgttaacacatacagactgcttagcaaacagtagcacttctgtcatttagggaaaaaataacatcctaaattaaaagtgacaaaactacatgttacacactattagggagccatgctaaacacagatggtatgatctgttgcttaatcatgaaactgtgagtaaaatatattgatctcagttcaaggagttaaaaacacccagtcaaatctttaaaatatctttgaaaattatcgcaaattctctttttgccaagctagtcattcatatattattatagcaaacaaagtaactaatatctttactttttaaagataaaatcttctacctctgaacatggga

SEQ ID NO: 653547 - DNA, 588 bp, Homo sapiens
gagtgaacacaagtcgaggccaaatatttccttgtccaggaagaaatttataaatctrtgcctcccttaataagtcttagtgatgcaaattgcctatttattcttttgagattttgtatcaagtggatctatcatgaagggaggaaagggaaatgtattttactgaattcagaagagtgtttattcacagagtaaggattcaggaaggtgagtcacatcctccaaagccatgggattatctattttctcctctaaaaagagtaaagaactagaaaccaatacaatgagaactccagaaactttctaacttctcaatgtttgcttttgtgctcagtacctgccagctttctaggacagtaagacccaagtccgtaaaatgcaggatctgaacctccttctataagggagcagggataaactattatcctttttgcagcatggcttgtttggaggaagaagcccaaagtaacacaagtagagacacagcccaaactaacacaagagacacagcgtggccaagttggttttatgccggaaatgcaacactacaaacatcattaagtgtaatttaccacatcaaaagattaa

SEQ ID NO: 653548 - DNA, 594 bp, Homo sapiens
ttacttggtttttctttttcttggggcctacatattatcaggaaattacatataactctgcttctcctcccgactatctgctacagaggcctaggcagatagtggtttcttctgcctccctctccactgcttcttttggttttgagttgttgctccttctccctgcccccacccacttcagcaatgcttattaatcaccatgcctggaccaggtggcatataaaacactgaaaggatgggacagctgaaataattatcctgtgttaccagcaccccaactcctagtcaagtaatgaacaatatccacaaaatccctgacacggtgctcttgtggcatctcccttggtccctattaatggcaggtaagtggctccccactttgtctctagtaggtcccccaaatccccataactccaatttacaccccaaaygtctcccgtgatgatctaaacatgataatctaaagtaactgctgaagcacattatcatggaccatttacagtactaattctgatagttctttatcttctacataaaatactattatttaattatctaaatttatttaatttatctaaataaaataaaatgttg

SEQ ID NO: 653549 - DNA, 526 bp, Homo sapiens
tgtctagcagcattcagaattgaaacactaggaaatcatgtggtgttcttggttttatcataatttatagtatgaaccaagacaagttgtttagacttcccgtgcatcagttctgcggtaagtagatcattaatatctgcctcttcgaattatgttctggaaataaagtgatcttttaaaattatagattattgtttctcattagcttgtacttaaagataacagcttttctcctcatttaagagcagggctccagtggaagactaaggtggtctcattcacaacttttcaaaagttcaactgattagtcaaccactttgttgggataatgatttgcttctcctttaatttatcaatgtattctgattcacaaaaaatyttgatagcaattttgaaaattttactctagtccagtttaggatcagcttgactcacaaacctgggataaactcaaactgaattaaaacaatggagaaggtggcatttaatagcaggttaagtggaaacaaagacatcttttgaattg

SEQ ID NO: 653550 - DNA, 624 bp, Homo sapiens
tttctctcccatttattaaaatggtataaaaccagctattcttaatgagatgggtatatacataggtatataatttctaaatatcagattctttgcattttgttttttccctacaatagactcccaactatcccttggattagttttctgaacaacttatataactttatacatctttgtactatactttgtcctcttcaagtatatttcttgagctaattataatgtttagttatttaatatcgagtaattccctttagagaagagtttwccttatacaaagcatgttcaaactctatcaccatttcctagtgccatttctttcattcaaactacatttttttttccttcattacatttaatgtagaattttaaagcaaggcttctgaacctgagattcatagagtccatggaatggatcctctagtccttgggcctcctgaaatacatgcagaattttgtatgtatgtatgaatacgcaaagatggtaccatagtattaagatgtccatggctttcatgagattttttaatctatgtcctcaaatttagtatcaaatgtatgacggtactaaaacactgattataatctttatactggcacctttgctaaagctgagcagtc

SEQ ID NO: 653551 - DNA, 596 bp, Homo sapiens
acttaatttatctatgttttggaaaaaagaaaaaacagaacaatatcatagtaataacaatcagcttgatctttttttttctactttctctttgaaaaagtcattaaggatcattcaagagcccatcctttatttcagattacattaataaggaatataactaacttaattttataaatagcttgtcaaacaatattgtccccccaaatggatatattacagtacatgccagaacagaggaaggtgagatagaaaagtgctaatttaattatgctaatactgctctagtaagtgtggaaccagatggtagagcaagcaaaccagggaggaattttttaaaatcaggtattttttaataaatatttgtgctccaaatctctacattattagcattggtggaattattatccttttttaagcatgttatctacaaggctgttgggaagcttctcctggggctccgaaaacaatacccaaatgaaagcctcagaagcaaaggactctttctgacctcctgctctcttgtctctggcctctccttctccccmacagctagccacaggaatcagaatccttcttccccaaggtgagtcatg

SEQ ID NO: 653552 - DNA, 535 bp, Homo sapiens
tcagcttgatctttttttttctactttctctttgaaaaagtcattaaggatcattcaagagcccatcctttatttcagattacattaataaggaatataactaacttaattttataaatagcttgtcaaacaatattgtccccccaaatggatatattacagtacatgccagaacagaggaaggtgagatagaaaagtgctaatttaattatgctaatactgctctagtaagtgtggaaccagatggtagagcaagcaaaccagggaggaattttttaaaatcaggtattttttaataaatatttgtgctccaaatctctacattattagcattggtggaattattatccttttttaagcatgttatctacaaggctgttgggaagcttctcctggggctccgaaaacaatacccaaatgaaagcctcagaagcaaaggactctttctgacctcctgctctcttgtctctggcctctccttctccccaacrgctagccacaggaatcagaatccttcttccccaaggtgagtcat

SEQ ID NO: 653553 - DNA, 613 bp, Homo sapiens
gacctttcacttcaagggaatcagtaatgacagctggcacagaagatgtgaattagagaggcaaaaaagccctttccaggactgccttcctcctctgtctctctcagagaagcaaggagggtaaacrcacagagaaaatattacaatagggaatatcaacatcgtccttcagcttaaacacatacaaatgagctttcaattttccagtatccatgacctagactggcatggaaaaaacagaaacatcttctccaagttcctaagctccttaagaacttaggtagaggctacgtcaagtatatttgggcatctttctcacagtgttcagtaagtgataggcatatcatagctgactgataagttcctcatggagtgacatgaagcaaatctgcaaaccagtagaggagtggttacatttgaatgcaaaaaaaagagatacaataaaggagaaataaagaaatccatagcaaataaacatcaaagacaaggccaattgtatggcaatgaagacaacaggaaccatgagaaaccacagaataaagggtcctgccacctcaaagacttgataattttacataattatgtcttactatattagttttatttacaaaat

SEQ ID NO: 653554 - DNA, 613 bp, Homo sapiens
ttacttcatctatgtaagttcctgaagcagtaaaatggcaaccatatctaaaatggcataatcatctttggcttagaggtaaggattctcattgatgggttatggtgtgagacttggaacctagatatgagctctctcttcaatctgaattattctattttagtctcctacaagaaggataattttggcttagcagttgatatttttctcaggtattcaaagctgttgaaatggtcctaggtgggaggtccacaaattaaaacacatcctttcactgctatcatatataaaaaggaaggaaaytgtgcatttaaactcatcctttacattgttttagccagttaggcctctttaatttcagattaagttaaaagtgagcttcaagaatgggaaatgcaatgacttccccaaaggacatcacacttttataacaattctgcaatgttagcttctgaagcacaaaatttatcttagagtatagtctaaataaatgtgtgtgtatatgtatttatatatttttatttatattacatatttaagtatataaataagtgcatatacatatgtaagtatacaatatatacctatctctacttcttatataaatatatat

SEQ ID NO: 653555 - DNA, 613 bp, Homo sapiens
ttacttcatctatgtaagttcctgaagcagtaaaatggcaaccatatctaaaatggcataatcatctttggcttagaggtaaggattctcattgatgggttatggtgtgagacttggaacctagatatgagctctctcttcaatctgaattattctattttagtctcctacaagaaggataattttggcttagcagttgatatttttctcaggtattcaaagctgttgaaatggtcctaggtgggaggtccacaaattaaaacacatcctttcactgctatcatatataaaaaggaaggaaattgtgcatttaaactcatcctttacattgttttagccagttaggcctctttaatttcagattaagttaaaagtgagcttcaagaatgggaaatgcaatgacttccccaaaggacatcacacttttataacaattcygcaatgttagcttctgaagcacaaaatttatcttagagtatagtctaaataaatgtgtgtgtatatgtatttatatatttttatttatattacatatttaagtatataaataagtgcatatacatatgtaagtatacaatatatacctatctctacttcttatataaatatatat

SEQ ID NO: 653556 - DNA, 627 bp, Homo sapiens
tttgtacagacaggaaatgaggaagaccaggacaaaactgttatcggtgagaaacagaagaaaaaaattctgaaatatagtgtagataaaaataccagttgaaagattagatgttatagcaaatgatctgctgctgatgattctcaaatttcaagcccaggtgattgaaaaagtagcagcagaaaactgaagaggcaatctacttggaagaaaagaaaaacttaatttgagtcctgctgcataaaaatgtaygggtgcatgatgagctttagcataactccagtgtaagacttggttggacttgaatggctattgtagaatgacaggagcgaaagtgaactgtggccaaacttaaaaaaaaaaaggaaaggaaaacaaagaagaaaaagttgaccagggagagaggctttctttttagagatgtgtttaactcatctaagtatataccaacaaatcatttccagatgttcaaaaatctaagtttactctatcaaggtacaaacataaggatctaagaatctcatctcataacaaagaagtaacgttactcctttgggagaagcagtggctgggataaagaaacgtgaaagtcagacattagccattgggaaaaacttatatacacgt

SEQ ID NO: 653557 - DNA, 517 bp, Homo sapiens
acccaacatgtataggaaatcaaacaaagctatgtgcacagaactgaaatgagttgggctgggaagccttctagaaaaagaagctttcacattattttattcctttctaaacatcaattggtcagtcaaagttttaaaagcaatagtaatttttccctttagagaacattaatgatgtttcagactaatactgacactaaataaaaatacaaattgtcaccaaartatctgtttttcctccttccatttctcctgggaagctcttactcatccttcagccttcagcttgtacttttttttttttaattggtagagctggcttatgtgttttgccatgaactgccatggtgctctaggccaatgccaaaggtagcatctttgttcttcttaaatgtctatgttctgtgctagctttccctggaacagaccttcagcatccaggcagcagacacagacaagttcttagcccacaggaggagattaataattggctgttgataatatgagtgaatggttc

SEQ ID NO: 653558 - DNA, 517 bp, Homo sapiens
acccaacatgtataggaaatcaaacaaagctatgtgcacagaactgaaatgagttgggctgggaagccttctagaaaaagaagctttcacattattttattcctttctaaacatcaattggtcagtcaaagttttaaaagcaatagtaatttttccctttagagaacattaatgatgtttcagactaatactgacactaaataaaaatacaaattgtcaccaaaatatctgtttttcctccttccatttctcctgggaagctcttactcatccttcagccttcagcttgtacttttttttttttaattggtagagctggcttatgtgttttgccatraactgccatggtgctctaggccaatgccaaaggtagcatctttgttcttcttaaatgtctatgttctgtgctagctttccctggaacagaccttcagcatccaggcagcagacacagacaagttcttagcccacaggaggagattaataattggctgttgataatatgagtgaatggttc

SEQ ID NO: 653559 - DNA, 524 bp, Homo sapiens
aattttggtattttaacaaattaaagctttaaaaagtcatgcaagccaaataaaacatgtcatagtcaaacatggatcagggactcgttttacaattgggtaacagtttggacagacaattataaaagtagtttcgcgtgatgttataggtaattttcctttattcatgtcactcagaatgatcacgaatgtatttatttgttacttatgtaatataccgtaatatttatatcaggaatttattcaactgaagcaaagtagaagattaagcaattattctgaaattgatattaatgtataggcttatcaataatctaaggaaaaaattcatcttcatatgggagacaaagcccaagatcacagggatcaactcaataggctataaaggatagatactagggagatggcttttctctatccattcagggaagggaataagcagacactaatgyctttggatgccttgcctaacatgtgttctgatgttttactacttttctaaaatagcactggtcagaatttac

SEQ ID NO: 653560 - DNA, 490 bp, Homo sapiens
aattatgtacatttgaggtgacttctattgcctcactttttctcatctgtgaaatgggataatactctactttataargttgtcgttagaattaagttaaatgagtcttttttaaataagatctttacaatggtgcctgacacatagtaatgctgtataagacatgttaaatgaaaacctaagctcacttcacattgattgttctttccttctaatgcctgcaatgctcattaataatgtgcactctcttctcactaatataattcctattccttggttctgacataacacatttttccttttattacagtcctcattttgcctatggtctattcattgtataccataagtgtacttagtgagttgttcaaataaaaatatatttaattagtggatgcttaaagatttataaatttttttgtgcaggatcataaggagcctttttttttagtacaataacagataaaaggtgacattcaattgcaggaca

SEQ ID NO: 653561 - DNA, 565 bp, Homo sapiens
gctaaaagataacggtaatagagattttccttaattttgtaataattactaaaaaattattttaaagctattatggaaaaatgccattttcatgttaacagaactgcaagatagggaaatgctactcacataaaagcaacaataatgaagaaatatttgttctaacttggaagtttatgagtcaaatttctttcaatctaggtagaagcagtttcctaatatagctaaactagcatcaagaaatcagttacgatattaaaaatgtcaatgtgtacaaagggttagacagctcaccagaagaaaattgtctatctacatttattattcattgattccttaaaaaaagaagataggataccactccatttatttttactagttactttgggctaaagatgtttctaaaaacgttgccctgtttctgggatagtaaatttaaaatatcaccccttttgtccagtactgttctgtatkgtgtaagtcatgtagctgtcaaaaggctttctttttttgaagccacattacagactaagttaattctgaagatagggataattatttggat

SEQ ID NO: 653562 - DNA, 490 bp, Homo sapiens
ttttccagaagtctttatttattggctctcaggcattcatcagttcttactggattatacgaccattcttgaatcaatcwtcatcaatggtagtgattgatttgtggtcaatttcacctaaaccaaataacagaatggagtctggatggtttcccaaaagaaggtgggatgctatgcaacaaacaacagatattcactgttgctagataatgctttaccaagtgcatcacacacacacacacacacacacacacacacacacacacacgttacagtcttctagggcctagattctgagctccataggaagggactgtgtcggtatcatacattatcctgtcctttgggcctaagtcagttcctggtacatgatcaggagaatacatgtattagcagaagaaaaacaaaacaacctaccttgcaacttcacttctaagcattggctacaaattacaaaaaaaattagttatagaaaagtatcatcaagact

SEQ ID NO: 653563 - DNA, 490 bp, Homo sapiens
ttttccagaagtctttatttattggctctcaggcattcatcagttcttactggattatacgaccattcttgaatcaatcttcatcaatggtagtgattgatttgkggtcaatttcacctaaaccaaataacagaatggagtctggatggtttcccaaaagaaggtgggatgctatgcaacaaacaacagatattcactgttgctagataatgctttaccaagtgcatcacacacacacacacacacacacacacacacacacacacacgttacagtcttctagggcctagattctgagctccataggaagggactgtgtcggtatcatacattatcctgtcctttgggcctaagtcagttcctggtacatgatcaggagaatacatgtattagcagaagaaaaacaaaacaacctaccttgcaacttcacttctaagcattggctacaaattacaaaaaaaattagttatagaaaagtatcatcaagact

SEQ ID NO: 653564 - DNA, 410 bp, Homo sapiens
tattttaagtgcttgtaatttttagtaatatgmaggcccatgaacaaatatcaaaagggaaacccaactgagagtgtgtgtgtatgctgataactgtttatttagggaattttaatgtacacaatcagcctgggaaactttgtactgtttattaaataaagcagagaaaacaagagaggatcaacacagtgggaaataaggtcaccagataaggctttttggctactgcttcctgttctgggtagctctgcaattcactctgagaattttactccctttacccagattgcaaatttcccatttcctgtcacttatctctgccacctccttcattcttgagctgccagaccaaaacagttcaaacagataaagacacagttaatttgttgaagagaacagagctctccagt

SEQ ID NO: 653565 - DNA, 619 bp, Homo sapiens
tttcaggtcaagtctgcacaaagagattacaacaaaatatttatgtggaattgaatacttcaaacctgtgaaaaggactatgtaaaagagacatatctaaacatttttcaagtacccaaaggagtaaagaaattgatttttttaaaaaacttgtttatcccagcaagtggctcattgactattaggccaatggggatgccaccatcaacaacagccgtgccaggctctccttacccctgaggttcatctgatgagctggtgtgccactggattcttctttgctcttataacaagaaatggatgtgtctttgaaggtgcaccaatattgtttgtaacctttcagagtcagcttttttggcctatgtatcaaagagaattaacaacaaaatcacttggaagtaactttattaacgctgtattagcaaagtttcacaatattaatttaagtctggggtcaagttttacacgtgctgaaattgatcccccttggtcagygtcttattagtcagtgctactgttactggatgcgagcctcccttctcaatctactctagaagatcccacaaacagcgttccgaggagaaaggcagtagggcctgtgttccagtattctgcagct

SEQ ID NO: 653566 - DNA, 654 bp, Homo sapiens
cacttaccaatgttctgtgttttaagatttagtgattgattggtaatgaatagtctctgactacttcarttgtgctgaaatgagatcttacaattgtagaaatgtcaatgttcataaattatgggaaatgaggtagaggttgaggccctcaggtcccaaatgtcagagtatattaagagtctggtgaagaattggtcaaaaatacagatccttaggtttactccagagatcctgattcaggaagtctggggtccagcctggaatctgcatttttactcactgctctgggtaattctgatgcaaaatgtctttatgagtcataccggagaaatcctggctgtgaatgggacttaaaaaatccagctttgctttcaaaagtgcaagggatatcttaaatttcttaatacatactctgacttaaatgctttaaaaacaatgttactaattcatctactttactttttatccccaccttcttgttttgtattattctgcttctttttactattgtaaatttactttacacaaggatccagatgtcccaaggagagtatacttcggagtataggttctctctgaaagaaaaaattctaggcatctcctcctcaccatactttcacagtttccttattctggtactagttggcttcctac

SEQ ID NO: 653567 - DNA, 574 bp, Homo sapiens
tttctcaaaaaggctcgggggtggggcgtggggggtaaaaagctgtactattatgaagccatcacttgttttccttctctggggaagaaaagggattttatgatttacttataaatttggcttgtttagtaattcttttaagwcaagaactacttatagtttactatacctagcaaaattctaacttctataataaattttagtaaaatatcttaattcttcaaaacattttgccagcattctggaaagaattatttctgtgtccctcctcccttatttaacagatcccatcacaccgtatcacgtgcacataacagtatctgacagacactcaaactcctatcattaacattgcaaattgctacaacattgactgaatcaacaaaaatatcctccctcaactgtaacagaatgctcctcaaattcagaaagtggtcgtacacttgctttacaaataaacatctgtgtattctaaggaacagaaggcttgggtttctcatcattagaggctgagtaaatattgcttagtctaccaaacagcttttggtatcacagtgctctcccactccatgag

SEQ ID NO: 653568 - DNA, 533 bp, Homo sapiens
aggggccagaggagtggttggggaaggctgacagcttgaattttcccaggttcctttggtggcatgaatcagtgagtaagaagcagagctccttatatcacaggtttattttgtttaaattgataaacactgattcatattagaatcacctggggaatccttacccatgccaatgaaatsaaaatctgtgagagtggggcctaggtatataggttttaaagtgcctcaggtgattctcatgtatatccaggctagaattgctgatttagcctttacttttagctatccaagatcaactgatgcttggctacatgcaaccaaatttcacttccgccttaccatacttaaacagcctgctgcttgcaaaaaatggcaggtgtaggtgttcacattttccttaatatgtcccaccttctcccataggccactcatatttcctgactttgtcataccatgcaagggcttgttggttttattttaggtcaccttttttagcgagctatgaactgtacctactctggcccacagaggag

SEQ ID NO: 653569 - DNA, 424 bp, Homo sapiens
gcctgggggaaagagtgaaactgtctcaaaaaaaaaagtatatatataatatatatatatacacacacacatacatatatatatatacatacatacatacatacatacatacatayatatatatatatatatatacacacacacacacacacacacacataggctgggcatggtggctcatgtctgtaactccagcactttgggaagctgaggtaggaaggtcacttgagcccaggagttcgagaccagcctggataacatagtgaggccctgtctctacaaaaaatttaaaaattagcgggatgtggtggtgcatgcttgtattgtatccctggctactagcaggtgctggggtaggaggattgcttgagcctgggaactcaaggctgcagtaagccatgattgtgccactgcactctagcct

SEQ ID NO: 653570 - DNA, 428 bp, Homo sapiens
gcctgggggaaagagtgaaactgtctcaaaaaaaaaagtatatatataatatatatatatacacacacacatacatatatatatatacatacatacatacatacatacatacatatatatatatatatatatatacacacacacacacacacacacacataggctgggcatggtggctcatgtctgtaactccagcactttgggaagctgaggtaggaaggtcacttgagcccaggagttcgagaccagcctggataacatagtgaggccctgtctctacaaaaaatttaaaaattagcgggatgtggtggtgcatgcttgtattgtatccctggctactagcrggtgctggggtaggaggattgcttgagcctgggaactcaaggctgcagtaagccatgattgtgccactgcactctagcctggga

SEQ ID NO: 653571 - DNA, 424 bp, Homo sapiens
gcctgggggaaagagtgaaactgtctcaaaaaaaaaagtatatatataatatatatatatacacacacacatacatatatatatatacatacatacatacatacatacatacatatatatatatatatatatatacacacacacacacacacacacacataggctgggcatggtggctcatgtctgtaactccagcactttgggaagctgaggtaggaaggtcacttgagcccaggagttcgagaccagcctggataacatagtgaggccctgtctctacaaaaaatttaaaaattagcgggatgtggtggtgcatgcttgtattgtatccctggctactagcaggtgctgrggtaggaggattgcttgagcctgggaactcaaggctgcagtaagccatgattgtgccactgcactctagcct

SEQ ID NO: 653572 - DNA, 515 bp, Homo sapiens
gaaaagtgagatctatacaggagaactccaaaccaagaaaggttttttttttttttttggccagactctgaaaaagtaggctctaatatatatttttaaaaagtctatacccwtgaaggaccgtgtgaggagatgctatcttatatagaatagggctgaggcttattgaggctttgccaagatttcagagtaaatcttattcactttgaataagaaatttgtcttatgaaaaaactattggcttgaaaagtaacgaaacaagggctgagggagactccagtgggtttgtacctattctcagccttacccaggagctggctgaaatgggttagttgatggaaaaatctctttgtgtgtgtgtgtatgtgtgtgtgtgtgtgtgtgtgtgtgttttaagtaagtttttctgttcgtaagtgacgttattttgattgttaaatgtgatgtttttctattgtaaaagaaaagtcactaaaaactgagaggacaaatggtacctcataagcacccagact

SEQ ID NO: 653573 - DNA, 557 bp, Homo sapiens
acaatgaaatgataaaaatgtgaggcgatggatatgtcaataacctagattaaccattatacattgtaggcttatgtcaaaaaatcaccggtaccccataaatataaataaataaataataaagtctatttcaagaactgcacagtgcctaagagggaaagcatgtttagtttcttctgggcaacacaggatggcaagcagcactttgtgagagctcagggggagagtggacactgctgtaggaggaaagatcccaggctcagaggccagcaggtagaagacaatctcagtcaaattcatatttttgccctgggccagatgtgtctaaaagcttcacgcttttgcacagctcctcccccaggagtagcaactgacggaggggtcacgtgcttatttccccagtctcaccccctgggtaaacgtcagaagatctgctgatggacctttcaatttcacttccttcctttgcctcctgtggatgatggtttgcagggagggaggaattttawtaacacatgaaactttcaattcctgtgaataaaacggggaaggcttgt

SEQ ID NO: 653574 - DNA, 534 bp, Homo sapiens
tgccctccaacaagcacggccagaaatagatgcagtgtctttctcggccaatcatagcttctttttgctctaaattggttttatagctgagttgccatttaaagaaaaaaaaacaaaggtctacatagtgaatttgggtgtcctaatccttcccctgtcaggcacattcgctggggctctagtcttagagaatgccttacctgactttcaacagatggatgttaatgggatatttatttactgagtaaaattaaattggagctgcatcttaatgcacaatttacataatcagctttgttctgaactgatgagctgttttcaatagcacttgggacctttccgtcacagctgcctcaaagcagcagccacygagaatggagattaaacaatttcctaaagctggaagtcttgatgaggatctattatcccattctggagacctcataatttctccagacactggcataggatcaaagattcatgttagtttcttgccatcgtttgggatcaaaagaaagatgttcaatttgcatt

SEQ ID NO: 653575 - DNA, 240 bp, Homo sapiens
tagtgttacagagctgaagcggctcactacccaatgcaatagaagcmaatactaaaacactaagttctttaaaaaagaaaaacttgtatattgaaagtcaactcccaaggagacaagagtcaagctcaaatctgtctctctgtgctgacattaaggtagtatttttattagaaaagattcagggggtggattctgagattagtaggtgattggtggatggaaatgggaggtctggaaagt

SEQ ID NO: 653576 - DNA, 557 bp, Homo sapiens
aggatcttacattcataatttcgtgtaataatacatataaaatttacatcctacaaatatrgaatatataactttctcttatttttttctcctttgtactttataaaatttctaaaattcagttaggttcttgatgatgaaaacatttcagatagttcaggaaagtagagattttagagtcatcagtctctgatcaaaattaaaaaaaagataaataaattgtataaagacccaagctgaaccgtttaatatcagagtgcactctcataaagtgtccctaaagcaaaggagaagtcaaggctgaaattccaagttaaagaaatagtaattcaaactagaagaccttgtagcaaatttatcgcatccaggaaaagttgtatttagaggaaatagcttcagataacttctttattatagaagaaaattaaaactacaagttagaattcatgttaggaaactcaaagaaaaaaatgacaaaacaaaacaaaaggacctatgaaaaggaaattaattgggataggaactgatattaatgaagtagacacaggggctaccaa

SEQ ID NO: 653577 - DNA, 557 bp, Homo sapiens
aggatcttacattcataatttcgtgtaataatacatataaaatttacatcctacaaatatggaatatataactttctcttatttttttctcctttgtactttataaaatttctaaaattcagttaggttcttgatgatgaaaacatttcagatagttcaggaaagtagagattttagagtcatcagtctctgatcaaaattaaaaaaaagataaataaattgtataaagacccaagctgaaccgtttaatatcagagtgcactctcataaagtgtccctaaagcaaaggagaagtcaaggctgaaattccaagttaaagaaatagtaattcaaactagaagaccttgtagcaaatttatygcatccaggaaaagttgtatttagaggaaatagcttcagataacttctttattatagaagaaaattaaaactacaagttagaattcatgttaggaaactcaaagaaaaaaatgacaaaacaaaacaaaaggacctatgaaaaggaaattaattgggataggaactgatattaatgaagtagacacaggggctaccaa

SEQ ID NO: 653578 - DNA, 418 bp, Homo sapiens
gaattctagaaaacgctcaaggaaatctgaaccatagaaaggaggccttagcaacagagcaatggaaatagaataagagagtgaatgcgtgggtaagaatctgaagcaatgacagcaaagaccaaatcatactactacgagacatggaaggtcttacagaagaaggatgagtgcccagcccatgaaggcagagaacagagaactgtggatcaagactgagaaagtagaygaagactgagacatcagcacctcctgttacacagtgataatataacaaacaaacagctgtaatgagctgtttgtgtttagctgataagaacattttgttcatttatccaacaaacatttactgggtttgtgtgtgtgtgtgtgtgtgtatgcctggcacaagaaatgggatgcaaaaatggattgcatc

SEQ ID NO: 653579 - DNA, 583 bp, Homo sapiens
accatcataagtcagggaccatctgtatattgtaaatcctaaggcaaccactaaaaaaactgaaaatacacagaggacctggcaaacttcagtcttccaacatcacctagacccatatcyatctgtaattcaacttcttttgagaaaaacgattataagtctatctgaaagaatgtagatcaatgtcaaaatcccagttgtgacaccagatactatagttgtgcaaaatgttaccattgagggaaagtgggcaaagtgtaccgatcacagtagtatttctcattactgcaagtgaatctacattatttcacctttttaataagtaatgtaataatcatattctcccatcagagttcatgaggccttacactgcataattctagtactacctcacaacatataacaaattccagataaaaagtataactccttttgtcccagaatcatttataatacatagagctgtccttttaagtgtatttatttgaataggtaataaatctcaaggcacaaaactcaagggagtcagtgaaaagtctccttcccctggaactcattctccagccatctagtttcctcctca

SEQ ID NO: 653580 - DNA, 516 bp, Homo sapiens
gtagaaacaagggtggagctaaaaattataccaagcttaaaacaaaaataaatgcgcctaattrgggatcaattagtgtcaacttaaagagcagaaattttccacaatttctcagttctgggatgagatccccgcctcctttctcaaagcatgcccacctttctacttgcagctcatggtaatatcccatgagatttaatcaagagagagccttgggaaccacagccaaaatttccatttgattccaaaaggaaaaagatgggaaaattataaagattacatggaagtgggagacattctgagaaaaaaaaaaaaaactcaactgaaattcttattggattgttcctttagagttagtaacattgagataaatagaatgattgtattcatttagtatgtagggagaaagtggagtgactatgaaattcctttcttgttctgaaattgaggcagtaattaagagcctaccaacaacaacaaaaaagcccaggaccagactgattcacagccgaattc

SEQ ID NO: 653581 - DNA, 574 bp, Homo sapiens
ctctctggcatctgtccccagaaacatactttcacctcctctccagtgttaataaccaaggaagtatgactttagtgaccatctctttcccttattttcttttatagttttttcasataagcattgaatcctaaataagatgatcctgtttttcctatttttgaacattatataaatggaattctatagtatatgttccttgctaatcggactcaaccttctatttgtgtgatttatccatattgatttgcttagccttattggttcctttccttttatgttatagcatttcattgaggggtaatttcacaatttatctactctaaagttcatgggcatttgcattgtctgctctttggggccactgtagataatactgccataaacatttttgtgcctgtctccaagtgcatgtatgctaaaatttgtccaggctccccagctaagagagtaatctcagaatcatggagtctctgcatttttacctttatctgataattccaaaggtttctcaaagtggttctgccaatttatattcacacctacagaataagtaagaatcttatcattgtcc

SEQ ID NO: 653582 - DNA, 381 bp, Homo sapiens
tgcttcctactgatgattaaaagcattcaaaagtatttctcttggttgcacccccagcccctttctgttttatttctcatttttcccttttgagtgccctgtgtcccacccatgtcctgcatttccggcttcagtttctttgcccaaaactgtttccaaatgcctaaaatrcctcccaatcgcacttccacatattcaaatttgtcaagtccaaatgcaaacttgtcttctccaagaagatttttctgattccttagcctgttgtagtttctcactcttcagaaagccaagagaaatgatctgttttttctcttatagtagatgtgaattattactttgcagtaaattagctgtgttttatctacaccataagactgtaca

SEQ ID NO: 653583 - DNA, 549 bp, Homo sapiens
ggtagcagatactgttctttcattttcatgtttagaattcacttaagaatctcttgtaaggctagtctagtggtaacaagtccccttagtgcttgcttgtcagaaaaaaaaatcttttttctcctttgcttatggagcttagttggcaagatagaaattcttgcttggaattatcttttctttaagaatgctgaaaattgctgagttcagtggctcatccttccaatcccaatactttggcagcttgaggtgggaggattgcttgagcctccaggagttcaagaccaccctgggcaatatagtgagaccttgtctctacaagtaataataaaaattagctgcgtgtggtggcatgtggctgttgtcccagctgctcaggaggctgaggtgggaggttcacttgakactgggaggttgaggctgcagagagatgtgatcgttccactctattccatctgaggcaacagagtaaaaccaagtctcaaaaataatgataatgatgatgatgatgatgataataataatcatataatgctgaaaataggtctc

SEQ ID NO: 653584 - DNA, 392 bp, Homo sapiens
aagagaaccaactggaaaaattgaaatgattatcattagggagtgtttgaatgttaacaagtaaatttcattcttaagtacatataaccaaacaagggatttaggcatagctgacataaaattaattaggattttaaagtaaacacacccaaaccctcattaatttataaataactttataattgtcttttatttttattactttcatttgctacaaaagcagtatgtgctcattatagaaaacaaaggacagatatcctaataacataatatctctagcatccaaattgtaagaatacaccaamaaatatgttggagatgttggtctctcacacactttttctgtattagtttggactgctataaaaaaaataccttagactaggtgattt

SEQ ID NO: 653585 - DNA, 626 bp, Homo sapiens
ggaacagttgcaaatcgccgaataacaactaacagcatttcaaggccagaaagacggagctggtcactgtgatctgtggcagccataaaagccatgcgaattaagtcagcaagatgcagtaccaaaaagtcatctataagattaaaaaacatattgggagaaaaaaagattagaaaatatcaaaaaaatgtgctggaactaagacttacattaagtgataatttttcctcctttaagtacctctgacttgatatactgtttttgctgtttgttaaatagagactttaaagctggatttaatgtacactgcaaatacacacaagaaaactgtcccaaagctagtaagtatatccagctactcagggcagaattagcattttttaagkgtcctaatagtatcttcaataaaattttgttcagcttttatgataaaagtacattagttggtatggaggagactttgggctttgactaattaagcagaaatttattttctttatgtcaggttgaagctaagacataatgttcctttaaaaaaaagttttatgcggctctttctatgaacgacaatatcttatttttacatatactgccaaacatacaaatggtgggagtataaaaaacat

SEQ ID NO: 653586 - DNA, 569 bp, Homo sapiens
cttaacatggatgtgccacatgacaggcaataatatattggccccattagcccttcctggagcagtcataatgaattacagtcatgacaggcacatgtaagaaaccaaaatttgctaaatatgtacatgagtcttcatcacagcatcgtttatgaaaacaactaaatattcactaatggkgccagtggaataaatcagagaacatcccctgctacgtaactctctgcatacatcaaagagaatggtgtggctttgctttttcaacaatctactgagtggccatgggcatgtggatatggccatgaatgagcaagatcctctctgatcctgtagaagttaagttctaccagataacttgctgcttcaacaaaaagatttacctttttaaataaatgttgtagaatacttaaaaaaaacaaactagaatttgcctgtgtgcagccagtaacatgtctatttaacctggacaccttttgaggaatattctcagattgcccccatgctgtttataagacattgttccttatacacctgtttatgaatgaaaagaaacataaggagtgggtaca

SEQ ID NO: 653587 - DNA, 395 bp, Homo sapiens
acatcctagggaagataaagaaaagagtttagggttgtccaacctcatagaaaggagaaaggaaaattaaccaagtccacaggcatgacgaccctagtctgttttagctgccaaaggaactaataatgctgccatttaagttttaatttatggattgtttgtggtgtttcccatcccttttaagttgaaattgtgtgttgcaatctctacagtaatagaatatttcttttttcaaagtattcaacaatragtttaatattctttcttcctgtgatgcataccaccatccgttatgctaaattaactgtttatacacacatacacagagctcaactggtcagagctgtggttctcagcctgagtccacattagaagttttggaaatactgctacca

SEQ ID NO: 653588 - DNA, 523 bp, Homo sapiens
ccttctgtcagtggctgaaggcctgaaagcccctggcaaaccgctggtgtaggcccaagagtccaaaacctaaagaacttggagcctgatgttcaagagcaggaattatycagtatgggagaaagatgaaggcaggaagactcagcaagcctgctcttccattttctcctgcctgctttatttcagacgagctggcagctgattagatggtgcccacccagactgagggtgggtctgcctcttcccgtccactgactcaaatgttgatctcctttggcaacaccctcacagatgcacccaggaacaatactttgcatccttcagtccaatcaagttgacactcaatattaaccatcacagaaatagaatattggtgagcactgtctctctctgccactcaagtctatgcatctatgcttatttgcattatcacttgtgtgtatacaggtcgcatgtatattttatatatagatttcatttacatttgcccccatttcctctagactcttcagaccacagatca

SEQ ID NO: 653589 - DNA, 262 bp, Homo sapiens
ggcatgccccagtcaggtccgactcatccccagccatgtgaggtgagctccgtgtccccccttttcaggcctatacaaccttctcaaagcctctttccggattcatcttgctctaaaatattgattttcatgacaggatattccttgtggccaatcaagtctattaagcttctgraagccagagggtaggagaacccaggtgccccagggccatggctacagagagcccagaagagtcctggggtccgcacttcctgctgtg

SEQ ID NO: 653590 - DNA, 517 bp, Homo sapiens
ccacaaccaggggaaagtacatctactgggaatttgtaagctgcacaattaccagagcttgcaaaaggctcaaagacaagtgaagcacaaccagtcagagtacaaagacactggtgaacagggggtagaattcagtagtgatcccagaaaggccaagtcttaagtatagggttaaactaatgctaggactgcagctaccaaaatgtggactagggaaccccagtgggtctgtaaagttaaaacaagtttaaataatactaagatttaatttgccttttttcactttaatttattcacaatkatacagtggtgtttatagaagctacatgttgtatcataatattacattgacattgtacaggttgtgcttctgtagtcttgtgttacaaaatgttcctagttttaatttctaaaatgctgaatagtccatagttaaaatcctcatgaacaaaaactatggcgtccccagtaattttaaagagtgttaaggttctaaaaccataaagtttgaaaatat

SEQ ID NO: 653591 - DNA, 555 bp, Homo sapiens
acaaaaacctgtattaccctataaaataaatactagtgtagttatcaacaaagaaktctgaaggagataatgttgatttgcttactatactgacattttactgacaatgatataacacagtgatgtctgaagggcaggggagaatggtataaaaatcactcatggttcacaacctattattgaaactgaggttagtatttatattacatggtatggcaatactagaaaagatttccttgtggagtatacagtttaagacctctgctgtacagctatacctccatgcttgcttccagtggccatgacactttattcaaatatgtaagttttattaagactgagttcttaaaaagaaaaaaccaagaaccttagatacaactagtgaagtattgagacctgtccatatttaaaaccaagcacacgataccacttaaaaggttccccagaaagcctctatcctgaaatgcttgaaagtgagcagtgctgactctcgattattaccaattgcattaaatatgacacttgttttgtttcttttggctataaggagaaaat

SEQ ID NO: 653592 - DNA, 555 bp, Homo sapiens
acaaaaacctgtattaccctataaaataaatactagtgtagttatcaacaaagaagtctgaaggagataatgttgatttgcttactatactgacattttactgacaatgatataacacagtgatgtctgaagggcaggggagaatggtataaaaatcactcatggttcacaacctattattgaaactgaggttagtatttatattacatggtatggcaatactagaaaagatttccttgtggagtatacagtttaagacctctgctgtacagctatacctccatgcttgcttccagtggccatgacactttattcaaatatgtaagttttattaagactgagttcttaaaaagaaaaaaccaagaaccttagatacaactagtgaagtattgagacctgtccatatttaaaaccaagcacacgataccacttaaaaggttccccagaaagcctctatcctgaaatgcttgaaagtgagcagtgctgactctcgattattaccrattgcattaaatatgacacttgttttgtttcttttggctataaggagaaaat

SEQ ID NO: 653593 - DNA, 590 bp, Homo sapiens
gacctgagatcttacagcctcaagaagtgtgaaaagagaaatatctgttgttttttagtcacccagtwtatgttattttgttataagagtccaaatagaccaagatattccacttaatatgcaggggaaggcaacaaaaactgccacacttagaatactcctgatgctgggagtatgaaaacaggaaaaacaaaacaaaactgctcttgaaggtgaaggaggaatatcactgagctcactaacacagccaggaaaagaacagaagtgtgagaaggctacattcctgagaccctgagaaaaagtacctgcatgagactgagatgaaattacctactctagttatgactgaaatcccaaaaagaaaagagggaaaaataatggagcaaaagaaatatttttcaaaataactgccaaaaatattctaaaagaagtgacagaaaatggaacttcagatataggagactcagagaatgtcaaatagaacaaaaataaataagaattaaatcttgaaaaatcttttaaaaatcaactctaaattttatatcttgctccaaatatatagagatataaataggttatcatcaagatat

SEQ ID NO: 653594 - DNA, 370 bp, Homo sapiens
tgctattttttttttatctaggccctgtccctttgatgttaagtggtggagggagttggcgggatttgcctctggcttgcggtatatctagtggattgtatcaaatccagaaytcaagttctttccatgtcttgaaaacaggcaggatttatcagaacttttataaatgttgtgaaaaatgaaggtgaataaacacctgtttttccagcatctagtatacatcttaaaatctgagaagtgaacttctctgttttgattgtaaaaggaaagagaacggtaacacagaaactttgtgtcccaaatagagcacagataacttgtctattactcatagtaatcctcccttaaatttgtataacatgcgaagttt

SEQ ID NO: 653595 - DNA, 581 bp, Homo sapiens
taccacacattactctttttaattcaatgaggtaatagctaaaggattaaaaatgaacatagcaagactccacatgttatcctagacttaattttctgacacaaattagcaataattattccacaatttataatctagttcccctgaaaaatggacattaatcagttmtttatttgaaacatggtatttaatttttctctggaaacgaggttttagatgtttgtaatgaaatttttcggcctgtgaaaaaaacttaatgaatcaagtttatatacatttctttactcctaaacctaatccccaagttactgtttctggcaaaatttacataaaatcaacttcagtttgtaaacacccaccttgctcgcccttgtaattttctgccttctcatgttcaaatacctccagtaactcttcaccaatcatggatgtctttcctgcccctcagatagggttaagtaactacagacccaatgcagggcctccatacaatctgatggctcatgaccgtaaacccagcagtttgggaggctgaggcgggtggatcacgagggcaggagttcaagaccagcctggccaat

SEQ ID NO: 653596 - DNA, 596 bp, Homo sapiens
cttttggttacgtgactctgttatttcacagatttaagagcaacaatggggacattttctaatgaatacaataagatggaaagaaagaattgatgtgcggaaatgtcatagtgagacagtggtaggactgagaagaaaaacaaagtcctaaaagtcagctatgctagaaacttggacacaccattaactttaaaagtgatgtacataaatatattgcaagaagaaaaaatggaataggatttcccaaattagagcaaatttacattttccttaatgttaccatgtgagacagctctgctgtcactattgtcaacaggaaagagtgggtttttttcttgataatttcttccctccataacccmgtcctagtcatagtgaaaaggaagaataaaaaatagaaaacaaaatgcaccttgattcaaaattctcagaaacgacatgagaacttcacacatggcatttgttgtgtgtctaaagtggctgtgtcaagtttccattgagtaattaaataattttacatctagaaacctgctcctaatttgtttattgaatattacaaatcttaatagagtgctattacctatatctttagaagg

SEQ ID NO: 653597 - DNA, 557 bp, Homo sapiens
catttttgaaactgaaattcagaacttataacaagaatgctttccaccagagaaacttcaatgccagtcatgaaaacagaaagcaaaaaaattaaaagagatatttttaaaagaagctgagagaagtcacatttccaactagaaaaccattgggccacccaagaattaagagaattaagagttagaaaaaaaaaaaacrtaaacaaaaacaaaacccacagaaatatagccaggaaatctggatttgaatacttgagccacattatgaataataaaagagagaataacctctccaaaaaactaaaggctctgaaagagaaacagtgacttgttcattctcatgttgcaaggactggacccagtgcttgtaacatagttggctctcagtaaataaagtgaagtcagagaagaataattccaaagcctcgcatttcttgcataatttgcactagtgtttgattattttttcagttaaatacttacacatagacaaatgtccatgatttttttcgcttctatcttttgaataaaccactttttactataatcagatttgt

SEQ ID NO: 653598 - DNA, 557 bp, Homo sapiens
catttttgaaactgaaattcagaacttataacaagaatgctttccaccagagaaacttcaatgccagtcatgaaaacagaaagcaaaaaaattaaaagagatatttttaaaagaagctgagagaagtcacatttccaactagaaaaccattgggccacccaagaattaagagaattaagagttagaaaaaaaaaaaacataaacaaaaacaaaacccacagaaatatagccaggaaatctggatttgaatacttgagccacattatgaataataaaagagagaataacctctccaaaaaactaaaggctctgaaagagaaacagtgacttgttcattctcatgttgcaaggactggacccagtgcttgtaacatagttggctctcagtaaataaagtgaagtcagagaagaataattccaaagcctcrcatttcttgcataatttgcactagtgtttgattattttttcagttaaatacttacacatagacaaatgtccatgatttttttcgcttctatcttttgaataaaccactttttactataatcagatttgt

SEQ ID NO: 653599 - DNA, 593 bp, Homo sapiens
aaaaatggtgtgcaaggaggcacaattcccagggcaatatctttgattagcactccgattgtaagatccccttcacccagaatcacgcaggagctgggtaagactggagcagcacttaggaaatgaagttcctctaacttcccttacatgttgattttactgtttgatacaacacagtggttttttctcaataactttgtcatggaagatttctaggcactggccaatggcaacatccctaactaaattcgtgcaacttaatttccttaggaaatacatctaacatttgttgatgtagaacttgcttactgcagttcagtgcaatggaaacacaaacagtattgttaattaatctgtttgcaattttattctggttcacatctctaagaagtgtatctcataagtctttgaatgtagtagctataaaccggccttaagctttcatgtttatcctaatttgaggcacttttcacaaaatattttatacctgctayacactacttatgatcaacttaaatttacaattgtcattcgagatttttgcttttaaattttattgtaatacattagctttggaactttgacaacacgtt

SEQ ID NO: 653600 - DNA, 570 bp, Homo sapiens
catttcagcctacaactcagtacaacacagaaaacatgcaaagaaatcaacatagatgatgcttgctttatatgttacattacctctattcttttcaacttcattttacagattaaaaaaatcaaaagacactaagtgatcttagggaaaacttaaacttcactgctcttagttttcatatcttgcttgtttaggtcagagaataaaccaacattgtgcagttttacacatgaggctagctctcatgtgctcatttgaaaccagattcacagatgagcaccatatcaaaaatttctgatctgtgtattcattccatctttaaatctgagagacacaattgcccacatttgcactatgccaaagatgcatggtgttttccattttgaaagacaggagagttctggctttgagatcagccttgaccattaatacatttcagtagcattcacccrttttaatccaacatacttattcctcttcagttattttatttgtgtttgtttttaaatggcaactcccagagtgattttcagagaagaatgatttaaagttcataaaatgtcatcacac

SEQ ID NO: 653601 - DNA, 595 bp, Homo sapiens
ttatacgaaacacgatccaacaactaaaatacaattgagcatgaattccatacttcttacttcattttcttcttaattgcaaaataagcttttattgtggttttgcaagrcttctcttgtgattttgcaaatgttagaaataaatttctttctcatcagaatcaccccaaaataatgcaaaacttaaagagtagctgaaagagacaagtaaaacatgggatattgatagtatgaatgatgaagatgttaagttggtgtttacaaatattcaggttatagctaacatacagtttctattcaggcagttatctatggccatctttcatcagtttttcttctttctctaaggactagaaacctatggtagaagaaagactgacaaaattattaagttgtctgtaatgttaagaatcaatgcagaatacttggtccaaaatagcctaagaatttttattgtttcttatattcctataagccccattgccagaatccatcttaacacttgaagtcaaatatagtttctcccctaactgtgcccagttatattttttcacttatgtttcattcagtactaatgaatgaaattatggcaatt

SEQ ID NO: 653602 - DNA, 595 bp, Homo sapiens
ttatacgaaacacgatccaacaactaaaatacaattgagcatgaattccatacttcttacttcattttcttcttaattgcaaaataagcttttattgtggttttgcaagacttctcttgtgattttgcaaatgttagaaataaatttctttctcatcagaatcaccccaaaataatgcaaaacttaaagagtagctgaaagagacaagtaaaacatgggatattgatagtatgaatgatgaagatgttaagttggtgtttacaaatattcaggttatagctaacatacagtttctattcaggcagttatctatggccatctttcatcagtttttcttctttctctaaggactagaaacctatggtagaagaaagactgacaaaatyattaagttgtctgtaatgttaagaatcaatgcagaatacttggtccaaaatagcctaagaatttttattgtttcttatattcctataagccccattgccagaatccatcttaacacttgaagtcaaatatagtttctcccctaactgtgcccagttatattttttcacttatgtttcattcagtactaatgaatgaaattatggcaatt

SEQ ID NO: 653603 - DNA, 589 bp, Homo sapiens
ccacccttgtatcccaaagataaaacctacttgaacatgatggattagcatttttatgtgatgctggatacagtttgctggtattttgttgaggttttttgcatmgatgtttatcaaggatattggcctaaaattttctttttctgttgtgcgtctgccaagtttggtatcaggattatgatggcctcatagatgagtaggagaggagaccctcctccttatttttgggaatagtttcagtaggaataaaaccagcccttctttgttcatctggtagcatttggctataaagttgtctgatgctgggctttttttgtttggtaggctatttattactgatacaattggagctcgttttgttatgtttagagattcaatttcttgctggtttagtgtaggaactgtgtatgtatccgggaatttatctatattttttctagattttctagcttgtgtgtacagaggtgttcatagtatttgctgatggtcattagtatttctgtgtgttcagtggtaatatgccctttgtcatttctagttgtgtttatttcaatcctctgtctttccttctttattattctagctagca

SEQ ID NO: 653604 - DNA, 589 bp, Homo sapiens
ccacccttgtatcccaaagataaaacctacttgaacatgatggattagcatttttatgtgatgctggatacagtttgctggtattttgttgaggttttttgcatcgatgtttatcaaggatattggcctaaaattttctttttctgttgtgcgtctgccaagtttggtatcaggattatgatggcctcatagatgagtaggagaggagaccctcctccttatttttgggaatagtttcagtaggaataaaaccagcccttctttgttcatctggtagcatttggctataaagttgtctgatgctgggctttttttgtttggtaggctatttattactgatacaattggagctcgttttgttatgtttagagattcaatttcttgctggtttagtgtaggaactgtgtatgtatccgggaatttatctatattttttctagattttytagcttgtgtgtacagaggtgttcatagtatttgctgatggtcattagtatttctgtgtgttcagtggtaatatgccctttgtcatttctagttgtgtttatttcaatcctctgtctttccttctttattattctagctagca

SEQ ID NO: 653605 - DNA, 606 bp, Homo sapiens
gctgtgagctttgctgcatggggtcgggggaggagtggtgcaagcacttgcttaattgacatggctggtgtctccctaggtcacattccaccctggtccactggctctaagcccagttctacactagaacttgcctctcagtttcagcttttgtggctttgactgcctttcaagtttacttagggccccagagcacyttaggttgggatagcaaggcttgtgaaaactcaattactcaccactggaatgggcaatttccttcttgctagaggtagtttaaatacttcctccatgggtgaaaatcacctgaattcagcccagttttactttctcttgtgtcagggaagcactgagttctatgcattgtctcacaattgctgcattagttctcttccaagtgcacggattctctctccatgccacatggtcactgctgggtgatggggaaggggtagcatcagtaatttgagattatctttcctattatcctcagtgcctcttttagttaaaagcaagtagtgtgagtaatcatctgatttttgttttttatgaaagtgcatttttttgtttacattggtgtaaaattttttgttcttgtgggaggga

SEQ ID NO: 653606 - DNA, 606 bp, Homo sapiens
gctgtgagctttgctgcatggggtcgggggaggagtggtgcaagcacttgcttaattgacatggctggtgtctccctaggtcacattccaccctggtccactggctctaagcccagttctacactagaacttgcctctcagtttcagcttttgtggctttgactgcctttcaagtttacttagggccccagagcaccttaggttgggatagcaaggcttgtgaaaactcaattactcaccactggaatgggcaatttccttcttgctagaggtagtttaaatacttcctccatgggtgaaaatcacctgaattcagcccagttttactttctcttgtgtcagggaagcactgagttctatgcattgtctcacaattgctgcattagttctcttccaagtgcacggattctctctccatgccacatggtcactgctgggtgatggggaaggggtagcatcagtaatttgagattatctttcctattatcctcagtgcctcttttagttaaaagcaagtagtgtgagtaatcatctgatttttgtttttkatgaaagtgcatttttttgtttacattggtgtaaaattttttgttcttgtgggaggga

SEQ ID NO: 653607 - DNA, 574 bp, Homo sapiens
atactaaacagaagtctgtctccctgtaacaaatctgcttcctgtgtcacagatgccccttggagatgcctctgaagacagaagccaggcctatctttgtcctccaggctttttctccttcgaggtaaacatcctcagaccccttagttgttcctcatgtgatctggtcacctcaccttccaaaagccaagccccatgttccagtgaggcctgaccaatacagttgagcagcctctttctgggtagactggcattagtgtaccataagattacactacctttttcctccagttgatttgtattaacatttttaaacttttgattttgacatagtttcagacttaagttgcaaccaagcacaaagaattgacatacaccctttatccagcttctctatttattttttaccacattgccttcctgtcactctctcagtttctttctgaaccagttgagattaatttgcagacatcctgccccatttccccttratgcttcagtgagtatttcataaaaacagggatactctcttacataaccacagtacaaccatcaaaattaggaaattaacaat

SEQ ID NO: 653608 - DNA, 605 bp, Homo sapiens
gcgatggcttgtaaaaggcactcagtaatatactaacattactgccaaacaactggttaattctgtccaaagattagtgtgtgccacgaggattgaaaagttaaactgacaagtttgagattttgcatacaaccatagccacatacgcaggtaggtaacagattttttaaaatgaaaatcggtttcttttgaattaatctcatttttctggttataaaattaattatttttcctagttatgaaaattaaaatattttagattacttagtaaaaacggaaaaattaaaacagagtaaagaataaaataaattacctataatttctcaaaccagtaataacgactggtaacatgttgatgaatgtccttctgatctttatattatacataaacacagatatgctacaggactgccagcttcatatgcccactgtgcagcagcagaccaatacactgactgcrgggttgcagcagaggagtttaatcacaaggcgccaagcaaggaaatgggaggaattctcaagccttgaatttgtttccttgagggattctgggcaagggtgtttaaggggattcataaaagacgggggcggggcggggtgggggc

SEQ ID NO: 653609 - DNA, 611 bp, Homo sapiens
ctattcttttctaagcctatcaaatattctatccttatcctgccccaaattataagcatcttcctgattgaaaggatattagaaatgtttgcacacttctaaattccaggcattgtataaaagggtttcatatatatattgcctcccacatgtaatctcatttattagacagtagactaatgcttacataggcataattatcattcccttaatcttataaaaacaacatatatatatttatataatttctaaaacataccttgtgtctctcttaaaaatgtcaaatatgttgttcatttcaagatgtctttaacaaccagaaaaaaaaaagaaacagaaaaaaggcttccactaagcccaagaagcttaaggattctatttgtgctgcttcctgaccctacctattaaaatgcagtatctctaatgtcctayaaagcccttcacaaatatttatggatccccaagggttatcttatgtgtgctcttgaataagcactgccagctacatagatatatatctgatatatatcacatatatatgatatatatcacatatatatgatatatatcatatatagatgatacctgacattttgttctcttttcctgca

SEQ ID NO: 653610 - DNA, 581 bp, Homo sapiens
gatatgcacctctgacttcttcttccatttaagctagacaaccartgtcctgctagatgttctgcccactgggaagattcctttccccagtgtccttcagggccacccatgagtggggctgtaatgctatagccatccctacaaccagcagaagaaagctgtaaatgagaccagagggatgaaggagatgagcaggacatcaggaagtctgagccacttcttctgaatcctacctgtcaggtggtgcctgatcttcaggatcctgccttcaggacctgcttttgcctgatcccatatgaacacttggtttgaaggtaaagtgctgcttcatatgcccaaatgtatgatgtttggatgacatcataatgggcaggtcataatgagcagtttgagtcatatgttcagttaatgccctataatcaaagtgttagtccccactcagacccatagacatctaggaactgtttctcaagagagattagctatttgctcaggagtgtatagcttcctttcaacactgtaactggaactacaattcttccatgagtttgcccagggctcaatagagtatcttctacttc

SEQ ID NO: 653611 - DNA, 623 bp, Homo sapiens
agcagaacgaatggaaaaggaggagggaaaggtcctaagattattttctgagatgagaaaaaaagtgcctggctatgcaacaaaggaaagaaaggatgacaatctcagtgctctaaagaaggcagttgagagagcagcaggcagcaggcagctgaccttcaccaccccacagggccggaaccccagcaggctgggggtccactcatttgcataggccactccctgaacagaagttcctttcttcctcacttcctactgacagcagtgcacaaaggaatggctcatctgtaaaactgaggttgaatctccaaagacactcctgggaggagtacaccatgagcaaggagggggcagttaccaccagagaaaccactacaaatgatgctcccacgagcatctccctgctctcttcagtgctgcccgccccaggsagacccctttgagtgaaggtaccatgcactgatcaagggtctggctggttttagactgagcacgtctgaatcctgcttcctcacccatgtacctgggtcctgggtaccttcctcacccatgtacctggatccactactgtaatcctatagagtcttgctgtctttctctgaaaatggggataaccagggtta

SEQ ID NO: 653612 - DNA, 596 bp, Homo sapiens
tgcctaggaacgtgtgttcagcagaacgaatggaaaaggaggagggaaaggtcctaagattattttctgagatgagaaaaaaagtgcctggctatgcaacaaaggaaagaaaggatgacaatctcagtgctctaaagaaggcagttgagagagcagcaggcagcaggcagctgaccttcaccaccccacagggccggaaccccagcaggctgggggtccactcatttgcataggccactccctgaacagaagttcctttcttcctcacttcctactgacagcagtgcacaaaggaatggctcatctgtaaaactgaggttgaatctccaaagacactcctgggaggagtacaccatgagcaaggagggggcagttaccaccagagaaaccactacaaatgatgctcccacgagcatctccctgctctcttcagtgctgcccgccccaggcagacccctttgagtgaaggtaccatgcactgatcaagggtctggctggttttagactgagcacrtctgaatcctgcttcctcacccatgtacctgggtcctgggtaccttcctcacccatgtacctggatccactactgtaatcct

SEQ ID NO: 653613 - DNA, 599 bp, Homo sapiens
gaaggtaccatgcactgatcaagggtctggctggttttagactgagcacgtctgaatcctgcttcctcacccatgtacctgggtcctgggtaccttcctcacccatgtacctggatccactactgtaatcctatagagtcttgctgtctttctctgaaaatggggataaccagggttattatgagtaggctcataacaaayagtagttatagttggtattgctcccttctgcagtggatgttcttcctgcaactaaggacactgaagaacctgagatcttttattactttagtttggtttgacttctgctgtctccttctctgtctccagtgatgagaactggaatgaaagtgatgctgctgttttggaactactattgttgtagactaggacctgcacaaatgtgaaagatcaggtacatgggtgaggaagcaatcatatgtgtacaactgcatggatttttgtatttcctcactggcaattgggagcaataagactacctactggatttggtgaagactgaataagagacatatgtgatgccctctgaacagtgcctagcatatattagtgctctgttaatgtttcatgaggacttt

SEQ ID NO: 653614 - DNA, 579 bp, Homo sapiens
gccagcgatatggcagaggctgtctccacaacagctgtgacttgggtgccatgtcagcaatcctycccgctcaggacaggccctaagaataggcaccatgtggcacctgcctcaggcccagtccagcggggaagctgcctgtgacccctggaaccagggaccaaaatctccgtctattgaaggctgacaggaattggtttcctcagtgatgagccactagagaaataaaagtttcctcttttccaaggagtagtcactagtctaccaacagaagtcaagtcctaaccatcgccaaactccttcccccgacatccatcttccctgctcccaagacctgaacatgctgctcttcttttcctccattacaactttgccattttctttttccatttctttcttttccacaacatctgaacgttagtgagagagagagagagcacccttcccaaaggatcctggagccctgtcctcagaggtgaggacacgttctgcgttccatcagtcatcaccttccccttaatgcagaattctaggaagttctcaagccctgttctaaaactctgcctcactccctgacct

SEQ ID NO: 653615 - DNA, 547 bp, Homo sapiens
ctaaccttagtgtccagtggcacttataaggtgctaaatgattacttgttgaactgtttgttttattgagatttcaaccctttgacagtatatactaatgaggtatccttctcacagattctcccagaaggataaagcaataagaagcttgaacctagagctatccctctttattaagggctttttaaaaattggaattctatctgtactataaatttcattttattactgactcacaagattgttctataaacctctggctagacckattttatatgattttgtaaaaatgtcatctcttctatttaaagaatataaatgcatagaattatacacatagtgttacatagacacacacactagttttctattgttgcataacaaattaccccaaacttacaacagtaaataatacagattattagctatagtttccatgggtcaggtatccagcatattgtagctgggccctctgttcaggatctcaaaggttgaataaaatcaagatgtcagctgagctatgttctcatcaggagactctggggag

SEQ ID NO: 653616 - DNA, 595 bp, Homo sapiens
ggccaatgagctgcataactaactagctgcttccagctgaaacagcagatcaggattgtataatgctattgaatttcaactttttcactcaggcaccaaatgtttactgagctcccactatacacagagcacttgggtacagagatacagatggcaccaccctgaacccaagtgaagagctcaaaatttctcattttgcccagcagacaagtttcttatttaagtgagtcaaaattatactttaaatattaactgtcagatttcagagggcatttcagatatcctaaaaatattttgataattaaacaagaagaaaacctgtattccaaacaatgtttattccctgcgtcytaaaaaaacctatgtttaaaaaaaaagatgaggcaaattgaaattttcctttcaacatgacccttgatcagacattcttttggctattttgacaagaaagaatcagtcaaagcctggtcacattcctttaaggtcacagctctttgtcatcatcatctcttcttttggcaatgtacagtagttacttccaaatgccaattactttgaaaagatcttggcttaaccttagtctaacccagccaac

SEQ ID NO: 653617 - DNA, 565 bp, Homo sapiens
gactcttgtcccgaaagctctcagagaagtgaaaattcaggaaaacccatctatgaggaatggtcaacggcacagttgtttagcctagagaaggtcactcttccaaatcgttgccatttcatacaaagtggacttgctccgagctacttggtgggagtcacagggaagaagggccgttcttacatttggaaccacccaaccatgaaactggctgctttgggaaaaaaaaatgctgacatgaaaatgcccaacacacaggccccactgtggctcccgtacttttatacctgaacatcagctctgctaccmtgaatatcttggcatctagaacatattataaaccacctacttacacccacttcagccatctcatattttaaagagacaattcaaaggatatgagctactcattattctagaacttctaagctctctctggattctaaattaattcatcacaaagcagcagacctcagctgataaaatctctttgtgcatgtttttcgctgaactaagagttaatgtttaaaagggcactgaaaagggacacgttggaaaacattcc

SEQ ID NO: 653618 - DNA, 565 bp, Homo sapiens
gactcttgtcccgaaagctctcagagaagtgaaaattcaggaaaacccatctatgaggaatggtcaacggcacagttgtttagcctagagaaggtcactcttccaaatcgttgccatttcatacaaagtggacttgctccgagctacttggtgggagtcacagggaagaagggccgttcttacatttggaaccacccaaccatgaaactggctgctttgggaaaaaaaaatgctgacatgaaaatgcccaacacacaggccccactgtggctcccgtacttttatacctgaacatcagctctgctaccatgaatatcttggcatctagaacatattataaaccacctacttacacccacttcagccatctcatattttaaagagacaattcaaaggatatgagctactcattattctagaacttctaagctctctctggattctaaattaattcatcasaaagcagcagacctcagctgataaaatctctttgtgcatgtttttcgctgaactaagagttaatgtttaaaagggcactgaaaagggacacgttggaaaacattcc

SEQ ID NO: 653619 - DNA, 397 bp, Homo sapiens
gtggtttgctttagcttgaaatcatcagtgaggattatacatgggcaatgtccagaaatcacattattgctcatagaccgtgtagtcttgatctaayggataactgtacattgtcttcactaagaagctagggtggttgtccttgatattgggacattgtagacttggccagaccaatgcccaaatatttcccaagacttttacctaagactctgctcagtatccatttgtctactgctggtcatctggaagaataaacttctcctgagtggtaccagcttatgagatttcctgagttgatacagaggtaaatgcatctttgttgcacaatttacagtctttttttttttttaagaaaaaacatgattttgatcattgtaccacatgcctttataaa

SEQ ID NO: 653620 - DNA, 495 bp, Homo sapiens
ccaacatatgcaaaccacttttaaaattcaacaataagaaaacaaacaaccttattaaaaagtgggccaaagaccttaacagaatatatacagatggaaaataagcatatgaagatactccatattatatgtcattgaggaaatgtaaattaaaacaacaacaagataccactacacatctgttagaatggccaaaattcagaacactagcaacaccaaagkctggcaaggatgcggggcaacaggagccctcattcactgctggtgagaatgcaaaatagtacagccactttgaaagaaaagtttttcaattgcttatgaaattaaacatactcttacacgcaagtgcaatggcactccttcgtatttacacaaaggagttgaaaatatgtccacacaaaagcctgcacatggatgtgtatagcagctttattcatggttgcccaaacatgggagaaatcaagatatccttcagtagatgagtggatacacaaa

SEQ ID NO: 653621 - DNA, 571 bp, Homo sapiens
attcaaaattcctaccattacagtcattgcatccagaaagtctagtgaagtattgaagagtctaatactgagtcattgaaggatatagtacaattacaccctatgacaattggtgtgaacttttatctattttctctcctaatctcttcaccagsctttttatttgcttatctcccttagttccagtacttaggatttttatgggggttattgtaacaaacttacaaactgatttctgtttctactctagtcccctgcaacttacccttcacacaactactagcataaaacccaaatatagtttgttccctccctaaaactcttgaaaagctccttaagagtaaaatcctgcagagtaaaatccaagcagaagcataaaagcaccatataatctggctcatgccgatttcctctaacccctcactctctcagaactccttgcaattgcttcaaaacacattagtgattcatgcttctatgtcttctctcatgagatttcctgttagcctgggatactcttctcctcttctaaggctgatcaattttcattcatgctttgagactcagtctg

SEQ ID NO: 653622 - DNA, 571 bp, Homo sapiens
ataagctatatccagaaaagtgcaaatatcatacaagtaccatttgatgaatcttctgatatccccacataaccaacacccagaacctcttcttgtctcattccaggataaccactaacctgacttctaacagcatcagtcagttttgtctgtttttgtacattatatatgtgatggtttgaatgtgtcccccaaatttcatgtgctagaaacttaatccttcaattcatatgttgatgstatttggaggaagggcctttgggaagtaattaggattagataaggtcatggggtgaggtatgatggcactggtgacttataagaagagaaagagaaatctgagctggcatgctcttgccctctcaccgtgtgatgacttctccatgtcatgatgcagcaagaaggccctcaccagatggtggcaccatgcttttggacttcccagcctctagaactgtgagctaaatcaatttattttctttataatcacccagtttgatattttgtcatagcaacagaatatggacaaagaaagaaaattaatgcaagaagtagagtttttactgtaaca

SEQ ID NO: 653623 - DNA, 596 bp, Homo sapiens
gtatctttccagcctcctctgcagtcatgtgcctcaattcaccctgttatcccatgcacactggattatgtacagctcttgaaacacactgtgcacctgcacgcctttgctcatactggtctctggtggaaggctcttcctcttctctgtttgcccaccttctccacaacttcttccttctgctccttcggcaccagatatgtgaacaacaattcttgttctggcctccttgagagcagggactctgcttccctcttctccatccctgttgctttagcactgagctgacctagcataatgctgcaagaattgatctgagttgggtcacatgttctcccacagtttatgatgttgctgggtggtgggattcaaaatgctcattcctccctcctcactggatttccaaagagggkttcaccctgatttcaccgcccactaaaatctaattaaccacagggcatgaattcttcttggaaacctccaaactgccaacttcttctccctcatgctgttgccaaggctctcgagtgggcttgaaggaaggaaacgtggacaaaaagattttgctcgtttctttgaggccaatgcctaatcac

SEQ ID NO: 653624 - DNA, 483 bp, Homo sapiens
tgtcaagagttctagagagaaggtagcatctgaataagagggctgcccagcaggaggtaaagaaacccggggctccagaaggatatagggaaggcatcagctcaacagcctagctaagtgtattgtgctagaactgaggaagggttaagagggcatccatgayggaaggtaaccagaaaagaagccaacacctgcctcaggttaagagggcatccatatggaaaatgaaggaaagactgagaagctgtttgatgcattataatgtaaacgcagtaaactggatctttttactataaaatatacaacaaatagcaaaattttaacggggtctgagaattaaatggtagtaacaaatcattgctaatctcttgattttatgttacagaataattatgtgaaagaatgttcttgtttgtagcaacataacattcaggaatgatggagcatcatgtcagtagttactctcatagttcaggaaaaaaa

SEQ ID NO: 653625 - DNA, 566 bp, Homo sapiens
caaattactagctctatggcttttggcaaattacttagcatctctgaacctattttcgtctctgaaaaaggggaataataatgcctactttgtggattccttgtgaatattataaacagataatgtatgaaaactatgaagaaaagttcccaatgtatttggcacccataaataacataccattcactaaactactattttaattttatctactatgtcctcatgatgaggttcatttatgctaaagttgattattatttacctttcagagtcattcattcattcaaaaaatggactaagagcctactttatgccaagtaccctgtcccaaccttggatcatggatatataaagacagacaacatacgcacactcaaggaagtttcactagagaaacagttatgagaacaatcgagaatatctaaaatacagatttgagagtaataaaagtaattactataagtaacagggaaggaaagacaaatagagaagaaagactatcatagaagtattcactaaaagcrtaaaatgaaccataagactatgcttgaaggatgaaaaggaat

SEQ ID NO: 653626 - DNA, 414 bp, Homo sapiens
tggaatctggtatccacctggggccttgtaattacctggggtctgggcatccacctagggcttgagtatccttctggggccttgagttttactggggactcgtgtctgccttggacctgggtgtacatctgttgcctaatgtacaccttgagagtgatgtcaacctggggacagttgtcctcttggggtctgagtgtgyacctggtgcctgatgtctgcctggggacttgtgttcacttgagacctgatatccacctggggcctgggtgtccacgaagggctgatgttcagctggagactggatatccacctggggcttagggatctatccagaaactgatgtcaaactgggacctgatgtctacctggggactaggtatccatgtgaggcttgatgttcatccgcggccagac

SEQ ID NO: 653627 - DNA, 605 bp, Homo sapiens
tgtcttatatacttatattaaaattttgaactggcaattagggaagtggttttttaaactgggataatacattttaaaaatatgtagtggatgggaatctcaggtaatggcataaaagtgctaatgacctgcacaagcattgaatgaaagatgcaaatgagcagcttaatggaaaaaatatgaggaacttggtgctaaatcattcacagtcaacctgtttctgggctggggtttcctaagcagcrgagcacctccctcactaccgtctattgaaagtcagcttttaaacaataatagtaataaataataaaaaataataaaaatatacatatatcaaacaaactttgacaccatggtgtacattttagataaatcaatatttgttagactacagcactaacaagtttctatcttaaacattatagtgacccctaatcaggccttagagtggtgattgaattttttttttttttttttttttgaggcggaatctcgctctgttgcccaggctggagagctggagtgcagtggggcgatctcagctcctcagctcactgcaacctctgcctcccatgttcaagggattcccctgcctcagcctccag

SEQ ID NO: 653628 - DNA, 638 bp, Homo sapiens
agacagaggaattcggtttactcatgttgcttatcaggagatgctggggctccctctacccctaggggtgtctctctacattttgttgtagtgtagtattggaaaacaaagttcaaaggactctagagacaacaaaaataacagatgaacaattaaactaaagccgtgaatgcatcttctcttcaatgaagggaacagataattcatttgaattaccaaattttaacaaggttgttatttgccatggttgaagaggcaatctgactttaaaatcattataggtctttaaagaaatacaatgttattccacagaatatggataaaataaaagcaaattatgcatcagaatggggattggcaatcttgccaaagtcagggggaaagtcttctctctccagctccctgagggtgggagagcrtttcccagcaggagggaggggacaggcttcagctaccttcataccctgttgagtggctgctatttcggccaagtggaactccaatgctgctgtgggagaaatgccccaatctccagctccggcatgtcttatgtacacgaagcaggcatttccacaccttctgtacacaccccactgcaagccctgaccaagtgtggaatcctccaactcaaagggcct

SEQ ID NO: 653629 - DNA, 243 bp, Homo sapiens
tgtctgttttttcccagatagcttttaagatattcttttggtctttggtgtaccacagtttcattatagtgtgtctggctgtattttctggatttctttttatttatccakcttgggattttgtatggttcttaatgtcattatcttttaaaacactgtctctctttcatgctctgtattcccttcttttggaaattatattagagagatggtgaacattcttattctattctatgtgtctta

SEQ ID NO: 653630 - DNA, 605 bp, Homo sapiens
acatttggtttttttagtctttttggaatagtccctctactttttaaaaatgacattgtgtttttgaagagactttgtagaaagccccacattctagatttgtctgatcaattgtgtgtggtggtgttcttgttctgccccaccagatttcctgcaatgagttcaattgtgtttgtcccccaaaattcatatgttgaagccctaaccgccagtacctcagaatgtgactttatttggaaatagtcactgtagacataattggttaagatgaggtcataccagagtagggtaatagggtgggtccctaatccaatatgactagtgtccttataaaaaggggaaatttggagatagacatgcacatataaggggaatgycctgtggacatgaaggcagggatcagagtgacacttctacatgtcaaggaatgtgaaagattgctagcaaactaccagaaactagaagcaagtgaagggggccagaatatgccacccccaaacatgtcactcaaaaaggatggttttgagctgaaggcaattagctctctgcccttcctgcttctgactaaaagcaggacataaatttccagttgtaaggtgtctccc

SEQ ID NO: 653631 - DNA, 619 bp, Homo sapiens
caacactgtacggaataccatgacaatggataaggcattctataagtccatggatggtagtttttagcagaagcattgcatgcaggaagggaaaatctgtatttagaataagtgtctatttcagtaaggacaaaatgccgcyactcccatgatggaagcaatccaatgtaatcaacctgctaccagatagctggctggtcactccagggaatggtcctatattgggggctcagtgttggtctctgctgctgacagattgggcactcagtggtggccatagtcaggttggccttggtcaattctgagcccatgcataaactccatctctggagcctggccacttacttcattagcccatcgagcagtgacaagggtggctagggaaagaggctgactggtctccacagaatggtcatcctagccacttgattattgaaatcttcctctgctgaggtaaacctttggtgagcactcacatgagatgcaaataccttcacattctttgcccattcgaagtagtctatctacagacctcttccccaaatatatttgtcaccaattttccaattatattctttccaagtccctgactatccagccaaatcatgggctacagccc

SEQ ID NO: 653632 - DNA, 616 bp, Homo sapiens
gaagctttgtaaatttccctagaaacaaggaaatcagagttgcagagcagatggagaaactagtccttgtatttaatgccttttcagaaatactaccaagataatggagtaaaaatcacctctagaaacttaatagacttacaaaatttttgatgtaggtaataagttggcttttatgattaccaagaggtcaatagaaaacaagaaaatagtgttcatcattcaactggatccttggcttttttttttcaattttataaattactaaagtttgtatttaaattaaatttcattagtcattgtaaaatggcacattgacttcattatggattattttaaaagctgtagaaatgcagtcaattttattttatcacacacacactacataaaagtctttgtaattactttgttttatgagactccccatcagttgggtacattgtaaatatcccattccacagtttatrggtggggaaaatgaaccacgtggaggttaagctgctcgtgttcacattacagcagcagtgatggaattaaatctgagccattctcagtaacggaagaatctgcccccatatatgaaatccggagccctccaagagttttgcaagaaaga

SEQ ID NO: 653633 - DNA, 598 bp, Homo sapiens
ggtgaactatatagtagatttttcatgttcaaaaatacttacacaattatttattggaaggcatgagcaatttatgaaatcatcttcactaaagtccctggagttaaaatctgcccatgtaagttgttctttcctttaacccaacaggacttctatcctagaggtgccccacacctaggagacactaaaaattactctcaactgaaagattaagtgagtaattaaaattttaagaggagcccaacattctcttgagcctgggaccatgagagcatttctccctagaaattcaggamagacaaacacacacacacacacacacacacaatttatactaagtatagctgccacaggccatgaacctggggattaaaacccagcatagcaaatatataaaagatgaggggtctcagctggtatctgggttatttcattcagtgaccttcttgctgtctctcattcctttctgtctctatgcataacttcctgggtttatgctatcagaaattaccttgttgagttcctgtgatgtcatcctacagcaagaatcctatcagaaatttactttggaaatgactctggaaatgtaagttgaggg

SEQ ID NO: 653634 - DNA, 630 bp, Homo sapiens
tgtgttgtgcttttagagttgcctcgtgttgtattttttatttatatttctgattgaaacaaaaagatgaaataaaagaagaaagagctccccagtctcaatgcttcagctgcccagaaaagtgggtggagacagggacctttctccactggtggagggaaggtggctggactcagggtcccactgagtccttagatactagggggcatcattgagcatgcatctgtctatgttcacatacaccctcttctcacctagtgtggtaagtgagcaaggtgcgcagaaacacttccttccagctggcattgcactaagcatttttcctgcatctgctcctgagtttgtaaaccaggataccatgtgcaccatacatcccacaccttgttctgttattttctgggggtttctgacttttagctcatgtgaaagagcaccaggccttctcttcaagtgctctgcttggagtgatgatgggttcttccaatgtgctccyggctttctgcagccggaatctttcttgtgaaccacagcctgagtttttcatgaggcaaaacctgtataagggggtgttgattgattgttgattttaaaagtagagttgcatttgactcattttttgagatttacccg

SEQ ID NO: 653635 - DNA, 601 bp, Homo sapiens
aaatccagtctttagggtcataataaaccaaccctaaggatgccaaaccaggtattcaggagaagaacagcaatctgctcaaatgtaacccaaaggcagtagctctcagccccagccagcctgccacatagacatcgtttgtgattgtgggggttgccaactaagaacaccaaatcacaatccctttctgccccctggtagcccacagtccagtgtttcacatgtctgaatgttctctggtatctcaagcaacgtgtgagmctaagagtaagaactccctagattcaaattgtgactcccccatctactgtgtgaccttgggcaagttacataacctctctgtgcctcagttaccttatctgtaaaataaataccttctttgccacattgttgagagaattaagtgagccaatactgcaaagcattgaggagagtgtctgacacatagtaagcgcttaataaatgttagctacttttataccaaagtcctctatttaggaagtccttattgtttcttatcagccaataccttcacaggaatgagcaagaagttgtataggctgaagagggtggaggtggagacaagtggagtgaggagtta

SEQ ID NO: 653636 - DNA, 527 bp, Homo sapiens
ccataggtcctctggctcaactttggggatcaggaaatttgctgcttgctttactggcgaaaagcagattcgttaattaaacatgacagaaagctttggtagcaaagaaaagaatcctatgtccattgttcttccactaaatgatgagaaagtgctggaccatctgcccaagatagtaacctcaagtgaaaatttgttgtgctttggttattgtttcaaaaacacaaaacctagtggccactgggtgtaggtatagaaggaatgtataatgagagacagggatgacttagttgtctttaggcgttaatttcttagtcccttggaaaagcaaaaccaagcagaactctgagtctgttcctcatgaataccaaaataagattaaattcaacatctaaggactttcaataagaaagaagccagaaggattcaaccatcagggaayagccgaccaaaggcattagaaaattggaaaccagaaatgagaaaccaggagccgtgagatgtgctgaattacccaggagagtggg

SEQ ID NO: 653637 - DNA, 610 bp, Homo sapiens
cagcctggctcttgtgtccagcccctctctcctgtgcctgctgatccaccgagctccttcatgcatccacctatgtgtcagcctgctcatgagggctcaggcaggtccagaagcttgctggccagctagggaaatgggattagaaggcagtgcctgggacaggccaggggtactttgaaggactcaggcactacaggagcacagggctgggtcctcagttagcctgggagccagcaggcaaggggtgagctgacagaggagaggaagtaggtggatgaggaagagaagggggcattccaggggacacggacgttggggccagcttcagcctcagccccatcactgtgggaggatgtcagctcactacagatggggcagactgaggagatccaggctgcatcctgagactcggtgttgctgctgtagcaaccccagtgctcttctcatctgatgagcgacctctccattcaaaaaaataaagtacgtattggtgtctctgyatgaatctggggctatagtggtgaacaagccggagaagctcctggaccttgagcacttaacatttcaatgggaagataaaaaataaaccagcacaagagtaaacaggacc

SEQ ID NO: 653638 - DNA, 578 bp, Homo sapiens
tcaaaacatcctgccatgctcatcatcccaagttgtgattctttgcttacaagctcttctctcccatttatctcagtgttcttaaggccactgacccagaatttacttttctgttcgtgacccctctggcctgagcctcgcagagtccctggcttatggcagatgctcaataaatgtttatttgcagcatcctacatcatgcactgacttagcacatttttgagtgcctactattcattaagctaaaaatctccccattctctgtcatctcaaaggcacttttcttgggcaacactctcaagcctctgtgaagtccactttatgaatttagaagagtttccatggaagaaaacatattctcaagtacagaaatcaagatgaaagctgtggctgcattctcttggtctaggcatcagttaggatgacatttttctgaagactgaggactaagctctgatttttttttatcttgcccaaattcctatctaggaastcgagggagttattccctacaaaccataaattctcatcagatgggttttatttaaccccatatatcatggcttactttccaatct

SEQ ID NO: 653639 - DNA, 597 bp, Homo sapiens
gctatgagggttaaatgagagaatgtgttactaatgtacttagcacactctctgacacagggtcatcactgaatacattgtagtagttgttccagttgctcttgtacttgttcatagaagacagtgtgatgagtaggaaatcagccacctggtcaacactgtaacccagaataacatcttatggtaatttttccattagaaaatattgaaatatcagatacatcataaaggtgtcataaaatttaattcatgtggtattaacatacccataggtgtgcacatagatcacctaagttcctaaattacatttatactgttgttctaagaattcaatattataagaatatttagtaatcattattattaaagacaataattatttattttctttgcttctaagataacagtttaaaaaatggaaatgcccacagctattttttttgatagacttaacgtattctcaagattttgaatgtacagatttggtacaatttcctctgtattgaaaccctaattcaattaataattrgttagtttggtaaccaggaaactgaaattatttcataaattccaagtcagtctttcagcccatgtcca

SEQ ID NO: 653640 - DNA, 540 bp, Homo sapiens
tttctcattgctagtctactacaggaaaagttccaagatagtaaaagttttagagtaaaacatcaaaacacttccctttccattgtatttaaagaggctcaagactaggtgaataaatatatttacaaaatgtctgctatgtccttagatacatattaatggtcatttgactctgatagctggaaacactgattcacttcatttcctgcacawtggaatcacccagggaggtttgtaatatattaataattgagtctcaactccagtgtttctgatttaattggtctagatcaccacaggcttgcagtttggctataagcctttaaatgaaaggctcttgggtctttagcccagaacttctcttccctcctcctctgccttttaggaaaaacacagaaacagaaacccacatgagctaagcatgtgtagtctgctactaatgaatcaagtgcaaaaattagaaaaacacatagtttctgacaacatgctggacaaagagagagaaacaagatatcctctcagaagaaactcaaaaaattt

SEQ ID NO: 653641 - DNA, 517 bp, Homo sapiens
tgtgcttctgattagttgccctctcaaccataagcagcctataaacagggcctggctccatccttgttacttccccattgcactgaattcagtatttttccctcaaggtagatagttgtggggcagcatccctaaaaatgtccagttatataatggcatccagtaaatgttttcttaattacttacctccattaacaagctttatgcaaaaaaaaaaaaaaaaaaaggaatgctgactttagacttcatctccacttaaaggaagatttctgttgcttttcacaatagatatgttggatattttgcacaagtgaaacatctstacaactggaatctccctccaagacggatactctttataataagattcattatttattcgattcgtggtaagtgctttatgtgtaattgaagaattgggcaggagggccaatgtccccactctgggagagttttgctcatagttatatatacagatgagcctaactcatacctgtctttttacatattgtcacac

SEQ ID NO: 653642 - DNA, 517 bp, Homo sapiens
tgtgcttctgattagttgccctctcaaccataagcagcctataaacagggcctggctccatccttgttacttccccattgcactgaattcagtatttttccctcaaggtagatagttgtggggcagcatccctaaaaatgtccagttatataatggcatccagtaaatgttttcttaattacttacctccattaacaagctttatgcaaaaaaaaaaaaaaaaaaaggaatgctgactttagacttcatctccacttaaaggaagatttctgttgcttttcacaatagatatgttggatattttgcacaagtgaaacatctctacaactggaatctccctccaagacggatactctttataawaagattcattatttattcgattcgtggtaagtgctttatgtgtaattgaagaattgggcaggagggccaatgtccccactctgggagagttttgctcatagttatatatacagatgagcctaactcatacctgtctttttacatattgtcacac

SEQ ID NO: 653643 - DNA, 487 bp, Homo sapiens
tagaaatgctctcgttactttactgttgactgttttcatgcatgtattctgcgtgcataaacctatagaaaatattaacaatacacagtgctaatcatgcagggttttgaaactttaaatagattgtattatatgtactcttcctcaacactgggtttaaaaaaaaacaactgtttttgaagtttatcatagtgatataattgtagcacattccttttaatgctgttttccattatataaattkgccaaattttttttattctcccattgataaacatttgagtttcctttttttccctacagttgccagaaatgccatagtgaacactcctgaacatatctatttgtggacatgaatgaatttcccaagagggcataatctggaatgaaatgcacattgcaaatttctcagtctgtggcttttctctaactttttttatggtgtcttttagtacaaaagttttccattgttaatgtaggcaagctt

SEQ ID NO: 653644 - DNA, 609 bp, Homo sapiens
tgttaaatgtgttgacataaataaaataataagagctgtaagctgagtttaaaaactaaaggaataactaggttttcaaatttgtacctttaaaaagtgaatattaattttaaaaccaaaataaatcccttgaattcacttttgtgggcaaaaaaaaccccacctttgttgccaccaaaaactcacatttcctagttgtaacattttgggacaacttgcaagtagagaaggctgggtgagcagtacagagggtggatttcacaggtgcttggttctattggtaggggttctattcataaaagagtgccatccctgaagaaaacctgacacctgaaggtaatctataactaagggttataatcccttggggcttgaaaaggcaaaccaactccaaaccacataattttactctctaatggctgaaaattaatagggagtagaaggagaaagagaagttgtgatgagactggccctgtttttttaattgtctacttcataatatctccaggcrtactccacttgttaactcttggagatgatcagaaacttatgtgggggctttaaaagacaacctcagacacttcaaaagattaacaactttaatcaatg

SEQ ID NO: 653645 - DNA, 577 bp, Homo sapiens
tctctggattgcaagacaataaacactaatgagtgtggatgtatcatattgaaaacaggtggatgaagtaaaatgcaagatattgagacccccaggcttattttctcactcagctcccataacactgacaggcttctaccctctggcagtaggttggaagagtcttctctaggaatccaaccagcccargagaaaaagaaactaaagttatgagcatcagaaatttatccaaaagaatattctagccaaaccaccctcaagtgtatcacatatacacacacaaggttttcaataggctttctatgtcccattttagcatatgaacaggcaattaaggatataagatatacgaggaaaacttctattatgaaagacaaataccaaataaacaaaaagaaaaaagcaccttggaggaaacagagtgtgtagggggaaaaaagcttcaaaaaatctatcagtaataacttcagagagataaaggagaatattgcacttatggggaaaaaagaaaaggaagaagaaaaaccagatggagaatgggagagaaaacctaagaaaactggagaatcagtctagg

SEQ ID NO: 653646 - DNA, 529 bp, Homo sapiens
gaggcccagggtgtctcttgaggaatgtctgttttagtgttcttacagtcagtgcattgctgtaccggggccatgaactggtatcctccaccctatccccagagcccaggaaatagagaaatctcctggctgcagtgctggccacagagggcactactcctctaggtctccctccacccctgctgtgacaccagagattttataaaagacccaggaatctcaraaggcaagggactgaaacttgaaaatctttagaaaccacagtttactgttttccaacctgaggaggtccctagggtcgctggggacctaaaccctggcttcccttggtgttcataggttcctcagagtcactggttcacaactttggctgctttagagatagtcatttaggccgggtacagtggctcacacctataatcccacttttggaggccgatgtgggaggatcacctgagcccaggagttcaagaccagcctaggcaacatagtgagacccatcccacgccccttgcatctctgtacaaaa

SEQ ID NO: 653647 - DNA, 583 bp, Homo sapiens
aagacaggaaagaaccctatgttaggagcccttggaggaaggctgacctgctttttctccacaagaggatggggtcattcaacccttcccacactgggattaattaaagaggcctctgagaagataatgaatgtggataaggatgcaggacctctgtacctgggctgctatcaatctcatcctcactaaaactgtcatcttgaggctctatggttgcctcccttcattcttgctctagtgcagtcagcttttggtaggttccatcccttccttctccctcattatgtctgagaaatcgctttttgtttaatcctgtagtttttagctgacagccaaagtgagatggatccagagggtaaactcaagggatggaagcctaccttagatgacatcccaattaatgttacccttgtgtttctgtgtagtatatccctaatttctaagttacgaataataatgaagggaaaactctctgagctacagatagtgaatcttctattaacaagaaaggcatttcttcaaaacatccagaaatacaggtgaggacattagggwtttttcataactaatagaacctattcct

SEQ ID NO: 653648 - DNA, 545 bp, Homo sapiens
aacacagtggttacagggcttgataaaggtcacatggctagttagggacagttctaggactggcacccaagtctcctaactgccagtttcctgctgtttccactacaccacatttgtgttggccgggaaatatttactgcgtagagagacatgctgatgtttaagttgttgtttrttttaataggtcatttcaaattggctgcatccaaatagatgtcccatttacatagacacaggtcagtctgctcctgggctcagtttggaacatatttttatttacttgggttttttttttttaataactgaacttggcattcctgctttgctaatagcattggctcaggtttttaaaaatcatctgttctcacaattcaccatgaaaaaaatcacagccatccatctcaatacacagatagaaaggtggaaatatgggactaatcactgcaaatcaaccattaagtagtggcattctggtctcacattaaatccaaaaacaaaaatcaaaataataaaaaggaactaaaatatatgtctcggttaatgaa

SEQ ID NO: 653649 - DNA, 529 bp, Homo sapiens
ttcaaatacttatataaaccaaaaatatcaaactcataaaagtgacccaaagaatctttaaaagttcagttcagtaacaacattacaatttatgcaggactggagaacagcatctgatctggtctaattgccttactcaagggtgctttcattagctccaacaactatcagctctttttatttcactgaaatctgtaacaaacagactttgtcactgtggcctgtcatccttggactcaagtgatcctaagttcctgatctctcacctcgtctctagtgaggatggggcagaggcatagacaaaagattctaatcccagctcaagctgtagcatcatcacaggggggttctctgtggttggttttgtgtyacagaaacagagtagtcaaggtatctaatatttgtgttataccaaaaaaaaaaaaaaaaaaaagatggaggttgtttgttcagccaagagaacctaaagtaggaaaaatatgaggaagtgtttatggaagtagttgtagcttggtgttcgctgcaccag

SEQ ID NO: 653650 - DNA, 608 bp, Homo sapiens
caaatagtaatttatttcttcccaacagcaggtcagccacaaggatttagtttccttccaaggtaggggagctgatttaacctgccgctatgcttttctacaagattcttatttacaacagtttcttaatgagttatgtcagagtagctgctggtatgatccttttgatatcagggcctgtgaagcagaatggttaatgatgaacgccttgctagtttcagtgaacattacagagtgactgactacagcaccatggactagatgccaaactcataataaatggaacagtgccaccttttggccataaagtagggacacaaactaggaaggctaggattctgtaagtcacacagtttatttaaaactatttatgacggatttagtggtcatgcaatcctcaaataatagcaaccaaattctwtttttctctttattttcttccttttttcccccactgtggcagtatctatgctttgactgtatgcatttcatataataatgatgctttggagaggctaaattttgctacattccaattatgttttgcacaagaatgaattaagcatgcattatgcagataatatgaaggataacatggttaccattgt

SEQ ID NO: 653651 - DNA, 444 bp, Homo sapiens
gaattctcttgtattattagttgtatgataatttgtaattcacttattcttcctgggccttagttcctcatctacaaatgaaagatttatgggagaaaatctctgaggtcccctctgctctaaatgtctttgaatttattctatttataaaggcttagatagctaacaacttttaaagcttctttaagccttaattttctcatttaaaatgggaattatgctaacatttctgtctaacctatarccttgtgatcagatgaaattaaatgatgagtatatgtgtgtatgatttgatttacagaatcagtaagtataaggcatattgtttgatcagaaatagcatttacagctcattatgatttatcaaggaagggttattcattcattttgcaaatatttattgagcacttattatgagctggatgctattcttcaggctgagga

SEQ ID NO: 653652 - DNA, 473 bp, Homo sapiens
tttaataatagaatttcaggcactccaacagatgttggagatattttggacaaccatccttattcaaaccataccatataagttaaagcttctactcaaaagatatcctggtttctgaacattctgaataacacttaaacaagaatcttgactatgtaaaaaaacaggaagagttaagatwaaaaacaaaacaaaaaaaaaaaaaaacttctacatctttttaccactaagacttttgttcttttcccctttggtcctaatgtttaaaaaatgttgtcaaccaaattgtttttactaaattgcaataagttgattttaataactcccagctatagtgtatatccatgactgtttatcctgcctttctccttcttcttccttctggtaatagtacttccaagttgtctttagaaaaactgtccctctcccctcttcttaactatttgatgtgagtggttcttttagtcagggtt

SEQ ID NO: 653653 - DNA, 473 bp, Homo sapiens
tttaataatagaatttcaggcactccaacagatgttggagatattttggacaaccatccttattcaaaccataccatataagttaaagcttctactcaaaagatatcctggtttctgaacattctgaataacacttaaacaagaatcttgactatgtaaaaaaacaggaagagttaagataaaaaamaaaacaaaaaaaaaaaaaaacttctacatctttttaccactaagacttttgttcttttcccctttggtcctaatgtttaaaaaatgttgtcaaccaaattgtttttactaaattgcaataagttgattttaataactcccagctatagtgtatatccatgactgtttatcctgcctttctccttcttcttccttctggtaatagtacttccaagttgtctttagaaaaactgtccctctcccctcttcttaactatttgatgtgagtggttcttttagtcagggtt

SEQ ID NO: 653654 - DNA, 464 bp, Homo sapiens
ccgacgctggcaggagagcggccgccgacccccggaacaaaggaggagaggggggcgtgcgccggcgcgcggccgggcgtttcctgcgctgccaggggaaacgtgctttgggctaagttccggaccctcgcctgtgcggggctcgacgtgtgctgcgagggtagcgaggctggggatgcccggcacggccggctcgtccgctcggaaagctctgggatgctcgggcgcagtgacagccgcgctctcgccaccaggccctgcygctcgcctcctctccggcttggctgggatgccccgcgcaccgccggcttttaaagagtccgggctggccgcagacgcgtacgtcagcctcggggcgggccgcattccttgggtcccagcccccttccacgtggggaggagggtgggcgagccgggaagcagcctgcgagctccccctgcgggccggcgacggcggtgcacca

SEQ ID NO: 653655 - DNA, 530 bp, Homo sapiens
attgtaatcacctgtaacatgttacccagcaagacattcctcaccaggttgaagtaaaaaaaagaaatgaagtgaaatatcaagcttatgcaagtttgaaattacaaacaagaacaaaagttaaaacacataagcccttcttatcagtaggttatctttcaggatagatcatacggttgtttctcttagtaattgcaacattgctctgttttctcattgagtaagtgagagagagagagagagagagagagwgtgtgtgtgtgtgtgtgtgtgtgtgtgtgtgtgtatgtgtgtgttggtgggcaggcagagacaaataaatgagttggaaagaaagtaaaagatgataaatgggtggcttaggtcaggttctgataattttacaatatttatgggtgaatgctaaggtggttacatagtttgtgcttgctgaaatgatccgacctagtttaactttgtaatgagttgcaaacacaaaaacaccaaaatgcaaaattaatggattttgcaatttgttttataagacatgc

SEQ ID NO: 653656 - DNA, 526 bp, Homo sapiens
tgaaatcatgcatattataaaatgtctttttgagttattaccagcagatggtatatcatgcattttgaaatgattagtcaagtctagaggtcagcgttgaattatgaatctaagtccttctccttcttgaatgaacaaactaaattacaatgccaggtttgctgattatcagatcytgatgcttggcttataaatcagctgtaaggctatatacctatttctgtttttcaaagatgagtgcatttgaaatccaataactagaaattttcttctgagacagaaatggatttttagggtaagaaaggtcacatttcacttcatttttaaattttaatctcaatttctgaagtccctaacttctaacaaatcatcatgtaggtcatactctatccttctttaaaggaggagggaaagtgcgcattgttagccatcttgaacgtaccaagtcctgtaatatgctcagcacttttcctgagtgctctcactacatcctcactctgccaccatcatctctttccaatgtttg

SEQ ID NO: 653657 - DNA, 532 bp, Homo sapiens
gtcaattaagctatgaattgtacaatacacatttgaattgatgattaataatttaaggcccaagtgtccagtgtccaactggttaaggatcaggattctattaagcatacaaacactgcttttcctccaaaagaccagtaagtgagtttcaacattaatataatacaaagcatattttatttggcatggtgaccaaagacaggaacagtgttgttggttcttgatatgtgagacatttaacaagtgactaaaaacctttcatggttttggagacagaataagtaggggaaacaaataagtattggttttaactgacaggctgttttgtstgtgtgggatagcctgcattttaatattttgtgtgtatatatgttaagtatgagccaattatcatgaaaattaatcagggcttgacttctaatatatttaactacatatgctttaggtttaataggtaagccagtattcatcttgggaccttgggatgacaagtatttagtgtatccactgtggcatacagaatttctaagta

SEQ ID NO: 653658 - DNA, 603 bp, Homo sapiens
ttgctagagctaacctctttatggaggaatgtatgcttacttttaagatggcagtcagggggagagaggagcccatctagggaatttaattatatgtggaatgtttctaaaccacagccatggggtttagtcatggctggataatacctagtacttcaaaagctgyatttaaaatttgaaaatcacctattacactcatgttataaattgccaataaataatttcattaacaagcaattagatgtgtctgggaatggcaacacctgccagttggtggctgtgcattgccctcagctgtctgcctcagagttctgtgctcagtttcaagcaagagccactcctacaaactccagtttctcacttttaaaacatagtccaagctggccgtggtggctcatgcctgtaattccagcactttgggaggctgaggaggagaatctcttgagcccaggagttcaaggcccagcctgggcaacatggctaaaccccatctctaccaaaaaatgtaaaaattagccagaagtggtagagtgcacacttatagtcctagctactcaggatactgaggtgggaggatcacttgagcctgggaagttgaggctg

SEQ ID NO: 653659 - DNA, 646 bp, Homo sapiens
tcttcgtgaacttcagatggccaacaattttctgtacagggtacaaaaattactcttcttagaaggaaaaatyttaaaaaggcaaattagaccacattaaaattgagaacttttgatcatgaaaaaccatattagaggtgaaaagtcatgcccacatgtgggagaaaataatttgcaagtctgacaaagtcttgtatttagaatatataaagaatttctacaaatcaattaggaaaggagggaaaactcaaaagaaaagaaaatggacaaaggactttgacaggcacttcacaaaataggatatccaaatggccaatggacttgtgaaaagtattcaacttcattcataatcagtgaaatacagattaaaactatgatgtgatactattacaccacattggaataacaatagataaggcaaggtagagagaagaaagtggtggtaagaaagtggagcagttggaatgatcatacactactggtggaagtgcaaattggtacaatcactttggaaatatttttggcattatctaactaaagctgaatatatgcataccatatgacccagcaattctattcttaggtgaattcttatgagaaatggtatatacattcaccaaaagatattcatcagcagaatattcac

SEQ ID NO: 653660 - DNA, 583 bp, Homo sapiens
ggtgtacaggagacctggagagctgtcagcacagactggaaaaaacaaacaaacaaacagaggcctccagaaatgaaaatctgaaaaacaagaaggagaacagactctatatcatcttttaaattttcaaacaatccaacaagaaaataaaggctattgaagctttaaaatatagatatggaagaagctaataaatgcagcccctgcagtaaattcttataaaactgctttgtcaaatacaaccatccaagagatataatctactaaacatctcatagatgggaagctatggtaagagaaatagtagttagcaatgtatcattttaaataatgaaataagcatagtcatctgtaggaactgaggtcataaaacagagcatcggtatttataaaccctaacaatgtgaaaatttctatataactagcaaaaatgttgaagtaaaaatgggttgggaagatacaaatttactcaacatttatattggtaattctataattaatatytgatattgaaatgtggagataagaaaataatgactccaaatgcttttcattttaagacctgcttattcagactgttgca

SEQ ID NO: 653661 - DNA, 556 bp, Homo sapiens
tcaagagctggagtctgtgtcctcaccttgaatataggtcatctctgtgattgctatcataaaaagaacatagcagaagtgatactgtaccaggttcccctgacgcctaaaaagactgacagcttccatttcctttctcttggaaaactctctccaggggtctggaagacaatgaagtccaattactctgagagcaccatgctagagaggccgtgtataaagctgactagtgccagcagagcccaaacattctctccacacaggtyccagctcagggagggagtgaagtcatctaggatgctctagactagactatctcccagacgaataccgttgaatgattcttagtcaatacctcatggagcaaagaaattgtccagctaagccctgcccaaagtaatgactcatgaaatcatgagatataataaaatagttaatggttattgttttaagacactgagttttatagtaatttgttacacaataataaatagccaaaatatctccaattataagtaaggaaacagactaagaaaggtcaatattttcccaagaa

SEQ ID NO: 653662 - DNA, 640 bp, Homo sapiens
ccataatagctaaaaaattgtagaagattgaccatagtgttgataaacacatagagcaataagagctatcacatactgcttgcagaagtaaaacttagtataatcaccctcggaaagctacatgaaagtaagtataaatgaacatatacatgctttatgactcagcaatcaccattctagaaatgtgtacacatgtgcaccaaaagacagttataatttggaaacatttacagaagcatcatttacaattgctccaaactgggaaataacccaaatgtgcatcaacagataaataattgtaatgtatttaaacagttgagaaaatatagagaataacaagaaacaaacctttgctacatacaayggcatgaattaatctggcaaagagaatattgagtgaaacaatttagatttttaaaactctattacttcatcagtatgaaattcaaaataggtaaaactatttttggtgttaaaattcaaggaaatggttgcccttgaaaaggcagtgtttaatgctttgaaaggggtatggttgggggaggggggctctgattttttttattattctattttgtgacataagtgtgtattacatgggtatgctcctttctgattattcatcacttgtgacattgta

SEQ ID NO: 653663 - DNA, 559 bp, Homo sapiens
tcttctttggcagcacctgcaactgcattcctggatcaaacagtggaaggtgcattctgttttctaactgttgaaaatgcctttccaccacaagtcttcacgcgcagcatggttttctatcgcatgagtgccattatagcactgcccttatctaatgagaagtgtccctggaggcagacatgaatctcacttgcttttgagagatgtatcatttgtccatggttacagaaatagtggtgatctgctcctgtgtaatttaacatcctcctcttgcaacattcataagaatcatctaagggagtaaaacctgagtaasagtatcacggcatttaaccaaagggatataattctaatattattctcctcctattttccacgctgctacaacacttttctgtaaatatgttctttgcttttatactggtatcatattattttcaggataaaacttagggtcttctatgtggcttagaaaatctttctgacctgatcctgcctgccctatctgcatcaccttttgctgtaactaccctgactcaaaactctgacattgaaccac

SEQ ID NO: 653664 - DNA, 546 bp, Homo sapiens
tagtttgatggtgatggcattgaatctataaattamcttgggcactatggccattttcacgatattgattcttcctatccataagcatggaatgttcttccatttgtttttatcctcttttattttgttgagcagtggtttgtagttctccttgaagaggtccttcacaaaaaggagccatcttaaaatacaccagaacagtctattcttcacaaggcctgctctcaggagaagctattttaccagaacctaatctgctggggtttttatcagagtctgacctacctagggaaaagaaaatgcccaactcaagttcccgctaggcttccaggtgggagaagaaaatagccagttctaggccctctagccatcctgtcctacctaagaggggagaaacactgagaagcacttgagaagttcatagttcatgagcacaggctcaccaaaagactgaaacctaatcataggaccacagtatgcatccctttccttcacaccttaacactattatcaaagtctcattcatcacaattccttttaccagaa

SEQ ID NO: 653665 - DNA, 546 bp, Homo sapiens
tagtttgatggtgatggcattgaatctataaattaccttgggcactatggccattttcacgatattgattcttcctatccatwagcatggaatgttcttccatttgtttttatcctcttttattttgttgagcagtggtttgtagttctccttgaagaggtccttcacaaaaaggagccatcttaaaatacaccagaacagtctattcttcacaaggcctgctctcaggagaagctattttaccagaacctaatctgctggggtttttatcagagtctgacctacctagggaaaagaaaatgcccaactcaagttcccgctaggcttccaggtgggagaagaaaatagccagttctaggccctctagccatcctgtcctacctaagaggggagaaacactgagaagcacttgagaagttcatagttcatgagcacaggctcaccaaaagactgaaacctaatcataggaccacagtatgcatccctttccttcacaccttaacactattatcaaagtctcattcatcacaattccttttaccagaa

SEQ ID NO: 653666 - DNA, 573 bp, Homo sapiens
tctaaataacactttgttacagtcatcctctataattttatgagtttacctattaaatacattgggatagcctttttaaaargaaaaaatgggattttagaactgcagacgtgaaattatgtagataaagtagcaaaacgtcttgtttaataattactttcctgaaaattctccacagtgtttgactcttccttctcaaaacatctaaccaaactgaaggaacagaaggaatgatctaaacacccacagtatctcctacttctgaaaagtgtcttgtacagagtacatatactcagtggttacatgacaaaccaggatggactgcaaactacaaaagagcggaaactaacaatatatgtaattaggttacacacacacacacacacacacacacacacacacacgcacacatatttttttgagacagagtctcactctgtcgcccaggctggagtgcagtggtgcgatcttggctcactgcaacctctgcctcccggttcaagtgattctcctgcctcagcctccctagtagctgagattacaggtgcccaccatcacacctggctaattttt

SEQ ID NO: 653667 - DNA, 622 bp, Homo sapiens
tttcactatcagtctcttcatggcccttccagtttctgcccactgcccagtaccaatgtcaatgccacatgtttttgttacaaaagcactcccaacttccaagtgactaattcatttyttgttatctactgctgcgtaataaactgctccaaaactttccaatgacttcaaacaacagggattttattgtaacacatctcacagtttcagaagttaggaattcaaacagggctcaattggggtgatatttttttccatatgacagtaacaaaggttactttgtggtattcagctggcacctgggctggtgtgagctggtcacccatacatctggcactttgatggagaaggctgggctcagctgggagcctcaactggagtgtctacacatggcctctctagcattacaacctcaaggtagccagacttcttatgtggcggctcagggatcccagagagtgttcccagacagctgtgccaaaggtgcaagtcctcttatgacctaagctcagaagtcctaatatctgctacattctaatggtcaaaccagacactaaggccaacccagactcaggggaaagagaattaaaatccatctcttactgaaagcaacagaaaagag

SEQ ID NO: 653668 - DNA, 622 bp, Homo sapiens
tttcactatcagtctcttcatggcccttccagtttctgcccactgcccagtaccaatgtcaatgccacatgtttttgttacaaaagcactcccaacttccaagtgactaattcatttcttgttatctactgctgcgtaataaactgctccaaaactttccaatgacttcaaacaacagggattttattgtaacacatctcacagtttcagaagttaggaattcaaacagggctcaattggggtgatatttttttccatatgacagtaacaaaggttactttgtggtattcagctggcacctgggctggtgtgagctggtcacccatacrtctggcactttgatggagaaggctgggctcagctgggagcctcaactggagtgtctacacatggcctctctagcattacaacctcaaggtagccagacttcttatgtggcggctcagggatcccagagagtgttcccagacagctgtgccaaaggtgcaagtcctcttatgacctaagctcagaagtcctaatatctgctacattctaatggtcaaaccagacactaaggccaacccagactcaggggaaagagaattaaaatccatctcttactgaaagcaacagaaaagag

SEQ ID NO: 653669 - DNA, 307 bp, Homo sapiens
gttcacaggagaagcttgttacatgtgcagattccaggtcccaacccacrgaaaatttgatccaataggtctatagcttggccccaaagtctggtgattctgactgagacaggaggtctctgaacctcactctgagaaacactaaaccatggggtacttgcaggagcaaacagatcttcctgagccacatatacgtatctcttcctagcttgctggatttgtccgtgtcctgggaaatcagcctgtgggtaggatggtcatcctggacatgctcttccctccagaagacctatctgtggttaaccat

SEQ ID NO: 653670 - DNA, 307 bp, Homo sapiens
gttcacaggagaagcttgttacatgtgcagattccaggtcccaacccacagaaaatttgatccaataggtctatagcttggccccaaagtctggtgattctgactgagacaggaggtctctgaacctcactctgagaaacactaaaccatggggtacttgyaggagcaaacagatcttcctgagccacatatacgtatctcttcctagcttgctggatttgtccgtgtcctgggaaatcagcctgtgggtaggatggtcatcctggacatgctcttccctccagaagacctatctgtggttaaccat

SEQ ID NO: 653671 - DNA, 488 bp, Homo sapiens
gacactggaaaaccaggtttttctttcttctatgccagttacccaatgtacatttgtgctgtagatgagagctgaggaccttcctgcccttcagggttatagtaaagttagaggcatgttatgtggttcccaaatatttgggaattttctaggtatctttctgttattgatttctgatttaaaagcatatggtcagagaatacattttgtatgacttgatacttttgaatttattgagacttactttaaggcccagaataggacctatcttgggraatgttctatgtccacttgaaaggaatatatattctgttttgttgagtggagtgttctatctgtaactgccaattaggtcaagttggttgatattgttgtttgagtctttctaatctgctgctaatctcatccagtgtatgttttcatatcagacactgcagttttcatctacagaagtttgttttcagtctctttttatatcttcctgtcta

SEQ ID NO: 653672 - DNA, 354 bp, Homo sapiens
aacaatatcaaccaacttgacctaattggcagttacagatagaacactccactcaacaaaacagaatatatattcctttcaagtggacatagaacattytccaagataggtcctattctgggccttaaagtaagtctcaataaattcaaaagtatcaagtcatacaaaatgtattctctgaccatatgcttttaaatcagaaatcaataacagaaagatacctagaaaattcccaaatatttgggaaccacataacatgcctctaactttactataaccctgaagggcaggaaggtcctcagctctcatctacagcacaaatgtacattgggtaactggcatagaagaaagaaa

SEQ ID NO: 653673 - DNA, 354 bp, Homo sapiens
aacaatatcaaccaacttgacctaattggcagttacagatagaacactccactcaacaaaacagaatatatattcctttcaagtggacatagaacattcyccaagataggtcctattctgggccttaaagtaagtctcaataaattcaaaagtatcaagtcatacaaaatgtattctctgaccatatgcttttaaatcagaaatcaataacagaaagatacctagaaaattcccaaatatttgggaaccacataacatgcctctaactttactataaccctgaagggcaggaaggtcctcagctctcatctacagcacaaatgtacattgggtaactggcatagaagaaagaaa

SEQ ID NO: 653674 - DNA, 602 bp, Homo sapiens
actaccagccaatacaaaaacactcctacaaacacagaccagtgacactataaagcaaccacacaaacaagctgacataataaccagctaacaacacaataacaggatcaaatccacacatgtcaatactaaccctaaatgtaaatgagctaagtgccccattttaaaaggcagagtgacaagctggacaaaaaagcaagacccaatggtaggctatcttcaagagacccatctcacacacagtgacacccataggctcaaaataaagtaatgaagaaaaatctaccaagcaaatggaaatcagaaaaaagcaggggctgcaatcctaattttagacaaaacagactttaaaccaacaaagatcaaaaaagagacaaagaagggcattacatcagtgtattagtccattctcatgytgctatgaagaaatacctgagactgggtaatttataaagaaaagaggtttaattgactcacagttctgcattgctggggaggcctcaggaaacttaacaatcatggcagaaggcacctcttcacagagtggcaggggtgacaatgagtcccagcaggggaaatgccagacgcttataaaaccatca

SEQ ID NO: 653675 - DNA, 602 bp, Homo sapiens
actaccagccaatacaaaaacactcctacaaacacagaccagtgacactataaagcaaccacacaaacaagctgacataataaccagctaacaacacaataacaggatcaaatccacacatgtcaatactaaccctaaatgtaaatgagctaagtgccccattttaaaaggcagagtgacaagctggacaaaaaagcaagacccaatggtaggctatcttcaagagacccatctcacacacagtgacacccataggctcaaaataaagtaatgaagaaaaatctaccaagcaaatggaaatcagaaaaaagcaggggctgcaatcctaattttagacaaaacagactttaaaccaacaaagatcaaaaaagagacaaagaagggcattacatcagtgtattagtccattctcatgttgctatgaagaaatacctgagactgggtaatttataaagaaaagaggtttaaytgactcacagttctgcattgctggggaggcctcaggaaacttaacaatcatggcagaaggcacctcttcacagagtggcaggggtgacaatgagtcccagcaggggaaatgccagacgcttataaaaccatca

SEQ ID NO: 653676 - DNA, 624 bp, Homo sapiens
cttcagagccactgtgggagaaggaagagggatgctagaaagacccaagacagtcacagacagtctttccatcctcctctttccaccaaatgaccatctctagcatataaatgagcatctctctttcaccaaatgatcatctctgggacataattgtgggtgatggcacctccacctaagatggggagccctggatggtgggtcttatgggaagggatttgcaggatggctgtgtggaaatctccctcatcccctcgagttctcagccataagctcagtcccctgatagcccakaagcctgtcttttctctcctgggaaagatctatgcaatcaccccaactcacgagcacccggaacagccctgatcaggggcattcacaacaaattctccctggatctccaaagccaaggtctcagagcgggagtgttgagcgccctgccaggtttgtgcactctggcccagccccactcctgttctgggctcatcagccagcatttcctgagtgctcactttttgcccacattgtacaatcggggctttggagaacacagccaaccccagaccagtgcagctcccaaggagccatgattgggtgatctctagggatctgtagcctggtcct

SEQ ID NO: 653677 - DNA, 650 bp, Homo sapiens
cccatgccttgcaggaagtacttgaaggcctcggtcagcttgcctggctgcggaagtaagaagaggcgagggagacggtgagatgaggttagaggaagagctggagcctgaggctgcggcactgtggggccgggtgtgtggcaaagggcagagcccagtgccaccggtatcctatgtcccttccccatcccatggacggcagcggcactcacctgagtcagctggggctgacctccggagtcagccatctgttcaggagagcaccacccagaaaaagtgaaacacacataartgagccatgcagagaggtggaaagggtctctcttccctagcttcttcactctagcccctttgttttgttcttcgttcaccccatttgctcccatgccgggccctggaggcttagcagctgcatgtagagaggatatatgactgtggacgggggcccaggaacaggttactgaccttgaggaacgaggtctgggtggggtccagttttgagttacattccacctggagtaagcaggaggctgaatgaatgaggtcacgcccactgtggcgcctcccccgtaagggacccaggaacccagaccccagtcccttttctatcagctccctacccagttcctccttaccaggaatcaaattct

SEQ ID NO: 653678 - DNA, 478 bp, Homo sapiens
aatttgtactgagccagccatattgctgaatccctgtgtctccagcttgtacacagcctgttgtgggacttctcaaccttcataattacatgagccaattcccctaactaatcccctcatctatctatctatctatctatctatctatctatctatctatcyatccatccatccattctactgttgctgtctctctctggagaaccctaactattgcccaactgaactaacgcatagctccctatttacattgttacattgtgtacagaaggtcatagtctggaaagtatcatttaaaatgcaccagtgacccattagaccacatatcaccaatgacttcagatcctgtctctcttgcctgtctctggttccagctgctactgctgccttgctgcacatgggctcccaccaattgcagggaagtgccacctgcccccacttcacctcctgcctaggctacataatcctccacctccct

SEQ ID NO: 653679 - DNA, 478 bp, Homo sapiens
aatttgtactgagccagccatattgctgaatccctgtgtctccagcttgtacacagcctgttgtgggacttctcaaccttcataattacatgagccaattcccctaactaatcccctcatctatctatctatctatctatctatctatctatctatctatccatccatccatccattctactgttgctgtctctctctggagaaccctaactattgcccaactgaactaacgcatagctccctatttacattgttacattgtgtacagmaggtcatagtctggaaagtatcatttaaaatgcaccagtgacccattagaccacatatcaccaatgacttcagatcctgtctctcttgcctgtctctggttccagctgctactgctgccttgctgcacatgggctcccaccaattgcagggaagtgccacctgcccccacttcacctcctgcctaggctacataatcctccacctccct

SEQ ID NO: 653680 - DNA, 478 bp, Homo sapiens
aatttgtactgagccagccatattgctgaatccctgtgtctccagcttgtacacagcctgttgtgggacttctcaaccttcataattacatgagccaattcccctaactaatcccctcatctatctatctatctatctatctatctatctatctatctatccatccatccatccattctactgttgctgtctctctctggagaaccctaactattgcccaactgaactaacgcatagctccctatttacattgttacattgtgtacagaaggtcatagtctggaaagtatcatttaaaatgcaccagtgacccattagaccacatatcaccaatgacttcagatcctgtctctcttgcctgtctctggttccagctgctactgctgccttgctgcacatgggctcccaccaattgcagggaagtgccacctgcccccacytcacctcctgcctaggctacataatcctccacctccct

SEQ ID NO: 653681 - DNA, 478 bp, Homo sapiens
aatttgtactgagccagccatattgctgaatccctgtgtctccagcttgtacacagcctgttgtgggacttctcaaccttcataattacatgagccaattcccctaactaatcccctcatctatctatctatctatctatctatctatctatctatctatccatccatccatccattctactgttgctgtctctctctggagaaccctaactattgcccaactgaactaacgcatagctccctatttacattgttacattgtgtacagaaggtcatagtctggaaagtatcatttaaaatgcaccagtgacccattagaccacatatcaccaatgacttcagatcctgtctctcttgcctgtctctggttccagctgctactgctgccttgctgcacatgggctcccaccaattgcagggaagtgccacctgcccccacttcacctcctgcytaggctacataatcctccacctccct

SEQ ID NO: 653682 - DNA, 560 bp, Homo sapiens
tttacccatcaaatggtgagacatagatccacaaaattaaaagtgatctttgaggccattgcaagaaactgcctcagtttccccatgctactcttcctgtcccaaaacagtgaagtagagacaaatgagatccacaaaaagtttttcataaattttcttgaggtattttaaatgttatctggtactaacacattttaacacagatgaattaaccaaatacatagctgtgtttgatgtagaaataaataarggatgcaagatggaaatagaatcagagttttctagcagacggcgggctcactcttgtcaatgtcctgaggcaatcagacacaaatactgactcacactaactataatgtacagaaggcctgaggaaggcatcagggtggcaatatattaatttaaagtgagaaatagaattgtcacacagactggaattattcaggttggcataataatctccttttctccctgtagtcagggaaaaccaaatggtaatcagaagccactcattatcatgagaaatcactgtgaaaagactcagaaatatttaaaatctg

SEQ ID NO: 653683 - DNA, 560 bp, Homo sapiens
tttacccatcaaatggtgagacatagatccacaaaattaaaagtgatctttgaggccattgcaagaaactgcctcagtttccccatgctactcttcctgtcccaaaacagtgaagtagagacaaatgagatccacaaaaagtttttcataaattttcttgaggtattttaaatgttatctggtactaacacattttaacacagatgaattaaccaaatacatagctgtgtttgatgtagaaataaataaaggatgcaagatggaaatagaatcagagttttctagcagamggcgggctcactcttgtcaatgtcctgaggcaatcagacacaaatactgactcacactaactataatgtacagaaggcctgaggaaggcatcagggtggcaatatattaatttaaagtgagaaatagaattgtcacacagactggaattattcaggttggcataataatctccttttctccctgtagtcagggaaaaccaaatggtaatcagaagccactcattatcatgagaaatcactgtgaaaagactcagaaatatttaaaatctg

SEQ ID NO: 653684 - DNA, 356 bp, Homo sapiens
tgttttgtttttcagagtcaaagaaacttttgagtgattcgcagcttgtagcaattgagtaaagtatactgctgtgaacaaaatttggaacatatttgtttctacctgatttctccagaatttggaaactacttgygagtattcttaacttatggcaatatagttatttgcataggtgcaataagaatctgttttcttttgtaacaggacacaattagagaaattggttattttaccaaggctttgactggaatggtgtgctttcttttaaggaatcaaacttgacttgtagagccaataaaagccctttggggaacaggcctcataccttgcctacagtccctgtacttacctat

SEQ ID NO: 653685 - DNA, 591 bp, Homo sapiens
gcaacttctagctactaaataatcttagtgcttattttctatcaatcccaggtggtttccctacacaggctgtttcatggctttctttgatcgcaaaaccctgtccttcttccacttcctttatcttagcaaacaactttattgaaatttatttactttattgaagataagttgttcaraaccatttctgtcacactcctgtctctctccctccacctcccactttctcttattcttcctctttatttcccccatttcaaaggctcacctctccttctctgttcctcattcaatatccattagggtttaaattctttaattagcatttccaactctaagctctggcctctccatcagtaaacatactcaagtctctattttcacccccaaaattctccaaagagaaatgtatcatttattcactgtatccttatcccactttttgactgaagctgctttctctggagatctctaaagacttgccaataccagtgggtacatctgagagcattggacactctgatcaatcatgcccattaaatatttccttggtggcctatatgtcaagtcatacactgaaggcaaatcact

SEQ ID NO: 653686 - DNA, 599 bp, Homo sapiens
actaaataatcttagtgcttattttctatcaatcccaggtggtttccctacacaggctgtttcatggctttctttgatcgcaaaaccctgtccttcttccacttcctttatcttagcaaacaactttattgaaatttatttactttattgaagataagttgttcagaaccatttctgtcacactcctgtctctctccctccacctcccactttctcttattcttcctctttatttcccccatttcaaaggctcacctctccttctctgttmctcattcaatatccattagggtttaaattctttaattagcatttccaactctaagctctggcctctccatcagtaaacatactcaagtctctattttcacccccaaaattctccaaagagaaatgtatcatttattcactgtatccttatcccactttttgactgaagctgctttctctggagatctctaaagacttgccaataccagtgggtacatctgagagcattggacactctgatcaatcatgcccattaaatatttccttggtggcctatatgtcaagtcatacactgaaggcaaatcactcaatcttggacaaaaattcaa

SEQ ID NO: 653687 - DNA, 616 bp, Homo sapiens
aacttctagctactaaataatcttagtgcttattttctatcaatcccaggtggtttccctacacaggctgtttcatggctttctttgatcgcaaaaccctgtccttcttccacttcctttatcttagcaaacaactttattgaaatttatttactttattgaagataagttgttcagaaccatttctgtcacactcctgtctctctccctccacctcccactttctcttattcttcctctttatttcccccatttcaaaggctcacctctccttctctgttcctcattcaatatccattagggtttaaattctttaattagcatttccaactctaagctctggcctctccatcagtaaacatastcaagtctctattttcacccccaaaattctccaaagagaaatgtatcatttattcactgtatccttatcccactttttgactgaagctgctttctctggagatctctaaagacttgccaataccagtgggtacatctgagagcattggacactctgatcaatcatgcccattaaatatttccttggtggcctatatgtcaagtcatacactgaaggcaaatcactcaatcttggacaaaaattcaaaagata

SEQ ID NO: 653688 - DNA, 591 bp, Homo sapiens
gcaacttctagctactaaataatcttagtgcttattttctatcaatcccaggtggtttccctacacaggctgtttcatggctttctttgatcgcaaaaccctgtccttcttccacttcctttatcttagcaaacaactttattgaaatttatttactttattgaagataagttgttcagaaccatttctgtcacactcctgtctctctccctccacctcccactttctcttattcttcctctttatttcccccatttcaaaggctcacctctccttctctgttcctcattcaatatccattagggtttaaattctttaattagcatttccaactctaagctctggcctctccatcagtaaacatactcaagtctctattttcacccccaaaattctccaaagagaaatgtatcatttattcactgtatccttatcccactttttgactgaagctgctttctctggagatctctaaagacttgccaataccagtgggtacatctgagagcattggacacwctgatcaatcatgcccattaaatatttccttggtggcctatatgtcaagtcatacactgaaggcaaatcact

SEQ ID NO: 653689 - DNA, 673 bp, Homo sapiens
aatttaaaacttgttttgcccatttttttctcttgttaataactgttttcacatatacttaattcttaaatctctttattacacatatttctttgcccttactccagagaaaattagcgttagcatacgactactcgaaagaaatcctgtttcttggacaattttttttttacttttgaataagaaaaacttaagaagagtataaattagagtatttgttaggcttaaaaaccccaaaattaatttctttgccagaaaacacttaaatttataaaataccttggaagcttgtttttaaagaaaatagatttttacgttgccttctgacctgtttgcataaaggtgtttttacatcagcaagacggcaaactaccattttaagtttcataagcaaaaacattctacttagtctaaaagtacataaaaggaaagagtgactrtcttgtttaagagagaaaatcattatttcctcatatcagaagcagagaggtggaaaaacagactgtttcctgtttggagggttggggttgaaagctgctgtaaagtgacaggaatggaaagttggtatcgtgagtagtttctgtttctgtctatacatcccattcttatccctccatgtcttatttatgcttcttactccccatgatgaagaaaaccagctccgaggggtgag

SEQ ID NO: 653690 - DNA, 530 bp, Homo sapiens
aagtatttaggaattgatttcactcaatcatgtggtcaatactgattgtgtacctgttgtgtattatacactgtactgggtactgggaagacaaagatggataaaacagagtccttgatccagagagcagagtctagagttaggcaggcacacaaagaaatgataatgagataatgtgatatgtgctataatagaggtatgttccaagggcaacgggataaagcaaatgattctgtctggtataaaaggagaggatctcaaagacagcatcatgttaaccagctcttaagggataggctcacctacagagatatgaaggaagggaactctaaacagagggaatggtatcartaaagagatgaaggcatcaagtgtagtgagcagaaagaaatctgggtatcaggaataaagatatctaagctgagctggcatatgtagacaagagtaggaacgttcatgtggtgtaatgctagccccatgggctaatcagtgtttggggtcacaaggatgaagattaagagtgtttcatg

SEQ ID NO: 653691 - DNA, 491 bp, Homo sapiens
aatgaaatttacctctttcctagaaattcttctcaatgaaaaataatattcatttaaacattgcatatttatacaaaggaactgcttttttttctctgcctattaagatgcagggtagttctactttaacatccaaggtttttcttattccttactcagcagaaaaagcctactcaaacaaaaggaagaaactgacatatttggattgacagatgtcaagggacactaccatctaatttccttgttgattaatttgaaggtaatttcctggtaacccaggcttccaaaaatgtattttaagtggcatgttggtaaaagaaaattaatttctctgtgytaaacttgccagcttttgaattaattgcatgagcataacaatcaattaataaatgttaagcaaacaagggaaaatcggtcaattaaaaatgataaaattgattcgaagggtagataaaccaaaagtgtgtcataatgcccacttctgagtttag

SEQ ID NO: 653692 - DNA, 587 bp, Homo sapiens
ttgcgtagttgtgacaaggatcttataatctgaaagcctgaaatacttataaattggcactttacagaaagtgtgtgctgaccaatgctctaattcattcatttaatttgttcarttaatatttaatgattagctactataagctaagcatcaaagcattagcctaggtgccagagattcaaaagtcaacaaaacaaagtctttgatgttgtgcagcttataatttgaggtaggagggtagacaaaatataaaataccattatgtattttaaggaagctttgagtgctatagataaaaagtaaaacatattaaagcagttgggcatccatgggagctggggtcttatttgttgggttgttgctccttcaccttgtgtaaggctaattatgaaaggatcttccagtagggtgatatttgagaagaggcctaaaaaaagagagagatccctgtggatatccatagaatgtgtgttctaggggaggtaattatgaattccctttctaacaacagaaacccagaatacttgaaacaagactggtagaaatcaagggagaggtagacaactgaacaataggtagagaagtaa

SEQ ID NO: 653693 - DNA, 610 bp, Homo sapiens
gcatgacacaaacaaatggataaacattttatgctcattgattagaagaattaatattgttaaaatggccatactacccaaagcaatgtacagattcagtggtattcctatcagtctaccaatgtcatttttcacagaattaaaraaaaacccttttttaaaattcatatattaccagaggagcgcacatatccaaagcaattctaagtgaaaagaacaaagccaaagacatctcttaacctaactttatactataaggctacagtaaccaaaagagcatgacactggtacaaaaacagatatatagaccagtgaaacagaatagagaaccaagaaataaagctgcacagctacagtcatttgatttttgacaagctcaacaaaagtaatcattggagaaaagatttcctatttaataaatgattcttggataactggccagccatatgcagaatgaaactgaacccctacattttaccatatacaaaaattaactcaagatggatcaaatatttaaattcaagacttcaaactataagaaacctataagaaaacccaggagacaccattctgtttatcagccttggaaaataatttatagttaatttaa

SEQ ID NO: 653694 - DNA, 615 bp, Homo sapiens
aaagccgagtcagtcttagaaaagcctttagagcgttattttcattatttttcttttgcatctttccttcatattgaagttcctgaattcatttaaggcattttccaccaaataactttcttcaaggtccttatgaacagcagacagccaatcaaatgtttgattcagcaaatgcatgttaaacacactcctttagacttcaagtacccgataatggtaggagagtaaaaagatatattctttttctacttggaaggggaattgaaaggtaagtaattttatgatcaatccaaagtatgcaaytgatgcatcctatatgccacaagtgtcaattggccaacaactttcctatttttttttcctttttttattctaaatacatggaaaaagagggcgacataatttagtgaaataacataaattgaaagttagatatgggcctggatattgtttccacgttgtgagaaatttaattagcagattttcatttccttcctctataaaatgggaatacatccaacattttgaagtagttctgaggattagaaagggtgtaagtgataataacatactactgttgttaaagtaaattaaaacagagaccaggcatgaaga

SEQ ID NO: 653695 - DNA, 637 bp, Homo sapiens
tccttgcagtccacagcccagttagggactgtcctcatgataacttcactgaaggaacaatcttctgtggatgacaatgaaataagaaatgacagccaggcaaggtggctcacgcctgtaatcccagcactttgggaggctgaggaaggtggatcatgagatcaggagttggagaccagcctgaccaacatgatgaaaccctgtctctactaaaaatacaaaaaattagctggatgtggtggcacacgcctgtaatcccagctactgaggaggctgaggcaggagaatcgcttgaacccgggaggcagaggttgcagtgagccgagattgcgccactgcactccagcctgggtgacagaatcaggctccatctcaaaaaaaaaaaaaaaaaaagaaaaaagaaaaaaaaaaaatgactaccctataaagcaacagctctagttactgtatgccaaagcagaatctcctcataatagaagggtctgaarttaaccaaggactcacaatttttatctatttaaatgtacatttttgaattgacttctatgtgttctggcatctggaatcttaagaaagtcttctgtgctcgcttcgatagcacatatactaaaattggaacaatactgggaaggtgagt

SEQ ID NO: 653696 - DNA, 636 bp, Homo sapiens
ttttgctgttaacagtatataacttggagatcaatcagaataaacatactctggagtcaaaagctaycgggtaaatttgactcagaaaaataaatgatataatcagcttccacatttgtaaagggctagagttgtaccagatagcctctaagaaattccttcaaatctaaaataaggtgatattctctgcatttagaacaaggtgaaaatcaatcaaggcaaatactggcaattaatttatctgcattattatagttgaaaaaaatccttagagaactggcttacaatacttattattatcctaaaataaaatatgacaagaataaaatgtttcattgctctgaagcttgttgtaaacagattgtattctacagggattaagataatacttgagactgatatctgtctgtagaagacatgaactaatgagaatatatgcagagtgtccagcttacaatatttttctaataaaaatgcacattgtcttcaagggaaaacaaatattgggaattttacaatacaaaataatgggacctgaaatgaggtgagtagagtagaacaatttcagagcagaataggcagtagaagcaaataaaaataaaatgaatcaataattgaatattcattaggacccac

SEQ ID NO: 653697 - DNA, 555 bp, Homo sapiens
tctgaaagaaggaaaataaaatttttaagcgtataaaaaaacaatttgccgttgtactttggacatgggtgagaagtggaccattgctgcagtggtggaaattctgctgcatttgcctagtaaattctgcaaattttaagaggaacgtgaataatatggaactgcacattttttatttctgacacatttccaggtgatactgatgaggctggcttttgggcctcacttccactgatgaggctttaaaatagagtttctcagtcttggcactattgacattttggattaaataattctttgttattgggattgtcccgtgcactgtaggatgtttagtagcatctccggctttcaataaccaaagtgtctgtagacattgccaaacatacccttgttgggggtgggctggcagggggcacataaaagccttatgaattgagaacaaggactctaaaatattctttcaccctgtcttctagaccaatgtatatcccaagtagtamacaaagatttttcatgacatagatagatctaaacagatcaattgcaggtaca

SEQ ID NO: 653698 - DNA, 472 bp, Homo sapiens
ttagaatcattctatatcccagaagtgaatcgtgctcagccagtatattgtgcttgtaaggtgagtggagagggagcagtttctctaacagctggggaaaggggatcatctctaaagctgaaggggaagaactgctccgtaaacctcaccattccrcattcccaactaatgggcaaagaattaggtaagctttattttaaacagcacctggaaatctttctcccttcagtaaagttcagaacgtattaagaatttgtcattttccatagacatttaagttcttcactttgaatctaaaaagagaaaggaaaccaatgatatttcttataaacaaaatgtattaattaatccatgttataggacagttcagaactgacactaaaggttaattctgcttgctttctattccagagttaaagtttaaatatcacttgaataaaaccacttatgtcaatgaagcttacaggtaatc

SEQ ID NO: 653699 - DNA, 566 bp, Homo sapiens
gccgaatttaatacagatgttttaattgtgtttgtttaaagatacaaggaatgcatagtctaaccctctctaaatataactctggtacagtccttgacgcatttgtgaaaaatgattctcagcttaaccttcaacattttactaattcctgcaaccttaccctgaggtcacatcataaaattaaatctcaggttacrtgttcttttaagctttatttctttgataatgtggcatttcataaggatactaagaatttccctgtaatgaattacatttgtgttgaaagcgtctgcaatatttctgtcaatagacaataaatttaagaagatggtgctagccttgaatatttacacagaataaaacataagaagggaatggagagattctgtttttattaatcatcattgttctgtacaagtgtcaactctcctcccatctctatcccatgtggactttatcacagtcctctgcctttcatcaaatgatcctacacattggtccttatgccctaaaatgagtcagccaaggtcacgtccaaattgtaatgggggcacagggacagaagg

SEQ ID NO: 653700 - DNA, 589 bp, Homo sapiens
cctctctcagcctgatttctttgtgcaatattaggaaaaggtcacccatatgacatgcactgttttggtcctatcaggacatgcctgacactgggcaacgtatttctcatgtaggaacaaacagctcccacaatcacaaggctgtcattttgtagcaggcaaatgggaggctgatttcttgccttttacctgcaatttatcatgctgagaatagctatttaatattaatgaaatctggctttctgactttccactgcttaatttcatctttaaaaataaacaaaattattcaaatcttttaacaaatttcatcaaccttcatgtttgatgactaactctgtcccaaatatatgactgcgtgtaaatggttccaaaactattaatttgatgaagccaaacagcatttgatgcagatataaagaaacaaaggcaaaaatgcaaaagaattcaaatgagatgggaaaaagtatctatgaagtaatgtaactgctctactaacaaggaaatgcactgatgaaacagtaatctactaaatatgttacttaamagaatcaacacattagttgtctggcttctcatagacttaaca

SEQ ID NO: 653701 - DNA, 589 bp, Homo sapiens
cctctctcagcctgatttctttgtgcaatattaggaaaaggtcacccatatgacatgcactgttttggtcctatcaggacatgcctgacactgggcaacgtatttctcatgtaggaacaaacagctcccacaatcacaaggctgtcattttgtagcaggcaaatgggaggctgatttcttgccttttacctgcaatttatcatgctgagaatagctatttaatattaatgaaatctggctttctgactttccactgcttaatttcatctttaaaaataaacaaaattattcaaatcttttaacaaatttcatcaaccttcatgtttgatgactaactctgtcccaaatatatgactgcgtgtaaatggttccaaaactattaatttgatgaagccaaacagcatttgatgcagatataaagaaacaaaggcaaaaatgcaaaagaattcaaatgagatgggaaaaagtatctatgaagtaatgtaactgctctactaacaaggaaatgcactgatgaaacagtaatctactaaatatgttacttaaaagaawcaacacattagttgtctggcttctcatagacttaaca

SEQ ID NO: 653702 - DNA, 501 bp, Homo sapiens
ttttgactttttccttgatattacgtaccacgttatgagtgagcagaaaatgcgaattaaatgtatattaactctaaatctgagttcaccatcttaaagaaacaaataaaatgtttataaatgtcacaaaattgaggcattagattaatttttgttagtcatttataaaaattgtgcatatatgtgaatgctagtgttaattatcctgataattttgttcacattggcatttaatttaccattgtatttgggtgtgtttttaaatatccagctattccactgcaaaarttggtagcctgtctgaaaatctgaacttgcttaaaattctactaatgattgtacttgaagccaggaatttatcaaatgcttacatttttctcatagtgtttggcaatatttggaaaatattttacaatctccaccattcaaaagaaaaccttgtctttgcctttaatgaccaaagcatttactttttcttggaaatgttttcagctgcagaaa

SEQ ID NO: 653703 - DNA, 482 bp, Homo sapiens
tagaaacacaattatgctttctatcttacaggcttgttggggaatgtaaatgagagcagctacaccttacttaaaagtccacacagaataattaggaatattattatgataattgatcttttaatctccaaccagaagattgtattatatgcttttcactgtcacctttgcagaatcttctttgtctaattttatagagcactattcttgctcccatctcatctgtttcacacttgctttgtatatcgttttattttcttgaaacacagagaccacaatcacacacattcttacaggtrtatatatatatatatatatatatatatatatacacatacacatatacctatacaggtgtgtgtatatatatgtatatatatacacatacaggtgtgtgtgtatatatatatatatatatatatacacatacaggtgtgtgtatatatatatatatacacatacaggtgtatatatatatacac

SEQ ID NO: 653704 - DNA, 482 bp, Homo sapiens
tagaaacacaattatgctttctatcttacaggcttgttggggaatgtaaatgagagcagctacaccttacttaaaagtccacacagaataattaggaatattattatgataattgatcttttaatctccaaccagaagattgtattatatgcttttcactgtcacctttgcagaatcttctttgtctaattttatagagcactattcttgctcccatctcatctgtttcacacttgctttgtatatcgttttattttcttgaaacacagagaccacaatcacacacattcttacaggtatatatatatatatatatatatatatatatatacacatacacatatacctatacaggtgtgtgtatatatatgtatatatatacacatacaggtgtgtgtgtatatatatatatatatatatatacacatacaggtgtgtrtatatatatatatatacacatacaggtgtatatatatatacac

SEQ ID NO: 653705 - DNA, 596 bp, Homo sapiens
aaacaataaatttcatatggattaaaaatatacattcaagggataaaataaaattccatatacagaaatattttcataattttgggatgaggaagtcctttcaaaacataacaaattgcagaagccacaaagaaaagattgacaaattggctgccctttaaatttaaaactctatttggttaactaagcmataaacaaagataaaaaatgcatgatatgctaggagcaaatatttgcaacctatataacagaccaagggttagtatccataaggtattaactgtgcttacaaattaataagaaaaagacaacaacctattaaaaatgggcaaatgataaaagaggtaattatcagaagaagaaatacatacagaaaattatagattgatatgtcagtaaatatataaaaagatgttcaacttcattaataatcatataaacataaattagatataactattaatatggttaggctttgtgtccccactgaaatctcatcttgaattgtagtctctgtaatccccgcttgttaagggagagaccaggtggaggtaattgaatcatgggggcagtttcccccaggttgttctcttgat

SEQ ID NO: 653706 - DNA, 419 bp, Homo sapiens
gggtaatctgctcagattttctagttttatggtcccrctggagtaaagaaatacctaaaagttcttgtacttaacaagagaagaatgggcttttcacaaacccgtggatgagattcactgattttcttctttttgttttaaagagactttattttgtactctatgcactctgtgactgaagcaggaacctatgtacatacaacaatggagtattttgcaatcccactttagtccattcacggtgataactggagtcctttatccctcagtgcccctaagcagccattctcgttcactttacagaacagttgcctctagctatgtcatgtacagaaaatcacttaatccatgtgggtgaagtgtttttggttgtcccctgcgctggttaaaaccctgtgctatgcataaatgaaaggcat

SEQ ID NO: 653707 - DNA, 392 bp, Homo sapiens
gccttatgtttcagcactgagatcacggttagctttaacatactcttgtccccaaatccatttctttggagtttggaggatgagtgctgccgggcagcaccctcataactggggtagtgcttactggtagataacaaggccaaagtcaaaccacttcacatgcaaaaagggtccacastaatcaaacttactttcatggcacttaattccatagacgtcgatgttcggatcgaactccccgggagccaggggtggtgagctgttcagtgtattcccggggctatctgggggggttcccaccgggtgggtgccatcgctctcgccctcctcctccccatcgttctcctcacactccacttcctcctgttcggctctctccacatcatgaattc

SEQ ID NO: 653708 - DNA, 554 bp, Homo sapiens
tgaattccatatacctggtgatctaaatatacaggcagcttacccaatgacttcctgcaagtttgagtggctttgctaatgggaagaagaaaagcagaagtggtgaagaaacctcaggccatggcctaaagatgcatccctgtgagccgggcatagtggctcacatctgtaatcccagcactttggaagggcgaggcgggcagatcacctgaggtcaggaccagcttggccaacaatggtgaaagcccgtctctactaaaaatacaaaaattagctgggtgtgatggcrggcgcctgtaatcccagctacttggggaggctgaggcaggagaataacttgaacctgggaggtggaggttgcagtgagccaagaccacgccattgcactccagcctgggtgacaagagcaagactccatctaaaaaaaaagatgcatccctaccccagctaatgaaatactctaaatctcgaaaggcgtagcagttacatagatgtgtatgtttatcaaagtctctaattttatgtttaagatcagtgtatttcattgtatataa

SEQ ID NO: 653709 - DNA, 451 bp, Homo sapiens
atttgttatactgtatcactatatttgtttattccctgtctttcccactaaacaaaaaggaaaaaaccatgtccagttttgtttctccatctctatcagattacctggcactgcccaggtagttagtggcaaagccttgattcaaattgccaatctgaaacccacgctctcctctgtgtttgttrtcaaggacagcaaagatgattggagagccatctgcaccaagagtacaagatgactcaattatgaagtgatctcaagctgaaagttcatctgaaggagagaaaagagggcagcgctcaagaactgaaagccaagaaaaccaagactcttcaggtggccactcattggaaagagcagttttagactcttctgaggccctgggggctgtgacatttaacgaggccaatgtataccttgagtctgttactaagataaagtgtgacaggtg

SEQ ID NO: 653710 - DNA, 565 bp, Homo sapiens
cttgattcacaagcatttccaataagggatactcagcttggagtggctaacatttattaggcaacttctatgtgccacgcacccttccaagggcatggcatgcatcatcttgtttaatagtctcaagggygcttggaaataaggtactattagtatcctcatccccattttactgacaggaaagtggagccacagggagattgagcaaactgcccaagacccgctagctggtaaagagcagggccaggatccaaatccaagcagtcttgtgccggggccgctgtgctgaactcctgcactgcgcttgccacttgccaggatggaggggagatagtggaaggtaagcccagataagccccaaatgggtggattatatgtaagaacaactaagatactcaattcttaccctatgctcttcacaacttacttatggatcataatgcattcttttccttttgaacacacataattgcaccaaatgaacaaaatgactaggagtgggaggcaggggactgggcccccaaaggtgctaataaaacaaggattaaaatacttttccaggtgg

SEQ ID NO: 653711 - DNA, 565 bp, Homo sapiens
cttgattcacaagcatttccaataagggatactcagcttggagtggctaacatttattaggcaacttctatgtgccacgcacccttccaagggcatggcatgcatcatcttgtttaatagtctcaagggcgcttggaaataaggtactattagtatcctcatccccattttactgacaggaaagtggagccacagggagattgagcaaactgcccaagacccgctagctggtaaagagcagggccaggatccaaatccaagcagtcttgtgccggggscgctgtgctgaactcctgcactgcgcttgccacttgccaggatggaggggagatagtggaaggtaagcccagataagccccaaatgggtggattatatgtaagaacaactaagatactcaattcttaccctatgctcttcacaacttacttatggatcataatgcattcttttccttttgaacacacataattgcaccaaatgaacaaaatgactaggagtgggaggcaggggactgggcccccaaaggtgctaataaaacaaggattaaaatacttttccaggtgg

SEQ ID NO: 653712 - DNA, 638 bp, Homo sapiens
gtatgacatcgtgccctctcaaagccctgattttctttctgtaaaacaagacaggacgctctccaaaggctttcccagttttaaagttccatcaaacttcagttgtgaagggagagaacagatgattgaagcrtcaaagcccaagcaactaagacagagtcaagcgattacaaagcagaccatgaatgttagctagtaaatagtccactcagctgtctgggtacaagtgctaagggatatttaattttggcatgcttttattttctcaggagaaaaatagcagaaggaagtgcacatgccattttattccattgaaactgccaatgtgctcaacttaggacttacatggggttagcaacgtaggggcacacaagtcagtactttgttaaactgctccccaggcagggaatgttgtgggttcaggtctaaagaatgtaacagtctcaaggactttggtgtaggagccacttatggtatccagttcactccagacttttgacactgcctgggccctcttcagcaaactcatctctcagcaggtgtggggcttggggacaaaaagttcagcctgaaagtggaaaaagagttccaaaacatgccgggaaggctgaggcctaagggctgaatatgtgtgtatc

SEQ ID NO: 653713 - DNA, 483 bp, Homo sapiens
gcatattctgtggtattagctaattatttgtcatgcagttaccactcatgactagtcctgttttatgaatgaaatggaagcagagagatgaaaatactggcatgacctcaccagtattttacttgctgggctccattttgcttatttgcaatttgctgagccrttggcagaaacagcacttgaacccaagtttccttctgctattgttatcctctctcctttagagcaggtgttggcaaaccttttctgtaaagggccagagaataaatagttcaggcttgcaggctatatggtctctgttgcaactgtagtattctggcactgtagtgtgaaagcacctaagaccattcaccattttggtttgaacactgagcaggccctccagttgggtgtaggctaatgtgtaaattacatccatggctgggaaagactggctggttggagtaaatactggctggttggagtgaagactggctggttggg

SEQ ID NO: 653714 - DNA, 483 bp, Homo sapiens
gcatattctgtggtattagctaattatttgtcatgcagttaccactcatgactagtcctgttttatgaatgaaatggaagcagagagatgaaaatactggcatgacctcaccagtattttacttgctgggctccattttgcttatttgcaatttgctgagccgttggcagaaacagcacttgaacccaagtttccttctgctattgttatcctctctcctttagagcaggtgttggcaaaccttttctgtaaagggccagagaataaatagttcaggcttgcaggctatatggtctctgttgcaactgtagtattctggcactgtagtgtgaaagcacctaagaccattcaccatttyggtttgaacactgagcaggccctccagttgggtgtaggctaatgtgtaaattacatccatggctgggaaagactggctggttggagtaaatactggctggttggagtgaagactggctggttggg

SEQ ID NO: 653715 - DNA, 487 bp, Homo sapiens
aggggtcaccctaatgacttcattttcccaattacttgtttaagaccctgtgttaaaatagagccacattctgaggtactcggggccagggcttcaacacgtgaaytggtttcaacatacgagttgtgcagttcattttgtaacacctgtggagatgggtagagggcaggttctctctgcaataaggttttacagatggtcatttatcttctgcttctttcttttcccttcttattttttactgtgagaaaattcaaacatgcagaaaagttgcaagaatagcaatgagtaattgttaacatgttgttgtatttgcctcctctttatgtgtagattatatgaactgatgaaaacaaagttttaggcatcatggcacctcacctgtaaacttttcagcatgaagctcagaacaaagacatccttttctataaccccacgctattgtcacacctaagaaagtttcaaataattcagttcgatgtctgtc

SEQ ID NO: 653716 - DNA, 398 bp, Homo sapiens
gaattcagatcatgaatgactgacagaatattttgctgggcagtcctgatttaaaactaagactggcttgtggctaaatgagtatgttcagtttgtgaatttaatagtaattccaattcagtaagtgctattactgtttaccccttccaaagatatgattagacttcgttagtaacgttcaactttccacaaagatggtgagtgccatcttaaaayttattggagattggttttatttagatttatataactgtttatgtaaatatatttaaatactggggaaatttcttcactgtctcagaacaaagcaagattcacctgtgttttgtgttcatttgcctcttaaacgcaagggttgaagataaataagggagcaatgtctactttatatttttggc

SEQ ID NO: 653717 - DNA, 415 bp, Homo sapiens
aactcattttccagtatgaatattaacttgctatttgtaaattgtctatattaaattatcagttaagccttccctgattaataatattccagagattatattgattatagtagataattaggtaaaaacacaaccatacaaaattctattttaagaattttgaggacaaaattgggagaaatgtggggcaaaaatctacaacatggttattatttaatagataaatataaactatgcagttagtcctccatatctgtaggtttcacatcagctaggttcaaccaacyacagatggaaaatattcagaaaaaaagaatagtttcatctgtactgaacatgtacagtcctttttttcttgtcattatttcctaaacaatacagtataacaagtatttacacaacatcatattgagaa

SEQ ID NO: 653718 - DNA, 631 bp, Homo sapiens
caatacaaggtattgatcaaatttcatttttttgcatataggtatctaatttttccagaagcatttgttaaaaagttttctccactgatttttctcaaaaatcagttatctatgaaagtatgtgtatgtttctgaactctattctgttcctttgatctatttatctatctttatccaaagccatattgtcttgattactacagctttataataagccttgaacaaagttcatattagcccatgactttggtttttctccaaaattgttttagttattcgatatcctttgatttccrtatgaacctaaagattaacttgttaatttttataaaaagatatgctgagatttttacagcaactgcattgactcaaaaatcaatttggggagatttgatattgtagtgtgacaggtcccccaccaggttacttaagggtgtatgtccgctgcttgaaccctgaaggctgggcagcaagccaaggccatggtgcccagccaaggagcaggtgtccctgagaacccaaacatcctagagagtatctgagaacctactaagaaaaacagtctcatcactcaaacacagtatgcaaaaatccagaaaattagcttaaaggcattttagagacaggaggt

SEQ ID NO: 653719 - DNA, 579 bp, Homo sapiens
aatacaactgtacatgtttagcttaattaaaaaaaaaaacagcattaggaggccctcatagatctgctaaggtctgtaggaagaattgataaacacagagaaaactaacaaacaataaatgaagcaattattaattccaaagtttaaaaaaatacacaagaaaaattttaaacataatgtaactcttgactcagtaaacaatatttataatttaaaacaaaaactgtaacacaacagtattagaagaatgaaacagaaaaatcctcagcttccataataggaaaccaatagataatgtctaaaactgctttatttagaaatatgagggccaggcgcagtggctcacacttataattccagcactttgggaggccaaaacaggaggatcacttgaggccaggggttcaaaaccagctgggcaatatagcaagacccccatctctataaaaaaawttttttttaagaaaggaatatgagggtaaattccagaagcaactgatacacaagttagaaatataattgccactgggatacagaatttaaaaataggacagaagactgctgtttttcattataaat

SEQ ID NO: 653720 - DNA, 622 bp, Homo sapiens
atcagaaaaaaattaagtgaataaacaacgaaaagatcagaaccccgaatagttttcagcaattttctcgagaacctgaatcctaacatgaacactgaaggattctgagaccttgctaccacctgccgtcagatcttaatagtcatatctcaagccctgtggtgaggcttaactgagataacctaaataaagcatctccacctgtcttagtgtctggcacattgtcatattctatacatgtgatttccttccttaatttgatacaaaccatctgctgcctcttgcccctgtggttttggggacactttctgtatgcatgcctgtgtgaacatgtccagtctctggtcctgcccctcctctctatctgctgctaaacaaacttttattctgacaattggcagggtatcttccttctttccrcttcccttgccttgcagaattatttccatatgagtctaacgtaagaacaaaagaataagcagataaaaagccctgaataatgacattcagattaaatggtaaactgcatgaatgggtagaaagatcaaaggatttcaatcctggttctgctgctcattaattgtgtgaccctgagcaaattactcaacatctattagcctca

SEQ ID NO: 653721 - DNA, 560 bp, Homo sapiens
taggttttcacttgcgactccatccttccccgctaagagtcttgcttctacctctgggctcttgttgttgagaacyttccatccctttaggtggccctattggatggcatctaacattaagtgtttcttttcattttaactactactatctagccaactagagaccagccacatgcaggtttagctttatcaggagaagccaggcaccagtctttgtgtctgtaaatttgaggaaacatccaactctctcattatctcctggaagtccccctactaggctgaggtaaggggagtgcaccccgaaacttcatccctttgggagggtggtgacttacagaaccataaaaacatgctaaaaaaaaaaattcacaaatcctctccctctttccactctgacagctttttatatagcctgtttatgactaagtaaggggaagcagtcatgaaaccagtttccaaaaatagagtgatctgactgaccctcatcccattacctaactctgttgtgttagcactttgctcaaattctgcataagaagagtctgttcactacaagctga

SEQ ID NO: 653722 - DNA, 606 bp, Homo sapiens
tattaataatatcaacactgctctgctctctaagcatcagatttcccatggaaaagaaatyagaaatcattaattttccacatcaaaatgactgtatagtggtgccatgatgctatagagacctcattttcacctgttgctttggaacagtgagtcctaaatgcttggatgtcaaaattgatcctgctggacctaaattccacccaacctccacctcatgccacaaaggctgaattttatgtttcaccctagtatggaagaaaattctataatttctttcttctgtaattaaaatctaaagaaccagttagtcaaagcagtgcatcatttttctttggctttctttttttatttttattttgagaatgtgaattttattgttgtgtgtttctttttggtattagcactttatgcagcagccaagatggtcactttctgtgaaggagataatggaggataatgcaaccatccagctgcttgagcaagagacctgggcatctccaagaacaatcgattctactttccctattttcttgctgctgccattgccttagttcaggccctggaaatcatttgctatatttagcctcctaggagcctttccac

SEQ ID NO: 653723 - DNA, 542 bp, Homo sapiens
aatcattaattttccacatcaaaatgactgtatagtggtgccatgatgctatagagacctcattttcacctgttgctttggaacagtgagtcctaaatgcttggatgtcaaaattgatcctgctggacctaaattccacccaacctccacctcatgccacaaaggctgaattttatgtttcaccctagtatggaagaaaattctataatttctttcttctgtaattaaaatctaaagaaccagttagtcaaagcagtgcatcatttttctttggctttctttttttatttttattttgagaatgtgaattttattgttgtgtgkttctttttggtattagcactttatgcagcagccaagatggtcactttctgtgaaggagataatggaggataatgcaaccatccagctgcttgagcaagagacctgggcatctccaagaacaatcgattctactttccctattttcttgctgctgccattgccttagttcaggccctggaaatcatttgctatatttagcctcctaggagcctttccac

SEQ ID NO: 653724 - DNA, 591 bp, Homo sapiens
acttttctgcaggaagaggggccaacaaacactgctgattacctgctccattgccaacacattctatttcaataaccacagttggtgcagtgataaacaaaagaaggctcttgccttcaaaaagttgcatcacgcatttgttaagccatgtttgcaagccatcttagataatctcatgcccattactaaatgcctcagcaaatgccaccacttgtgtttccaaagtagactcttcttgttatttttacaaattaaagaattagaaaaacaatrcaggcataaggactttacatatggatagtttatggtaattttgtccacatattataactacaaattaaggcaatatgtagtaaataattctttatagataggcagtaaattttagtttataagaagacaatgagcagagtggtttattgattacatcgatggaaaagaggttgcatgtttgagatcagggtcccaggctttctgttaaatagtcttttttaaaaaaaaattataagttttcatcaaatcagtgacaaattctgcaatatttaaataatttaatgaatggcagaataatctatttttcagaagtttttt

SEQ ID NO: 653725 - DNA, 590 bp, Homo sapiens
ttagtttggtacatttgctacaattaatgaacatttttatgcttattgaaaaacgttgatgtgttaactcaagtccatagtttgcattaagaatcactttgtgttgtacagttctgtgagatttgacaagtgcatgaagttctgcatccaccattacagtaatacagaatattatcgctgccctagatagcccctgagctctacctcatcatcctctctcctcgcattcaaamccatggcaatcgttgatatgttaccacctccatcattttgcttttttcaggatgtcatacagtcgcaataattgtatgtagccttttcagattgtcttctttcacttagcaatcttcacttaatgttcctccatgtcttttcatggttcgatatctcatttctttttattgccaagtagtattccattgtgtgcataatccacaatttgtttatccattcacctgttgaaggacatcttggttgcttctaattttcagcaattatgaataaagctgctgtaaaagtaggattttgtgtggatgtaagtttttgacttatttggacaaataacctcatactgtgtagcacgactgctg

SEQ ID NO: 653726 - DNA, 603 bp, Homo sapiens
tgcttggcttttggctcacaatctatgccacakttatttttattgaggccactaagagacatgtgtttgttgattttcaggctcatgcctctgtgtgatctgattagttaagtttatcaaatttatagtgagtgcccactgaacagcagggactggacctgagctggatttacaattgtgaataaagcagtattcaccctcaaggctctttgcgttcagtaggtgagaaagtcactcacagaaaatgtgcatataccacaacaatttcaattaaaaagactcatacaaagtttatgagaacacagaactaggcacctaacccggactggtgggtatgcatgcttggagggatgttcagagaggagataaggaaaggaattaagatacaaataattattgaaataagtattaaagaattaatagatattagaaagacagagtaaaaataaagccattccaaacagaaggaaaaacatcgtcaaaggtacagaggaaagcaagcaaataaaaagcagaaagtatgtgagttacaatacattacagtattgtacaatatacaatacagtaggacagtgttggtaggcaaagcgcatgtcaagagag

SEQ ID NO: 653727 - DNA, 603 bp, Homo sapiens
tgcttggcttttggctcacaatctatgccacatttatttttattgaggccactaagagacatgtgtttgttgattttcaggctcatgcctctgtgtgatctgattagttaagtttatcaaatttatagtgagtgcccactgaacagcagggactggacctgagctggatttacaattgtgaataaagcagtattcaccctcaaggctctttgcgttcagtaggtgagaaagtcactcacagaaaatgtgcatataccacaacaatttcaattaaaaagactcatacaaagtttatgagaacacagaactaggcacctaacccggactggtgggtatgcatgcttggagggatgttcagagaggagataaggaaaggaattaagatacaaataattattgaaataagtattaaagaattaatagatattagaaagacagagtaaaaataaagccattccaaacagaaggaaaaacatcgtcaaaggtacagaggaaagcaagcaaataaaaagcagaaagtatgtgrgttacaatacattacagtattgtacaatatacaatacagtaggacagtgttggtaggcaaagcgcatgtcaagagag

SEQ ID NO: 653728 - DNA, 505 bp, Homo sapiens
aaaataaataagactaagagcttagacacatgtgttccttatagttcaaacattcatctatggtaatgtctaacattataataataactataattgtagttatttaagatatctgtcaatatattatttataacaatttccctccatgaatttgattggagcacaacagatttatctgtttttaaatgttgatctttttagaaaaatcacatgatttcttgaggaagatccttaagcatcttaaacaatacattttttcttggacagtctatgaatgaaattgtgaaatttggcaaaataaaaaattgtaaatatccatttaaaatatcgacttattatgaggttattataacttcagaggtttttaaaaataggctgcaagaattaacagggtctatttaaaaagtaaatttgaaaacagactctctcaaagatgttgatwtaaacagtcacattcaaatgataatggttagtagttttcaaattaatttggtagttatacaaa

SEQ ID NO: 653729 - DNA, 598 bp, Homo sapiens
caagtttattaagaccaatttcatataaaaatacacaaaagaaaaggtaaatataaagattacaagaggaataattttaaatcagattttttaaaacaacatttgaaacttttacttgaaaattgacacatacatagaattatgttttcattcaataagttactgacagatttttacgtatataaataaagatactgaataaaaacattgtatgttatcattaacacattcataatagcaatgtgttcttgttttggcattcaaaatgaatataaaaatagaaaaacatacatttttatgatctacatactttaycagagacacatatttattaatttcaaagccagtaggtcagtgaggaaataaaaggaaaaatttaaaagtttttttagtaaacaagaatggaaacataccaaaacttatgggatatattaaagcagttcaaagggaaaagtttataacaataaacaaccacatcaaaagacaagaaaaatctccaataaagaactcaaatgatggaactagaaaaacaagaataaattaattccaaattcagtagaaggagagaaataataaatatcagggcagaaagaagtga

SEQ ID NO: 653730 - DNA, 621 bp, Homo sapiens
gactatgacctttcttttggtgcaagtttggctttgggaaatgctttggagcttcttatcggtccaaccaatctgagctggccattgccagttgcagartgatacagttttcgttggaagttgatagcaaaaataagaccattagtaagagaagttcactaggaagtgtaaagcttaaaggaaagggctattagtaattggtgttaaatgcattgttcgtagtaggaccctcaacaaaatgaggatatactaaatttaataaatgtatgaaagaatgaagaaatatctagtgattgacaaataatgggaaggagaagaaatgctctcaagttaacaaaatagtataaattaatacatttagtaaaagttaacaaaagcattcctcttcttttctgagtaaatgttcacaaaaatagaaaatactaaattatagtcttcaacataacatatctgattggagagtattcccatgtagcctaaaatcctaggcttcaaatgcaacatttcacccttcattggaaaaaaatatgtaagatataagaacataaaacccaatcaagggtatatgatgcaaactttaaaaaaatatttcacccatgttggtagttgccccgcaacctt

SEQ ID NO: 653731 - DNA, 488 bp, Homo sapiens
aacatcacacaccagggtctgttgtggggtggggggagaggggagggatagcattaggagatatacctaatgctaaatgatgagttaatgggtgcagcacaccaacatggcacatgtatacatatgtaacaaacctgcacgttgtgcacatgtaccctaaaacttaaagtataataaaaaaaaagagtgaacaatttttttctataaattgttcttagaggcccaataatcatccctgtatatcttgtacatattatgtctttgtcatcttccagactacagctgtgtcatctcccactccatttgaagttcttccaatgccagaaatttcaagtgacttttactcccaagtctgctgtgtttgccctctcaccactgtcattgagaaactttccctttctatatgggagttgcagagtgctcctgatgtktatatcagatgaccccctcagttcatagagagaactaccattatgagactacacaaa

SEQ ID NO: 653732 - DNA, 544 bp, Homo sapiens
tgacttctcctcagataagcgaagataagaattacatctgactttctcctcagaaaccatggaagtaagaagagagtggagtgaaatttttaaaattaaaacattgaaaatgttgagagaaaacagcaacatggaattctgtacccttcaaaattagccttcaaaaataaaagggatataaagactttctcaaataaaaattgagggaattcgttgtcagcagatttgttgctcatatataagtaaaatggataatagtaatgatacaagagacaagagagaggaattaaaattatttattataaaatactaacactacccatgaaattatatagtattaattaaaagtggcacctgtaatcccaacactttgggaggtcgaggcaggtatgtcacttgaggtcaggagtttgagaccagcctggccaacatggtgaaatcctgtctcttctaaaaatacaaaaaaaattakctgggcatggtggtgcatgcctataatcctagctactcaggtggctgagacaggagcattgcttgaacctgg

SEQ ID NO: 653733 - DNA, 553 bp, Homo sapiens
ggactttcatagctatagaggaaaaataaatgcctagcttcaaaggacaagttgactcttgttaggggctaatgcagctggtgactaagttgaagccaagttcatttaccattccaaggatcctagggcgcttaagcattatgctatatctactctgcatgtgctctataaatggaacaacaaagcctggccgacagcacatccatttacagcatggtttacggaatattttaagcccactgttgagaccaactgttcagaaagaaagattcctttcaaaatattactgcttattgacattgcacctggtcgcccaagagctctgatggagaagtacaaggmgatgaatatcgtttcctgcctgctaacacagcatccattctgcagcccacagatcaaggaataattttgactttcaagtcttattatttaagaaatacattttatgaggctatagctgccatagatagtgattcctctgacggatctgggcaaaatgaattgaaaagttcctggaaaggattcaccattctagattccattaagaacatcc

SEQ ID NO: 653734 - DNA, 523 bp, Homo sapiens
cattttgtacatactattcatacattctctttatctattaatctcttcattaacatttargttgtttccatatcttggctattgtgaatagtattccaatgaacatgggagtgcagatatctctttgacatactgatttcatttcctttggatatattctcacttgtgggattgctgcatcatatggttgttctatttctaatttttataaaagcatcaaaagtaacaaacaattatgaacaaatgtgatagaaaatttgccaagactgtacactggaaactgtaaaatgtctctcagagaaaacagagaagacataaacaaatggggagagataccatgttaaaggattaaaagactcagtattgttaagatatcaattgtaatcaaattgatctgtagactcaatgcaataccaatcaaaattccaccaggctttttgtatagaaatttaaaaatggtttctaatatttatatgaaaatgtgtagaacaaaaaacaaccaaaataacatttaaaagaacac

SEQ ID NO: 653735 - DNA, 553 bp, Homo sapiens
aatcatcactacatccctcatagattatagtcaatttagcaaaagggttaaaaagaaaagggagccttttgggtttattctatatcyacaaagagaatatttcatcccctttcaggaattaagagagtgagagagagatcacaaaatttagagatttctgcaaagagtgaaactgacattttctgatcttctcttgtgaaattaaaatgagaaaaatgagaatcaaggacaaatgatgacagctcatggctgctagaaaataaggcacttggttcccagttccatagatttacgaagttttatttattcacagggaaactctacactgactgggtgtaagctgtacgtgagtttgggaccattttctttcctgggaatactacagatgggaccaaaagtgtatgcataagagaaaagtggtgttaatttccagaaaactctagccaaggatatggtttagcacccttggggacgatatgtatctagatgagcttcatttgtggcagccccacttcaccgaggcccattgaagccattaactatatacactaaa

SEQ ID NO: 653736 - DNA, 593 bp, Homo sapiens
tctgctagcaagctattctctctcctcactggctmcaccactctccctggggaaacaacctctctcttttacactccagtgacaccctgtacatacatctatcagagtactgagacacattattcaaattatatacatacattattgtacgtgaggaagtaactgtcactgggctggtcctcagtgtgattatgacttcctctcccactctgacttccttaagtgaagagatcattctttttctttttaaatccctagtgtttttgcaatactgaagataaagacactaaataaatgtcgtccagatctgttgagtttaatcccctacataccttaaattcaagagctcattgatgactggtacaaaatgaatgatcaagctaaacagacaaaaataaatatatatcttaatctcatctctagcacttttcaaaatattcaaataaaagagtgaagtacctagagaatgttctaggtttagcacacattttatgggttcatgactttaagaattatttgaagcaaaatttgtaaaaacaagagggttttgcctccaatttatttacttatttattttattttcatcttttatt

SEQ ID NO: 653737 - DNA, 593 bp, Homo sapiens
tctgctagcaagctattctctctcctcactggctccaccactctccctggggaaacaacctctctcttttacactccagtgacaccctgtacatacatctatcagagtactgagacacattattcaaattatatacatacattattgtacgtgaggaagtaactgtcactgggctggtcctcagtgtgattatgacttcctctcccactctgacttccttaagtgaagagatcattctttttctttttaaawccctagtgtttttgcaatactgaagataaagacactaaataaatgtcgtccagatctgttgagtttaatcccctacataccttaaattcaagagctcattgatgactggtacaaaatgaatgatcaagctaaacagacaaaaataaatatatatcttaatctcatctctagcacttttcaaaatattcaaataaaagagtgaagtacctagagaatgttctaggtttagcacacattttatgggttcatgactttaagaattatttgaagcaaaatttgtaaaaacaagagggttttgcctccaatttatttacttatttattttattttcatcttttatt

SEQ ID NO: 653738 - DNA, 593 bp, Homo sapiens
tctgctagcaagctattctctctcctcactggctccaccactctccctggggaaacaacctctctcttttacactccagtgacaccctgtacatacatctatcagagtactgagacacattattcaaattatatacatacattattgtacgtgaggaagtaactgtcactgggctggtcctcagtgtgattatgacttcctctcccactctgacttccttaagtgaagagatcattctttttctttttaaatccctagtgtttttgcaatactgaagataaagacactaaataaatgtcgtccagatctgttgagtttaatcccctacataccttaaattcaagagctcattgatgactggtacaaaatgaatgatcaagctaaacagacaaaaataaatatatatcttaatctcatctctagcactttycaaaatattcaaataaaagagtgaagtacctagagaatgttctaggtttagcacacattttatgggttcatgactttaagaattatttgaagcaaaatttgtaaaaacaagagggttttgcctccaatttatttacttatttattttattttcatcttttatt

SEQ ID NO: 653739 - DNA, 546 bp, Homo sapiens
gcatcactatctccttatttctctcttatctttgtttctcctcaactgtggtatgtattgttgttttttgctgttttggtggctttccttgacctgatcatttatgaagtggtattcttcagggttcagttatttgtcaacacatatgtcccctgcacaagtgcacattcatacacacacatagaaagggagagagagattcatgtactaataggccccaaaatcatcatctgtcctgaataacagaactgtattctcagccacttttctctatgaaggcatttcacacatggctcaaacataacactttcccattggccctccatgcctccatgtgaaccatatacttactatctactacttaacaattatttgacttaagagacccagaaaacaaatggcttatgtatkccttattatacaggcacgtttatacaaaaagatttctttagaacaacttctaacatttacctagaactgaccatgtgcctgggaccttgtgaagtggtttacaaagattgtagcaaatctaatcattacaataaa

SEQ ID NO: 653740 - DNA, 535 bp, Homo sapiens
cagaagcccagtctgttctaacagcttgagcccacactaatatctagccttcctgatcttccgtagcattgatcatctgtaccacacaaattggcagacttattatcctgttctgtatcttgcactgactcattattgtctcaaattcaactaatgatatctttaggctttatttaactgttccattttatacctggaaagaacattagtgatttttaatccaacctcytcatttgtacagaaggagaaaataacacagagagaagtgactttcctaaagtcatataacatttctcaaactaagttctgcttaagtacaacattgacaaatgaagcagtgcttgtgatgaaatcagcttacaaaaagctgcatattctatttcgtagaataactgatgctgaacaattaatattgcatatcaaagcttttgagaaatcctgcagaaaaaaatgaagctatttcaattgctttaactccattttctgaaaatttgactgtaggaatattttctcaccaagtgctattgagaattag

SEQ ID NO: 653741 - DNA, 535 bp, Homo sapiens
cagaagcccagtctgttctaacagcttgagcccacactaatatctagccttcctgatcttccgtagcattgatcatctgtaccacacaaattggcagacttattatcctgttctgtatcttgcactgactcattattgtctcaaattcaactaatgatatctttaggctttatttaactgttccattttatacctggaaagaacattagtgatttttaatccaacctcctcatttgtacagaaggagaaaataacacagagagaagtgactttcctaaagtcatataacatttctcaaactaagttctgcttaagtacaacattgacaaatgaagmagtgcttgtgatgaaatcagcttacaaaaagctgcatattctatttcgtagaataactgatgctgaacaattaatattgcatatcaaagcttttgagaaatcctgcagaaaaaaatgaagctatttcaattgctttaactccattttctgaaaatttgactgtaggaatattttctcaccaagtgctattgagaattag

SEQ ID NO: 653742 - DNA, 568 bp, Homo sapiens
aacaccttacagcctcatattgatatactacagagtccagagaaaggagaaaagtttgttctgtcttccagttttgtaagaaaaaatatgattcaccctgcaatggcaggmttaatttggacactgaactgaaaaacaaaacactgtgacccagaaccactgggaaccacaagcgaaacttgggactactggagaggggagacataaaagctgagaaggcatctaaaatgcctgttatttccatgacatcagaattaatcgaaaataaaacaatggagaaaggttataggagactaagctcagagggcgtgcatgaagggttttgaagtctgtgcttagaagtctctgggttagtctcttcctagaatttctctggaacactggcactagatgatcctgtatcagcagtaattaatttttttcatccattcatctatccatcttcatccatctatccatccattcgtctgtcatccatttagcatatatatggtgggcatctatttaagcaatagactttgacaagtactgacgctacataggtgtataaggtactgccatgccccag

SEQ ID NO: 653743 - DNA, 568 bp, Homo sapiens
aacaccttacagcctcatattgatatactacagagtccagagaaaggagaaaagtttgttctgtcttccagttttgtaagaaaaaatatgattcaccctgcaatggcaggcttaatttggacactgaactgaaaaacaaaacactgtgacccagaaccactgggaaccacaagcgaaacttgggactactggagaggggagacataaaagctgagaaggcatctaaaatgcctgttatttccatgacatcagaattaatcgaaaataaaacaatggagaaaggttataggagactaagctcagagggcgtgcatgaagggttttgaagtctgtgcttagaagtctctgggttagtctcttcctagaatttctctggaacactggcactagatgatcctgtatcagcagtaattaatttttttcatccattcatctatccatcttcatccatctatccatccattcgtctgtcatccattyagcatatatatggtgggcatctatttaagcaatagactttgacaagtactgacgctacataggtgtataaggtactgccatgccccag

SEQ ID NO: 653744 - DNA, 485 bp, Homo sapiens
tcccctgtgccttccgccttgattgtaagcttcctgaggcctcatcagaagcctcacagatgctggtgccatgcttgtacagcttgcagaactatgacccaaataagccctctgtttttttacaaattatccagtctcaagtattcctttatagcaatgcaaaatggactaacacacatcatgaattgttttggggaaagatagatrtatgttattttttaatctgaatatatgtttctgtttctatacaatattcattcctgatcctcagatcttaatccatgttacatatcttaaaatgatatggaaacttctgtgagttttttactttttgttgacaacagataagctcattctgtgttgaggtgagaatcttggtgttggcctgacctctgcttactgcctgacatcccattccctatggaatcacagttaaagtttcctgaattttacagaaatatatgaattatttgatagaactgaca

SEQ ID NO: 653745 - DNA, 488 bp, Homo sapiens
aattactgattcatctctttacttgttatcgatcactacagatgttctaattcttcctgagtcagatttagtaatttacatctttctataaatttgtccatttcatgtaagttatttagtttcttgaygcactgctgtatatagtattttcttatgatactttttatttccataagatcagtagtgatgtcatgtcccctctttattcctgaattttataatttgaatcttctttcctttttgctttgtcagtctagcttagtttgtcagttttgttgaccttgtcagtgaaccaatttttagctttgttggtttctccattgtttttatatttttgattatgtttatttatgctctagtctttgttatttcttttatttctttcctattctctctttggattgatttttctctgaataaggcatggttcagatctcccatttccttaacttggctccctttcattgaagtcttcttccgatgaattc

SEQ ID NO: 653746 - DNA, 542 bp, Homo sapiens
catgcaattcattatattggaaagatgaggagagggggttgtcagcaaagataatggccatgcaatttccagtccattctccttgcagccagatcttggaggcagcccatagaccaatttcatcaagcagaccctgctcayctctcgtctgtctatattgggaaagaggttgtgtctggctcaagcaggagcaggctggtggcagggggtggtgtgggggaatgggataggggaggtgtctggggaaataggccagggctctttcccagagtgcttggtcctgaggttcttgggtgtggttctggttgatatcagtgtcaaggggcttaatccagagggttggctaggaatgggagattaacccccaccccaggatacagttctgtacgttctgtgtattcccagctttgagcctggtgccagcagagcaggcactcaataaatgtctgactgaatgtgcaggagactgagacagcacaggtgtggggttacttgccgcaatgaaatcaaccatgtatgcttcccaagggaaatgaaagttg

SEQ ID NO: 653747 - DNA, 615 bp, Homo sapiens
tttgtttgttatctctcttccttattacattctgagtttatgagaacaggaacttgttttgttcattgttgtatccacagcacttagaacagtgcctgacacatagcagatgctcaattagtatttattgaatgaatgggttcggggatggcaacaccttctcatcacctaacaggaagagaatacctgctcccaaatatttgttgggtcaagttactccataataaacacgttgaaaagagtggcccttctctcatttccaacctgcggttcctagagtaggagttaaggtcatggctttggagccagatagtcttggctgtaccctcccacggagaggggaactggggataattgctgagcacctctgaactgcagtttccttatctgaaggtaacaatgattgttacctcataggactcctgtgtgaattaagataatgtttgaaaagtgtttatggggatttttggcacaaagtatgtgtacatcaaaaagtggatgrcattgctgttgtggtcatcgtcatcctcatgatcttgaggctgcgaccacccccccacccttaactgagagtggggctgatctaaggacaggcaatgccatgaggcaagtgta

SEQ ID NO: 653748 - DNA, 615 bp, Homo sapiens
tttgtttgttatctctcttccttattacattctgagtttatgagaacaggaacttgttttgttcattgttgtatccacagcacttagaacagtgcctgacacatagcagatgctcaattagtatttattgaatgaatgggttcggggatggcaacaccttctcatcacctaacaggaagagaatacctgctcccaaatatttgttgggtcaagttactccataataaacacgttgaaaagagtggcccttctctcatttccaacctgcggttcctagagtaggagttaaggtcatggctttggagccagatagtcttggctgtaccctcccacggagaggggaactggggataattgctgagcacctctgaactgcagtttccttatctgaaggtaacaatgattgttacctcataggactcctgtgtgaattaagataatgtttgaaaagtgtttatggggatttttggcacaaagtatgtgtacatcaaaaagtggatgacattgctgttgtggtcatcgtcatcctcatgatcttgaggctgmgaccacccccccacccttaactgagagtggggctgatctaaggacaggcaatgccatgaggcaagtgta

SEQ ID NO: 653749 - DNA, 236 bp, Homo sapiens
aaaaacacaagtttaaactctgatagggctctctactgtaacccatgattgatttcatttagtactctccgcaactttgggaagtctttattatctcccttttgtagaagtggcaattgacgtcagaggcctggattggaattcaagtcttccatctgcaarcccagggttatttcagtgccttgggctgtttcttaaacaagatcaaactgtccatttccccatcaccaagtcca

SEQ ID NO: 653750 - DNA, 520 bp, Homo sapiens
ccagactgggttacataccttttaaaataaagtccccaaacacctgtgcctccttgcagtaccgtggatacttgtaattagtgaattaattgttgataattagttgcttaatatctgtcttcccactagactgtaagttccttgatgtcatttgccttttgtctttgttcacactgcatacctagaccctggtgcagtgtttggcactcagtaggaatgcagcaaaatttgtttgattgactggtttgcctctatgccaatggattaggaccacatgatgatgatttatgatggagtattaaaccacaggctgaatgaagtcgttgyggtaatgctttctctggagcatctaaacatggtggttctggtcctgaatacaagggaaatgccccttttccaactggactcttgtataaacaacacagactattaaagcaggtgaatggggaaaattcatacccatggatattgaagtcagccttcagcaatgaacaaaatagcatgcacaaaaacagtatgt

SEQ ID NO: 653751 - DNA, 670 bp, Homo sapiens
gaggtgtccttaaaaagaggagcatgctcttctttcctctttttccttcctgttggctggaaaatagatatgatggctggggcttaagcaatcatcttgtaccaccaggtagagctgcttattatgacagagaaataatagaaggagcctggcttggaggaagctgcccgaaactttcaatggagttgtgtaccaaagagagagctaaatttctaaattgtttgtcactcgaattatttttgtcatgtgtatttaaagctaaaggagtgactttggtaaggttaaatgtctgcgggtaaacttcatttgcacactgggactaataatacttaccttagcctaatgctaaggttacagcaagttagtcataaatctaaaagcagaacctaggaatcttaatgtctcaagcttctaagctcactagtgtttttgacaaaagtcttggaccttagatacagtgtacctctttccattggtagctattgtaacaaatgaagcaaatataaatcaggatatrtttatgttatagaagcactctgctccagagcctcattcaggatctacctccatcatgagaccttcctgcccattaggcctacagtgggtcatctcactctgagttcctacaacacactgcaggctttactcttttttttttgagacggagtct

SEQ ID NO: 653752 - DNA, 670 bp, Homo sapiens
gaggtgtccttaaaaagaggagcatgctcttctttcctctttttccttcctgttggctggaaaatagatatgatggctggggcttaagcaatcatcttgtaccaccaggtagagctgcttattatgacagagaaataatagaaggagcctggcttggaggaagctgcccgaaactttcaatggagttgtgtaccaaagagagagctaaatttctaaattgtttgtcactcgaattatttttgtcatgtgtatttaaagctaaaggagtgactttggtaaggttaaatgtctgcgggtaaacttcatttgcacactgggactaataatacttaccttagcctaatgctaaggttacagcaagttagtcataaatctaaaagcagaacctaggaatcttaatgtctcaagcttctaagctcactagtgtttttgacaaaagtcttggaccttagatacagtgtacctctttccattggtagctattgtaacaaatgaagcaaatataaatcaggatatatttatgttatagaagcactctgctccagagcctcattcaggatctacctccatcatgagaccttcctgcccattaggcctacagtgggtcatctcactctgagttcctrcaacacactgcaggctttactcttttttttttgagacggagtct

SEQ ID NO: 653753 - DNA, 614 bp, Homo sapiens
tgtaggccactgaagaaattcccaattagcacagaggaacgtccaaccctatgggatttgagactggagattgcagccatcacatgatggaagcagaattagactccaaaaaccttgccttgagtctcggcgtctcggctctgtcatttgccagccaaatgaggccaggcaagtcacaatctcatggagtattcacttatctacctgtaaagtaggaatgtctgacctatttcagaagattgttctgaggataaaatgagatgaggcatttgtcctgtcctcttcaaatgccatattgtgatacttttcacttaattattttaagggctttaaagactccatctcctttamttttgacaacatctcatggcaggggatactatttttatccccattttacagagagaaaaacgggaccctggatgagtcaagtgacttcttcaagcttataccactaggtggcagactcaggatttgaaccctgctgtacagctccagagtctgtctgaccaaagcactcattcccagtggaggaaaagatagaccattcttttagaagtgcgcttcatttttgtttggagaaccacaagtactttgttattgttccagcatcc

SEQ ID NO: 653754 - DNA, 481 bp, Homo sapiens
tacagatgtttaaggactatccccagtgcacttggccagctagtggcagagccagagccagcttctagatatgtccctttattgctctgtgcatgccttttcctttcaaagatgccctgkaacacttggaaaagtggcacaattccagctatggggaggaaatagcttgaatttttgtagaggattgtgtttctaagttggctttggccaattcaccaatttccagtggttgggaaaggtgaccaaaacctcagaacatgtggaatcttccccgtccttgccacctgactatgcatgcatttcatagcattctcatttcctgaaaaggggtgagtttctggtttccgccagtgtcgaaggtttcagttaggaaatgtgaagtagagctgatagaacaagtagccagcgattctgtttgaagaagtaaaggtagatcttggtgtaggactcttgatgctggttaatagcaatgagatcaatg

SEQ ID NO: 653755 - DNA, 481 bp, Homo sapiens
tacagatgtttaaggactatccccagtgcacttggccagctagtggcagagccagagccagcttctagatatgtccctttattgctctgtgcatgccttttcctttcaaagatgccctggaacacttggaaaagtggcacaattccagctatggggaggaaatagcttgaatttttgtagaggattgtgtttctaagttggctttggccaattcaccaatttccagtggttgggaaaggtgaccaaaacctcagaacatgtggaatcttccccgtccttgccacctgactatgcatgcatttcatagcattctcatttcctgaaaaggggtgagtttctggtttccgccagtgtcgaaggtttcagttaggaaatgtgaagtagagctgatagaacaagtagccagcgattctgtttgaagragtaaaggtagatcttggtgtaggactcttgatgctggttaatagcaatgagatcaatg

SEQ ID NO: 653756 - DNA, 523 bp, Homo sapiens
acggaattctaggttgatgacttttcccctcaacattttaagtatttcaccacactctattcttccttgcatggtttctgaggataagttggatataattcttatctttgctcytctatacataaggtgtattttcctttggcttctttcaagatttttttctttatctttgattttttttgcagtttgaatatgatatgactagggtttttgttttttgcaattacctggcttagtgttctctctgagctttctggatctgtggtctggtgtctggcatgaattttggggaaattctcagtcactattgcttcaaataattcttctgtttcttcctttcttctccttttagtattcccattatacatgttatacctttcatggttttcccaaagttcttgtatattcaattctgttttttttttccagtcttttttctctttgcttttcagttttggaagtttctattgccatatcctcaagctcagagattctttcctctgccatgtccagtctactaatg

SEQ ID NO: 653757 - DNA, 548 bp, Homo sapiens
agaatctctgggatacagctaaggcagtgttaagagggaaatgtatagcactaaatgcccacgtttttatttagtcttcacaatagccttatgagataagatgctattgctatccttattttataggttaggaaaaggcttagagtggttaaataatctgcccaatttgcatggctagtgagtggtacaattggtattcatgcccagcctggttccgggccccagctgctcttctgacctgctccttcttttgcctcatcctgtctcccgagttagcctgctttttgagacctgaaagctttgactggaaaagatcctgtgattgcatattttttccaaactggcctagacttgttctttaacaggctggatgtagcaagcaamacaacaaaaacaacatccaaacaatcatgggggggtagtggtggctgtgtaaattttacttaagggacattttaatttcatctctggcaaaagtcagctattttcccagattctgaagtggcataaaaagccttcagtcagccattgctcttgacagtagaatt

SEQ ID NO: 653758 - DNA, 521 bp, Homo sapiens
tattatcttatattctgttgcccactgttgaactctcagaattcagggacttgagggagaaagttgaaaactttttccctttttttttttgcttgagttttcttattaccttgaaacttaaagaaaacccttgttatcagctgggcacggtagctcatgcctgtattcccagcactttgagaggctgaagtgggaggatcccttgagcctgtattcccagcactttgagaggctgaagtgggaggatcccttgagcctaggagttgggaccagcctggacaacataaggagaccccatctccacgacatataaaaataaattagctgggtgtaatggtgcagacttgtagtcccagctactcaggaggctgaggtcgagggatagattgagccctggagattgagrctgcagtgaactgtgatcgcaccactgcactccagtgtaggtgacagagtgaaaccttgtctcaaaacaaaaacaaaagaaaactcttgttatcctagttcttcttaggaaaaac

SEQ ID NO: 653759 - DNA, 630 bp, Homo sapiens
tggcgagtagtagccagcttcttcacaaggaaaagtaccgagcgaagaggggggtaaagagtccctcataaaaccatcagatctcrtaaaaactcactatcacgagaactgcatggaagagaccacctgcatgattcaattacctccacctggtctctcccttgacacgtggagattatggtgattataattcgagatgagatttgtgtgggcatgggggaaactatgttcagccactcagaagacactcagaagcgatttaccccaacaacaacaacaacaaaaattgtaattggttagcttttgatcagaaatatttgcataaataaccaaatcagattcgggaaattcaagtcactgtgtggttataaaatctaccagcctataaacatattttatcaataaattatgtttcctaaaactcttggaatgcttttacaattcttaaatgataaaattataggtcctataaattgaggaacatgattataataatttttcaaactgtattcttgattaacatagtaaaaaaatgcatgtggtagttcctttataaaatctatataccttaatattttctactaaattttagaaaattatgtgggaaaaagtcgccaataaagatacata

SEQ ID NO: 653760 - DNA, 571 bp, Homo sapiens
gatggaggacagtactaattaaatattctgaaaatagatattatacttaattattaatatatcatcatgaagaggtaaagaaaatctctataccctgacttaaggtaaatagcataatcatacacaagtatttgattaaaatatagagatctcaacatttatatcatattaacagattaatttcttttacatcacattttagtcaaattaaaaggcccaagcctaaaggccattaacagcatatatttggactatggacatacccaatggtgacattaagtccgggaatatttgcccctgaaattgatttgtataggatgagttgttttctattagatattatttaaygcaaaaaagcttaagataatttcaaagctcaaaaaataatgcatatataacaagatcactgttctaactataatacattttagaactaccttcacaacattgttaaaaatgttttcttccaaatttgacttggaaacacagtattgctcaagttacgtttattgatggtggcacttattttatctgtttatacctgaaactaaaaatagcccagatagaccac

SEQ ID NO: 653761 - DNA, 629 bp, Homo sapiens
atttttctagtatatccagaatattagggaccatgattactattactattaccaccaccactactactactaagatgcaatttaaaatatttctgcaagatatatgcagataagaagctcatggcagtaatagaaaaagggagcctggccgggagcagtggctcacgcctgttaactccagcccttggggaggccgaggcagaaggatggattgaagccaggagtttgagaccagtctgggcaacatagggagacccctatctctacaaaaaataaaaataaaaaaatttcctrgctgcagtgagttatgatggcaccactccagcctgggcaacagagtgagacactgtctcaccataaataaataaataaataaataaataaataaataaataaataaatgggaggagtctgaagaacaagggattcacaaagtaggtctactcactatgcggaaaacagaatgatgaagagggactcatcacggtagacaagtaagaaacaggtaaaatagcggggcgaggacataatatttctgaacactagatgggccttaaagcagatagcaataggttttccgatccttttttccctttgtcttttctttgaatttaacctttgaggaattt

SEQ ID NO: 653762 - DNA, 646 bp, Homo sapiens
ttcatcgcagcaacatgtgagatagattattagtttattctcattgataagcaataaaaaatcaaacatgaaaactgaaatgggataaggaaacactggatgagacagtatgaaatatttatttgagatcttcatcaaaccaaaatgaaaaatgaaaaaggtgaaatacgtaaagtaaaaaagagggaaactttctgattaagcagagcatttatattctaaattatagattattttaaatgttttataattagtgtcaaattgtggctccaattacattaaaataattccaactacaccaccagctgtaaacattctctctgtaagcagtgcttaaaaatgactattgtgccagtcagaataccaggctggtagtcttccaacatgtaataatggaaggcacaggtcatgatagacattgccacagagatttgagtttcctcataaagatcaggatgccaattttctagcatgcgttaggtgctctgtagttgggatacttgatgaatggagggaygatagatagatagatagatagatagatagatagatagatagatagatagacagatagatagaaagaaattggtcctggagaggcatagtgatttcgaatgacaagaaaataagagaagagagaaagaaa

SEQ ID NO: 653763 - DNA, 646 bp, Homo sapiens
ttcatcgcagcaacatgtgagatagattattagtttattctcattgataagcaataaaaaatcaaacatgaaaactgaaatgggataaggaaacactggatgagacagtatgaaatatttatttgagatcttcatcaaaccaaaatgaaaaatgaaaaaggtgaaatacgtaaagtaaaaaagagggaaactttctgattaagcagagcatttatattctaaattatagattattttaaatgttttataattagtgtcaaattgtggctccaattacattaaaataattccaactacaccaccagctgtaaacattctctctgtaagcagtgcttaaaaatgactattgtgccagtcagaataccaggctggtagtcttccaacatgtaataatggaaggcacaggtcatgatagacattgccacagagatttgagtttcctcataaagatcaggatgccaattttctagcatgcgttaggtgctctgtagttgggatacttgatgaatggagggacgatagatagatagatagatagatagatagatagatagatagatagatagayagatagatagaaagaaattggtcctggagaggcatagtgatttcgaatgacaagaaaataagagaagagagaaagaaa

SEQ ID NO: 653764 - DNA, 431 bp, Homo sapiens
aattctcctgcctccgcctccttggtagctggaagtacaggcacctgccaccatgcccgctaattttgtaattttagtagagttggagtttcaccatgttggtcaggctggtctcgaactcctgacctcaaatgatctgcccacctgggcctcccaaagtgctggrattacaggcgtgagccaccgtgtccagactagtttcagatgtttaacatcagtacatatttattattattattattattattattatactttaagttctgggatacatgtgcagaatgtgcaggtttgttacataggtatacacgtgccatggtggtttgctgtacccatcaactcgtcatctacattaggtatttctcctaatactaaccctctcctagcaccccccactccctgataggccccgacgtgtgatgttcccctcc

SEQ ID NO: 653765 - DNA, 535 bp, Homo sapiens
ggtgcattagcttttattctgtcawctgcttgtcatagtacctcatattttcacattccttggtcctacccaatgcagttctaacataaaataagcttccaggatattattcttatatctgagcagtgtaggcatgttagtcctgcttgtctggtaaatgagatcatagaataagtattactggaaaccagtattggcatatttgtatagtccaggtgttaactgatgttatcccatcttttgagacttttacataaaattaaattgacccatttcctgcatcttcccttcccctaccccactctctacatttagtgggaagtttgatgcccacctccagattcctacaaattcctcaaagtttgggttattttaatgggccttttttggttttaaatcaaatttctttttttttttttttctgaagccctgatcttatatctcactctgatggctattttattcaagccccacagcaacctataataccttcctttaaaactgacgtggccagggcatgattaacatggagtat

SEQ ID NO: 653766 - DNA, 616 bp, Homo sapiens
attagttataaagaaagcaacactcattaagtctgtgrtgacactaaatgttgctagagtgatcttaagattataaaggtaatgccaggtagtcacttccagaatccagacacacagtagtggctgtaaacagggagctgtgattacccacagacatttcaactacaaaaccaggctacgacaagcagatcagagagctgacactcagaaatgcaaaagactttttcaaatcagaaagaacaggctaaggctgaacaaatggattcacctatatagccctatcaatacatattgttcactaatatatgtgtattcattcatctatggattatatttagggaccactgtgggaatggtgtagtggttaaaagcatggaatttcaaatcagacaaccttgttttgaattttcagctcctccactctggatgagttaacatgacttaatcttggctttatttgtatttttctcacaaggctgtcccaaatatcaaatgtgtttaaagcccttagatcagcgactgacacaaaatttacaccatacactgtttgatgttattattaaatagtatgtgcattgtaaaatacatataaaatagaaaaatgatgcaaataggc

SEQ ID NO: 653767 - DNA, 391 bp, Homo sapiens
gcatattaacactttgggattataaagttttcacagagtactgtgaagtaaggctcactgtgagctaagtcctacttgttaatacctgggtaaaactgaggaggagaaaaaaatctctgtggattgaggaagsctccaatggtaggacttggcatttaagtacagtagttaggtttagctgagggatatagtttaggaaaatattctgtcatccttaagatcactgcctagtactatacgtagtaggacttcatgggcccttccctaagcatttttttttggtgaagctatgtcatatatgtattcttataaaagggaagctataggccctttgaaacgatccatggtcatcattaactatattcatttataccattctgtacgtgaagaa

SEQ ID NO: 653768 - DNA, 505 bp, Homo sapiens
tgctttaatacttttagaggccctcaaaataagtagaggcctttcctacagggtctgagaaggccaccgcagtcatctcttccgttctgtcagacataattcctcagtttagccttcccacctctatacagtctgataacagaccagcctttattagtcaaatcagccaagcagtttttcaggctcttrgtattcagtgaaacctttatatcccttatggtcctccatcttcaagaaaagtagaatggactaaaggtcttttaaaaacacacctcaccaagctcagccaccaacttaaaaaggactggacaatacttttaccacattcccttctcagaattaaggcctgtcctcggaatgctacagggtacagcccatttgaggtccataacaccccccaaaaaattttcgccgccccaaaacttcaaaactattttgttttatttttcttattaatataagaaggcaggaatatcaggcctctgagcccaagccaagccatcgc

SEQ ID NO: 653769 - DNA, 505 bp, Homo sapiens
tgctttaatacttttagaggccctcaaaataagtagaggcctttcctacagggtctgagaaggccaccgcagtcatctcttccgttctgtcagacataattcctcagtttagccttcccacctctatacagtctgataacagaccagcctttattagtcaaatcagccaagcagtttttcaggctcttggtattcagtgaaacctttatatcccttatggtcctccatcttcaagaaaagtagaatggactaaaggtcttttaaaaacacacctcaccaagctcagccaccaacttaaaaaggactggacaatacttttaccacattcccttctcagaattaaggcctgtcctcggaatgctacagggtacagcccatttgaggtccataacaccccccaaaaaattttygccgccccaaaacttcaaaactattttgttttatttttcttattaatataagaaggcaggaatatcaggcctctgagcccaagccaagccatcgc

SEQ ID NO: 653770 - DNA, 531 bp, Homo sapiens
aaatatttaaggaaatcccaaaactcaatagcaaaaaacaaacaaacaacaaataacctgattcaaaaatgggataaagatttgaacagacattctccaaagaagacacacaaatggataagtatatgaacaaatgctcagtgttacaaatcataaaggaaatgcaaatcaaaatcacaataagataccaactcacacctgtcaggatgactactacttttaaagaaagacgataagtgtcagcaaggatgtgaagaaactggaagctycgtgcaatgcaaactggtgcagctgcaatggaaaacgatatagaggttcctcaaaatattaaaactgtgtctaccatatgacccagtaatcctacttccaggactgcttatttttccaaaagaaatgaaatcaggatctcaaagatatattaggattcctatattcactgcagctctgttcactacagtcaagaggtgcacgtaacctaaatgtgcatcaactgatgaatgaatatagaaaatgtggtatgtacatataatg

SEQ ID NO: 653771 - DNA, 531 bp, Homo sapiens
aaatatttaaggaaatcccaaaactcaatagcaaaaaacaaacaaacaacaaataacctgattcaaaaatgggataaagatttgaacagacattctccaaagaagacacacaaatggataagtatatgaacaaatgctcagtgttacaaatcataaaggaaatgcaaatcaaaatcacaataagataccaactcacacctgtcaggatgactactacttttaaagaaagacgataagtgtcagcaaggatgtgaagaaactggaagcttygtgcaatgcaaactggtgcagctgcaatggaaaacgatatagaggttcctcaaaatattaaaactgtgtctaccatatgacccagtaatcctacttccaggactgcttatttttccaaaagaaatgaaatcaggatctcaaagatatattaggattcctatattcactgcagctctgttcactacagtcaagaggtgcacgtaacctaaatgtgcatcaactgatgaatgaatatagaaaatgtggtatgtacatataatg

SEQ ID NO: 653772 - DNA, 546 bp, Homo sapiens
aatatttgtattgtgagatggcttttagtgttgtctttcatttgactaaggctgtttattgtatctggattatgatatcttctgggagagttactagtttatggggtatatttatgttaagaacccatagtttcaagatacatttgaataaagaaatacaaaaatttcattggtaggacaacaaaatgcaccaatgtagggcgatctcagcaacatgcaaacttccttttatgacagtaatagaattttaaaaaatctgggtcatcttattgctctggatactgcyttaggaaaaccaaagttgaaacctcttaatgaccattgcttctgttcaagatttgctgtcttatcatcatctatatttttacatttctgaagttacattagtgaaaataggtcatatatgtgcttgattaccttaggaaatgacagagcactgaaatgaagaatctgttgaatatcaacaaccacaaccttgcaagtttcttctatttcctaataaaccattatcaatttcataaaaaatattttgtatttatgttaaac

SEQ ID NO: 653773 - DNA, 546 bp, Homo sapiens
aatatttgtattgtgagatggcttttagtgttgtctttcatttgactaaggctgtttattgtatctggattatgatatcttctgggagagttactagtttatggggtatatttatgttaagaacccatagtttcaagatacatttgaataaagaaatacaaaaatttcattggtaggacaacaaaatgcaccaatgtagggcgatctcagcaacatgcaaacttccttttatgacagtaatagaattttaaaaaatctgggtcatcttattgctctggatactgccttaggaaaaccaaagttgaaacctcttaatgaccattgcttctgttcaagatttgctgtcttatcatcatctatatttttacatttctgaagttacattagtgaaaataggtcatatatgtgcttgattaccttaggaaatgacagagcactgaaatgaagaatctgttgaatatcaacaaccacaaccttgcaagtttcttctatttcytaataaaccattatcaatttcataaaaaatattttgtatttatgttaaac

SEQ ID NO: 653774 - DNA, 656 bp, Homo sapiens
caatgctgacattgctgtaatgaagcagcctcaagccgtatttccatattacttataaaataaactagaactttaaaaaaattatattcattcattttgatacttagatatcagtaaaaactaaagtctgtcaatttagattcattttatgaagctctaatgactaatttattacaaatttataaatagaaaatgatatatgctggcctatgtcttttagtagtaagtgagtggaaggacgaaaagtataattattcgtcttagaaatactgcattatgtgcttatgaattcatatcagctttaggaacacagaccaatttttttctggaaacattgtctataaaaaggtataaacaagatttttgtcactcaacagaattcaggaataaatattcaattcaaattgctatagttattaacatataatgaatgggtatacaaaatagatatatctcatcttagaaattctattttattaaaaacaakacattattattaaataacattattattgaaaacatatcttcaaaagaagtttcattttctaacattaaaacttaagtagacatatgatctattatctgaacccttccaccatatatacccagtatgacttcccagcttcacagttccctgttctccacacatactaatt

SEQ ID NO: 653775 - DNA, 518 bp, Homo sapiens
ttggctgctgagtgatccacctctaaaattccattttaaagttatcttcctcagatcacctagaatgggttctttggaaatctgattctttgacgaagacatgcatttcggaagtttgttggagagtgccctcagaatcaactcatgtagtagtgttttaaaaaaagagggattaggcagtggaatgagttcaactgtgctgcattacttccaaataggtcagatggagctgttcagttgagaaggcctttcagagtggccctgcagagttttcctacaaaggagattgatgcttcactgcattagcatttcccacagtgaggtggctcttgccagctgaggacaaytccattagaagggctgactggagagccaacatcttccaacgcttccaggaagaaaaagcacctgctacagagttttatgataaggacttgaagttactattcataattttctctagcttttaaatgtagttcaggaagcataaaatatgtctctatgtttattcaacagtc

SEQ ID NO: 653776 - DNA, 619 bp, Homo sapiens
tttgaaatattttccctccaatgttgcctgactcatatctgaagaaactaaaacctgtgtggcaagagaacagaggtagtacactgaaatttatgtgctctcatagtctattggtaagcatttccaacagacagatgtgagtctcacagggaagggacatgaccatgtcttgggctctgtttagttggctgcttagaggaaaaagggagaagccgtcagcagaaaaggggtaggggtayagcacaagatgttcaggaaatgtggcatattcatggactcagggaaacgcccatcactggacacctctctttgatctacatagatgtatatatcgtctaggtagagaaactttctaagggtccattaacatgtcaccaaggaattggggaagctttatatagagaagatcttcatagctcactctgagctacggtggtcagaacctatctatcaggctggggttgggttaagtggagaggtaggtggagaggtaacagacaaaaaagccacctgtgctccatctccctttcttacttcagctctccagccaaagtggacccaagctggggaggggagaaatttttgcattaaatcaggtttagagttattactattttgg

SEQ ID NO: 653777 - DNA, 619 bp, Homo sapiens
tttgaaatattttccctccaatgttgcctgactcatatctgaagaaactaaaacctgtgtggcaagagaacagaggtagtacactgaaatttatgtgctctcatagtctattggtaagcatttccaacagacagatgtgagtctcacagggaagggacatgaccatgtcttgggctctgtttagttggctgcttagaggaaaaagggagaagccgtcagcagaaaaggggtaggggtatagcacaagatgttcaggaaatgtggcatattcatggactcagggaaacgcccmtcactggacacctctctttgatctacatagatgtatatatcgtctaggtagagaaactttctaagggtccattaacatgtcaccaaggaattggggaagctttatatagagaagatcttcatagctcactctgagctacggtggtcagaacctatctatcaggctggggttgggttaagtggagaggtaggtggagaggtaacagacaaaaaagccacctgtgctccatctccctttcttacttcagctctccagccaaagtggacccaagctggggaggggagaaatttttgcattaaatcaggtttagagttattactattttgg

SEQ ID NO: 653778 - DNA, 546 bp, Homo sapiens
tagttgacttacaattccacatggctggggaggcctcacaatcatggcagaaggcgaatgagaagcaaaatcacgtcttacatggcagcaggcaagagagcttgtgtaggggaactcccctttataaaaccctcagatctcgtgagttttattcactatcaccagaacagcaagggaaagacccgcccccatgattcagttacctcccaccaggtacctcccatgacatgtgggaattatggaagctacaatgattttggtgaggacacagccaaactatatcagcctcagactaaaggccatttgccaataaataagtagcaggaatctgaacttctagaaggaattcttccttgaagatrtcttaaatattaaacttttaaaagacgttgatcagatataacattgtttattagagaagacaattcaccattatgaccaaaacagaaaatatattacatcaaatgaaaaagggaaaaaaaggccaagagaacacatttagagcgttctccaggagatgaaagctgagcagttgaattcaaaact

SEQ ID NO: 653779 - DNA, 598 bp, Homo sapiens
acacacacacaaatacaaagaatattattcagacataaaaagaatgaaaccatgtgttttgcagcaacatggatggaactggaggtcattatgttaagtgaaataagccagatacagaaagacagatgccacatgttctcacwcatctgtgagagctgaaaagaattgatctcatggagacagagaatagaatgacagttaccagaggctcggaagggtgtgtggttggaaggcagtgataaaaagaggttgattagtggtacaaacagagttgaatagaaaaaataagccctaatttgcaataacagagtagagtggctatagttagcaatattgtatattttaaagtagctagatgaaaggacttgaagggtcaatgacatatataagtgataaatactcaaggtgatagatactcccaaataccctgacttgatcattgattattatatattctatgcatgtaacaaatactcacatgtacttcataaatatgtaaaatattttatatcaaagaaaaacatgtaaaatatcttgtataaattaaaaggtgtccagggtacaagagtatattaattacatacatatggtatatgca

SEQ ID NO: 653780 - DNA, 638 bp, Homo sapiens
ctttagtacactggaaatatgaaaagtaaacattacttttagtctctctctctttttttttctttactttatatttacaggaaatgctaaagcaacattctgttgcttacaacattcacataggttccaattatgcctggttaattcaatgatacaaattttgccttatttcttaccattattattattattaagtaatataacattgaaatagtttcacaattctgtttcatattttcttcaagattstagggaattgacacccaccatgggtctgggaacatgtaacaccttgagcgtttttgagaagcagagaagaagggaaagtctaagattgtgctgaggtttctgggggaaaatccatacattttcaagtatgttacaggccatattcttcgttttatgtacattctaaggtaacaacaattcagttagaattatttaaaagaaaggcacttgcatttattgcataattacagcaatgagtatgttcaaggatggtcaacaattaggatagcttgtaattagtggaaggtaatattatacatcacttattattttacccaagtgcagaaaacatctcaagttcaagagtatatgtaaattgatgatgcatttcctcctctgctgctaataaa

SEQ ID NO: 653781 - DNA, 544 bp, Homo sapiens
ttccttattgcaatgtgagaacggactaatataatgtagtttgaatattgagatttgagggtggctttcacagagcttataggactgtacacaggaagtctgggagttaagaaagaggttacctgagctatttgcttactttctgtaagtgacttgagaaaaacaaactatgttctccagcagccaaactggaaagagtacagttactcaaatatctgcttctacagccaatatctaaactcacctggcaactcaatcctgcaatgaaatccacacctatggctcgccctccagagtcctcgcttcttgaaatagctgtacaagatctctctttgaactatgatctaacttcaaaacaagctcattttgcagaaagaacagcttgtagtctattatatagacaatataagagaaaggccaaatggcattcttyaagaacaaacagtttccttcagtttcttggaaaggaaagtctatgcaaaaagtacttttctccctggatcaatagttttaggttttaacctcttcaaagtacataacattc

SEQ ID NO: 653782 - DNA, 600 bp, Homo sapiens
tttggtttggtctggtctgctggggcctattgtatgaactcagtccaaaataatggcatctcctaattttgtttaacagtttcttccttttggttatgattttacttaggtgagtgtgaccattaggcttttaacgccattctcagttaccattattttagggttttggtctcagtacatcatttattggttatgatgtctttatgagaacactcttttttgagtttttgtcatctcaattaaagagagaccatttgacattttacaaatggctgtatgtaaccattgaaaacttttgagggaacatagtgtgccagagagacaattataatgatcaagargatcaaatcaagagtttggagtatgctccttagtcagcatctccatgaaccaaaccaactaaaatgaaatagatcaaagaatgagccagaaaaggagtctacttgttttaatcaagcagtctgtttattaataccctacaaccaaatctctgtaatagtcaatgcatttatttacatgtaacaaatagagtcagtaatggtacagatttttttctgtttatccagtagacaatctagagtaattttattatccagcaca

SEQ ID NO: 653783 - DNA, 646 bp, Homo sapiens
aatatatttatgtgttccatactaatatttatacactgtttgtatcctgtttttttcacttgccattaaattatacatactattttgttttttcatggtgctaaatgaccttcataaataccacttaaatggctgcttactgatttatcaaaatgatttgctgtaatatatggttaataatatttcaaatgctgggacatttggattcctttttattttctttagtggcattgagcttttttttcttagggcttttttaaaacaatattttgaatcatttcctaatgataaattccagaataatttccatatcaaagaatatatttcatgagtcttgagacgtgttaccaaattgctttccgaaagggcagttccaatttactctgccaccagcagtgtacaacctttaagttttgaatgttagtggaacatttcaatgaaaatggcatatggaccaatgacagagaaagagatcagggctagaaaaatagacctaggactttaaaaaaatgaaatcatattataagcagataatttcctygaggagaaaatgaagaatagtgtaggaaaaagccctgaagaatttttttaaccttctcattttacataaaaatatatggtacacagaattaagtggccgctcatg

SEQ ID NO: 653784 - DNA, 576 bp, Homo sapiens
gatgatcagcattctgatgcctcaggagacactcactggtgcttggcacarccactaaaagttctgtagtcatggcttctgacctcctcaaaccctcaaggagacagcagacccacggcctcatttactctcctctgcattgcctcttgtatctggaccctctctcacagacacagtgcacacctcactggactccactcccacatgtactacatttattttatcactctcctgatcagagaccctttaggccaaataccctagcccgcccttgggctgcactctgaaagaaaagcagcacctaaaacagtgtggagcaccagatgctctattgctccttttgaaaaaatccatcccacaccttcacccaaatcatgaaacactaatacaatttgaaaactgtccttacagacttctgggaatctcttctaaagaaacagctcaaaacacagaaggtggcttctgcccaaaggtgctcagagcagcacggtttataatagactaaatctggaagcaatcaacatgtccaaccagaagacaaagcaaatgctgggatgttccccttcatgaaatatt

SEQ ID NO: 653785 - DNA, 576 bp, Homo sapiens
gatgatcagcattctgatgcctcaggagacactcactggtgcttggcacaaccactaaaagttctgtagtcatggcttctgacctcctcaaaccctcaaggagacagcagacccacggcctcatttactctcctctgcattgcctcttgtatctggaccctctctcacagacacagtgcacacctcactggactccactcccacatgtactacatttattttatcactctcctgatcagagaccctttaggccaaataccctagcccgcccttgggctgcactctgaaagaaaagcagcacctaaaacagtgtggagcaccagatgctctattgctccttttgaaaaaatccrtcccacaccttcacccaaatcatgaaacactaatacaatttgaaaactgtccttacagacttctgggaatctcttctaaagaaacagctcaaaacacagaaggtggcttctgcccaaaggtgctcagagcagcacggtttataatagactaaatctggaagcaatcaacatgtccaaccagaagacaaagcaaatgctgggatgttccccttcatgaaatatt

SEQ ID NO: 653786 - DNA, 600 bp, Homo sapiens
cttcaaaaagggttaaggaggacgcattgtgtttaccagattgtctggtgttgggttaatcaaaaggcttcctgtgctgggaaaaccagaaaaacataaaagaatggcattagtgaagtgcrtcagggggcagcagttacttagagatggtggtggaagtgtcctccatacgatgctgtgattaagtgcttacagttttctttgtttttattctctatcttgattaaaattttgcagtgtttatactgccacacagaataaatggacccatagcttacatttcaaactgtgccttgctgacatcattatgtttgtcagatttataacatttctaatatacaacaatttttcactcttggaacactgaaggggaacacaggctccctctcttttctgatgtttcattcactgttacttcctctatcactggtcaagggatatggtctccttggaaataactgaaaacaaaaataatagcataattatttatatattatttactgtatcaccctcctcatatgatcttttacctgttatcagtattttattgctattgtagcaaattactatgcaattggtggtttaaagtaacgcaaattt

SEQ ID NO: 653787 - DNA, 582 bp, Homo sapiens
aaatcttttgtgaaaggaagaatcagttgttacaacaaacttcactgttgtcttattttaagaaattgccacagccacttcagccttcagtaactaccaccctgatcagtgagcagctgtcaacactgaagcaataccctgcaccagcaaaatgattatggctcactgaagattcagatgaccattagcttttttttaagcaataaaatatttcttaattaaggtatgtacattattttttaaacatgatgcaattgtacacttaataaactatagagtaaaaaataacttttatatgcactaggaaacaaaagtatttgtgcaattcactttattgtgatatttgctttattacrgtgttctggtacctaacacacaatatctctgaggtgtgcctgtatacagaaaagagcaaaacaaacatgtgctttgtccctctggggcttacagttgttgggacaagtaagttcctcttcaaagactcaaatttctggtcataaattgtaaaccaaacctatcccctccttttttcacaaatcgcacatttaccctatttggaaaagtttaagtcttagccaacgg

SEQ ID NO: 653788 - DNA, 517 bp, Homo sapiens
agtttaaacatcacttcttaagggaagccctcccctcattctcccctcctctaccactaccaagaccagactgggaccacccgttacacccactcacaccatcagctctcatccaggcttgctcatctcagcaaatgccacacccgcccacccagttgtttaaaccaaaacctaggagtcattcttgcctcctctctttctctcacacccaacatccaatctatcagcaaattctgttggctctacttcaawatatttcctaaatatatccttaatgtggctgcctctcaccactttagaccaaaccactaacctctcacctgcaccgctaacatggtctccaaactggttccctccttccatttttaccccttccccataacctattttcaacagagaagccagaggggtcctcaaaattttttttccttaaaaagatttattttattgtgtaagaacacttaacatgagaactattctcttaacaagtgttcatgtacaatacattactgttgac

SEQ ID NO: 653789 - DNA, 517 bp, Homo sapiens
cattctcccctcctctaccactaccaagaccagactgggaccacccgttacacccactcacaccatcagctctcatccaggcttgctcatctcagcaaatgccacacccgcccacccagttgtttaaaccaaaacctaggagtcattcttgcctcctctctttctctcacacccaacatccaatctatcagcaaattctgttggctctacttcaaaatatttcctaaatatatccttaatgtggctgcctctcaccactttagaccaaaccactaacctctcacctgcaccgctaacatggtctccaaactggttccctccttccatttttaccccttccccataacctattttcaacagagaagccagaggggtcctcaaaattttttttccttaaaaagatttattttattgtgtaagaacacttaacatgagaactattctcttaacaagtgttcatgtacaatacattactgttgactgtagatgcaaygccatacagcagatcttcagagct

SEQ ID NO: 653790 - DNA, 484 bp, Homo sapiens
tagctcagtgtataaggtaccaggcatgatacctccaagaacacaccaccaagagctatagaatgcatgcttttaatggcaaggaggagaaaggtggaaatctaattaagtgctaagctaaatccaaagtctagatcaatcatgactttgggatcatgaaacatttgtaatttgtaaattcattttatggtatatttaactatcatttgagtcctactgagctaataatcctatttcaaattatactctaattcactatctttttatttcttcatttttttttttttgagacagggtgcacaggctggagtggagtggcacaatcacagctcactgcagccgccatctcccatgcttgagcgatcctcccactttgccctccccagtagctgggactayggtgcgcgccaccacgcctggctaatttttaatttttttatagagactggggcctcactatgttacccaggctggtctcgaattc

SEQ ID NO: 653791 - DNA, 430 bp, Homo sapiens
ctgaatgttaaaactaattatcttcagaaagtaccttcaacataaatccacatttgtttttagcagtaagaaatggtctttaaaaatcataaggttttcctaccttgacaaaaatggtcgaattgcattcctgcaatgcctccattaaactaatcacatggagacacaccatttctaccatctgaaacaacaaacatgaaagttaattccatttccagtgatatagaaaccttgcaaactagtttgcagccgcagaagaccgatgtcctgtgcccatgaggtctttctgtgtaatgaccgtaggagaccactggcagtggtgttcattcacctctgaaacktcaaaccagaaaaagaattttaaaaaagctccagaggcttggtaattgtcatgcctccctcattcaactcagggctgccaatggaattc

SEQ ID NO: 653792 - DNA, 546 bp, Homo sapiens
tctaaaacctctgtgaggacaacagcattaattttaattaagttatttacatcagaaatgatattgcatagctaagagaggccacaggggagacagagccatatctactatgcgaggtaaggggctcacttagagctgtctctataaggatggtttaaagtcctagaccccacttaagtatgtttgcatggcctggatgggcccttgaggtcaagataaggtttgtgaagaagtaaaattttaaatrtctgtatctcccttcagcagatcactttctcacctataatactcagcaaagtgcaatgcagagcataatgtaagcacatttcagcatggttagcaatcacacagcgtcaagatctgaggttggatccaactgtctgatttatgagaactcttactagtcagaattaatcaaaaatcaccctaaaagtaaaggaggtacacagagaatccggcatattaaaggaaataaaagtgcataagcctcagaaatcatcttttttttatccatgcattgtcatccagcatatttttacatcagat

SEQ ID NO: 653793 - DNA, 400 bp, Homo sapiens
ttagtttgattgactttcacttgtcaatttcgtttttgttgcaattgtttttagaaacttagccaaaaattatttgccaaggccaatgtcgagaaaaatatttcctaggttttgttttagagttttcataatttgaagtcttacattttaacctttaatccatcttgaattaatttrtgtgtatggtggaaggtaagcatccagtttcactcttctgcttatggctagcgaattatcccagcaccatttattgaatagggtgccttttccccattgtttgtttttgttggccttgtccacgatccagatggtggtaagtgtgcagctttgtttttgagtgttctattctgttccattggcttaagtgtctgcttttgtaacagtatcatggttagtgtac

SEQ ID NO: 653794 - DNA, 400 bp, Homo sapiens
ttagtttgattgactttcacttgtcaatttcgtttttgttgcaattgtttttagaaacttagccaaaaattatttgccaaggccaatgtcgagaaaaatatttcctaggttttgttttagagttttcataatttgaagtcttacattttaacctttaatccatcttgaattaatttatgtgtatggtggaaggtaagcatccagtttcactcttctgcttatggctagcgaattatcccagcaccatttattgaatagggtgccttttccccattgtttgtttttgttggccttgtccacgatccagatggtggtaagtgtgcagctttrtttttgagtgttctattctgttccattggcttaagtgtctgcttttgtaacagtatcatggttagtgtac

SEQ ID NO: 653795 - DNA, 627 bp, Homo sapiens
acagccaatggcactacagcactcacgcctgaatggagtttattcaatgcatgtatttcctctgtaagacacatcacagacttcttggacttgtgaatgctaagcagcacttcagcactatgcttgggggttaatttaaatggcaaaacaaccaacaaacaatacaaaaacaggaaaagcatggcattaaatagaccacaaaaaggatacctgactattgtatgagagctgaaaaagaaggcagaatatcatcctgttcaaactcaaattcttttgacactctgcgcaaacacatgactatgaaaggctgtgagtactgatttgggggtcacaaaaaatagtaggtgagttcacaaatacaaaagctgaaaacaaggaggatmgactgtattttcgtagacaatctaatctcagaagatttcaattcagacaaaaatcatgagaattactgtattacaaaagggcactagataggggaaaaagagtaaaaatcacaattaaaacaaaggttcaaaattctgcagcaaccatatccagttacactttaatatgtttgtggcagactacattattgttcccaactcatcacccctccctatatctaaaacctttccccaagacaatgca

SEQ ID NO: 653796 - DNA, 627 bp, Homo sapiens
acagccaatggcactacagcactcacgcctgaatggagtttattcaatgcatgtatttcctctgtaagacacatcacagacttcttggacttgtgaatgctaagcagcacttcagcactatgcttgggggttaatttaaatggcaaaacaaccaacaaacaatacaaaaacaggaaaagcatggcattaaatagaccacaaaaaggatacctgactattgtatgagagctgaaaaagaaggcagaatatcatcctgttcaaactcaaattcttttgacactctgcgcaaacacatgactatgaaaggctgtgagtactgatttgggggtcacaaaaaatagtaggtgagttcacaaatacaaaagctgaaaacaaggaggatagactgtattttcgtagacaatctaatctcagaagatttcarttcagacaaaaatcatgagaattactgtattacaaaagggcactagataggggaaaaagagtaaaaatcacaattaaaacaaaggttcaaaattctgcagcaaccatatccagttacactttaatatgtttgtggcagactacattattgttcccaactcatcacccctccctatatctaaaacctttccccaagacaatgca

SEQ ID NO: 653797 - DNA, 627 bp, Homo sapiens
acagccaatggcactacagcactcacgcctgaatggagtttattcaatgcatgtatttcctctgtaagacacatcacagacttcttggacttgtgaatgctaagcagcacttcagcactatgcttgggggttaatttaaatggcaaaacaaccaacaaacaatacaaaaacaggaaaagcatggcattaaatagaccacaaaaaggatacctgactattgtatgagagctgaaaaagaaggcagaatatcatcctgttcaaactcaaattcttttgacactctgcgcaaacacatgactatgaaaggctgtgagtactgatttgggggtcacaaaaaatagtaggtgagttcacaaatacaaaagctgaaaacaaggaggatagactgtattttcgtagacaatctaatctcagaagatttcaattcagacaaaaatcatgakaattactgtattacaaaagggcactagataggggaaaaagagtaaaaatcacaattaaaacaaaggttcaaaattctgcagcaaccatatccagttacactttaatatgtttgtggcagactacattattgttcccaactcatcacccctccctatatctaaaacctttccccaagacaatgca

SEQ ID NO: 653798 - DNA, 627 bp, Homo sapiens
acagccaatggcactacagcactcacgcctgaatggagtttattcaatgcatgtatttcctctgtaagacacatcacagacttcttggacttgtgaatgctaagcagcacttcagcactatgcttgggggttaatttaaatggcaaaacaaccaacaaacaatacaaaaacaggaaaagcatggcattaaatagaccacaaaaaggatacctgactattgtatgagagctgaaaaagaaggcagaatatcatcctgttcaaactcaaattcttttgacactctgcgcaaacacatgactatgaaaggctgtgagtactgatttgggggtcacaaaaaatagtaggtgagttcacaaatacaaaagctgaaaacaaggaggatagactgtattttcgtagacaatctaatctcagaagatttcaattcagacaaaaatcatgagaattactgtattacaaaagggcactagataggggraaaagagtaaaaatcacaattaaaacaaaggttcaaaattctgcagcaaccatatccagttacactttaatatgtttgtggcagactacattattgttcccaactcatcacccctccctatatctaaaacctttccccaagacaatgca

SEQ ID NO: 653799 - DNA, 562 bp, Homo sapiens
gcaactgtaagttactacacttggagaaaaaaattattgatattttcatagtgcaaaagtatacatatgtgctagtctgagcatctagattaaaagtccacccttgaacctaaaataaaagttaaaatatttttaaaaagaatctatcctacagaagtaaaggcatatatgtgatcctcgatatacaagaatgctttcacagcattgtttatgatggcaaaataaaccggaattaaacatgagtttcttcaacaggtaattggtagaatagtttttgtatccttataatggaaaaattttaagatattaaaagataagttagtttgcatgtatttacctgaagctatgtctgcacctatatgcaaaataggagtttgcaaaataatatacatgatatcattcacttcatacagagtattggttaacacrttaaagaattttctgtgtgggaccaagttaaggaatttacatgcattggctgatttaattctcacataaatcagctgatagagcagttttatcattctcattgcatccctgaatcttaggtgcatagaggttc

SEQ ID NO: 653800 - DNA, 397 bp, Homo sapiens
cctcccctcatcataatacattataaaaattccttgtgaacattaatggcaagtatgcaccaggatcttgtcaagscaaaaactcctggaaatgctagtttttaaatcgggcttagattaaaagaaacaaaattactgatgaccttatgaagaggatgtagttactctaattctccatatccaaaccatagtaacagttttcagaataataggtgagtttcatagcatcctacagaagtgaacaattagcttttctaagtattatgaacccatggtttaaatgtatcaatgtgttttaatcttttgcagttatcactctttttttttttttttgagacagagtctagctctgtcacccaggctggagcgcagtggcatgatctcggctcactgcaac

SEQ ID NO: 653801 - DNA, 549 bp, Homo sapiens
ctgtaagtttctaaaacaggcagttggatgatagagtgggcagagacagtttgacttttgattcgtgttatgccttttccccacttatcatttttatattgtttcttgaaaagaaagtcattcatactagcatagttatgaatcttatctttgatttatcccttgtattttctatcagacttaggataccagttgtcttttcaggaagacactgtcacttttaacataaaattcctacatgtaggaagttgggastaaagatatcagcaactgcacaaatggccctgtgtctctgtcttatttttcaatgtcctttgctctcaatcctgtatcactttttatgtaagaggctgtatctcgagaagtaggttctcaagaccatacaaggagtcatagctctaggttagatttcaccaagatagctgggaattgaagactacaggagctgctgaactgacaccatctaccctgcccttgtatcagtgaagggctcagtagcaacaatacatagaagagaggaagggaagagaagggtggagatagagcatg

SEQ ID NO: 653802 - DNA, 549 bp, Homo sapiens
ctgtaagtttctaaaacaggcagttggatgatagagtgggcagagacagtttgacttttgattcgtgttatgccttttccccacttatcatttttatattgtttcttgaaaagaaagtcattcatactagcatagttatgaatcttatctttgatttatcccttgtattttctatcagacttaggataccagttgtcttttcaggaagacactgtcacttttaacataaaattcctacatgtaggaagttgggactaaagatatcagcaactgcacaaatggccctgtgtctctgtcttatttttcaatgtcctttgctctcaatcctgtatcactttttatgtaagaggctgtatctcgagaagtaggttctcaagaccatacaaggagtcatagctctaggttagayttcaccaagatagctgggaattgaagactacaggagctgctgaactgacaccatctaccctgcccttgtatcagtgaagggctcagtagcaacaatacatagaagagaggaagggaagagaagggtggagatagagcatg

SEQ ID NO: 653803 - DNA, 537 bp, Homo sapiens
gttcaccaaactgaagtttgatcctgaatctattcttagtcaggaatctgccatagaagtgtgtaataaacaggccaaagagttaaatgtttcaggcagatgtaaatataaatccctaccactgtcattcataagatttgtgaccttggaagccttctaaggttcaatgtctttatctctaaaaggcagataatratttagtagctatttcatgtgaagattaaatgacgcagaccatgtgaagtgtagcatctggcactgcaaatgctaaacattattagcaaagccagaattttgttagattcatttcttctttaagttggttaaacatccatagatatccagcataactgcccaattctggatccagtttccagttgtgctacatcaatacctcttttcaggttataaatatgtaacaagacttctggttaacatggtatatatttatctcaaatctttcctccaaacacatttataatgaaaataggggatgataaaaaagcataaataattgaataaagagaacagagaagg

SEQ ID NO: 653804 - DNA, 537 bp, Homo sapiens
gttcaccaaactgaagtttgatcctgaatctattcttagtcaggaatctgccatagaagtgtgtaataaacaggccaaagagttaaatgtttcaggcagatgtaaatataaatccctaccactgtcattcataagatttgtgaccttggaagccttctaaggttcaatgtctttatctctaaaaggcagataataatttagtagctatttcrtgtgaagattaaatgacgcagaccatgtgaagtgtagcatctggcactgcaaatgctaaacattattagcaaagccagaattttgttagattcatttcttctttaagttggttaaacatccatagatatccagcataactgcccaattctggatccagtttccagttgtgctacatcaatacctcttttcaggttataaatatgtaacaagacttctggttaacatggtatatatttatctcaaatctttcctccaaacacatttataatgaaaataggggatgataaaaaagcataaataattgaataaagagaacagagaagg

SEQ ID NO: 653805 - DNA, 537 bp, Homo sapiens
gttcaccaaactgaagtttgatcctgaatctattcttagtcaggaatctgccatagaagtgtgtaataaacaggccaaagagttaaatgtttcaggcagatgtaaatataaatccctaccactgtcattcataagatttgtgaccttggaagccttctaaggttcaatgtctttatctctaaaaggcagataataatttagtagctatttcatgtgaagattaaatgacgcagaccaygtgaagtgtagcatctggcactgcaaatgctaaacattattagcaaagccagaattttgttagattcatttcttctttaagttggttaaacatccatagatatccagcataactgcccaattctggatccagtttccagttgtgctacatcaatacctcttttcaggttataaatatgtaacaagacttctggttaacatggtatatatttatctcaaatctttcctccaaacacatttataatgaaaataggggatgataaaaaagcataaataattgaataaagagaacagagaagg

SEQ ID NO: 653806 - DNA, 537 bp, Homo sapiens
gttcaccaaactgaagtttgatcctgaatctattcttagtcaggaatctgccatagaagtgtgtaataaacaggccaaagagttaaatgtttcaggcagatgtaaatataaatccctaccactgtcattcataagatttgtgaccttggaagccttctaaggttcaatgtctttatctctaaaaggcagataataatttagtagctatttcatgtgaagattaaatgacgcagaccatgtgaagtgtagcatctggcactgcaaatgctaaacattattagcaaagccagaattttgttagattcatttcttctttaagttggttaaacatccatagatatccagcataactgcccaattctggrtccagtttccagttgtgctacatcaatacctcttttcaggttataaatatgtaacaagacttctggttaacatggtatatatttatctcaaatctttcctccaaacacatttataatgaaaataggggatgataaaaaagcataaataattgaataaagagaacagagaagg

SEQ ID NO: 653807 - DNA, 556 bp, Homo sapiens
attttccaccatgattgtgagggctctcagctacatggaactgtgaatatattaaacctctttttccttataaattacccactcttgagtatgtctttctcagcagcatgaaaatggactagtacaccatctctacaaaagaaaaaaaattagctaagtgtggtgtcaggtgtctgtggccccagctacttggaggctgaggtgggaggactgcttaagactaagaggttaaggctgcagtgtgcagtgattatgccactgcaatctggcctgggtgacagagtgagaacccatctcaaacaggaaaaaaaagattatacaccatgatgaagtgggatttatctctgagatgcaaggatggttcaatataggcaaatcaataaacatgatatatcacattaacagaatgaagggtaaatatcatatgatcattacaatagatgtaaaaaaagcatttgacaaagtccaacatcctttcatgacaaaaattatcagcaaattaggtatagaaggaatatacctcaacataataaagrccatatatgataagtccaca

SEQ ID NO: 653808 - DNA, 499 bp, Homo sapiens
agcaaactacagcaccaacatctggagagacaggttcatctggagagacacagcccagaggtgttcacctggaacagaagctgctggatccctgagggctaggaacactggcatggtcactggaggacctgcgggaggcttagtgtccagcgtggcgctgcagtcttaggggagctcgcactttcctggactttacctccaggaacccacacttcttacagtgaaaatcagagaaacatcgcctcttrgtcatttcaggggggagataaaagtaatcgttgtaaaacacataattttttccataaaaaagacctacacactagggaaaaagatgctgtcaaagccatatccccgtgggggaagggtattcctccaaaacccacaagcaataacagtcaggacttcaaggaaatagatggagaatatcaaggccatagaaggaagaaaggatagtggagagaaaaaagctataccactggagagacacttgtgaaagcta

SEQ ID NO: 653809 - DNA, 499 bp, Homo sapiens
agcaaactacagcaccaacatctggagagacaggttcatctggagagacacagcccagaggtgttcacctggaacagaagctgctggatccctgagggctaggaacactggcatggtcactggaggacctgcgggaggcttagtgtccagcgtggcgctgcagtcttaggggagctcgcactttcctggactttacctccaggaacccacacttcttacagtgaaaatcagagaaacatcgcctcttagtcatttcaggggggagataaaagtaatcgttgtaaaacacataaytttttccataaaaaagacctacacactagggaaaaagatgctgtcaaagccatatccccgtgggggaagggtattcctccaaaacccacaagcaataacagtcaggacttcaaggaaatagatggagaatatcaaggccatagaaggaagaaaggatagtggagagaaaaaagctataccactggagagacacttgtgaaagcta

SEQ ID NO: 653810 - DNA, 499 bp, Homo sapiens
agcaaactacagcaccaacatctggagagacaggttcatctggagagacacagcccagaggtgttcacctggaacagaagctgctggatccctgagggctaggaacactggcatggtcactggaggacctgcgggaggcttagtgtccagcgtggcgctgcagtcttaggggagctcgcactttcctggactttacctccaggaacccacacttcttacagtgaaaatcagagaaacatcgcctcttagtcatttcaggggggagataaaagtaatcgttgtaaaacacataattttttccataaaaaagacctacacactagggaaaaagatgctgtcaaagccatatccccgtgggggaagggtattcctccaaaacccacaagcaataacagtcagracttcaaggaaatagatggagaatatcaaggccatagaaggaagaaaggatagtggagagaaaaaagctataccactggagagacacttgtgaaagcta

SEQ ID NO: 653811 - DNA, 503 bp, Homo sapiens
ccatacctttgccagtttaattatcagtctattattttttaaaagtccattcttctaacagccactttctgggcacccactgtgggcagaacactatgcaagacccttggagaatacagagaaggctcatgcccttctctgccttcttgggtgtgtacctgcaactaccacattgtttaaagatagctctgaatttcccccacctgggtaatgtcgagggcttcattaaaatttactagtgcagagctgtgtttacagattgatttcatcaaggaaaaccaaaacacagaataatagaatgaggagtgaaccaagacccagatgaaaatttttaatttttaaggtctaggataccagttgtcaaggtttacctcttcgtaacgggtcagaacacagtgctgygcctggcccagcccttgtccaaaatccatttcactcacacctgaatgatataaaggggtcatcctgagaatggttcttaggcaacagcttctcaacatcac

SEQ ID NO: 653812 - DNA, 523 bp, Homo sapiens
gctaccatatgaataagtatcttcataaagatactttgtgaacaaatcaagaagacaaaatagttgttactaatatttagttttgtccttaaacacagagctcagtaggatctctttctattgacattttattctctatatccctaaaataatcttaatcatttaattacagaattaatcagtaaggaatttaaaactaagctggaaaggcgtgaaacaggatagatggagcggagcaatgctgttccctgcrgtgagaaagagagaaaggtgttgcatcaccaagggcgagtctgggtgaccgagaggtcacaacttgatgagtgaagatagagtcaagacagaaaaataaagtcaggaaagccagtgctgatggggaaacaaatatgcaaagtataactcacagttctggaaaacccccagtattttcagtctctgtcaggacataaataagatttgcagttaaccatttgaccatttacctgaggccagtaagtctcagggaaaagcgtgtccacgcgtg

SEQ ID NO: 653813 - DNA, 605 bp, Homo sapiens
ttactaaagagaaactcaagttagccctctgggggagaagctcacaaggattaattatattgtaggggttgatatctctcttcatttccctttccagcagttttgcaaatacatttttccacagttttaaagaaatgttaagaactcccaagttccacaaccagaaaatcctgacagtctctgatagctgaataatggatgaagctccactgtttacttagcaggagaaaaaaagagagaatgatagagaagtccagataaagtgcaggaatctgacatcctcttgtgctgaacaatggtgagaagaatatcccagcttcttttttttttttttttgtccatgtgcaaaacgtatatggaaacaacagttcagtatgggatwtattattatttcacgcctgtacctaagagttaatcgggcgattctcttctatgtcaatgtgattgctcccttcagtaatgggctaagacctggaacacagattactaagcatttccatcccaacaactccactccatcccctactgcactgtcactcgaaagaactttccctaagatactgcatcattttcccagccaggaaacacctttagtattaccacat

SEQ ID NO: 653814 - DNA, 589 bp, Homo sapiens
taataagtttccccattccaattctcatgttcccacttttttccaatcaggaccctgattctcttgaaggagacttacacaggctgagaattaaccttctctggcgttctgccactcataagtacaggctgcacctgggcttcagttcagttggccttctggctgccagtgatgagggactttttaaaggcttccatggaggccctttgactctcacacttgggtttaaattggtggttaatagatttgatcctggcatctatacttagtgcatcaatggtgcttascaataccctcccaattcaacaatctttcaagttacttttccacctgtactctcaaatactagatacatcacagaagttaatgcattcgcttctacttatatgctgtcctggttcactacaagtaaaagtgttagcaatttcactgcaggagcacatctgagactatcttcagggaagagattctgatgggaccactggtgagtgagcaaactccagaatcccatccttagactcaggtgtatataactactactgctatcaactgtcttagattgggctcttgcagctgaccctgagaatta

SEQ ID NO: 653815 - DNA, 432 bp, Homo sapiens
aacgtggccttatttcccttttggaacagaacttcgcaggactaggcaaactccaattttccaatgaatgcttagcattataaggacacagtaccttcctaagcttctctttaaatagcagtcttatttgaagccaaatatcatatggctatattgaacttaatatgatttctatcagccaaattacattagagctctgatgggaacagggataagtaatttggcaggctttctcttttctattcacctccatttgcttaccttgtttctaagaaaagattagaagacctgacaggttggctttatctcagagagaatatataggtaggaaataacagggagttggaaaaccaatttgtyagcccgaaccaggaaaagagtttcactgatttaaggctaaagcctttaaacatcccaaggtcatctctcttt

SEQ ID NO: 653816 - DNA, 575 bp, Homo sapiens
cctttggtttaaacctaaatttttgatgataggtgaatgattaatattatttgacgataatatttctaatgaaatgcaaaaaaatggtcatgataaaaagtacaaaaataagcattccaatggttaacaaactgtatgatcccacttttaaaggtaaagatacacaaacatattaattttggttatttctgaggttttcggtttaaactggataagcttctgaatttttaaattatttataataaatatattaaaacacattttttcaatatagaaacaatacaaatttaaaaaytgtatcagtaatacaggagttacatctttttccttccttagacgtggggctccatttatttaaagaaagatgttattctgtgaagcctttaacttaataaacaagcttgcttttgacatatacaaaggccattaaattgaattaacacttgaagccagcaatttacaactacactcatcatcagaattactaggaaagcaattaaaaacagaaggaggaaaaaaaagagatctcctgagcctgcccgagaattactgaatcaaaaatccctggagtgcat

SEQ ID NO: 653817 - DNA, 201 bp, Homo sapiens
gagtaaaacacactttctttttgtcccgtctgaagtggacaaatggagtgggtgcatagaagttgtaactctgagtccacttaagttttgcragtgtataagtcatttttcagtacacaatgaagttaacaattaatatctttgtggtatccagaaacaatgtcaaccaaaattggagcaatgaacctgagaattgaattc

SEQ ID NO: 653818 - DNA, 572 bp, Homo sapiens
cactgtacctggccaaaagcattttgaataaaggatacccaaccagtaattagaggtcaatttacatggttgccagcactcacaaattacgttcttgatgagtgtcttatccttttcattcccaatgccactatgctggttcaggttcatttcacctagcacatctgccccattcattcattcatacaatcatgcaagcagctattatgctccaggtactgtgctgggtgctggacatgacataargatcaatacagagttcctattttcaaagaacatgcagtctaggtagaggataaagataataggacctcaaaaataatgcgagaaatgctatagtagagcaggcacaggatgtggcccttagcatcaaggagaagcacctaatccacagtcaaggagtcaggtatgcctacagctgagaccttaataggaggcaaaagttaacacatgaaaaaggggagaaatattcagttcaagcgaaggaatggcaggagcaaaggcatggatgccaaagaatacaaagtaatttcacgggtggaccgaaaatagtttgatacacctgaaggatt

SEQ ID NO: 653819 - DNA, 572 bp, Homo sapiens
cactgtacctggccaaaagcattttgaataaaggatacccaaccagtaattagaggtcaatttacatggttgccagcactcacaaattacgttcttgatgagtgtcttatccttttcattcccaatgccactatgctggttcaggttcatttcacctagcacatctgccccattcattcattcatacaatcatgcaagcagctattatgctccaggtactgtgctgggtgctggacatgacataaagatcaatacagagttcctattttcaaagaacatrcagtctaggtagaggataaagataataggacctcaaaaataatgcgagaaatgctatagtagagcaggcacaggatgtggcccttagcatcaaggagaagcacctaatccacagtcaaggagtcaggtatgcctacagctgagaccttaataggaggcaaaagttaacacatgaaaaaggggagaaatattcagttcaagcgaaggaatggcaggagcaaaggcatggatgccaaagaatacaaagtaatttcacgggtggaccgaaaatagtttgatacacctgaaggatt

SEQ ID NO: 653820 - DNA, 634 bp, Homo sapiens
cctgctctttaatagtaggactggagtttggtgccttctagctttcccgagattatttgtgaaactacaaataaagtcctgctaatgtaatttgccaaagccacatagagacactcaactacttagattttctctgcctgaggaagaagcagatgaatcttggcaccctgggactttcattttaactctctggaaaaaatctgtgtcatctgctgatgttcccactgagctgttttcagattctaggttctagagcaaactgggtaccagctggacacccagacacacagtggggytggcctaccgggcctgaggaagagcaccgcacagttcacaaacaggaaatgtccttttgcagaggactttggttttttttcaagatagagttctgaggaagaaaaaaatgtgtttagttgaccatgaagtagctttaaatatcagatactacctactcaattcaggtaactaattaacaaattggctctttgttatatctttaggccaaatggtcatgcttttaagtttagcaattcaaggtctagcaattccttcattttgtttatgcaaaattcaaaatgctgtatctgtgaattaattattaatattaatatcttctaaactacattgtgatcat

SEQ ID NO: 653821 - DNA, 547 bp, Homo sapiens
aacattttctctagcagcagctctaatgtgtaataaaacctagtattataggttaaattggatatatctataacataataaggtaagcagctatagataagtcaaagcatggcaagtatatgatcagataataatcctgtttccttcagacctaacatgtggtaatacagtaattttgtgttctttagcttgtctgctgcttttgaaaattcttttcaacagttaacaaatattgatgaatccaaytggaaaaaataatgtttacctattcattagttccaagtctgtgatagttaaatacgtgggaccattgtagtttctagaataattacatttaaaatccccagcaccttgcaaaaatatttattcaattcatattttgctttttacgttatcaacacatattagtttagagagtttagcacaaatcactaactagaccagtattagtaatccattggtaattccaagtctcacactggatcatcttgaaaatagttcatgggttactatttttttcattagttatatatgtcatgccgaatca

SEQ ID NO: 653822 - DNA, 495 bp, Homo sapiens
gtatgacattcaatcacttactgtagcacagcatgaaactcaggcaggtgtgacctcagcaacctcagttctgacataggaataagcggtatcctctggttcaaaacctgggcttactgtgcctgcagtactgactgcgagatggcagcagaggatcgaataaaaaaccctgggccatctcttgcaggacctcaatttttcccagtgcatttgaggcgaaaatgatgaaatggagatctggaagggacacttattgatgccattgactccaatgtcttatttatagattaagcaaccaaggcctataggattgaaatggctttcccaaagcacacagttgtgttggcaattaagttattctgactcgtgtggtagatttttaagttaagtagcatcagtgaactctgataacatttcagaatttgtttttattatattcctgtggacacattttttaaacataaaacattagcaarcagtaacctcctcatatgt

SEQ ID NO: 653823 - DNA, 599 bp, Homo sapiens
ggattccaccccgatgaagcccagcaagttaagatccactggcttgaaattctcgctgccagcacagcaatctgaagtcaacctgggacactcaagcttggtggggagagtggtgtacacattactgaggacygagtaggtggtttttccctcacggtgtaaacaaaactgtcagaaagtcaaaactgccaaagctcggcaaagccactgtagccagactgcctcctctctgggcagggcatctctgaaagaaaggcagcagccccagtcagaggcttatagataaaactcccatctccctgggacagagtacctgggggaaggggcaatggtgggcgcagcttcagcagacttaaacattcctgcctgctggctctgaagagagcagcagatctcccaggacagtgctcaagctctgctaagggacagactgcctcctcaagtgggtccctgacccctgtgcttcctgactgggagacacttcccagcaggggtagacagacaccccatataggagagctctggctggcatctggcgggtgcccctctgggataaagcctccagaggaaggaacaggcagcaatctttgctgttctgc

SEQ ID NO: 653824 - DNA, 599 bp, Homo sapiens
ggattccaccccgatgaagcccagcaagttaagatccactggcttgaaattctcgctgccagcacagcaatctgaagtcaacctgggacactcaagcttggtggggagagtggtgtacacattactgaggactgagtaggtggtttttccctcacggtgtaaacaaaactgtcagaaagtcaaaactgccaaagctcggcaaagccactgtagccagactgcctcctctctgggcagggcatctctgaaagaaaggcagcagccccagtcagaggcttatagataaaactcccatctccctgggacagagtacctgggggaaggggcaayggtgggcgcagcttcagcagacttaaacattcctgcctgctggctctgaagagagcagcagatctcccaggacagtgctcaagctctgctaagggacagactgcctcctcaagtgggtccctgacccctgtgcttcctgactgggagacacttcccagcaggggtagacagacaccccatataggagagctctggctggcatctggcgggtgcccctctgggataaagcctccagaggaaggaacaggcagcaatctttgctgttctgc

SEQ ID NO: 653825 - DNA, 599 bp, Homo sapiens
ggattccaccccgatgaagcccagcaagttaagatccactggcttgaaattctcgctgccagcacagcaatctgaagtcaacctgggacactcaagcttggtggggagagtggtgtacacattactgaggactgagtaggtggtttttccctcacggtgtaaacaaaactgtcagaaagtcaaaactgccaaagctcggcaaagccactgtagccagactgcctcctctctgggcagggcatctctgaaagaaaggcagcagccccagtcagaggcttatagataaaactcccatctccctgggacagagtacctgggggaaggggcaatggtgggcgcagcttcagcagacttaaacattcctgcctgctggctctgaagagagcagcagatctcccaggacagtgctcaagctctgctaagggacagactgcctcctcaagtgggtccctgacccctgtgcttcctgactgggagacacttcccagcaggggtagacagacaycccatataggagagctctggctggcatctggcgggtgcccctctgggataaagcctccagaggaaggaacaggcagcaatctttgctgttctgc

SEQ ID NO: 653826 - DNA, 583 bp, Homo sapiens
aagcccaaacacagtagaaacaagttcaggctcagttatcaattagaaatgtaaagcaagaaggcttagcaaggactgtgaatttttttatttactaaggcactaagtggataaattagtgtgccctgtgataatgctaacaataatagtaacatatattgggtttttactttgtgccagactctktgctaagatctgtacatgtattttgtatgtaactctcaaaacaaccattttaggaataaggactacgaatattgccattttactgagtaaactgaggcataaaaagtccaagtgacatgtctgagatctgaaagctgtaagtggtagagcaaggatagtcttctagccttcacatattctgagagcagcaaaattaaaggtgattttaattgccaaaaatagaatgtctttgacatggtttaactgttaacaccaagctttctttatccattgaaaggaagccttgtgttttaacatcagttaaaaaaaatctatcataagttttaatgttgcgatttttagatcattctaatagctgtatgtatttttctctccaatagaattgaagcaatttatc

SEQ ID NO: 653827 - DNA, 583 bp, Homo sapiens
aagcccaaacacagtagaaacaagttcaggctcagttatcaattagaaatgtaaagcaagaaggcttagcaaggactgtgaatttttttatttactaaggcactaagtggataaattagtgtgccctgtgataatgctaacaataatagtaacatatattgggtttttactttgtgccagactctttgctaagatctgtacatgtattttgtatgtaactctcaaaacaaccattttaggaataaggactacgaatattgccattttactgagwaaactgaggcataaaaagtccaagtgacatgtctgagatctgaaagctgtaagtggtagagcaaggatagtcttctagccttcacatattctgagagcagcaaaattaaaggtgattttaattgccaaaaatagaatgtctttgacatggtttaactgttaacaccaagctttctttatccattgaaaggaagccttgtgttttaacatcagttaaaaaaaatctatcataagttttaatgttgcgatttttagatcattctaatagctgtatgtatttttctctccaatagaattgaagcaatttatc

SEQ ID NO: 653828 - DNA, 543 bp, Homo sapiens
atattgaatttaaaacttaatttggtgtgaactgactactttgctgtattggacttcttgttctaggaacatgataatctgtctactccatttactcaggtcctctcttacagttttctttatataggtctccaacatttcttgtttagttctggacatttatattttatattgctataatgaatgggattatattagtcaagtatgcctttagcaaaagatacagaaacccagacaaacagtaaacagatagaagttcatttaactcacataacaactcaagagatgggcaatacctggcagttgtgaccattcaatgatgtcagcaaagaccttggttccatcatcctcctgcttgccgctttatgagctcttttgatgtgatgattcaattctttcttctcttctkgaaagtttgcttctcttagtttcttggttatttcttctcttccattctctattaggccctctggaataccctgattagttaaatatcgggtgttccaaattgatccttcatgccttttaattttttctcttcta

SEQ ID NO: 653829 - DNA, 617 bp, Homo sapiens
tcacgccaattgctgacaaacttagaccaagtaagaaatcatattaatcaagaaccaggtctagtgatactattacaaattatttatcttttaacatcatagattagattttttttcttattgactgtttcttaatgctatttaaaataactgctttcttattttgtagtatattggctcaaataattgttctaaacattttacatatccacacttcagtttratgtagaatgtaacctgtattattttttaatgtatattttattttgcttcagagtctgaatctacatggaaacagcttgagtaaattgagagatctctccaagttaacaggacttcgaaaactaaacattagctttaatgaatttacctgtttagatgatgtataccacttggtaagaattgttcctttgaatctaaaaaagtgaaactcatagaagcagaagtagaatggtggttatcagggcctaagggctaggggaaatggggagatattggtcaaagggtataaactttcagttataaattagacaagttctaggtatctgatgcacagcaagtgtggtgatggatgtgttaatttgattgtggtaatcattacacaattatatcaaatc

SEQ ID NO: 653830 - DNA, 617 bp, Homo sapiens
tcacgccaattgctgacaaacttagaccaagtaagaaatcatattaatcaagaaccaggtctagtgatactattacaaattatttatcttttaacatcatagattagattttttttcttattgactgtttcttaatgctatttaaaataactgctttcttattttgtagtatattggctcaaataattgttctaaacattttacatatccacacttcagtttgatgtagaatgtaacctgtattattttttaatgtatattttattttrcttcagagtctgaatctacatggaaacagcttgagtaaattgagagatctctccaagttaacaggacttcgaaaactaaacattagctttaatgaatttacctgtttagatgatgtataccacttggtaagaattgttcctttgaatctaaaaaagtgaaactcatagaagcagaagtagaatggtggttatcagggcctaagggctaggggaaatggggagatattggtcaaagggtataaactttcagttataaattagacaagttctaggtatctgatgcacagcaagtgtggtgatggatgtgttaatttgattgtggtaatcattacacaattatatcaaatc

SEQ ID NO: 653831 - DNA, 557 bp, Homo sapiens
tgttcaactttaatacaaaaattattttcattatcatagcctcacagtctacttgttaaatgactataaccttagtcattttacagataagggaactgggtaagttttatgccaaagtggtattttcaaattttaggatgagtaaaggtggctagctatagacctttcaaatgtcaagtctctaaaaatgactctaaggatattagaggtggccagagagaggagaaactctacatggatgtctatgtgtattttttcatctttttattataaaataaaacacagatacagagaattacatgctatatatatggcttagtacattgttgtaaggtgaaaatgcttgtaatcagcacccagatcaagaaagaaaattttgccacctagggcaaaagcctcttctatgtgccccatgccttcctctctccacaagaaatcattatcctaacctctgcagtaatcgtcttcctggattttttcctgatagttctgtcamccaaatgtacatccctagcacaatagtttggttttgccatttttaaaaaatgtaactgcgt

SEQ ID NO: 653832 - DNA, 648 bp, Homo sapiens
tttactatttgattatatgtgtttcctgtaagctgccacaaattatttgtggaatraggcagaatataaatgtatgaattaataattggacatgaagactagactgaagaatttagattttaaatgcaaggtaatgggaatgcattggatttgaagggcaaaggaaaggaagaataaaggatttctacaaggcttgagtctatgccaataaaagacaccataacagaatatgaatataggaagaaaagcaatttgggggtgtaagatgattagtattagacattagttttatatgacagaagatcatctgactggagatgtcaagcaggcagctgaaatcacaggattaaatatgcatatgaaaatttactttacatatgtttggacttggaagtaatttgaagagagttaacagttaagaccaaaagcatatgcaatattgtctaaggaaagagagtagagaaagtaaagaaatcaaagtgaggctctaatactttcatttattaaacatatgtagaaaaagaagtcatgaaaagtgggtgcagaggtaggtagtacagtaatatataatgctagagtgtctgagatataaataaactttggaaatggcatagttcaaatcctttattttatgtatgaacacaagga

SEQ ID NO: 653833 - DNA, 593 bp, Homo sapiens
agattgtcaaacaatagccattgggccaaatgtgacctgccacctattttagtaaataaaactttattggaacacatccatgcctgtttgtttatatataatctgtgactgctttcacactgcagtggcaaaattaaatagcaacagagaagctattgttcccaaaggctaaaatactgactgactctttacaggaaaactgtagaaaacatttgtcagcccctgatttaggaggacattaatcatatgttgcttgtataattatgaaaaacacaaaagcaatggtatttctaaggcttaatatgtttttattttttatttattttttgtacaattttatttatttatttatttttttaattttattattattatactttaagttttagggtacatgtgcacaatgtgcaggttygttacatatgtatacatgtgccatgttggtatgctgcacccattaactcgtcatttagcattaggtatatctcctaatgctatccctcccccctcccccaaggcttaatatgtttttaaaacttattttgagattttattattgaggattcaacaagagaagcagaactagtaagata

SEQ ID NO: 653834 - DNA, 508 bp, Homo sapiens
tcgaccaatttagaaatgtgtgtaatgtgaatctacagaacaatcatcttacctcattcagtggattaatctatctacctaatgtgaaggtaagtcattcacaaatttttctttctttcaaggtttccaatrcaaattattctttgctttggattaaatggtatttccatgttattaaagtagataaattattcctaaattttctttgggtttttttttgttttttactaagcaagaaaaaactattaccttccaaagtgattttggtttgacctcagttttatgtgattgtcacatatttagtaaattttcctctgtagtcagagatgggattgaaggcagatatggaaagaagcttcaaggttctttaaacggccttattgcctccgttattatttacttgactcaggcatctactaaggccttttaaacataggtaaatagctgtcttttcgactaaaaattatttcatccttgtcaggtttggagaaatcaggagaacagattg

SEQ ID NO: 653835 - DNA, 508 bp, Homo sapiens
tcgaccaatttagaaatgtgtgtaatgtgaatctacagaacaatcatcttacctcattcagtggattaatctatctacctaatgtgaaggtaagtcattcacaaatttttctttctttcaaggtttccaatgcaaattattctttgctttggattaaatggtatttccatgttattaaagtagataaattattcctaaattttctttgggtttttttttgttttttactaagcaagaaaaaactattaccttccaaagtgattttggtktgacctcagttttatgtgattgtcacatatttagtaaattttcctctgtagtcagagatgggattgaaggcagatatggaaagaagcttcaaggttctttaaacggccttattgcctccgttattatttacttgactcaggcatctactaaggccttttaaacataggtaaatagctgtcttttcgactaaaaattatttcatccttgtcaggtttggagaaatcaggagaacagattg

SEQ ID NO: 653836 - DNA, 634 bp, Homo sapiens
atataaaatataaacagactgtattaagcttaattctgatatattaataaatttatattttcttaacttcagtttatagtaaacacatactgaactgtctttttataatatagctggtttgaagttaagtttatggcctcaaacttacctatgtgtttcagagatataatgagcagtgaaaatttgcctccaataatgcacagtttagaagttcttcatttgggctacaatggaatttgtaatttgatccagctacaacttaacagactaagaaatttaaaattcctctttctacagggtgagtagaaacactgttactgtataagtctttatttttaaaaactgattttatcatcattctgttttgataagcaaatataagcatcagtatttactcaaacattcatagacaaaaatattttaataatcacaaattgatttttcttggttacttacattttttagaaaccatttttaaaggtcaatgcagtattctgagaatatatatagtattacrtcataatttacttgtatatcgtattcaacttaaaaaacaataaaaaaaacagtggataattcacaagtatttattaaacccagaattgtggtaagtactatgaaagatatggaagta

SEQ ID NO: 653837 - DNA, 620 bp, Homo sapiens
ataggggtcaagtttcatttcttctgcatatggatatccagttttccacccaccatttattgaagagactgtcttttccccaatgtgtgttcttagcacctttgttaaaaatgagttgactgtaaatgtgtggatttatttctgagttctctattctgttcccttggtctatgtgtctgtctttatgccagttcttaagaggacactagccatattaaattaatgctcatcccaatgacctcatttaaccttaattatctttttaaagacmctttctccaaatacagtcacattttgaggtactggaggttaggattttcacatatgaattggagggggacacaattcagcacataataatcaaggagaatgaatattgactgaaatgtagtatggcatactagaaagataattgagcttaaaatgtaaaaggtctaagttaggcctgatactgccatttttatgtctttgagaaagccacttaatttctctgaccctcaattttctgattagaaaaaagagataaaatatttcccctgtagtattttgagactctaatagaaaatactgtacatataaaagcattttgtaaattggagagtcttcatataagttatcat

SEQ ID NO: 653838 - DNA, 610 bp, Homo sapiens
ggtggaattttccagagctatgtgatgttttgacatcatcactgtggcagctaatgaaatgtctgcttgtatattcttgtgttttaaaaaattattagttttaatttcaaataaggtgaatatggatagacttaacctacataaaacagaagctttttggcatcctcaataattgagtgtaaaggggttctcttgaccaaaaaagtttgagaactatgtgtgtaaaatagtcagttgtatggctgcactacagacagcaagcatggaattgaaaataccacctgcaaggtggcggttccccctggtagagaggaggggctctgggtctgggaggaggatgcaggcgtcacttgaactaaacagctttatgacttgctgtcagatttcctagactgtgtggtgggatcgtgggaacctacttctcacaggcctgaartacttcacaataaacattttaagtctacttcatagcatgaaacctgtttcacacctgtgcccattaagaaaaaaaaatggcaccctataaatgatttaataattactaaggggaaaatatagctttccattggagatctggcagtcacctcttaaccaacctacagtctacatt

SEQ ID NO: 653839 - DNA, 451 bp, Homo sapiens
cctccttgcgaatgaagtgccggcggctcccacaaaggcctggctgccacagtccccacggtaattgcgagacagcaggcaggagaagtgagcgggaagtttcttccccaaagctgatggtgaacgggcccccaagctgggacccgatgactagctgggagtgaggagagattttggctttcctaggtgtgagctggatggggcttcccttcccagtggcctcagggctcctgggaaggggcacgggctccagggggacccttaggcctctctaggatggctggctggttgtcccaggcatgtacttggcttagttttcttmttcaattaagtggagacattaagttcccataaagtgggaacactcagacttggctgcagaacagcaggcctgctcccgcccagccctgtgacacagccaggtgggagcaggtccctggagaaactccag

SEQ ID NO: 653840 - DNA, 580 bp, Homo sapiens
actcttatattttgctatggtctaaaagtttgtgtgctcccaaaattcatatgttgaaatactaccccccgccaagattatattattaagaggtggggcctttggaatatgattaggtcatgagggttgaactctcatatatgggattagtgtccttataaaagaggttagaggccgggcatggtggctcatgcctgtaatcctagcactttgggaggccaaggcaggtggatcaactgaggtcaggagttcgagaccagcctggccaacatggcaaaaccctgtctctattaaaaatacaaaacttagcctggcatggtggcacacgcctgtaatcccagctacttgggagactgaggaaggaraataacttgaacccgggaggtggaggttgcagtgagccgagattgcaccactgaactccaacctgtgtgacaggagcgaaactctttctcaagtaaacaaacaaacaaacaaataaataaaaggggtttgagggggcttgtttgcccctccttgcatgtgaggatgcagcaagaaggctctttgaggaaaaggccttcataagataggtaatttg

SEQ ID NO: 653841 - DNA, 484 bp, Homo sapiens
actcttatattttgctatggtctaaaagtttgtgtgctcccaaaattcatatgttgaaatactaccccccgccaagattatattattaagaggtggggcctttggaatatgattaggtcatgagggttgaactctcatatatgggattagtgtccttataaaagaggttagaggccgggcatggtggctcatgcctgtaatcctagcactttgggaggccaaggcaggtggatcaactgaggtcaggagttcgagaccagcctggccaacatggcaaaaccctgtctctattaaaaatacaaaacttagcctggcatggtggcacacgcctgtaatcccagctacttgggagactgaggaaggaaaatmacttgaacccgggaggtggaggttgcagtgagccgagattgcaccactgaactccaacctgtgtgacaggagcgaaactctttctcaagtaaacaaacaaacaaacaaataaata

SEQ ID NO: 653842 - DNA, 484 bp, Homo sapiens
actcttatattttgctatggtctaaaagtttgtgtgctcccaaaattcatatgttgaaatactaccccccgccaagattatattattaagaggtggggcctttggaatatgattaggtcatgagggttgaactctcatatatgggattagtgtccttataaaagaggttagaggccgggcatggtggctcatgcctgtaatcctagcactttgggaggccaaggcaggtggatcaactgaggtcaggagttcgagaccagcctggccaacatggcaaaaccctgtctctattaaaaatacaaaacttagcctggcatggtggcacacgcctgtaatcccagctacttgggagactgaggaaggaaaataacttgaacccgggaggtggaggttgcagtgagccgagattgcaccactgaactccaacctgtgtgacaggagcgaaactctwtctcaagtaaacaaacaaacaaacaaataaata

SEQ ID NO: 653843 - DNA, 581 bp, Homo sapiens
aactcttatattttgctatggtctaaaagtttgtgtgctcccaaaattcatatgttgaaatactaccccccgccaagattatattattaagaggtggggcctttggaatatgattaggtcatgagggttgaactctcatatatgggattagtgtccttataaaagaggttagaggccgggcatggtggctcatgcctgtaatcctagcactttgggaggccaaggcaggtggatcaactgaggtcaggagttcgagaccagcctggccaacatggcaaaaccctgtctctattaaaaatacaaaacttagcctggcatggtggcacacgcctgtaatcccagctacttgggagactgaggaaggaaaataacttgaacccgggaggtggaggttgcagtgagccgagattgcaccactgaactccaacctgtgtgacaggagcgaaactctttctcaagtaaacaaacaaacaaacaaataaataaaaggggtttgagggrgcttgtttgcccctccttgcatgtgaggatgcagcaagaaggctctttgaggaaaaggccttcataagataggtaatttg

SEQ ID NO: 653844 - DNA, 621 bp, Homo sapiens
aggacatagaactaggaataaacacaactaaccaaaaaccaggaagtattcacagatgctctaagcctgcaaatatagctaatcacattcattcagcatttacactgcgaaattactatagaaatgtagtaatttacagaaaataaagcagtaaaacttaaaggttcacaatataatgtcatgactgtcaaattctctgcttcaacagaagaccgtattttctcactaatcgaagggcagattcctatgaaagctgaaaaaaaattttatatctgagcaagatttgagtaatttagcttctattacyctgattttatacattttttgaatgaatcacttcaaatcatgctacttatgctttacatagacagtctgaaaccattaccaacttgaaaacctagtttctttttttttttttttaaccttttaaatgtacagagctttatgtatgaaactcaggtaaattcagaatatcagcaaataaaatcacaaagcatgttggtcttactgttagtcttgcagttccctaataaaaccctaaaattcacataccactgactgcatgacaacatctcatgctgactctccaataatttccaccagtcaaatacaccacacaac

SEQ ID NO: 653845 - DNA, 395 bp, Homo sapiens
tcagaaatttttaatgagaaaattggatagaacagcatcactagacaggttcctgaggcttaccctgaggacccctctccagatggacattagtccatccatcagstcaaaactgccagtggacatttgttcaaccagctatgaatctacttaacctcaacaagacaacaagagtatcataaaaatcttagccaaactcctcccagaaataaaaatctatcccttgacatttccataaccaataagatgaactgtgaaagactttaaggatgttagaaataggaatgttttgttttcaatgagctcatattgactcctaataatcacatttttctcacatgtaatcattcagtaatccactctaaaaatttgctgaagatcaatgtcctgtgcat

SEQ ID NO: 653846 - DNA, 395 bp, Homo sapiens
tcagaaatttttaatgagaaaattggatagaacagcatcactagacaggttcctgaggcttaccctgaggacccctctccagatggacattagtccatccatcagctcaaaactgccagtggacatttgttcaaccagctatgaatctacttaacctcaacaagacaacaagagtatcataaaaatcttagccaaactcctcccagaaataaaaatctatcccttgacatttccataaccaataagatgaactgtgaaagactttaaggatgttagaaataggaatgttttgttttcaatgagctcatattgactcctaataatcacatttttctcacaygtaatcattcagtaatccactctaaaaatttgctgaagatcaatgtcctgtgcat

SEQ ID NO: 653847 - DNA, 560 bp, Homo sapiens
ctaaatattctcctttctctttgccctcacttctgctcttttaaatgttggaaaaaaaaatgaacaaggcaacaaagaaaattttaaaatgctcatggaaaaactcatcttctagaagggaatcttagtgggagggacaattcctctyagagagttatcagtgaagctgtgaaaatatgaggccctggaagccagaggtgtcacccaacaaggctgcagcaaggacaattagcaatggctgctgtgccctctgtcactgcctcaacttagaaaggatgtctttgtcagcctcaggatacttagcatggtgcctacctcacagagagttctataaataattgctgagtgaaatcagatgaaatggaaacagtttcaacatgtcccaaaagtattagatacttgagtgctagagtggaattgttctctattggaagaaaagaaaaaaatataccattttgagttacaagtcttcaagtcttgcaatgtgaaggatgacaaaatcttcctgatctccaaactgggtcacctatcatgaaagaggaaagcacttctgcaaagtg

SEQ ID NO: 653848 - DNA, 590 bp, Homo sapiens
aatgttggaaaaaaaaatgaacaaggcaacaaagaaaattttaaaatgctcatggaaaaactcatcttctagaagggaatcttagtgggagggacaattcctcttagagagttatcagtgaagctgtgaaaatatgaggccctggaagccagaggtgtcacccaacaaggctgcagcaaggacaattagcaatggctgctgtgccctctgtcactgcctcaacttagaaaggatgtctttgtcagcctcaggatacttagcatggtgcctacctcacagagagttctataaataattgctgagtgaaatcagatgaaatggaaacagtttcaacatgtcccaaaagtattagatacttgagtgctagagtggaattgttctctattggaagaaaagaaaaaaatataccattttgagttrcaagtcttcaagtcttgcaatgtgaaggatgacaaaatcttcctgatctccaaactgggtcacctatcatgaaagaggaaagcacttctgcaaagtgctacaccctagaaaacatcttaaaccactcaacaaaacaagatttcacctcaagggaagactatcgaagatct

SEQ ID NO: 653849 - DNA, 574 bp, Homo sapiens
tgaattcttattgtacccaaatcagacttcagtgaggattcccgttaagattttttttttcactcctaaggtcaaatatatcttatatagtaggtaggccattggactaattcacagcaacaataacaatacaaacagatctttctayaacattttagatgacagcatagagcccaccagcatatcagtggttgtttttgtttgtttttttaacagataacactggttgatagaatcactgaataaaaaagtaatacactggaagcaggtcatcacgaaaagacatcagtttaacaaaattgaaactgataccataatcttggaggtttccaaacagagggaatataaagtcaacagaaaattaaatgagaggaagcctctgttcattacaaatcaacatataattagattgggatgcacccataatgatgaaataccagcagaaatgaaaggtcagttgtttccagtagggcaacactgccagaaccatgtttaaaggaaacagatcaacacggtaacccagaatctcaaagatatcccaggataaaggggattcattatagcctatttgagt

SEQ ID NO: 653850 - DNA, 534 bp, Homo sapiens
ggccccattttcactgttccacccaaatcagtaacctctagatggccattatctctgtctggcaaagcttgcatgccactatgtagtcctatttttcttctgagatgaactatagaggtttccaggtttttaaacataatgttaactagtacaaagttcccaacaagttactaatgggacaaaagaataaatttcattttaaagtgattttaaaatctccatacagaagracatctgaaagtacttaagaaatatacttaagtccctgttggttgaaagaaaaaaacaaccctccgttttactccataaagattattgaaaataccatgcgattaatgctatttatatggcactgagttcaactccaaaggtaacacttaaccacactctatttaccaagttaatctaccagatttgtttactttgtctgatttactaagacaaatacgtgagtgtctaaaatgttttatctggccctgggaaaggaaaactaaaggagtgttgtgcttttattaatagataagtgcaaacagg

SEQ ID NO: 653851 - DNA, 534 bp, Homo sapiens
ggccccattttcactgttccacccaaatcagtaacctctagatggccattatctctgtctggcaaagcttgcatgccactatgtagtcctatttttcttctgagatgaactatagaggtttccaggtttttaaacataatgttaactagtacaaagttcccaacaagttactaatgggacaaaagaataaatttcattttaaagtgattttaaaatctccatacagaagaacatctgaaagtacttaagaaatatacttaagtccctgttggttgaaagaaaaaaacaaccctccgttttactccataaagattattgaaaataccatgcgattaatgctatttatatggcaytgagttcaactccaaaggtaacacttaaccacactctatttaccaagttaatctaccagatttgtttactttgtctgatttactaagacaaatacgtgagtgtctaaaatgttttatctggccctgggaaaggaaaactaaaggagtgttgtgcttttattaatagataagtgcaaacagg

SEQ ID NO: 653852 - DNA, 578 bp, Homo sapiens
aaacccacattgaaaatgtgcaaattaaaaatgccatattaaaattaccccaaaatgttaatggttgtggtggagtagtggatcatgagtgatttttttctttttttcccccattttcaacattttttaaagttctatagtaaaatagactttaataaatcattgaattttagagcctttggcctagaagggctaatacaacactccacattcatgttaaaatatatcttacggcttatttaccttgcttaaatgtccctccctgctttcttctattcctctctccttctccctctctctgtcctttcttccttctttccttccttcttctcctccccatctaaaacatccagtacaacattaaacagacgtaatgagatctgacattcttatcttgtttctgatcacaggaggaacactcagtctttcaccattaaggatgatgttagctgggggctttttgtagatgctgtttatyacgttgaggaagttcccttctattcctatatactgagaatttttatgaggaattcatgttggattcataaatgctttctctgcatttcttgagatgatca

SEQ ID NO: 653853 - DNA, 557 bp, Homo sapiens
  misc_feature 221: n = A,T,C or G
taagagaagtagtaatgtacaggattacataggagaaacccagccaggcatgcatcatttgtgtttttttgttattattattaagtcaagcacatatgttccatctccatctaatagtgactatttttttaaaaagattttttaaaagacaatgccccaaatgttttacccactgtatgaagctccttgcactggggctcagtataaaacgacactccctncacattctttcttcagtgtatcttacacaatgagttcattaagcctttagtattgcagaagaaaaaatacctactaatgaacatcttagagtacagggaaatcaaaccagtgcatttctttaaactaagtagaattcatttgagccacttcagtccttatataccctaatcttggtttctttgtttcttgtatttaattttcttagatttttcccgttggcataccattaaaaattcctcccctcatttgtgacaaatgtaaacagtctactaaattagcctgtttttagtagctggcagttcagcyttaattacatgatattacaaagtccctaa

SEQ ID NO: 653854 - DNA, 565 bp, Homo sapiens
tgttcctacttaatcctctagatttttttcactttttcctatctgttctgccacttccttagttcaagtcaccgccatctcccatttcytaatggattgctctgcccctctgttttaccccccctcccaccaattcatccattatacacactggaagctacatgacctttctttaggtaaaacttggccatattactcccaaaccttcaaagacctttgagggtaaaatccgtataccttggaatggcatgcaaggcccttcaagatacaagggttctgccagtttctcccgccccgtccttccccattcttccctcatgctgcaatcatgttgaactgccttccacagggccacaactctctctggcctctggacctttataaatgctcttttttagattcagactacctctccacaccacttgcctattttttaaggtttgtaacagaccacaccttctttgagtagattcttgcaggtattgaaatctgggctgagacctattgtgtgctttaccgaatctcccacaatgctgttttgtttgtttgtttgttttgagatgga

SEQ ID NO: 653855 - DNA, 565 bp, Homo sapiens
tgttcctacttaatcctctagatttttttcactttttcctatctgttctgccacttccttagttcaagtcaccgccatctcccatttcctaatggattgctctgcccctctgttttaccccccctcccaccaattcatccattatacacactggaagctacatgacctttctttaggtaaaacttggccatattactcccaaaccttcaaagacctttgagggtaaaatccgtataccttggaatggcatgcaaggccyttcaagatacaagggttctgccagtttctcccgccccgtccttccccattcttccctcatgctgcaatcatgttgaactgccttccacagggccacaactctctctggcctctggacctttataaatgctcttttttagattcagactacctctccacaccacttgcctattttttaaggtttgtaacagaccacaccttctttgagtagattcttgcaggtattgaaatctgggctgagacctattgtgtgctttaccgaatctcccacaatgctgttttgtttgtttgtttgttttgagatgga

SEQ ID NO: 653856 - DNA, 565 bp, Homo sapiens
tgttcctacttaatcctctagatttttttcactttttcctatctgttctgccacttccttagttcaagtcaccgccatctcccatttcctaatggattgctctgcccctctgttttaccccccctcccaccaattcatccattatacacactggaagctacatgacctttctttaggtaaaacttggccatattactcccaaaccttcaaagacctttgagggtaaaatccgtataccttggaatggcatgcaaggcccttcaagatacaagggttctgccagtttctcccgccccgtccttccccattcttccctcatgctgcaatcatgttgaactgccttccacagggccacaactctctctggcctctggacctttataaatgctcttttttagattcagactacctctccacaccacttgcytattttttaaggtttgtaacagaccacaccttctttgagtagattcttgcaggtattgaaatctgggctgagacctattgtgtgctttaccgaatctcccacaatgctgttttgtttgtttgtttgttttgagatgga

SEQ ID NO: 653857 - DNA, 565 bp, Homo sapiens
tgttcctacttaatcctctagatttttttcactttttcctatctgttctgccacttccttagttcaagtcaccgccatctcccatttcctaatggattgctctgcccctctgttttaccccccctcccaccaattcatccattatacacactggaagctacatgacctttctttaggtaaaacttggccatattactcccaaaccttcaaagacctttgagggtaaaatccgtataccttggaatggcatgcaaggcccttcaagatacaagggttctgccagtttctcccgccccgtccttccccattcttccctcatgctgcaatcatgttgaactgccttccacagggccacaactctctctggcctctggacctttataaatgctcttttttagattcagactacctctccacaccacttgcctattttttaaggtttgtaacagaccacaccttctttgagtagattcttgcaggtattgaaatctgggctgagacctattgtgtgctttaccraatctcccacaatgctgttttgtttgtttgtttgttttgagatgga

SEQ ID NO: 653858 - DNA, 570 bp, Homo sapiens
ttgagttttgtctaacttattctttttacctcatattttcctaggtatgtatggaaactggcctttatttattaacartagtttaggagaatccaaaaatagtgtttaggaaacccgagacagaattcaggaaaaatactgtaatcagacatttataatttgtaagcaatttacaagttacgtcataagacaaaattactgaaaatattaacccattctaagcaaaattacaaataagacatggaaagtatttttttcacattgtttattttctgaaagtaaatagtataaaaccagctgagtgggttattcaacacaacttaatgcagacaataactggagaaaagtacagagaatgttgatatagaaaaagaatatagcttgtactgtagaaagtatgactttacatattaggcttgacttctgaacacaaagaaataggttagagaaaaatatttatttgtaataggtagtcatctagttgggaataattttctcacaggtattttcattattagtagttatattggctcctaaaatccttttacctttttgttaaattttcttcta

SEQ ID NO: 653859 - DNA, 381 bp, Homo sapiens
gttgatgttacagtaacccrtggtattcataccttagtactgagtctatgccagaataatagcacaaggtgctcatagcacaaaagctgatcattatcctattgaacaattatttccagaaatttcttcctgttttgttttatgaaatctggagggtgtaactgatgggttagttttactttctgaagcaatacataaagttgataattctcctattgaatgattcttttcagaaatttcctcccattttctgaaatctggagcttgtaactgatgggttacagttttgctttctgaagccatacataatagtttcttttggtgccacatgccagcccttcagatcttccagtacagtgaccatgcctccattaggcttac

SEQ ID NO: 653860 - DNA, 614 bp, Homo sapiens
gtggtttctctggaggttttaagatcagtagccataagctcccctctccccaggtgcccagaaaccaaagggccttcagcccacaggagatgtgttattgggttcccctagttcccagcccagtctgatgctcctggctctgtccagaggccacaagcccacaggacaccccagcccgcctccagcttattggaagttctcctgtgccccaacctgctcagtctggtccccacttttaaggcagagtgtctagagttgtatgagatcaaatcggacaatcttagagccaaaacagaccaaccttgctccttgtataaactcagaaactgagacccacagatgtcaagttcatgggactagttttggcagtgctgcttcaggactggagagatggcctcaaccagctgggacacagaacagcctggaggccctgccgccagttctgccctcccttcttgcttgaacccatctcacagaccctctgcctttctgctttcttcttggccttaactcacctgggcctcagtaagaggtgaagacccctaagaggaagggctctgaccatcttcaaccttgatttgatgyctggttatgtccatagggccctgagtctt

SEQ ID NO: 653861 - DNA, 592 bp, Homo sapiens
gaattctgtatccagataaattatctctcaaaagtcagggagaggccaggcacagtggcttatacttgtaatcccagcactttgggaggccaaggtgggcagatcatttgagaccaggagttcaagatcagcctggccaacatggcaaaaccccatctctactaaaaatacaaaaaattagccaaatgtggtgacacacacctgtaatcccacctactagggaggctgaggcatgagacacatctgtaatcccacctactagggaggctgaggcatgagaattgcttgaacccaagaggcagacgttgcagtgagctgaggtcctgccactgcactctgtctcgaaaaaaggaaaaaaagaggcagggagaaataaagactttctcagacaaacaaaaattgagaamatttgtcaccatagacctgccttgcaaaaaatgctaaacaaagttcttcagagagaaggaaaatgataagtcataaactcaaatctgtatttaaaaaggaaaaagcattagagaaggaataaagtagaataaaagctttcattttttattcttaattgatttaacagataatcctttgttcaaca

SEQ ID NO: 653862 - DNA, 607 bp, Homo sapiens
agatcttatttgattctcaccctccccatgacgcaggtaatttcattattctcctcttatggatggggagatggaaggtcagagaaggctttaccccaaagatgatgcattycccactattcactccaaacagccttttgcccagaaactttacttttgccaattcccctttcagaaaatcacttccttctccaattcctgttttcctcccaggtctttaacccttcaaagccctgcatgtgtacctcatctaggaagcttacttccaggattcccgtccacactggcctcccctttccctttgcccctgcacagttttttcctggggccccacagctgtcactgcacagcttgaggcttgtggaggtggtgccatatggtgtggagggcatagtagtgggcaagggggcacatgtgaatccaggtacctcctcttactacctgtgggattctgaccaacttaacctgtctgggcctcttctaagcacctctatgaaaatgggcttaatatttgcacctacctcagagggtctctgtgcagattaaatgagctgcccactgctcagtcaatgtaaattgagtgtgcataaggcaatgagtgcaccct

SEQ ID NO: 653863 - DNA, 551 bp, Homo sapiens
ctgaaaaaattttctaaggagtgcattagaaaataagtacttatcacttcatgtgagtctattgtgtgagcagcctaatctcagctgcccagtatcttgtactgcaatcagtaactgaccatgaagagagagatggaggagtcctgactgtctgagccctaaactgtttgtcctcttggccygggcaccagatgtgtgagtgagcaagcctcaaggggattctagtccccaacccttgaaccacagcagtccattctgagttggagcagagatgagctgtctcttccaaggtcatgaacaaaatgaagtttgttgttattttaacattactcgagtaaaacccaagcatatctatgtatatatgacaatttcccagctacgtcccacgtagcagagtgattactagagctgctgaacctgactgggggcttcgcagaggctcctgatgtagtgaaaaatgaagatgggtcagaacagattcataaaaattatggtctattttaaacatcatataatgaataaattaatattttattttaaaagtataattg

SEQ ID NO: 653864 - DNA, 606 bp, Homo sapiens
ctaacaacaacaataaaggtgagtataaatattaaattacatttggcatatgtcatcttagtctcaaaatagttttgcaaacttgtaatttggaagacatgagtcatgcatgcattaacatagcttgtattgtcttaaaattattccagattggttccacattatggcagtaaacaagtcacctcaaatgtctgtagttattgctgtaattgatcaacttgtcaaagcagaaagtgaaagaactcagacttrttgagctactcttaagttacttctgcagttggtgactgagctacctgctgagtggatagggacctgacaggtggaattgtgcagacagtagctatgggacattgggtttccttctttgaaaactatcaggtccagaagtcacatataactccaacttccaagtttttcaatgatacttcttcacaagtgagatcactgtttctaaataaaataaaagaatggactggataaagaaaatgtggcacctatacaccatggaatactacgcagccataaaaaaggatcagttcatgtcctttgtggggacatggatgatgctagaaaccatcattctcagcaaactaacacaaaaac

SEQ ID NO: 653865 - DNA, 551 bp, Homo sapiens
aattcatttgatttggctactaatttcacaaattttcttttttaaaaaaaatttattcagaatgacaaagagagaaaaaataaaactttctgggaaagaaggaataagaagctggattggcagaaagatcaatgtggttttccctagagcttcctgggcagagcacagaaaaggctggtaagtggctttgtttgccagggagagattctgttgtgtcttcacaatgctatcacaactgcgaactctggagatttcttttccacatactcaaataactagtttgacaaaatttcccacccaattgtcttttgttaaagcattgtaaagatacaacttgaagcacctttgagaccattagtttttgatctattgcttttgtccaaacaattgcaaacmatttaactaaaggcctaatgtattccttttgtcccttgagactttccagtttccatttcgatgccacagtcttctacaggcttctttcttccccttccaactgccaccttcccccacaaaaaaagcctctcttgagattcagacacggctctgtg

SEQ ID NO: 653866 - DNA, 566 bp, Homo sapiens
tgagaaatcattcattactgcaaggacagcaccaagccattcatgaaggatccagccctgtgacccaaacacctcccaactagggccacctccaccattggaggttacatttcaacatgagatttgaagggcatgaagcatccaaaacatacaacattgagaacaaggcagaaaccacgatatctatcatgagctagcctcagaagccatatttcaccatttctgcaatatcctattggttacaggtcaatcctattcaatgagaggggaggagagtcatagcagtgtgaatgagggaagaatcattggagataacctgggagactggctaacacaaggtccatatttcatatcatttcacttttctgcttccaagtatttaaagaaaaataggacccctctycctctccctctccctctccccatggtctccctctccccacggtctccctctccctctctttccacggtctccctctgatgccgagcagaagctggactgtgctgccgccatcttggctcactgcaacctccctgcctgattctcctgcttcagcctgccgagt

SEQ ID NO: 653867 - DNA, 539 bp, Homo sapiens
agacattctaatgctaacattattaatttaccttagtaagacctaccatagtcataacatcagtctttataaaatgtgctataaagtatttatcattttaaaaaaatgttaattaaaaacaggagaattaaaaaaactatagattaaccaatattacacaatctaatatttttattgagacttcagtttcattaaaagataagaaatctttataattattattttaggatgaacattcattggcttaatamaattttactgtaccctattaacagtcgattttagacactaaagccaagttctacaacaagggacaaaagcgtgtgtggtcttgctggctgtttatttgggcagaatcagaagcacttttaagtctggctggattccctatttttaaactattttccacttataagcacataatagccacaaggaaataaataccctcaggttttctatgatactcggaattggctctttcaggagagaataatttggatttaaaatgcatgcctttaattgagaataattttaattct

SEQ ID NO: 653868 - DNA, 650 bp, Homo sapiens
gttttattttgaaaataactcattcagatgaggtgggattgaataagacgattgagattcatagttattaatatagtaaaatctctacttaagtgaaaatgtgtttgaattacattttacaaactaaaattgactgagtgatttgaatgtcttctgtggtatgcattatcatccccaatgcattttttattgttgttattccttttctttgacagccggaaatcactgtggaaaatcttcccagttatttcagacttcagaaaccattattgattttgttcagtgatggcactgtaaatcctcartataaaaaagcaatattgacactggtaaagcagaaatacttggattcatttactccatgctggttaaatctgtaagtatgtgtttattttttaatatgtaagaggtaaagaaagtaataattattacattttcattaggaaacgaaactctctaactctttggagttaattttatggaaccaaatatgtcaccatgatattttagtaacaaaactcccccaaacaaggtccaagatgaccttattttagattaaattttattctacagtaaaattttaaaagaaataattgttctactttttaaaaggaattgatgcccattgagaaaatttggcaaatacagaa

SEQ ID NO: 653869 - DNA, 613 bp, Homo sapiens
ctcaccattctcccaccttttgtagtctccagtgtcagttattccactctgtctgtccatgtgcacacatcatttagcctccactaataaatgagaacattaaatgtttgactttctgagttacttcacttgagataatgacctccaattccatccatgttgctgcaaagacatggttttattctttttttaatagctgagtagtattccatgggatgtgtgtgcatgcattctcatacaccacatttcctttgtctagtcatccattgatggatacgtagttgattccatgactttgctgttgtgtatagtactgccgtaaacgtatgagtgcaggtgtctttgtttctttttgttttttgagacagagtctcactctgtckcccaggctggagtgcagtggtgcatctcagctcactgcaacttctgccttcttggttcaaatgattctccttcctcagtctcctcagtagctgggactacaggtgtgtgccaccacgcccagctaatttttgtatttttagtaaagacagggtttcgccacgttggccaggctggtcccgaactcctgacctcaagtgatccacccacctcggcttcccaaagtgctggg

SEQ ID NO: 653870 - DNA, 595 bp, Homo sapiens
cactgaagccaacccctattgttgattctctccttttcttttcttttcctctccctctcccctaccttcctccctccctccctccctccctccctccctcccttccttccttcttccaccttccctccctccctcccctcacctcccctcaccttccctcttcctcacyctaacacttaggctggagtgtaatggcataaccagggctcactgcagcccctaccttttgggctcaagtgatcctcccactcataggtgtgtgccaccacgcccagctaattttttgatttttagtagagacaaggtctcattatgttgcccaggctggtctcaaactcctggactcaagcaatcctcctgccttggcctcccaaagtgctggaattacaggcataacccactgtgcctggcggtttctcattttttcaccacagctattgatctgctggtcaacagcttctgctttggttgctttatttccttaggataaactcccagaagggagagaacagggctaaaggggacgaatgtctctgcagcctttgctatgtaatgcagtgttgtttcctaaggggataacgtccatatctagatc

SEQ ID NO: 653871 - DNA, 583 bp, Homo sapiens
gatgtgagtgtacacagcaaatgagcttggccaaagggagcagctgttgtgaagctccagcagattcttgtgaagtggcaacatgggcgtacttgccagatattcttacttttgtgtgtgaaattttttggtgaagtttccccacttttaacttcacaaaatatcaattttatttaaacactgcagattaaacaaaatatgttggtgggttcttatcaacccacagtccaccagtctttgayatcaatctaaatctttatatatgtatgcatgtcatgtttcattgtgtttttctattacatttcctactgtaaccgtcaatgctcttctgggttgtgttttgttttcttacttgtttgtttttattctctaagaaaaaatacaatggctaaggccctatttgttggctaatcccacttctggaaggtgagcagacctatgtgaggtattgagacccttcccccttttaggcacctaaaacagcagaccatatggaaaatggcatattcccctggcagattcagggccacagtgtttgagagactatcggagatggaggagaagagtggagtgaccctggtgc

SEQ ID NO: 653872 - DNA, 623 bp, Homo sapiens
cttttcaacaaatggtgttagagtaactggatattcacctggaaaaaatcaatctaaacactgaccttatatccttcataaaaattaactaaaaatggatcacagaccttaatgtaaaatgcaaaactataaaacttctagaagacaaaataggatgccttggatttggtgatgagtttttagataaaataccaaaagcatgatccaggaaaaaaattatatcagattctattaaaatttaaaacttctgytctgcaaaatacaatgttaagataatgaaaatataagccatggactgggagaaaatatttgtaaaacacatatctgataaaggacttgcattcaaaatatacacagaagtcttgaaacttatcaaaaagaaaacccaatttaaaaatgggcaaaaaatctgaacagacacctcaccaaaggagatatacaggtggcaaataagcatatgaaaagatgctcaacatcatatgtcatcaggaaattgcaagaagttaaaagaacaatgagatgccattgtgtgcccactagggtagctaaaacccaaaatgccatgctagcagggatacatattgctgagtgaaagccaatctgaaaggctacatactgtataa

SEQ ID NO: 653873 - DNA, 623 bp, Homo sapiens
cttttcaacaaatggtgttagagtaactggatattcacctggaaaaaatcaatctaaacactgaccttatatccttcataaaaattaactaaaaatggatcacagaccttaatgtaaaatgcaaaactataaaacttctagaagacaaaataggatgccttggatttggtgatgagtttttagataaaataccaaaagcatgatccaggaaaaaaattatatcagattctattaaaatttaaaacttctgttctgcaaaatacaatgttaagataatgaaaatataagccatggactgggagaaaatatttgtaaaacacatatctgataaaggacttgcattcaaaatatacacagaagtcttgaaacttatcaaaaagaaaacccaatttaaaaatgggcaaaaaatctgaacagacacctcaccaaaggagatatacaggtggcaaataagcatatgaaaagatgctcaacatcatatgtcatcaggaaattgcaagaagttaaaagaacaatgagatgccattgtgtgcccactagggtagctaaaacccaaaatgccatgctagcarggatacatattgctgagtgaaagccaatctgaaaggctacatactgtataa

SEQ ID NO: 653874 - DNA, 591 bp, Homo sapiens
tgtattgtttaagcaataatgatgagaaagaaaagtctatacatgtccagtacagatgcaaccatcttttccaaaaattttccatgtgtggttggttagatccacagacacagaactcaatggatacacagggccgactgtacataataaggctatgttataataacataataaatatatgttttgttttgtttgagactgggtctcactctgtcacccaggctaaagtgcagtggtgcaatctcagctcatggcagcctctgcctcctgggctcaagcaaacctcccatctcagcctctaatgtagctgggaacacaggcatacaccaccatgcccagctaatttttgtacttttttttaagagatggggttttgccatgttgccccrgctggtctcaaactgctgggctcaagcaatctgccagccttggcctctcaaagtgctgggattataggcatgagccaccgtgcccagccaataaaatatattattaaatcaaagcataaaagaatacctagagtgtactacccttcatgtaaggaagaaaatatgaggtgatatatatctatacagtcacataccacataat

SEQ ID NO: 653875 - DNA, 551 bp, Homo sapiens
aaaagcaacactgcagaaaagaaacccagcagataccaccattaatgatcaatgctaatatcactagtaataagacaaatcaaaatcaaggtcaaatgacaggatgcaatgagaagatcagaggatcgcctctgagatactcttgccaaaaataatacaatctaagcctattcataatgaaacatcagaaaaaaccagctgagagacattctttattttgaactttactcttcaaaagattcagagtcatgaaagtcaaggaaacctgaggaactgttcagacagaaggagtgtaagtgacacaacaactaaatgtaacccatgkatctaaatgggatccttgtgctataaaagacatggcagacaattaataaaagctcaacagaagctgaggattggatgatatgatgctttgatgttaactttctgattatcaaggttgcattgtagttatatagagtgtcctgacttgtgggaatacctactaaagtaatcaggagtgctggcctaatgtcagcaatttactctcacatgcttcaggggaaagagtt

SEQ ID NO: 653876 - DNA, 604 bp, Homo sapiens
cactttggattatgacctccagctccttccaggttgctgcaaaggctatgatctcatttttttatagctgcatggtattccatggtgcatatgtaccacattttctttatctagtccattattggtgggcacctaggtagattccatgtctttgcttttgtgaagagtgctgcaatgaacatacatgtgcctgtgtccttayggtagaacaatttatattcctttgtgtatatatccaataatgagattgctgagtcaaatggtgattctcttttaagttctttgaaaaatctccaaactgctttctagagtggctgcaccaatttacattcccatcagcagggtataagctttcccttttctctgcaaccccaccaacatctgctactttctgactttttaataatagctattctgactggtgtgaggtgttacctcattgtggttttggtttgcatttctctctctctctttttttttaattattttaattgtatatgtatatgtaattataatatataattctgatatatcagattgtaagcctcctgaggacagggacatttttgttggtctgtttttctgttttgttctctgctgaatc

SEQ ID NO: 653877 - DNA, 638 bp, Homo sapiens
tagaattcttatgcataatttgtctcatatctcccatttaaatatttactcaattatctattagtaccagtatggactcatggatatttatttggtactttgagttaaaatkatatattattctatttattttattgctcaaatttttccagttcaaaaattacccactacaatagttatgtagtggtactttgttgtcattttaagttgcaattctctgttgacaaacaatattgagcattttttcatatccttatttggcatctgtttaccttctttggtgaggggtctgttcaggtttttttacattatttaactgggttgcttgttttcttattgttgaattttaagagttctttgtacattttagatacacattttttatcagatatgcattttgaaaatattttctacaagtctgtggcttgtctatgatacttttaaaaatctattttcacactctaatgagacatatgaagaggaaagaagttagttaattataggagaccaatcatgtctctacatgggggtgtgtgaagcctcctccctggaggaatctacttttccttggtcttccaaatacattgttatttccaaaaccatatatgaggagtataaaaaagatatgagaatatatc

SEQ ID NO: 653878 - DNA, 533 bp, Homo sapiens
aagggaaaatgcatgatgaacctggaggaccttgtgttgccagaaagtaaggggtcagggaacaggcctgacaaagcaacatgcagccaacctgaaagagctcccagtggccaaagctggaaaactttgaacaacaaaattaataaaaatactactgagttataacccaaagaaaaaagtaaatatcwgtgagtttatactgataaaaataaatggttaaatacataataactgaagaagtgaaaaaaatcttccttgtggaagatttccaaatagtaaacataaaagaaaggagggaaatggaagacaccacttgatgtggtttggctgtgtccccactcaaatcttgtcttgaattgtagctcccataatccccacctggcctgggaggtacccagtgggaggtaattgaatcatggctctgattttttcccatgctgttctggtgatagtgaataaatctcatgagatctgatggtttataaagggcagttcccctccacatgctctcttgcttaccaccatacaagatg

SEQ ID NO: 653879 - DNA, 533 bp, Homo sapiens
aagggaaaatgcatgatgaacctggaggaccttgtgttgccagaaagtaaggggtcagggaacaggcctgacaaagcaacatgcagccaacctgaaagagctcccagtggccaaagctggaaaactttgaacaacaaaattaataaaaatactactgagttataacccaaagaaaaaagtaaatatctgtgagtttatactgataaaaataaatggttaaatacataataactgaagaagtgaaaaaaatcttccttgtggaagatttccaaatagtaaacataaaagaaakgagggaaatggaagacaccacttgatgtggtttggctgtgtccccactcaaatcttgtcttgaattgtagctcccataatccccacctggcctgggaggtacccagtgggaggtaattgaatcatggctctgattttttcccatgctgttctggtgatagtgaataaatctcatgagatctgatggtttataaagggcagttcccctccacatgctctcttgcttaccaccatacaagatg

SEQ ID NO: 653880 - DNA, 533 bp, Homo sapiens
aagggaaaatgcatgatgaacctggaggaccttgtgttgccagaaagtaaggggtcagggaacaggcctgacaaagcaacatgcagccaacctgaaagagctcccagtggccaaagctggaaaactttgaacaacaaaattaataaaaatactactgagttataacccaaagaaaaaagtaaatatctgtgagtttatactgataaaaataaatggttaaatacataataactgaagaagtgaaaaaaatcttccttgtggaagatttccaaatagtaaacataaaagaaaggagggaaatggaagacaccacttgatgtggtttggctgtgtccccactcaaatcttgtcttgaattgtagctcccataatccccacctgrcctgggaggtacccagtgggaggtaattgaatcatggctctgattttttcccatgctgttctggtgatagtgaataaatctcatgagatctgatggtttataaagggcagttcccctccacatgctctcttgcttaccaccatacaagatg

SEQ ID NO: 653881 - DNA, 533 bp, Homo sapiens
aagggaaaatgcatgatgaacctggaggaccttgtgttgccagaaagtaaggggtcagggaacaggcctgacaaagcaacatgcagccaacctgaaagagctcccagtggccaaagctggaaaactttgaacaacaaaattaataaaaatactactgagttataacccaaagaaaaaagtaaatatctgtgagtttatactgataaaaataaatggttaaatacataataactgaagaagtgaaaaaaatcttccttgtggaagatttccaaatagtaaacataaaagaaaggagggaaatggaagacaccacttgatgtggtttggctgtgtccccactcaaatcttgtcttgaattgtagctcccataatccccacctggcctgggaggtacccagtgggaggtaattgaatmatggctctgattttttcccatgctgttctggtgatagtgaataaatctcatgagatctgatggtttataaagggcagttcccctccacatgctctcttgcttaccaccatacaagatg

SEQ ID NO: 653882 - DNA, 642 bp, Homo sapiens
ctctctatcaatctatttattgatccatctatctaatctagctttacccttccagttacagaaagatttaaggtggcatttgaacatgtacaataaaagataaaaataatattaaacaaaaatagatatgaaaaaatagaagtaggaggaaggagccaggagtgtatcaagtaaaacgcatgttgtactgtctgtacttttgctagagatggagtctaaataaagcctgtgataaatatggaaaaatagttttcaaaatgtcaggaaacccatgggactatgctatatagcaagagaatgttctccatgagaatttccttacccaaaagccaatgtatagcaaatattaatttctaaaattaaaatacaggwataatcctgaatcatgcaaaagttatttaatgattgccagtcatggtttactgaagcaatgcacataccagttttctctttacatttgtgatttttggaacaaagcatctttggaaccagggaaataggtaggttacccttaaggtaaatataatgtgagagtgaagtgcaaactaattctcctatttgttgaatgttctcatttctagaatttatagggaagaaaattacattcatttgaaagatttctgaagccaagtggggagagtg

SEQ ID NO: 653883 - DNA, 549 bp, Homo sapiens
tttgaaagatattcttactaggtagaaaattttagattgacaggtatgttatctttcaatactttaatgatgttactctaagaacttctgaacttgtgtagtttctgctgagagatctgctgtagttcccatcctcgtacttttgaatgtaatgtgccttttatttctggctgcctgtaagattcaaggttttctcataaattttcaggggtttgaatatgatgtaattctytctttaaaaaattatcctccttggcattctctgagcttcctggatctgtgatttgttatttgttgtctttcattaattttagggaaattctcagccattatctctttaaatatttcttctgacctgtttcctctctctctcttctacttctgggattccaattataggcatattagaccgtttgacattgtcccacatctgtaggtattaacttagtccttttaccacttcctagatgatgcagtttcctgaagtaaataatttaactccatttacctccttgtgatctttatgatattgttatcatatattttact

SEQ ID NO: 653884 - DNA, 588 bp, Homo sapiens
ttcagcagggacagaaacccaaacaatattagtagctgaacagatttttttaaaaaagacctatttatctgttgcctacaaaaacacacttcacctataaagatacacatggactaaaaataaagacacagagaaaagatattccatgtaaatggaaaccaaaaaagaccaagattcactatacttatattaatcaaaatagatttcaagatgaaaaattatagaaagaggcaaagaaggtcactgtataatgataaaggaatcaattcagcaagaaaatatttcaattttaaatatatatrtaatgtatttttagggctacagagggagataggccccaatacaataatagctagagacaccaacacctcacattcaacattagacagattcttcagacagaaaatcaacaaataaacattggacttaatttgtgctataaatcaagtgaatctaaagaatatgcatagaacacttcatccaatggctgcagaacacacattcttttcctcagcgtatggattattctccaggataaaccatatgttaagtcacaaaacaagtcttagaacagtcaaaatattgaaa

SEQ ID NO: 653885 - DNA, 371 bp, Homo sapiens
gtttcttcaacagagcggttttgaattatctgactgaaaagtcacgtatctctgttttttcaggactggtccctggtggcttttttagctcatttggtaggatcatttttttcccagatagtgttgacactggtagatgttcttcagttctgggcattragacattagttatttattatagtcttcactgtctgggcttgtgtgtacccatccttcttgggaaggctttccagatatttgaaagacttgggtgttgtgatctaatctttatctgctttaaaggggggcacccaaagcctagtaatgctgttgttcttgcagacatgtataggtaccaacttgctagtctttgataagatctgggggaattc

SEQ ID NO: 653886 - DNA, 603 bp, Homo sapiens
tagctgttagggttaattttatatatcaacataactgtactaagggatgcccagacagctggtaaaacattatttctggatgtgtttgtgatggtgtttccagaagagattaacatttaaatcagcagactgagtaaaaaagatcctttctcaccagtgtgggtgggatcatccagtccactgtggtctcaaatagaagaaaatgtggaggaaggatgaattttctctctctgctgagatgagacatccatctctctcctcccttcagatatcggtgttcctggctcctgggcttttggactcaggccaggacttatacctttagcccctcagttctcagaccttcacacttagaatggattacgccgccaactttgtagcttgcaaacagcagatcatggtaattcttggcctctataactgtgtgagttaatttatgtgataaatctccatacatacatgcacgcacacagacacacacacacacacacacatatatataattggtatawatatacatatatacacacacacacatatatattccaatatgtgtgtatctatatacacaatgtatgtgtgtttatacacacaagtcattgg

SEQ ID NO: 653887 - DNA, 612 bp, Homo sapiens
aaatgtatattagatatacttatatgcggaagaattttaaaaattgccctgtgatttttaagatataacacttgagaaagggtctataatacctatatattaatgtaatttttgcgtttttgtcttggcttttaaaattgttatggctacataatagctgtacaatttatggagtacatgtaatattttgatacaagcatccartgtacaatgatcaaatcagggtaattcagatacacataacctcaatccttcataatttatttgagaaatataccaaatcaactactgtagatattttgaaatgtacaataaattattgatacctatagttgaattatcatgctgccaaacagtagatcttatccctactacctaattggggtttttttttgaacccattaaccatctcatctttatgcaaaacctccccactatccttcccagcctttggtaaccaccattctattctctacctccatgagaccatttctttttttgctcccacataggagtgagaacatgcaaaatttgcctttctttgcctagcttattttagttaacataatgtcctccagttccattcatgttgttgcaagtgataggatttaa

SEQ ID NO: 653888 - DNA, 614 bp, Homo sapiens
aatatatgtatcattctaaaaacttattttctctttgagggagctcaaaatttagctgaattgtgaggattattcaatgtgagcatatttgtgacttagctcattttttgtgaatacctgaagacacagaaccaggaatcaataatgcgtagaaaggtatccaggtaacattcccagaggtatcatcagcctgatcttctaggagttgaaccccagcgtttaaaattttggaacttacttattttcctttcacaaagacaaaattattaattctgttcacagaaagttatttctcttttccttccgccataaaacatcacagtatgtttatttcataaatcattctctttctccccttgcctcaaactttgccattatctctaagacccctttggaaactaacttaataactattattgatttgggtccagtgcaaactattcacttaagggtgtttctacactttctgagcagcaagcagccagataaccatggcccatgctgcagatttaatttgagtatcaacagatccagatttggtaagcattttytttttcttttcttaccagactccaagagagccacaggaaataactggcactggctgcttggca

SEQ ID NO: 653889 - DNA, 623 bp, Homo sapiens
gattgcagactgcaaaggggataaaaattactactctagattaacaataataataataataaatccttctttaaatagatatataatcagctttgaagatttttcaaatatcgatcaagttcccaagtaaagggtcctgcctcatggagtgttcagagaaaaataattgtggatattttcagtcatctctcaaaggctctcaattctaaccaaggctcttccatctcaagtaacacagacgccaatcaaggtaacataaaagaaaaaaaaatgatcatggcacagtgttaataaagaaaagataataaaattggagaagaactctcaagaatcttgtttgagattagcctcatggaggaaggagaccaatctgaagctactctctcctctttgaatgcacacaggctctctcayctctaagtatctttctctctttctatcctgactgttctgcttccctctgagcctatgcatcaattgcactggggatgacagtgcaaagatgaataggacaatgtccctgtcctgtgagcttagagaccagcagggataggatgatagatatacaaggacaactcagcaccagttgcaatgttgcagaagatacagtgttctgcagcgat

SEQ ID NO: 653890 - DNA, 607 bp, Homo sapiens
tagaactcttagcttatgaagaaaataacattttcaacattttatatttccagttgaaatacagacatttattgtaggctctttaagaacctataatattgctactggttccgtgtagtcaatgtgcataactcgatttttggcttttgaggtaacatggaagcaaatattctcagaaaccaacagagaaattgagctgattcggacactagaagagccagctaccttctgttttattttagctttgttgtttcatcttcgtcatatcgtatccaagtaaaattggaggaaaatgtcagaagaagcttacaggtgagtcttggcaatcacttctgaccagccactagctgaatcaccaaactacagtaattgttcttaataagcatatcaccggcaaaatggaaaggggaaaatgagagcagaccatacaaatgttcagtaattcccaaatctttaacataattacatttttaaccttggtttagctcaaaaataatactggttgatatgagcaaagatagayaagttaaaatagtatttatgacacttcctagatttctcaagatgttatgagttcctttagcatctttcttccatcagttgttat

SEQ ID NO: 653891 - DNA, 602 bp, Homo sapiens
gggttttaaaataggtgtacatcagtgaggatgccagaaggaaacagatgacacactcagctgaaattctgagaatttaatgaagagatatttaacataagtatggacaggattaatggaaccaactgagggtctgagacacatcggtgttgacaagaatgggaaaccattagcctccttgggttgcagggctgaagggaaggaagagtgttaccatagggcagagaaagtgaaarctatggaggaacacaattattgtgggaactgcagcaaacctgattcagaggagggatagaaatactccatcttctccctcctcccatgctccaatccccaagagattagtcctcttgatcaaatcacaactgattcttttttactgatacataatagatgtacataatttcaggatacatgtgataacaatatatgcatacaatttgtaaagatcaaatttgtataattgggatatctgtcaccttaaatatttgtctttacactacaaacattcaaattattctcttctagttattttgagctatacaatggattattgtaaatcataataccctacgaatttatcaaacactaggtcttatttt

SEQ ID NO: 653892 - DNA, 602 bp, Homo sapiens
gggttttaaaataggtgtacatcagtgaggatgccagaaggaaacagatgacacactcagctgaaattctgagaatttaatgaagagatatttaacataagtatggacaggattaatggaaccaactgagggtctgagacacatcggtgttgacaagaatgggaaaccattagcctccttgggttgcagggctgaagggaaggaagagtgttaccatagggcagagaaagtgaaagytatggaggaacacaattattgtgggaactgcagcaaacctgattcagaggagggatagaaatactccatcttctccctcctcccatgctccaatccccaagagattagtcctcttgatcaaatcacaactgattcttttttactgatacataatagatgtacataatttcaggatacatgtgataacaatatatgcatacaatttgtaaagatcaaatttgtataattgggatatctgtcaccttaaatatttgtctttacactacaaacattcaaattattctcttctagttattttgagctatacaatggattattgtaaatcataataccctacgaatttatcaaacactaggtcttatttt

SEQ ID NO: 653893 - DNA, 602 bp, Homo sapiens
gggttttaaaataggtgtacatcagtgaggatgccagaaggaaacagatgacacactcagctgaaattctgagaatttaatgaagagatatttaacataagtatggacaggattaatggaaccaactgagggtctgagacacatcggtgttgacaagaatgggaaaccattagcctccttgggttgcagggctgaagggaaggaagagtgttaccatagggcagagaaagtgaaagctatggaggaacacaattattgtgggaactgcagcaaacctgattcagaggagggatagaaatactccatcttctccctcctcccatgctccaatccccaagagattagtcctcttgatcaaatcacaactgattcttttttactgatacataatagatgtacataatttcaggatacatgtgataacaatatatgcatamaatttgtaaagatcaaatttgtataattgggatatctgtcaccttaaatatttgtctttacactacaaacattcaaattattctcttctagttattttgagctatacaatggattattgtaaatcataataccctacgaatttatcaaacactaggtcttatttt

SEQ ID NO: 653894 - DNA, 630 bp, Homo sapiens
aaaactttttaggtcatttttatcaagtgacttgtattgtaggaatgtgaaaacatgtcaaaaataatcacattttccaggttcattgttctaaartccttcctccttcctctctgatatttgatatatttgttaaaatactcatgctttagtttgaaatcagttttacatttgttttaaagataataatatccaagcacctactactatgtgaaatgtttaatcacaaaccagtcagtctttgtattgtcctcaagtcacaattatcatgtacctttagtacatagagtacatattgctttacacagatataccaagcaaaagcatacttatatggcaattgacaaactaatctcaaagtggtccccactactgaatgctgaacgtttctcatcttctttcatatgtgtgatgaaataaagcgcaagagaatcaggagatgcgagttatcatcctggttctgtcactggcatcatcaagtccccttctctggaccagttttctcatctgaaaaataaaagaacttggactacctgctttttaatgtccttttcttcatacttatataattcttcctgttaaggtcttattttaaaaacaagaaatgaaaagcctacatctatgataaat

SEQ ID NO: 653895 - DNA, 594 bp, Homo sapiens
ttctcatcttctttcatatgtgtgatgaaataaagcgcaagagaatcaggagatgcgagttatcatcctggttctgtcactggcatcatcaagtccccttctctggaccagttttctcatctgaaaaataaaagaacttggactacctgctttttaatgtccttttcttcatacttatataattcttcctgttaaggtcttattttaaaaacaagaaatgaaaagcctacrtctatgataaattccttaatggatattttggaattttttattagttgcagttatttctgcaattattatagcaaataaagtagaataagaagcctcttaatattaataatgtgtccaactatgttaaataaaaaatcactgggctaaccttattgtaccatttgtgagggggaaaaaaatagtacagtttggttttccctgtactggagcttgtccttctcttttgaagagagatgtttcttaactctcagcagcatacgtgcttgtataacttaacagatgacaagggcagttcccccgcaattctgtgcatttttagcagtgcaaaattttagttggtggtaattctaggtatgagaggtg

SEQ ID NO: 653896 - DNA, 647 bp, Homo sapiens
ggaataaaagtttcaaaccatacaacagatgaaaaatatattgtaaagaaggaaggaagaaagaaagagaaagagggagacatggggggagggaggaaggggagaaaggaaaggaaggagggaaagaggaaggcatcatctcttaggcatatgctaggcactgaataaatgtcagttaatctttctctgctagtttgaaatatatgaaattagggatattatttttatctgcaaaaatccccacaattttcatatggttcaacttagcatattcaaaattattttttcaagatttgtctttgttaacagactagtggtgaaagagtcaagtgcaaggcaatgtcctctggaatagacaatgctgacaagtcaggctttcttagatggccagttctgtcctcttcagtccaccaaccaggtagggcatcttctctactaatggccagaagcatacaagtagctgtttttcacaaggtgtataattgttcactgcaaaagggatgcccttgctttaaaacctttgccatctgtgttgtgatttgtcctttgggacatataaaacctatatgccatgyttccaccactgatacatctaataccatggggtttaccagaacatatagacaaagtggcaagcctccaaaatt

SEQ ID NO: 653897 - DNA, 251 bp, Homo sapiens
aagtggaatcaaacttacttttcctaattttaagtccaatgtgttcatcctagtattttctaaattgtatgatattaacaagaatatcagctgtgagacaggaattrcaagtgagatcatgcaagctcagagcttgagaactttgaccacttggtcttcttggtttgttttacttctatacatccctaccatccatgctgcatatcccctaagaaaatcttaagactaacgttactgatattctaagaaaa

SEQ ID NO: 653898 - DNA, 588 bp, Homo sapiens
gattctggtgttgctagcccagggaccatgctctgagtagcaataacaggttctctatgttttaaaaactggcattggttacagcctcctgctgaccacgaaagaaagccaggtaggcagctgactccatcttctcttccaccaccattcattgttgagccagagttctttaaagtagctatgtgaagccagaattatttatttcctaagacaatagggaataygagatgacttaacttttcagtgtagagaaattgttgctgcttgatggaacagtgtgactcttacctagaaaaatgaggccaacatctaagatggcttctcctgcgtgtgccagttaatttccgttttttttttttctacagattttggactctacccttaacctaaaaatacatgcccttaggccattaacgaaaccgcatgaaagaaagtgactgaataattccacttctatgtctaacacacttgtgaataacatggtccctagaaagagcacaggtttgaatctcagtctgaactcttacaagctgtgtgaccttgggtaattacataactgttgcacctgtatgtcacctatgaataagc

SEQ ID NO: 653899 - DNA, 545 bp, Homo sapiens
ttagtacctgctgatccaaccttgaataaattagggaatgcatcaattgaaaagactagttttccttaagtaaattttctgaacctggcagaaataattttaaatatagttcaataattttaaattagttgaactatatttaacacataatattgcttgaaccaacttcaataccaaaaatcagcatggtgtatcaaacatgaaaactggaaagaattataaaacargattgctacgatgctggcaacaatggaaaatcattaaaagaaaaatatgagcaaagattaaaatgaagtaacttgaataaatgtttttaaaatcctataaaaaagagataatataaatacatttatggttaagaaataggaaaattttatacagtatacctgtatattatttatcttaatatttgtcttttatcaaaatcttaaatgaagcattcattgcattcattgcaaaaacaatagacaaaggttttaaagcatatgacagatttgatgccataaagagttttcccatggttgctctatggattttgacagcaa

SEQ ID NO: 653900 - DNA, 545 bp, Homo sapiens
ttagtacctgctgatccaaccttgaataaattagggaatgcatcaattgaaaagactagttttccttaagtaaattttctgaacctggcagaaataattttaaatatagttcaataattttaaattagttgaactatatttaacacataatattgcttgaaccaacttcaataccaaaaatcagcatggtgtatcaaacatgaaaactggaaagaattataaaacaggattgctacgatgctggcaacaatggaaaatcattaaaagaaaaatatgagcaaagattaaaatgaagtaacttgaataaatgtttttaaaatcctataaaaaagagataatataaatacatttatggttaagaaataggaaaattttatacagtatacctgtatattatttatcttaatatttgtcttttatcaaaatcttaaatgaagcattcattgcattcattgcaaaaacawtagacaaaggttttaaagcatatgacagatttgatgccataaagagttttcccatggttgctctatggattttgacagcaa

SEQ ID NO: 653901 - DNA, 562 bp, Homo sapiens
tgtactacttacatacattaccttatttttacgataaagtaagctagagaaaaaatattattaagaacatcatagggaagagaaaatatatttactattcattaagtgagagtggaccatgataaagttcttcattcttgtcatcttcatgttgagtaggcaagggaggaggtgtaagaggaggggttggwctttcagtcttggggtggaagaggtgaaagaaaatccacgtatcagtgacgcagttcagacccgtgttttcaagagtcaatgatactaagatgattcaaggcagcagtgtagaagaaaccacttttaaagatgtctaatgctttgcaaacacaggtaggtattattatttatggcatttttgttatctcacagtttgacctctgatgaaaagtcactattagcagtaacttcaactgaaactctgccagaatctcctactttttctttctctgtgttaaatgttttttctacgttacatccaaaatattctagcaacacatgacagagcatttcagaatgtgagaatgcacaaaccacctaagggagggtg

SEQ ID NO: 653902 - DNA, 537 bp, Homo sapiens
gagggtcaaatatccaaactatagcagcacctgatggctggctgtttctggccttcattcagcttttatattctctagaatacttcygttttctctcattcactctataaatcttgtaagtcgtaaggaacatacaagattcattagcaattgtaaagaaatgtttcttcacatttctgtgcatgtatttttatttatgatatttaatatctgatgggcaagatttcagttaatgaaacaagtagcacaatctttttctctccccagagctgaatgaagcagtatgataacattttgtgaactgttggagcactggtgatgcactcgtaatggtgttagcatggaatagaagctctcgcctccctgtcttgaggagcattacaccagaatattttacaaactggatagcaactcgaatgagtggttaccaggagtaaccatttaatatgcatttgcatttaatatgcattttcattttgtgcactttcacagcatgatatcctctgaggctcaagactctataaaggaagaagggca

SEQ ID NO: 653903 - DNA, 588 bp, Homo sapiens
accaggcagtgtcctaaataatgccttgtaagtagttgtaagcccttagctctggaagggcttccataactgtgtcctctctcaaacttctgaggtcctgggagctagtagagtaaggaaagatgtttagtttccctgcctgacagcacccacctccaaccttcctctcctgcatgactccaaatttcatcacttctcaggtctaagaggaaggctctgaacaaagcatgatggtgtgggaaaaagtcacagactaggactcagttacctggtgtttgcttggcaactaactgcatrcccttgagcaagtgattccacctcccaagtcttcaatttattcaagtaatcaagtaagaggttacagtccatgatttaataacagaaacagtgactgaattcttacacctaaaactgaaaaaatattgagttaatagcaattaatattgttgaaatagagtagatgtcaattcctcctatataaataatgccctgcttgcctttatgatacttttgtagcaattactttactgtatgcatgttaatcaaaagatcacactgggcgtttgggacttcacctctggctttggt

SEQ ID NO: 653904 - DNA, 412 bp, Homo sapiens
ttatagtgatagaattaaaaagtttaacttttcctacttatgggcatacaggtatttgggtgccatctttataatttacaattagtttgaaagatagaaattgcaaccataaggttgggagcctggtatgtaaggcatttgccggtgggcatgttttgaacatgtattgttgggcccttatacgtactgtcacttatctgttcccatcaccgttggacaggtatttctccctgtgctggcaaaacaggcacacctctcactaaggcagagctgccacaagtagtctaactcctgaggacaacaaacccctttgctggggggaagggatgggaggaggaacaagacttgagaggcggctgggcagaggacacagaaacctcygttctactgtgaggcccgaggaatgcaaatg

SEQ ID NO: 653905 - DNA, 602 bp, Homo sapiens
tgttgacttaaaggtaggaggagcacaaagtaaccaggtggtaattttaaactccaggttaatgaaatcattgtagtgtctcctggtggcaacattctttcctctggaatgaagacctctaggccagcagaatgtaatgtcacaggaacaggagaaagacttttgctagtggatcactagaggttatgttgtgtggtgccacttccacttccaccctttgaatcctggacccataaatcctggctataggagcaagagtaccatatattggatgctgattcagagcatacacagccttctggagaactttgccacagcgctrcaaagtattatcacctagctggcattgtaattgtgacttcaaaaggccattccactgttctatcaatccagctgctacaggatggtagggaacatggtaacaccagtgaattccatgagtgtgaacccactgccacacttctttagccataaagtgagtgccttcattggagacaacgttgtgtggaataccatgacactgaatcagacattctgtgagtccatggatggtagtcttggcagaagcactgccaaggataggcaaaggcatatgcagagta

SEQ ID NO: 653906 - DNA, 665 bp, Homo sapiens
catggagaacctctgctagggcagtgcagaagggaaatgtggggtgcaagccctcagccagaatccttactggggcactgcctggtggagctatgagaaggccactgtcctccagaccccagaattgtagatctactgacagcttgtactgtgtacctagaaaagccacagacactcaacgccascctgttaaagcagccaggagggggctgtaccctgcaaagccacaggggtggagctgcccaaggccatgggagcccacctcttgcatcagcgttacctggatgtgagacatggaattcaaaggagataattttggagctctaagatttaactgccctgctagattttggacttgcatgaggcctgaagccccttcgttttggccatttcttctatttggaatgagtatatttacccaatgcctgtacccccactgtatctgggaagtaactaacttgcttttgattttacaggctcatatgcaaaagggacttgccttgtgtcaaatgagactttgatctgtggacttttgagttaatgctgaaatgagttaagactttaggggactgttgggaaagcatgattggttttgaaatgtgaggacatgagatttgggaagggccaacggtggaatgatatggtttggctgtgtcgccacccaa

SEQ ID NO: 653907 - DNA, 648 bp, Homo sapiens
cacaacaaaacatctctatttgatgctttggataaactttgcataggaagctgcaaacacctaaagcagctttttgttgttgtatctgctgtaagtaagtccctagtacaacgctgtccctggcatgtgaaaacagagtaaaccagcttgcagttctgtatgtgcaatacacagacccagaataataycatctgtttcatctagaatgtaacctaactccacattatcactgcatttcaaagcaagactacactggatgaagaagactttctgtttattagagtttaccaaagactaaaaactttgctgtaatagtaggtcattgactttatatctatatccatatatggtggcatagtccataattaacagaggaagctgagacttttacagtgctaaaagttgtcattatttctctgaggccaaatagcatacacttgtggccccaatttctctagcctgtaggtccttctacttaacacaagctaccgagctttgcaatattccttcctcttcatcccaagaccaactctaaccatctcttcctttatttaactaccctcttcctacccctcagctctcagcttagatcacatttcttccaggaaatctcctgacctattgtcactcctgggttaagctggcctt

SEQ ID NO: 653908 - DNA, 648 bp, Homo sapiens
cacaacaaaacatctctatttgatgctttggataaactttgcataggaagctgcaaacacctaaagcagctttttgttgttgtatctgctgtaagtaagtccctagtacaacgctgtccctggcatgtgaaaacagagtaaaccagcttgcagttctgtatgtgcaatacacagacccagaataatatcatctgtttcatctagaatgtaacctaactccacattatcactgcatttcaaagcaagactacactggatgaagaagactttctgtttattagagtttaccaaagactaaaaactttgctgtaatmgtaggtcattgactttatatctatatccatatatggtggcatagtccataattaacagaggaagctgagacttttacagtgctaaaagttgtcattatttctctgaggccaaatagcatacacttgtggccccaatttctctagcctgtaggtccttctacttaacacaagctaccgagctttgcaatattccttcctcttcatcccaagaccaactctaaccatctcttcctttatttaactaccctcttcctacccctcagctctcagcttagatcacatttcttccaggaaatctcctgacctattgtcactcctgggttaagctggcctt

SEQ ID NO: 653909 - DNA, 623 bp, Homo sapiens
gcaggaatgcagtaattcctgcattactatgcaggaatgcagtaattcctgcattactatgcaggaatgcagtaattcctgcattactatgctaccagaatcagtcctatggaaatagaactttgcagaaagatcaaagggggttacagtctgtagttaggtgtcaggagacccccactgtagactcagctctttctctgccctgttaaataacccgagcatgtcatttggtctcttagccctgccccctacataactgttcacctgcagaatgtgaaaactttatcagctcatcaataaggttttgttaaggagcaagcatctattgaccaaactggcttataacccaaaagatgcagggtcagttcttggcaaaactatgaggaaggaaaaaaaattggcactgtttcctgacttccgtatttctaaatcaccattttgaaggcaaaaagctcaaaatttggtacttctgatattattcagtgaacggaaaaatattctagagggtagtgagcttcccatgtgcttaagcacatatggtgcaggtgataacgtactccatctctgtaaagaagsttgtctggaagcttttgtgctttgaaagaactccgtatttatgtgtg

SEQ ID NO: 653910 - DNA, 571 bp, Homo sapiens
tctgtcgcccaggctggagtgcagtggcacagtctcggctcactgcaacctctgcctctgggttcaagtgattctcctgcctcagcctccccaagtagctgggactacaggaacacaccaccatgcctggctaacttttttatttttagtagagacggggtttcwccatgttggccaggctggtctcgaactactgacctcaggtgatctgcccaccttggccccccaaagtgctgggattacaggtgtgagccactgcgccaggccctaatattcattcttatagaacacataatttgggtattagttaatagtgttcatttttactttatgtaatactaagtaattttcaatgatgtcaccttaattttattatcattacttttaatagttcacaactgtgtatcaattaaacatatttctattatttatatatcaaatatcataggcagcttgctttcatgtgttttattgtaaattattcttaaaagaatatctttgttcactgactatagtacattctatcttttggataattcctttaagacaaattgcttaggatggtattagt

SEQ ID NO: 653911 - DNA, 571 bp, Homo sapiens
tctgtcgcccaggctggagtgcagtggcacagtctcggctcactgcaacctctgcctctgggttcaagtgattctcctgcctcagcctccccaagtagctgggactacaggaacacaccaccatgcctggctaacttttttatttttagtagagacggggtttctccatgttggccaggctggtctcgaactrctgacctcaggtgatctgcccaccttggccccccaaagtgctgggattacaggtgtgagccactgcgccaggccctaatattcattcttatagaacacataatttgggtattagttaatagtgttcatttttactttatgtaatactaagtaattttcaatgatgtcaccttaattttattatcattacttttaatagttcacaactgtgtatcaattaaacatatttctattatttatatatcaaatatcataggcagcttgctttcatgtgttttattgtaaattattcttaaaagaatatctttgttcactgactatagtacattctatcttttggataattcctttaagacaaattgcttaggatggtattagt

SEQ ID NO: 653912 - DNA, 571 bp, Homo sapiens
tctgtcgcccaggctggagtgcagtggcacagtctcggctcactgcaacctctgcctctgggttcaagtgattctcctgcctcagcctccccaagtagctgggactacaggaacacaccaccatgcctggctaacttttttatttttagtagagacggggtttctccatgttggccaggctggtctcgaactactgacctcaggtgatctgcccaccttggccccccaaagtgctgggattacaggtgtgagccactgcgccaggccctaatattcattcttatagaacacataatttgggtattagttaatagtgttcatttttactttatgtaatactaagtaattttcaatgatgtcaccttaattttattatcattacttttaatagttcacaaytgtgtatcaattaaacatatttctattatttatatatcaaatatcataggcagcttgctttcatgtgttttattgtaaattattcttaaaagaatatctttgttcactgactatagtacattctatcttttggataattcctttaagacaaattgcttaggatggtattagt

SEQ ID NO: 653913 - DNA, 571 bp, Homo sapiens
tctgtcgcccaggctggagtgcagtggcacagtctcggctcactgcaacctctgcctctgggttcaagtgattctcctgcctcagcctccccaagtagctgggactacaggaacacaccaccatgcctggctaacttttttatttttagtagagacggggtttctccatgttggccaggctggtctcgaactactgacctcaggtgatctgcccaccttggccccccaaagtgctgggattacaggtgtgagccactgcgccaggccctaatattcattcttatagaacacataatttgggtattagttaatagtgttcatttttactttatgtaatactaagtaattttcaatgatgtcaccttaattttattatcattacttttaatagttcacaactgtgtatcaattaaacatatttctattatttatatatcaaatatcatagrcagcttgctttcatgtgttttattgtaaattattcttaaaagaatatctttgttcactgactatagtacattctatcttttggataattcctttaagacaaattgcttaggatggtattagt

SEQ ID NO: 653914 - DNA, 534 bp, Homo sapiens
ttttaaacttggttccattctccctgtctttttcaggtaccctgatcagtcataggtttggtctttttacataatctcatagttcttggaggttttgtttgttccttttcattttttttctctagtctcgtttgcctgttttatttcagaaagatagtcaagctctgagattctttcctctrtttggtctatgtggctatcaatacttgtggttgcattgtgaagttcttgtgttgtgtttttcagctccatcaggtcatttatgttcctctctaaactggttattctggttgacagctcttgtaatgttttatcatggttcttagcttctttgcattgggttaaaacatattcctttagctcagtgaagttcattattacccaccttctgaagcctacttctgtcagttcatgcatcttaacctcagcccagttctgtgcctttgttggagaggagttacgatcatttggagaagaagaggcactctggctttttgagtttttagcaattttgtgttgattttttttctcatc

SEQ ID NO: 653915 - DNA, 551 bp, Homo sapiens
tggtcagataggtaatcatgatgggtgaagggtctagcatcttattgtccagatgcagtgacctagtaaacttcaattccatgatactatctagaaggcctgaaggttggtttcctgagaaagaaactttaataaaacaaaggaactttctcaagtttcaagactgggagaatycatttctatgtgtattcaacagaagctataaagctaagttctgtgggacaattaggtcagtttcaattcacccctacctttctatttttcaactcctcaatcatgaggaatccacctggcaatcttttagctgcttcatgctgaggaggggtgttgtgggcagctccatgccatggctgtccacgtggctacccaggaaacaaaggttaatctactactatagtttccttttgaaacacaatctttctctctccagtatcctactgccaccaaagacaaatcacaagaccagcccacctgccaaataagctttagtcccatatacttggcctgattacctatacaatctgcaacaagaatcattgtccatataggtt

SEQ ID NO: 653916 - DNA, 580 bp, Homo sapiens
agttagtgtaaaagcagaaaccagagctgtcgctcccattctttcagaatgttttgatgaatcagaagtttttcttaaaaatgcctcaaagagtcaaaagatcttaactatattgattatttmatttttcactatctctttaaattttaaaagaacataaaagtaaaaaggagaagccaaggattaaataaaatacttgactatttattcagaaatacttcttattactctattttattttccatcttaattctgatttatatgcttttaccactgtccaataactaataaataagttaatgagatatttaaaaggtaatatgttttcttacacttttttcttttgattcatttactatttcttgtagttacagtcttgttttattaagcactttgagtctacatatcattttaatggaggtatcaggtgggatgtccttctcatttaccctacaatgaatacccagacattcatccatcctactcagtcctaggcagatatgtgaattaattccttgtcacccacaatattccatcttcattgtttttcttcctcaacccccaaatcattcacatagtt

SEQ ID NO: 653917 - DNA, 587 bp, Homo sapiens
gggtatcatatcaggggtgcagggatcatctgcaagaaagcaaatgtgatacaccatataaagataattaaaaacaaaaataacacgatcatctcaatagatgcagaaaaagcatttgacaaaatccagtatccctttatgattaaaaccctcagcagaatccacatagaagggacataccttaagataataaaagtcacctatgacaaattcacagccaacattataccaaatggggaaaagttgaaagcattctccctgagaattgaaacaaaacaaggatgtccactctcaccaattctattcaacatagtattggaagtcctagccagagcaatcagacaagagaaagaaataaagggcatctacactggtaacaaggaaatcaaacwgttgtttgctgatgacatgattgtttacctagaaaaccctgaagacacatccaaaaagctcctcgaactggtaaatgaattcagcaaagtttcagattacagaattaatgtacacaagtcagtagctctgctatacatcaacagcaaccaagctgagaatcaaatcgagaactcaaccctttttacaatagctgc

SEQ ID NO: 653918 - DNA, 542 bp, Homo sapiens
ccatcacacctggctaattttttatttttagtggagacagggtttcacyatgttggtcagctggtctcaaactcctgaccttgtgatccgcctgccttggcctcccaaagtgctgggattacaggcgtgagacaccgcgcctggccagactaatgatatattaatgaattttaatatatctcatatgtgagatatattaaacttctcagtgaacactaatgaagtagataataaggaatactaaggtagatgccgagcatgaccaacaataggactatgaatatctggaatcttgtaagtctggatttaaattctggctcaagtacatacagaccaagcaagccacttaaactataggactcttatctatcttatttataagacaggtggaataagattaattcattaggttgtggtaaaaatgaaataagaataatgcaaaatgattggaatagtgtaagtgctaaacaaatgatagctatcatcattatcatcactattttttgtcattttcattttattatttataaaacagctttact

SEQ ID NO: 653919 - DNA, 542 bp, Homo sapiens
ccatcacacctggctaattttttatttttagtggagacagggtttcactatgttggtcagctggtctcaaactcctgaccttgtgatccgcctgccttggcctcccaaagtgctgggattacaggcgtgagacaccgcgcctggccagactaatgatatattaatgaattttaatatatmtcatatgtgagatatattaaacttctcagtgaacactaatgaagtagataataaggaatactaaggtagatgccgagcatgaccaacaataggactatgaatatctggaatcttgtaagtctggatttaaattctggctcaagtacatacagaccaagcaagccacttaaactataggactcttatctatcttatttataagacaggtggaataagattaattcattaggttgtggtaaaaatgaaataagaataatgcaaaatgattggaatagtgtaagtgctaaacaaatgatagctatcatcattatcatcactattttttgtcattttcattttattatttataaaacagctttact

SEQ ID NO: 653920 - DNA, 542 bp, Homo sapiens
ccatcacacctggctaattttttatttttagtggagacagggtttcactatgttggtcagctggtctcaaactcctgaccttgtgatccgcctgccttggcctcccaaagtgctgggattacaggcgtgagacaccgcgcctggccagactaatgatatattaatgaattttaatatatctcatatgtgagatatattaaacttctcagtgaacactaatgaagtagataataaggaatactaaggtagatgccgagcatgaccaacaataggactatgaatatctggaatcttgtaagtctggatttaaattctggctcaagtacatacaraccaagcaagccacttaaactataggactcttatctatcttatttataagacaggtggaataagattaattcattaggttgtggtaaaaatgaaataagaataatgcaaaatgattggaatagtgtaagtgctaaacaaatgatagctatcatcattatcatcactattttttgtcattttcattttattatttataaaacagctttact

SEQ ID NO: 653921 - DNA, 565 bp, Homo sapiens
tttgggaggccgaggccggcagatcacaaggtcaggagtttgagaccggcctggccaatatggtgaaacyccgtctctactaaaaatataaaaaattagccaggtgtgatgacctgtgcctgtaatcctagctactcgggaggctgaggcaggagaatcgcttgaactcgggatgtggaggttgcagtgagccgagatcacgccactgcactccagcctgggtgacagagtgagactccatgtcaaaaaaaaaaaaaaaaaaattaagccttatccgtttcacaaagtagatgggaaatttttcagtattagtgcttttaattcaaatgttacctgggaaatagttttgatttttcctaggatagtttcttttcatggttatttcttcatctttctccaggctttttgtttgtttttgtttaaacataattaattataaatataaataatgcacaaacatggtaaacaattttaaagtatgagcaaggaacagatatgttttcccacctctatttctcatgctcacttatatccttcagagatatccctcttttttgtgtctctt

SEQ ID NO: 653922 - DNA, 567 bp, Homo sapiens
tcatggagagagcacattcgccttcctgtgtcccctccccagaacctgtcagccacgccagagcagattgctccctgctcttcctgycccctccgtagacacaggtcagaggctctccagggtggtcttttgtccgttgagccctgcaggtgaggagcggaggtgggcagtgcctaagactccaggctcctgcaggtgacccaggcctccagatactggctcccttcccaccttccttcccttgtttgcaccaggcataggtaacagcagctttattccaatgtctgcccaggcagccctccatgtgccgttaatagagcgctttctaaaacttcacccctcaggatctcatacagaccctgtgctctgggcaggggcagtcacgaagccatttgacagattagggaagtgggacacctgaggccagtgcctgctcaccatcgcacagctggacggtggcagagctgactcagaccagggccttacactaggccctgggtgaggggcacgtgcctgaggaggaccccagcccccatgtgctgcaggagactggggtctgcagcagag

SEQ ID NO: 653923 - DNA, 567 bp, Homo sapiens
tcatggagagagcacattcgccttcctgtgtcccctccccagaacctgtcagccacgccagagcagattgctccctgctcttcctgccccctccgtagacacaggtcagaggctctccagggtggtcttttgtccrttgagccctgcaggtgaggagcggaggtgggcagtgcctaagactccaggctcctgcaggtgacccaggcctccagatactggctcccttcccaccttccttcccttgtttgcaccaggcataggtaacagcagctttattccaatgtctgcccaggcagccctccatgtgccgttaatagagcgctttctaaaacttcacccctcaggatctcatacagaccctgtgctctgggcaggggcagtcacgaagccatttgacagattagggaagtgggacacctgaggccagtgcctgctcaccatcgcacagctggacggtggcagagctgactcagaccagggccttacactaggccctgggtgaggggcacgtgcctgaggaggaccccagcccccatgtgctgcaggagactggggtctgcagcagag

SEQ ID NO: 653924 - DNA, 582 bp, Homo sapiens
ctttctgcaagctttttgaagcttcagggattgctacaaagactggaaaatcgatcttgaactcagccttttaatttcttttcatgattactgttctcaaatggagaatgcaattaaaattaatgctgtcttagttcacttgcctcaaaataaacattgatcaaattctatgtgaagggtctgtaacatctcttctataatcattttaaaatatattaacagagatctgtgtattgtagaacaaaggggactgtttytgggagacaggagttctgagttctggctctagctctgccatgttctgtgtgacctacgaaaaggcacgtcttctgtttgagtccccttctcctctgtaagatgggtacattaatacttcacaggagtacttaaggatcacacacgtcaagcatgataatggcaaaaattacaataaacttacaatgaaatattatggttgctacctacattcctgaaaaaatctgattaacacaagcctcccagatatcaagatcattgggacttcacacaaatatgttacaatgcttattgttattatggtatgaagcgaatgttacatggagt

SEQ ID NO: 653925 - DNA, 588 bp, Homo sapiens
ggctctggggttacagtgggggttttatatttcatcctaagagccactgtgatgtcatgtggggagcaatataaggccctgtttgcttgcttgcttgcggggtaggcaggagtggaagcgggaaaccagggcagaggctgcagaactgtacaggtgaaagtgatgctggactgcccccaggggttagaagtgaaatgaagataagagatcaggatccaaaaccatttattctctccctttttcttcttggggcacccagtagtattttttcccagaagacatttcttaaaggatcacttaagccaggaactgtcaaatgcacaaaccaaatgcactttctactagtttttgcaaataaagttttattgcaacatagccatgcccattaatttatgtcycatctgtggctgcttcacactacagcagcagagctgagtggcggcagcagagactgtgtggcccgcaaagcctcagagttttattatttggccccttacagaagacatttgccaattcctgacctaagcaaagtgagtgagggacgcattttcaaaacacaaatctgttggcttaaagtcttcctagcac

SEQ ID NO: 653926 - DNA, 394 bp, Homo sapiens
gaattcccagtaagtttcttaatrcaatgttctgtccaaactattcacctctgggtgaagtttttttattttattgatgcagaggggaggtaaatagctaatgcatttatttaaagcaagtaaatatttaactttataaattattctaatttatacaggtgattacaggcagccgccaccacgcccggctaattttgtgtttttagtagaaacagggtttctccatgttggttaggctggtctcgaactccggacctcagatgatctgcctgcctcggcctctcaaagtgctaggattacaggcaagagccaccactccctgagtatttttattactttttaacgatactatggcagtagacatttgaactcttgaatgattgttttctttaga

SEQ ID NO: 653927 - DNA, 634 bp, Homo sapiens
aaggcatctgctcagcttctggtaaggccacaggaagcttttaaaaggatttcatataataggacatgttcgccccttttttgtctctttcttgtttactctctgagcctttcacctctgccatagaataatgcagcaagaaggcctgtgtcacatgtcggcccctcagtattgaacttccggaagtgtgagccaatagagttttgttttttataaattacctagtctcaggaattgtggtatarcagcataaaatgaaccaagacacccttcctccacctttttgttctatttggatctacaacagattagatgatgtctacccacattggtgagggtggatcttactcagtcatctttgatctactgattcaaatgctaatcccttctggaaagacctcacatacgcattcagaaataatgttttacccgctatctggctattccttaacctagtcatgttgacatgtaaaagtaatcatcacagccaccattcagtgccctcactaagttcactaatattttgtattggaccttttgcatattaataataattattaaaccaagcttatataagagaacagagccatggcagtaaatacttcttaaatcatcatacagggttgatggttga

SEQ ID NO: 653928 - DNA, 560 bp, Homo sapiens
aatgattctgaaactctgaggtatggtaaaatcactggtggagtgaatgaaaatgcagattctagggatcattttgtagatgttcagattcagtaggtctggagcagggcaccgcaatatgtattttaacaagcactcatggtgattctgatgcaggtcattcccagaccacagaytgttgcagaggaggaattggcagatgtttgattaactatgaagggcaatcaagctgggaggagaggggaattgactgctgatggtaattggaaggttgggaaaggaccctgatggtagggagagttgatgaattctatttagataattgttattcatgtttatgtttgaagcttgggtgtgtggatttcagttagtattttctgtgtatttaaagctattgattagaagatatcctggaatggaaatgattaagcacttgtcctctatctccaaacactggaatggttctaggcacttacagctttggctagtttcaggcagagtttgaggtggaatagggaagtcaatattataagacccatgctgaagctattgtgtttaga

SEQ ID NO: 653929 - DNA, 544 bp, Homo sapiens
taaaatcactggtggagtgaatgaaaatgcagattctagggatcattttgtagatgttcagattcagtaggtctggagcagggcaccgcaatatgtattttaacaagcactcatggtgattctgatgcaggtcattcccagaccacagactgttgcagaggaggaatwggcagatgtttgattaactatgaagggcaatcaagctgggaggagaggggaattgactgctgatggtaattggaaggttgggaaaggaccctgatggtagggagagttgatgaattctatttagataattgttattcatgtttatgtttgaagcttgggtgtgtggatttcagttagtattttctgtgtatttaaagctattgattagaagatatcctggaatggaaatgattaagcacttgtcctctatctccaaacactggaatggttctaggcacttacagctttggctagtttcaggcagagtttgaggtggaatagggaagtcaatattataagacccatgctgaagctattgtgtttagaaatacctgga

SEQ ID NO: 653930 - DNA, 544 bp, Homo sapiens
taaaatcactggtggagtgaatgaaaatgcagattctagggatcattttgtagatgttcagattcagtaggtctggagcagggcaccgcaatatgtattttaacaagcactcatggtgattctgatgcaggtcattcccagaccacagactgttgcagaggaggaattggcagatgtttgattaactatgaagggcaatcaagctgggaggagaggggaattgactgctgatggtaattggaaggttgggaaaggaccctgatkgtagggagagttgatgaattctatttagataattgttattcatgtttatgtttgaagcttgggtgtgtggatttcagttagtattttctgtgtatttaaagctattgattagaagatatcctggaatggaaatgattaagcacttgtcctctatctccaaacactggaatggttctaggcacttacagctttggctagtttcaggcagagtttgaggtggaatagggaagtcaatattataagacccatgctgaagctattgtgtttagaaatacctgga

SEQ ID NO: 653931 - DNA, 560 bp, Homo sapiens
aatgattctgaaactctgaggtatggtaaaatcactggtggagtgaatgaaaatgcagattctagggatcattttgtagatgttcagattcagtaggtctggagcagggcaccgcaatatgtattttaacaagcactcatggtgattctgatgcaggtcattcccagaccacagactgttgcagaggaggaattggcagatgtttgattaactatgaagggcaatcaagctgggaggagaggggaattgactgctgatggtaattggaaggttgggaaaggaccctgatggtagggagagttgatgaattctatttagataattgttattcatgtttatgtttgaagcttgggtgtgtggatttcagttagtattttctgtgtatttaaagctattgattagaagatatcctggaatggaaatgattaagcacttgkcctctatctccaaacactggaatggttctaggcacttacagctttggctagtttcaggcagagtttgaggtggaatagggaagtcaatattataagacccatgctgaagctattgtgtttaga

SEQ ID NO: 653932 - DNA, 544 bp, Homo sapiens
taaaatcactggtggagtgaatgaaaatgcagattctagggatcattttgtagatgttcagattcagtaggtctggagcagggcaccgcaatatgtattttaacaagcactcatggtgattctgatgcaggtcattcccagaccacagactgttgcagaggaggaattggcagatgtttgattaactatgaagggcaatcaagctgggaggagaggggaattgactgctgatggtaattggaaggttgggaaaggaccctgatggtagggagagttgatgaattctatttagataattgttattcatgtttatgtttgaagcttgggtgtgtggatttcagttagtattttctgtgtatttaaagctattgattagaagatatcctggaatggaaatgattaagcacttgtcctctatctccaaacactggaatggttctaggcacttacagctttggctagtttcaggcagagtttgaggtggaatagggaagtcaatattataagasccatgctgaagctattgtgtttagaaatacctgga

SEQ ID NO: 653933 - DNA, 448 bp, Homo sapiens
ttgtcctaaaaagggttctcatacaggtgatttctggccccagtgatgttctgccttctgtcttcataaattttcctactayggagattttatatacataaaatcaatatgtagtctttatgcctggcttttttttaacttagaataatattcttaggggtcatctttttttgttagcatatatcggtaggtcactcctttttgctgaatagtattccattgcatggatataccacattttgtttactttttacccattcagagacatttggactatttccagtttttagctattatgaataatgccgctattaatattttctattcttgtatttcttttagtgcaggtctgctgattataaattatctgtccataaatattcttatctcactttcattatagaatatacagaattgtatgttgccagaaactttcagcgatgtaaag

SEQ ID NO: 653934 - DNA, 448 bp, Homo sapiens
ttgtcctaaaaagggttctcatacaggtgatttctggccccagtgatgttctgccttctgtcttcataaattttcctactacggagattttatatacataaaatcaatatgtagtctttatgcctggcttttttttaacttagaataatattcttaggggtcatctttttttgttagcatatatcrgtaggtcactcctttttgctgaatagtattccattgcatggatataccacattttgtttactttttacccattcagagacatttggactatttccagtttttagctattatgaataatgccgctattaatattttctattcttgtatttcttttagtgcaggtctgctgattataaattatctgtccataaatattcttatctcactttcattatagaatatacagaattgtatgttgccagaaactttcagcgatgtaaag

SEQ ID NO: 653935 - DNA, 448 bp, Homo sapiens
ttgtcctaaaaagggttctcatacaggtgatttctggccccagtgatgttctgccttctgtcttcataaattttcctactacggagattttatatacataaaatcaatatgtagtctttatgcctggcttttttttaacttagaataatattcttaggggtcatctttttttgttagcatatatcggtagktcactcctttttgctgaatagtattccattgcatggatataccacattttgtttactttttacccattcagagacatttggactatttccagtttttagctattatgaataatgccgctattaatattttctattcttgtatttcttttagtgcaggtctgctgattataaattatctgtccataaatattcttatctcactttcattatagaatatacagaattgtatgttgccagaaactttcagcgatgtaaag

SEQ ID NO: 653936 - DNA, 571 bp, Homo sapiens
cacccctgtggtaaacttctgcctggacatccaggcatttctatgcatcttctgaaatctaggtggaggttcccaaaccccaatcttgacttctgtgtactggaagctcaacatcaagtggaagctgccaaggcttgaggcttgcaccrtctgaagctacagcctgagctctacattggccccttttagccatgactggagtagctgggacacagggcatcaagtccctaggctgcacacagcatgggtacccttggcctagccaatgaaaccactttttcctcttaggcctccaggtctgtgattaaaggggctgacatgaagacctatggcatgccctgaagacattttccccattgtcttggggattaacattcagctccttgttacttttgcaaatttctgcagccagcttaaatttctcctcagaaaatgggatttttctcttctatcacattgtcaggctgcaaattttccaaacttttatgctctgcttctcttataaaaccgaatgtctttagcagcactcaagtcacctcttgaatgctttgctgcttagaaatttcttctg

SEQ ID NO: 653937 - DNA, 443 bp, Homo sapiens
ttctgtgtactggaagctcaacatcaagtggaagctgccaaggcttgaggcttgcaccatctgaagctacagcctgagctctacattggccccttttagccatgactggagtagctgggacacagggcatcaagtccctaggctgcacacagcatgggtacccttggcctagccaatraaaccactttttcctcttaggcctccaggtctgtgattaaaggggctgacatgaagacctatggcatgccctgaagacattttccccattgtcttggggattaacattcagctccttgttacttttgcaaatttctgcagccagcttaaatttctcctcagaaaatgggatttttctcttctatcacattgtcaggctgcaaattttccaaacttttatgctctgcttctcttataaaaccgaatgtctttagcagcactcaagt

SEQ ID NO: 653938 - DNA, 655 bp, Homo sapiens
ttcttgcttaccaagttgctcatttacttctcaaggctagctagctgcctggaatttctcttgaagaaactcaagagtttccttattttctgtgctttgaggagggcccaagtcctctaagatgggtccctgctttgtttcaaaatgagtatgaagaatgcgaggtatgaaaaactcataaggcccagaaaaatatgagaacaaatcctcagtcacccctcccatgctagcaccagtgtccctgggcaattgtttaaaggtattttatttcttccttgtagttttcaggctagctgataaattacctaaaatgcaattataagttgyacaaggtgaccctcactcattatctttatgttcctgaaatttttgatacaaaaataatgtatagccaatcaatagcttatgatcaacttaagaactgctccttctttttttctttaaaaagccacttgtggccaggcacagtgggtcacacctgtaatcccaggactttcggaggccaaggcgggtggatcacaaggtcaggagatagagatcatcctggctaacacagtgaaaccccctctctactaaaaatacaaaaaattagctgggcgtggtggggggcatctgtagtcccagctactcgggaggctgaggcaggagaatggtg

SEQ ID NO: 653939 - DNA, 533 bp, Homo sapiens
attttaaaaatatcctctggtagttggtgcaatataaaatgattttaaaattttcctaaataatgtcagaagaattggattaaaatattaaaaaccaccaatggtggttagctgacttaaaatagaagaaaatataactccttacttttcaggttcccaaatgtaaaccaaaaataaaattctaagcccctcaactgactaaacraccatctcttagccaaggggacccccagaataatcttgaaaactgagttcttagttgcgatgggatggggtgtcagacactcttgttatacccccacccttgctaatcatgattagcctttcttccctaagggcttaacaaaaaccaggcctttcaagagactccaccactgataccaaccaacagcctgacactacccttccttttttgcctgatatggtaccactgaccaacgtgttgttctgcccaatctatagagaatgtgcagtaagggattttgcatcttttgcttcaccttttgacatcatcagggtgaaaactccaccct

SEQ ID NO: 653940 - DNA, 603 bp, Homo sapiens
tacccttccttttttgcctgatatggtaccactgaccaacgtgttgttctgcccaatctatagagaatgtgcagtaagggattttgcatcttttgcttcaccttttgacatcatcagggtgaaaactccacccttggatcatgctaatgccactatttttttatacatgggacccatgaagaggcatgaagctcagttgtgcatgttcacatttcttcttcataaatattcatggttcctcctatagcttattaaatatgtatattcagctatcctgctcagcatatttgttccctttgcctcttcctcaaagtatctgtttttgacttctgaccaaaggctatgcttcccagtctgccagaatggccattctgccagctgcaatcctttatgagaaataaaattttcttttccaaatttatgaatgtcataatttttcagtcaatacatatttctctaatggagtctttasaactgacttttgagctttttacattaaattagccactctgcactaaagaatgaatgggaaggatgtttaaaaggtgtgaaagtgtcaactaaatgagaaaaatcaagccattaaaaagttaaagttagttt

SEQ ID NO: 653941 - DNA, 414 bp, Homo sapiens
gaggaagtgaacttgaggatagatcttgaaggcctagttcttttctagaactcgataaatgaaatagagccaatgggccatagaatccatatgcaaaactgtaaggacaggawgaagtgtggtttttgtaaaaaaactaaggaagtcagccaggctttagagaaaggttcaggagagggaattttcaacatggggcttgatgatttctgacctgccatgtatatccttgtttatatcaattagcctatggtaagattggtttcattatatagtgaattttgcttgaaatcacagtttccaagatcatattcaggatgttaggtgagaacttcctgtataagattttttttttttttttggcattgcctggttaacttataaagaccttggtaattgtctgtatttaatttatga

SEQ ID NO: 653942 - DNA, 566 bp, Homo sapiens
atggtattttataaagatgtttgcatatcttctttctgtttagccattgttaacattaggtatgtaatcatcaattttcaatgggtggatggaaaacattaaaaatccaggttcctggttgttttatcaaaaaagttaaaaaataacagttatagttcactttaataggtgaatgctaggtattcctgaggattagttggctctgagtatagtgtttatgaaacatgtacaaggttgttcacataacaagaacttaaaggtgtgaactttatgagctttggtgaacagtttaaacaatatatatatatataatatatattatatatatacagactgtaagaatgaacatgaataattctagcattgatggagagaaaacawaaaacttactgttgagatcctactgaatttttgcagggaatgtgaaatggcttccatgtatttttaatgtttttataattcatatttgttttagggattttggcaatagcgtagacacatctaaaaaaacacagaaacccacggtaacctaattagtatgctttaattactcttgggagtacaga

SEQ ID NO: 653943 - DNA, 616 bp, Homo sapiens
agaaacttgagattcatagtgtcaagaaagaaacaagtgtagtacttatgatgttaggacataggtttgctattagaacattgaagttatttacatttgacttgcctgtttctcatattacttttatcttgaggcattggcttttaattgcattggtaaaaatgcaaaatataaaarcctcaaattatgtaagattgtttagaggtgtatgtattttatgtgcatggttggttctacattccctgagggtagccagttgtatgtcttgtgcgttactggtgtcagaggccagtttttcatgttgtccagcatgcagtgggtcacatctttacttcagtgtattagtatttttaatttctacattaaaaattattgcaaatatggtggcttaaaacaacatctgtttattatctcaaagtctgtagatcggaagttggcatggtatggctgggtttttctgctcagtatctcacaaggctgaaatcaaggtgttggtcaggctgtatcctcctctgaagccctaattctcttccaagctcacacagcttttggcagaattcagtcccttgcaactctagtacagaggttcttgttttcttgcttgttgtaggaccca

SEQ ID NO: 653944 - DNA, 602 bp, Homo sapiens
gtgcagctggtgctcctgttggcagtctcttggggatgcaagggtttggcccagggctttggcccagtcttgccagatcaagtgggggtaatctcctgtccccatttatatgcagtactcagaggtttccagctgcttccttgccatttactcctggcttcatccctgtgaggttgatgggtaattagcatggattttatagccaccataggagagaaaaggaactaacccagcaaatatgaatttggtagaaaatttaatttgatgcttccttcttagcaacccacatacaatgcaaataattttcatctcctaacctgtggtggaattcaagttctttctgtttcaaataatggtttatcccaagggaagttttcctcattaacaacaaaaaatacaaaaatttgytggtgatctatgatgatatttattctatttcatttatttaaatagttatagttggagagaagaacaaaaagtatcaaatcttggatttctgtatgtcaagctactttatagattccatctgactttttgagagagaaagttaacagtgttcatcgagctaactatataattaaatgcttacccactcctttctc

SEQ ID NO: 653945 - DNA, 516 bp, Homo sapiens
tgaaaaagaacaaagttggaggtctcacactccctgatttcaaaacatattgcaaagcaacagtaatcaaaataatgtggaactggcacaaagtcaaacatacaggccaatggaatagggtccagaaataaattctcacatatatggccaaatcatctttagcaaaggtaccaagaccactcaataaggacaggacagtctctttaacaaayggtgctaggaaaactagatatgcacatgcaaaagaatgaagttggacccttatatattaaaaaactcaaagacctaaatgtaagactgacaactgtaaaactagatgaaaacacggggaaagtttcacaacattggatttggcaatgatttcttagatatgacacagaaattatgggcaacaaaagaaaaaaagaccattggaattacatcagacttaaaaatgtctgtgcatcaaaggacataatcaacagagtgaaaaggcaacctatgggataggagaaaatatttacaaatcatatattt

SEQ ID NO: 653946 - DNA, 552 bp, Homo sapiens
gaaaggccctaaattgggaagaagtgaagggatatcaattttaccttttatgtccttaattggattagggcacaaaggaggtagagggtgggttagatagtcactcccarcagggtgcagcagaggcagccagctttgaagtgtttacctaggatcagcagctgggtgctctcagtcagctctccatgaagattggccgccctgcaggagtacaggccctgatccgaggaggacacgtttgtgagcagcaaggagccttcgtgcagatggtgcggggagcccagtttgcttttattcctgaaccaagtgacttcagcttcaggcactcctaggaagaaaaaaaaaaaacaaaaaaccccactcatcagtcaaacacattcaggtgagcccagaggcatttatagcttcttgaatcccccttccctggggctgctctacagggacatcttctaccaggctttggccagattaaataatgtccagagcctggtaggataaggatatagacttcagggtgaccaaagaatcagaataaatgttgatacaagataa

SEQ ID NO: 653947 - DNA, 641 bp, Homo sapiens
atttgctgtcacactacagcaggctagaaaagatcatctcccgcaacctgaccaagcttctcaacaagaaagagctaaaaagccagaacacatggattctggaacctctctcctgacaacaccttggttttacaaccacagcagaaacattaattctgaaagtagaaaggaattaagcctttgacagttcagaaatagtaaagcagcagttcagattttctctcaagwgtcaggctagtataatggcaggcggtgtacacttgttaagatggggactgttggcattaaaggtatctcagtttgaatccccaccctggcactggtgggttactgattggctgtagggtagggaactggggggaacagaaactcttttctgatgtaatgatgtaatcgttcaggcatccaaacaaatgtgaccttaggcagatttcttaatctctatgagaccctttttctcataaaatggagttattaaatagtacctgcttcacaggatcattgttaaaaataagtgattgtgtttataaaatgtttgacttatagcaaatgttcaatgttatttctccgtttaacacactcaggatacgtttgcatgtctcagtacactccgatgttgaggtattctgaacatcagtatt

SEQ ID NO: 653948 - DNA, 574 bp, Homo sapiens
acaaatgaaaagtatgtatctttgagccaaaaaaaaaaaaaaaagctgacttagaagtgtttaataagtccaatatctggatttcctcagggacagtttctgttatttgcttttcttcctgtgtatggttcatattttcttgtttctttgcatatcttataattttttgttgaaaattacatttggacattttaaataataaatgatctttgaaataatgtggacattctaaataatataaaaatgtccaaatagtggagacttayaataaaataatttgacaactatgaaaatcacattttgccctctcttcagggtttgttggagtacttgtagttgtttcttcatttaatttcttttgtgaattaattctgcaaactctatttgatgtgtgtgactacctcagtagataattcagtctctagttggttagcttagttgttgctaatgactggacaaagatttctttacatgcctggaaccagtaaatctcctagtctttgccagaggattttgtgtgtgtgtgtcttggggcatgccttcaacactcagctgggtagttggcaactctgcc

SEQ ID NO: 653949 - DNA, 600 bp, Homo sapiens
ggggagctggggagtcccgggagggagaaggtagacctaggtggaaatcaagatcacgctttgtggaggcgctcgtggagttgagcctactacagtagcacagatgttccccgagagtgaacagaccaagccaaggtgaggaggtgggggcgcccgagaggcagacatgccacccgtggctctttgctcacccccacctgccggtgccagggtgtccctgccatttccagtcctggaaacctttgctttctgactcgacagtccccagcaggaaagagcaagtgtgaatcactaagtcctgaggtgggggttgtgggggcagtccttggaggcaagagaggaagcagttattgcttgtttgcacattgactccacccactctgtcctgcagctgtgacgtgtcctgttcccagggcacttctggcttcttctgccccagcacccatycttgccaaaatggaggtgtcttccaaaccccacagggctcctgcagctgcccccctggctggatggtatggagggtggggcctgtgggcatggggtgtgggtctggggagaattctgtgggtggtgctaagcagggctccaaggtgagtgagg

SEQ ID NO: 653950 - DNA, 567 bp, Homo sapiens
aggctggctaaaacaggctttctattgccattaggaaaccaaactcctttcatgatacagaaaaaaaaagtctggagggcaaaaccctacaaataccaatattgattgtccctgagtcacatgattacaagtgatttttattttcttctttacagtttgctttctcccaattttttaaaraacaataggcccataattaccttccattatcagaatatgtgaatgatgtcagaatattataatatcaataagcaaaaaaggcagctttgcaaatgaatatattaataaatctttacaagcatagctccctactctttaggatttatccaagtaaataaaacaatcttctttctttgctaggtgtaaatgctgggtaatttcacagctgacttttttaagattcctgaactttatttagtggaatgacttctagcagcacaaataagacaaatgataaattgactgttgaattattactcggggtggcttctagctgatccagcatgattctcaggttaatcagaaaggcccagtgaaggcaaaagaggggcaattttcaccttatct

SEQ ID NO: 653951 - DNA, 312 bp, Homo sapiens
ctgaaattataccagtacattttcctcttttgaaaaattgcagtaccatttttttcactttgtaacaatccccgtaatattaaattggatgtaatcttactacctgtttatgtgactgtggactggcacataaacaggtgataaatttttctgtagctccactttgcaatttcctttactcgggtgcccttctacttcacattcacacaatagggatgtttccttcatagcccacattatcawccatacgaggctgagctcctggcgcagttgctgacagctttattcaataacctattcatacctacctgg

SEQ ID NO: 653952 - DNA, 554 bp, Homo sapiens
aaaataacatatacactgccagtcaattggcataacattcctcttaaaatataggtctattctatgagcagctgatatggtttgtatctgtgtccctgcccaaatctcatgttgaatcgtaatctccaatgttggaggtggggcctagtaggagatgattagatcatgggggtgaatttctcgtgaatggtttagcctcatccacttggtgctgttccagtgataatgagtcagttcttgtgacatctggctgttaaaagtgtgtagcacctccccactctctctcttcctcccattctggccacatgaagtgtcaactcccccttcatcttctaccatgatgtaagcttcctgaggcctccccagaaaccgagcagatgttagcaccatgcttcctgtatagcctgcrgaaccgtgagccaattaaacctctttttttttaattaaattatgcaatctcaggtatttctttataataatgcaagaataatacagcaactgaccagattatctagctgtgactgtatattcttaaaatttcatatagggttaat

SEQ ID NO: 653953 - DNA, 603 bp, Homo sapiens
tgatcctgaccttgtgtatggcctgagatagcttggggttccagatatagatagtgttcagtagtcagtcagcaaagaatatttcaacaagcttggagaacggtacttagctcatactgaccacttgccctgtggccgaaagccaccaggtacacacctgtagttgaacaagttgggtttattacaagttgcagtgagacagcacacacagcttgggaactgcaggaagtctcagagtaagaagatgttgggaatgacctactaccaggcttgggctttggttgggtgattttcgggagggtctaaggaagcagaggttttctctagtcgggagttgccagaggccaggggtgattctrtgagggggtatctgaatacatctgtcatctctagggaggacagactagagggagaccaaagctggaactgggaaagatgcagcagttgcttacttagcaagagtggaagatgtgtgggatttagcatgatctggcctgagtggacattctcggaaattatttctgtccaactggagagcacgtggcttagctggaagcatcaggccagctcatgataacacggaggccgtgatgtgaggtccta

SEQ ID NO: 653954 - DNA, 541 bp, Homo sapiens
ttttaattgagaagaaaagctttgtctgatatattctttagtttaaaaagcaagctggagaatattatgtatggtaggatcaactttgtaatcctgttttatttgtgtgtgtgttttatactattttgtgcgttgttctctgtttaccccctacctcaaggtctttagtaatttcttgcttcatgagttttacagggcagaaaacagaagctgttagaagtcaataggtcttcctgtattgtgtaaaattccaratcactgaagagattacactagggcgtgcctttgagagtcagagaagagagagaatgccttatggtaacaagtagcaagggaaagcaagagatttccctatgactaaaatggagcaggaggcaggggcttagacaagataagagggaaaattcatattgctcaaggaagtagcaaacttcgatgagggtgaaacccgatgtgccccaagagaacaaggtacctatgcttgtcaaggctgccaatgccctgcctcaaacttggcacagcttcagcaaagccacctgac

SEQ ID NO: 653955 - DNA, 541 bp, Homo sapiens
ttttaattgagaagaaaagctttgtctgatatattctttagtttaaaaagcaagctggagaatattatgtatggtaggatcaactttgtaatcctgttttatttgtgtgtgtgttttatactattttgtgcgttgttctctgtttaccccctacctcaaggtctttagtaatttcttgcttcatgagttttacagggcagaaaacagaagctgttagaagtcaataggtcttcctgtattgtgtaaaattccagatcactgaagagattacactagggcgtgcctttgagagtcagagaagagagagaatgccttatggtaacaagtagcaagrgaaagcaagagatttccctatgactaaaatggagcaggaggcaggggcttagacaagataagagggaaaattcatattgctcaaggaagtagcaaacttcgatgagggtgaaacccgatgtgccccaagagaacaaggtacctatgcttgtcaaggctgccaatgccctgcctcaaacttggcacagcttcagcaaagccacctgac

SEQ ID NO: 653956 - DNA, 541 bp, Homo sapiens
ttttaattgagaagaaaagctttgtctgatatattctttagtttaaaaagcaagctggagaatattatgtatggtaggatcaactttgtaatcctgttttatttgtgtgtgtgttttatactattttgtgcgttgttctctgtttaccccctacctcaaggtctttagtaatttcttgcttcatgagttttacagggcagaaaacagaagctgttagaagtcaataggtcttcctgtattgtgtaaaattccagatcactgaagagattacactagggcgtgcctttgagagtcagagaagagagagaatgccttatggtaacaagtagcaagggaaagcaagagatttccctatgactaaaatggagcaggaggcaggggcttagacaagataagagggaaaattcatattgctcaaggaagtagcaaacttygatgagggtgaaacccgatgtgccccaagagaacaaggtacctatgcttgtcaaggctgccaatgccctgcctcaaacttggcacagcttcagcaaagccacctgac

SEQ ID NO: 653957 - DNA, 567 bp, Homo sapiens
ttttattcttctctttggtacacacaggtagggagcaggcaggtacatctggaactccaccaccttcaaaggaaactaagrcatttaaatgtatttccttcctagtgggagatgactttcctttttaccctctggctctacccacaggatttcctttttgtctgctgggtctacatcagatattattctgcattgcttccttgccccaatttcatacttttggatgtcccttagcaaatcattcataagtttggaaaaccattcttagaattcaaattgctctatacacatcttagaaaggaaagagctacttagccagtgtgtaacttcattcccagagtattgaaattcatcataatgtgtcttgatctggatctgttctcatttatcctgcttggcactcagtgggttccttttgattgaagaatttgattcttcctttagctcagagaaaaattattccattatttcttcatttcttttgtatatactatgcagatattggaccttctcaaactattatattgtctttttacatatttcttaaatttgccaccttttctagtt

SEQ ID NO: 653958 - DNA, 611 bp, Homo sapiens
gaggaattgtgttcagcaacacaatgcaaaaactacaaatccaggaataggaatccggatcaggaagcttcttactccagaatcttcttttgacatcatcaaagctggagtctgcacagtggagtcaggctgttcattctgccacaatccgactgcctcctaacacccacatcgctagcagtgacacagtggaatgctgaggcagaaaagttcttcttcgtgaccttgctggccagcaaaaatggcaaatgttaatagacacatsgatttttttttctcctttccatcttctccgcagcttttcagtaccactaattggaagaatctctttttctcatagagacgctaaggtggaaggaagtctgggaaatgtagtttttagcatttcagtcattactgtagaagaaaatgcactaagaaagaagtgggaatggaaagtgagtgccaatttatctcagagagtttgagaaagatttcattaacttgaagtcaaaagattcttgatacagacgtctctggcttaacttaggtgaatttctaaatgatggaatctcaaacattgtaacttagtgcaaacacttctacaaaatagaaaaagaatcaggaattat

SEQ ID NO: 653959 - DNA, 458 bp, Homo sapiens
cctgatgtctgctgagctaactatagaatttaaaataatttcttttatgcatatgtattttaaaataccaaaaaatcttaatcatcaaattcactaaatatgaaaattaataattattgaaaaatcaatttyactatatcttaaagcttcttacttgaagattataatgtgcaaaatatctaaattcaaccaaattaattattatgaagcagctttaattttcattcttggatttactgaactcaagaaagtatttggcaacctgtttatgagttatgtatattgtaattaaagctgtaaatgtattaataagcacatttataaaaattataatggtgtgtgtttagaatctttgattttgttaaccttaaagttgcaagaagagtaaaaacctcttgaaagtaccataactttataacttcattttattctttatttctttgtagtacttaagtaat

SEQ ID NO: 653960 - DNA, 458 bp, Homo sapiens
cctgatgtctgctgagctaactatagaatttaaaataatttcttttatgcatatgtattttaaaataccaaaaaatcttaatcatcaaattcactaaatatgaaaattaataattattgaaaaatcaatttcamtatatcttaaagcttcttacttgaagattataatgtgcaaaatatctaaattcaaccaaattaattattatgaagcagctttaattttcattcttggatttactgaactcaagaaagtatttggcaacctgtttatgagttatgtatattgtaattaaagctgtaaatgtattaataagcacatttataaaaattataatggtgtgtgtttagaatctttgattttgttaaccttaaagttgcaagaagagtaaaaacctcttgaaagtaccataactttataacttcattttattctttatttctttgtagtacttaagtaat

SEQ ID NO: 653961 - DNA, 252 bp, Homo sapiens
tgataagggggagttcccctgcacaagcactgttcatctgctgccatccatgtaagaygtgatttgctcctccttgccttccaccgtgattgtgaggctgccccagccacgtggaactgtaagtccaattcgacctctttcttttgtaaatttcccagtcttgggtatgtctttatcagcaatgtgacaacagactaatacatctgtcctctaccacatctccactcacaggccctgctggtgctggaatgc

SEQ ID NO: 653962 - DNA, 535 bp, Homo sapiens
ttcaactgtgagtattacataaaaattgcatctcataagatatccaaaagtagaaaatatgatcaaataaaatgtcttcttttttattctgtagcagaatgtctcaagctcaacactattgacatttggtcctgaktattctttgtcatgggggctgtaatgtgctttgtaggatgttaagtggcatccctggctacagtacagtttctcaacagtgacagccaaatatctccaaatattgccaaatgtccttgggaagggtggggggaggacaaagtcacccctggttgagaagccctgtcatatagatataactttttgtgcagcacagggtccttcattgaaatgagtgtaagtctctcaaaacctcagtttccttgcctataaaacaggataaataaaaaggaagaggactgaatgtgtgagggcatattctataaactattcagtgctaaagagaatgaattagttatgataaaggtacggctctgccttggacagagcaggagagaaacttagggaagtggtaggacgt

SEQ ID NO: 653963 - DNA, 608 bp, Homo sapiens
ataaaaattgtatggctaattaagaactgcttattgtagcaaacctcacccccaaattctataaactacagaatatccatacaaaaaatggatagatgtattaaggggtgtgcataatgtggattatcatggcactctctttaaatgaattagaactgtatgaattagagttatgtgcattggcttgaagagttattgtgaaaacagcaagttgcagaagattgttatatgatgttccatctttataaaagaaaaaatgaaaaatacaagataagaaaggagggcggacacaaaagaaaaaagtgaaggagacacagaaggaggaagggaggcagatgcctggtgttcttatccaaatccaccgccccactcctcttagtcctccccagcagagcctctacrcatttggaatattgtatcagtcaggattccctcaggaaaacagatcttctagatagttgaagcagaaccacggtgtgacagtgaattagttgtaaggatgatagacgaagccaagagatcaaatagaggaagtaaagtaaccagaggttagcaaaaaaggaaaccaactctcctctcctccccaggactacagagacacaaggagg

SEQ ID NO: 653964 - DNA, 620 bp, Homo sapiens
ataagctggcatcctgctttgtaagtcaatgctctgtgcattggactggcataggtcagcttggcagggcctactatgtccaccaagttccatgagcagaagagaataaaaccaggacaagacgtgcaagaagtgctattacccagctgcttactgacaatggttgcattttactgtggttttctgtgctgataaaaatagttaactgcttattgagttgtcaaatctgttgctcttcccttttgargaaaacgaaggcccagagaaaacctgcccaaacccattttctactaagtgtgggccaacatgggagcccacctctctctgtggtcccttcacttatagcaccgcctctctgctttctgcctgagggatggctccagcagaacccaggctggtgaacaggtgtcaccgtcctcagccagctctgaccactggagggagacgatcttcaaaaagattctgaaaaggattctatcatcaagtagcagtggtttctgtgggtcctatttggagactgggggcaaaactgccacttcattggccatctcctaccaatcgctcgttctggacctggttactaaaaagtggtggctttaaagcaatacaaccagaggaag

SEQ ID NO: 653965 - DNA, 578 bp, Homo sapiens
gctttttggcattggcagccattgttttgtatatcagaggccatctgaagtcatgctcgtgagctggaacctctttgtcttaattcattcctaacaccctgacttgtattctcattttctcattgtttccctaactaattatttgagccaagaacctaaaactactaaatagtatataggtcaataattattaacccctcaaagtcaagtcaccttatttgcacatttccttatctaaatgcctatgtttagttcctgctcaaaggagcatgtgattaacagagtgattcatagtggttcaagacctattctgacctgagttcaaatcccagctctgccacttactaaatttgggtgttgggaaagataagtacatagatccatctttatcttctccatgcctctgctttctcatctataaaatgaggaagacaacaaggtaccaacttaggagggtgttgtgtsgattaaactttaatatggtaaaggattttcactaaagcctgacagagggtatttaacagattttagctatttttattttgaaatttctattttaatttatttgaaattttatt

SEQ ID NO: 653966 - DNA, 565 bp, Homo sapiens
tttattctgcaaatcaaagttagcaaggtaaacaaaaatccccgtggatacgtatctgccatatasagacatcattatgaacatccttctgagaagttctcccttctgaccctgacatggaagggtgaactttttggcctggcagatgatggatttcgtgcaatgtgcacaaggagaagcatatgtgcattaaaccgtttcaccagcataatttatagcaatggtcgatggctggttctaccttctagctcttctggatttctgattgggtgtttatcctcattttttttctgagcaagttgaggaggtcacgtaataagataaggagagtaatggcatgtcacactttagtccaaaggagactttgattctggagtccctttataaactctctctttttcagtttcttctaagttgccaatgagagtattatgacaacttctttggtttttaagagaagaattttcattctcaaggtaaaaatacattgttatcaccaaatataaaattttttactctgaactaaacctgaactgtcaaatggatacatcaatgtaagcaattt

SEQ ID NO: 653967 - DNA, 565 bp, Homo sapiens
tttattctgcaaatcaaagttagcaaggtaaacaaaaatccccgtggatacgtatctgccatatagagacatcattatgaacatccttctgagaagttctcccttctgaccctgacatggaagggtgaactttttggcctggcagatgatggatttcgtgcaatgtgcacaaggagaagcatatgtgcattaaaccgtttcaccagcataatttatagcaatggtcgatggctggttctaccttctagctcttctggatttctgattgggtgtttatcctcattttttttctgagcaagttgaggaggtcacgtaataagataaggagagtaatggcatgtcacactttagtccaaaggagactttgattctggagtccctttataaactctctctttttcagtttcttctaagttgccaatgagagtattatgacaacttctttggtttttaagagaagaattttcattctcaaggtaaaaatacattgttatcaccaaatataaaattttttactctgaactaaacctgaactrtcaaatggatacatcaatgtaagcaattt

SEQ ID NO: 653968 - DNA, 451 bp, Homo sapiens
gaggctaatatagtaacagaaattagtatagatttccatgcctagagccaaaggaaattatttagggcttagaagtaatatctcaagaggtacaatctgaactcatgataaatctgcagggcctgtgtctctctgagtctgcaggatgccacgtaacttctccagtactgtgatcttcttgcacagccaaactgaggtaatgctagaaagagaaatctatgtattgctgctcaygtattttccacttccaaggtgatatctatttcagcagagaattcaatacagaagcccacgcgtgattttaaaaaaatctgttgacttcattcatatcaaacctgttatgcaaactttgaactgctaagatttgaggcacaattttgcaattaaggtaactgatatgtattaacagaaatgctcagtgagctccattttctctgagataattctggga

SEQ ID NO: 653969 - DNA, 642 bp, Homo sapiens
aaaaagttacgtttctaaaagtaacactattatacaccagtattagattataggcctgtgcattagtttcaagttcttgttatctacctattgactagactaaatcctaaattcttctagcttcctcctatccaagtttcttccatggaattattaaaaataggaactgctctgtttctaaagccctatcaccttaagttagttttaaagaacaagtcttatgcatgatgtacaagccacacagaaagttcatcaggctgtttggttccataaccagcgacattcagactgcaaaccaggacaagaagttgatgacttcacgatgcaggcagcttttctcaagacgtagagtaagactccataccaraataagactcttaccccttgtaatgttaccttttcaatgacagaataatggtattattaaaattttataatctgtagcttctgctggtaactcgacagaatctgacctaagagatccgctacttcacgtgtcacgtgaaggatatcttggcaaaggatatcagaatctgacttaagagatcctctactacaatttggagtaactccctcaatatgcacataatttactatgatgtgcatattcccattgcaatgtcccattcctgaacaaacatc

SEQ ID NO: 653970 - DNA, 479 bp, Homo sapiens
ctgaattctcagaaaactcccttggaggggagtacagagcagcaacattttctgaaagtgctgcattggcccaataaaagaagttcagttatgatttctttctgtatcttacttagctcaaatattttcacttgaaaattatttttatactgactctggaggtccaagtgggtcccacaaaactattactgttttcaaatgcacataacygaaagagcagggcacaatgggtaatgaacattcattgaccttcatgagtttctacattataaacacagatttatcctcatggtttgactgatgaccctgtttaaaccacattgtgagatgggagtgggggtagaggaatctcacagcactagcaagtatggaaaaggaatataacttcaccaacaatactacaaaaactcacaatggatgagggtggagtcacatttcatatttatctctccataaatttgattgacatactcatgcta

SEQ ID NO: 653971 - DNA, 590 bp, Homo sapiens
gctgattcttcaaatataaaaaatgtaaacataaactctccctcccactcgccacccaagggtaacaatgtgacaagggattatgtattgacatgtacatagcagatgttggacaatgattaattaaatgtgaataattggcattgtaaatgttacttatctctcartgaaacaaaatataacacttcaaccctgacaaaagtcattttgctctgattttgtgggttttatttaaataactgtcatttgttttcttcttacttttttctcctctcctccctcttattccccttggtaatttagggtactctgtcatggtctcaggtgtttgtgtctgtcgggacccttggccactccaagtctgctgtagagcaaaccaaattgtttctgagtgccacaagggacatgcctctcttaataaaacagaaaacagcatcctccaaggtttcagctaaaaagaggctgggaaagaatggctggctaacacagctgaatcttttccctccaaaaatagatgtagtctcatacatttcctgaaaaataaaatggactgtattagtctgttcttgcactgctgtaaagaaatacct

SEQ ID NO: 653972 - DNA, 579 bp, Homo sapiens
tttgggagttccattgtcttccccatgggtcttggctgaaggcagtgggacatagaggatgcctgccaatgtctcagctctctttgattccttgatggctccctctacctctcctcttgtcctaaacatcttttacctagtttgagcaaaggttagatactgccttatcatatattcttccacatgttttctttttgcctgaaaccctaggtttttgatattctaaagccaggaattttattccctctatcagttgcattttttcgtgacgttgtgtggtttagatgcctgacctgggaaagggtcatggaatatagggatctatagaaatacaggsgcaatttatctgttaatattttaaaatatttctgtcacctatttcctcttctattaagctttgttctgggcaccctaaataaatgaatataatatacacatatacatacacacacacacatacagaaagagagagagagagagaaaatgtttatataccaagttaatatgatcatttatccttggaggtaatgcattaaattccttcctaatacaagaatctctcttttcattcaccttgta

SEQ ID NO: 653973 - DNA, 235 bp, Homo sapiens
attacattccactcgggttgaatccattcctttccattccaatccattccattcctttccaatccattccattccattcaattccacytggattcaatctattctttccattccattccgttgtgttccattgcagtccattgcattagataccattccattccactcgggatgattcctttcaattccattatattctgttcaattccattgcattccattccattccattcca

SEQ ID NO: 653974 - DNA, 235 bp, Homo sapiens
attacattccactcgggttgaatccattcctttccattccaatccattccattcctttccaatccattccattccattcaattccacctggattcaatctattctttccattccattccgttgtgttccattgcagtccattgcattagataccattccattccactcgggatgattccwttcaattccattatattctgttcaattccattgcattccattccattccattcca

SEQ ID NO: 653975 - DNA, 235 bp, Homo sapiens
attacattccactcgggttgaatccattcctttccattccaatccattccattcctttccaatccattccattccattcaattccacctggattcaatctattctttccattccattccgttgtgttccattgcagtccattgcattagataccattccattccactcgggatgattcctttcaattccattatattcygttcaattccattgcattccattccattccattcca

SEQ ID NO: 653976 - DNA, 235 bp, Homo sapiens
attacattccactcgggttgaatccattcctttccattccaatccattccattcctttccaatccattccattccattcaattccacctggattcaatctattctttccattccattccgttgtgttccattgcagtccattgcattagataccattccattccactcgggatgattcctttcaattccattatattctgttcaattccattscattccattccattccattcca

SEQ ID NO: 653977 - DNA, 606 bp, Homo sapiens
tactgcctctatgggttccacctatgtgggaagggcatagctgaacaaaaggcagcagaaacttctgcagacttaaatgtccctgtctgacagctctgaagagagcagtgattctctcakcacagcgttggagctctgagaacagacagactgcctcctcaagtgggtccctgaccccgtgtagcctaactgggagacacctcccagtaagggtcgactgacacctcatacaggcaggtgtccctctgagacaaagcttccagaggaaagatcaggaagcaatatttgctattctgcaatagttgctgttctgcagcctccgctggtgatacccaggcaaacagggtctggaatggacctccaggaaactccaacagaccttcagctgagggaccagactgtcagaaggaaaactaacaaacagaaaagaatagtatcaacattaacaaaaaggacatttacaccaaaaccccatctgtaggtcaccaatatcaaacaacaaaggtagataaaaccacagagatggggagaaaccagagcagaaaagctgaaaattctaaaaaccagagcacctcttctcctccaaaggactacagctccttgcca

SEQ ID NO: 653978 - DNA, 437 bp, Homo sapiens
gaattcctatggagatcaacatggcaattataatgcttgtgttcatcatggaaactgtcttcaaccagttttgcatgcatgtagtgctacaaacagaataaacatgcagtgtagatttcaaattgtggccacgttggagaaacagaatttataaactgtagctcctgctttttccctgctctttcttttccagaaggtatatcaacttcattctccctgcaaggcccatggagccaatggcagacaccattggctgcaatttcaagaggctccaaacatttctgagcttaagcaaagttgtagcagagttcaagtatccttattgctcctgcaacactaataccagttacccaaggtgaggagaggaggggacaggaaataaatatctgttgaggacagacrggaaaccaagcactgtactctgtcatccaatcctg

SEQ ID NO: 653979 - DNA, 645 bp, Homo sapiens
tctttacacacaaggaaataaaccctaccagtagcacatataaaaattagttctcaagttcaatgggtatcagcagtataaaatagctgctcttgaaactatttaaggttaaattaaagaagtataatgttaggctccaggcaggagatagctttgctttatgcattctggcaaaaccatgccaggtttcagatagtgcaatttaaaggggatttggacaaatataaacagatcaagagaagaaaaatcatgttatgtgtggtctccaaattatgccatatgagggaatttagtctgaaatgactagactcaggggacaaacatgaaatatgtgaattatcaggacatgaactgggtcagatgactcagtgtaacaactaycttaaagctggtggaggggaaatacagactgactgcttaataggcacagatttcattttgggttgatggaaaagttctggaaatagtgatgatggttgcacaacattgtgaatgtgtttaatgccactgaaatatatactttaaaactgtaaaagtcatttctgttgcatatactttactgcaattaaaaaatggttaaatgataaatttgacaataggtgtattttgccaaaataaaaattagtgtaactacctcaataaggc

SEQ ID NO: 653980 - DNA, 554 bp, Homo sapiens
aacaaacaatcccaaaactagcagaagacacaaaataaccaaaccagagctgaaatgmattaaatcgagatgtgaaaaaccatgcaaaagatcaatgaaacaagaagttggttctttgaacaaataaaactgatagaccactagctagactattaagaaaaaaagagagaagatccaaataagcaaagtcagaaatgccaaaggaaatgttaccaccaatcccacagaaatttagaaaaaaccgtcacagactaatacaaatatctctataaacacaagatagaaaacctagaaaaaaatggataaattcctgataacatgctatctccctagatggaacaaggaaggtatggaatccctgaacagaccaataactagttccacaattgaatgagtaataaaaagcctaccaaccagaaaagcccaaaccagatggattcatgttcaaattctaccagatatagaaagaggagccagtatcattcccactgaaactattccaaaaaatcaaagaggagggactcctcttgaacttatcctatgagtccaaaatt

SEQ ID NO: 653981 - DNA, 554 bp, Homo sapiens
aacaaacaatcccaaaactagcagaagacacaaaataaccaaaccagagctgaaatgaattaaatcgagatgtgaaaaaccatgcaaaagatcaatgaaacaagaagttggttctttgaacaaataaaactgatagaccactagctagactattaagaaaaaaagagagaagatccaaataagcaaagtcagaaatgccaaaggaaatgttaccaccaatcccacagaaatttagaaaaaaccgtcacagactaatacaaatatctctataaacacaagatagaaaacctagaaaaaaatggataaattcctgataacatgctatctccctagatggaacaaggaaggtatggaatccctgaacagaccaataactagttccacaattgaatgagtaataaaaagcctaccaaccagaaawgcccaaaccagatggattcatgttcaaattctaccagatatagaaagaggagccagtatcattcccactgaaactattccaaaaaatcaaagaggagggactcctcttgaacttatcctatgagtccaaaatt

SEQ ID NO: 653982 - DNA, 512 bp, Homo sapiens
tgaggtcaggagttcgagaccagcctggccaaaatggtgaaactctgtctctactaaaaatacaaaaaaattagccaggtttggtggtatgcgcctgtaaaccccaactactcgggagctgaggcaggagagtcgcttgaacccaggaggtgggggttgcagtgagccgagattgcgccactgcacttccagcccaggtgacagagcaagactctgtctcaaagaaaaaaatatacatcttttcatagatgttttcatcttttatgacgtagacatttttgaagaatacagttttgactttttttaatagagtgaccccattttaggtttgtctgatgttttctcatattgaagttttgcatttccagctgaaatgtcacataarggatatcgtgtccccatgacatcacatctggaggcacacagatgcatctgcacctcactggtaatggtaattttcaccatctggtgaaagtatggtccagtttctccacagtatagttactatattt

SEQ ID NO: 653983 - DNA, 583 bp, Homo sapiens
tctgtcgttatagctgaatacaaatacgattactcttttggttgacttattgggcaaatcagagtgcgtggttgaacctgtggtttaccacatagtcaaacgtgaaatcagcttagagcattgactgggcctcgccctggycaatttgatcccattgtatatgcatgcttaagctgagaagagtccaggaaatgaagatcatgtgtgtttgcgcaaatattctgtgaaaccctgggcaacaacagagggtcacatccatcctgtgagaaacagcaaagtcatatatgcccagtgccaggcatgcttttgggaggcttcgtttaatcagtccaaaaaacttagttcagaaagcaaatacaatgagttatttggaactgcgatagggcctaggaaattgctggtctgtaatcacgagccaagaagcatttgcatcatgtgcctgtaatgtatgatctatgctgaatgttctgccaacattttcagggcgataagtcattttacaaccctgaatgtgactcagaacgttggaaagcactggtgttttgttttgttctgtgttcctccccattcctttctgtcccaa

SEQ ID NO: 653984 - DNA, 583 bp, Homo sapiens
tctgtcgttatagctgaatacaaatacgattactcttttggttgacttattgggcaaatcagagtgcgtggttgaacctgtggtttaccacatagtcaaacgtgaaatcagcttagagcattgactgggcctcgccctggccaatttgatcccattgtatatrcatgcttaagctgagaagagtccaggaaatgaagatcatgtgtgtttgcgcaaatattctgtgaaaccctgggcaacaacagagggtcacatccatcctgtgagaaacagcaaagtcatatatgcccagtgccaggcatgcttttgggaggcttcgtttaatcagtccaaaaaacttagttcagaaagcaaatacaatgagttatttggaactgcgatagggcctaggaaattgctggtctgtaatcacgagccaagaagcatttgcatcatgtgcctgtaatgtatgatctatgctgaatgttctgccaacattttcagggcgataagtcattttacaaccctgaatgtgactcagaacgttggaaagcactggtgttttgttttgttctgtgttcctccccattcctttctgtcccaa

SEQ ID NO: 653985 - DNA, 583 bp, Homo sapiens
tctgtcgttatagctgaatacaaatacgattactcttttggttgacttattgggcaaatcagagtgcgtggttgaacctgtggtttaccacatagtcaaacgtgaaatcagcttagagcattgactgggcctcgccctggccaatttgatcccattgtatatgcatgcttaagctgagaagagtccaggaaatgaagatcatgtgtgyttgcgcaaatattctgtgaaaccctgggcaacaacagagggtcacatccatcctgtgagaaacagcaaagtcatatatgcccagtgccaggcatgcttttgggaggcttcgtttaatcagtccaaaaaacttagttcagaaagcaaatacaatgagttatttggaactgcgatagggcctaggaaattgctggtctgtaatcacgagccaagaagcatttgcatcatgtgcctgtaatgtatgatctatgctgaatgttctgccaacattttcagggcgataagtcattttacaaccctgaatgtgactcagaacgttggaaagcactggtgttttgttttgttctgtgttcctccccattcctttctgtcccaa

SEQ ID NO: 653986 - DNA, 583 bp, Homo sapiens
tctgtcgttatagctgaatacaaatacgattactcttttggttgacttattgggcaaatcagagtgcgtggttgaacctgtggtttaccacatagtcaaacgtgaaatcagcttagagcattgactgggcctcgccctggccaatttgatcccattgtatatgcatgcttaagctgagaagagtccaggaaatgaagatcatgtgtgtttgcgcaaatattctgtgaaaccctgggcaacaacagagggtcacatccrtcctgtgagaaacagcaaagtcatatatgcccagtgccaggcatgcttttgggaggcttcgtttaatcagtccaaaaaacttagttcagaaagcaaatacaatgagttatttggaactgcgatagggcctaggaaattgctggtctgtaatcacgagccaagaagcatttgcatcatgtgcctgtaatgtatgatctatgctgaatgttctgccaacattttcagggcgataagtcattttacaaccctgaatgtgactcagaacgttggaaagcactggtgttttgttttgttctgtgttcctccccattcctttctgtcccaa

SEQ ID NO: 653987 - DNA, 625 bp, Homo sapiens
taagaaatgctgtatcgccaacactcttaatggcacagaggacaataatgtataaaaacatggacaatgaatgactcaatgtgaaattttagaaatacttcagcctgtaactgaggtaatggtacataaatccaaatatcttaacacatcatccataagctttacagattaacaagaacaacaacaacaaaygtggggaaaacaaaatctacacctacagcataactagaagaacactacaaaactcagttgtctataaatagaaaaatgaaaactgtaatttccaatggagcaatttctcaatctcctaccccaacctttatatgcagtagagtccagaaaaaacttggggaaggaagaaagaaaatggagagcctaagattaaattaaaatcattcttacaatgaggaagcccattctttacgtaaatattcaaacagtcctagtagatcagagcactgactataggcaagtgccatgctaagtgaaagaggaagggggaagggccctttagaaattaggtagaaaaaaaaaagcaaagggggaaatttaagatcatgcaggaaataaaattctaagaacctacaaccacactcccaccaccctgaaaacattcattaaagaa

SEQ ID NO: 653988 - DNA, 625 bp, Homo sapiens
ttcaaaacctacttgaagtggcttacaagttttttaaggtagaaccaccaaaattaacataacaagagtctgtttgataataatggatatagatgtatcagaaacataaaacaagttagttagttagcttatgttcccaatattatagtgatgtgatctttttaaattagaaacctattgagaacactgatagctttaaataaaatttttaagcacataaagataattttttcacatggtccaaatcacttctgaggattattttatgtggcagatatttttacatakatatttgaacagttgtccagagtagataatagattattggagaaaaatgaatcaagtttcaaaattttattatgtcccatgtcccattcctctacctaccatacactgtccaatacacacacacacacacacacacacacacgtgcatgtacacacatacatcatggttgaaatatacttcttaattttcatgtctagcttttaatagctttaaaaagagaatatactttgcaaaattataatttaaaaatcaaaggatagcctgcaaagctttcagaaagtaaatatgagagaaatatctggctcctgtacttagctaagttgccaaatagactag

SEQ ID NO: 653989 - DNA, 649 bp, Homo sapiens
ctctggtctgatgtttttcatcagttttggaaaatattatcagccattgtttctcaattactacttcttaccaattttttctcccttttctccttctgcagctccagttacgtgtgtgttagatttttgcactatgatctttgcatcagtatggatatttttttctaattaatcttccagcccacaaattctctctgcagctgtgtctcatgttctattaaagtcaccttaattttaattattgtatttaaaaatttctagagtgtctattctttttcttactcttttcacttctcttatgagattttaawtttttttcatttaatttctggcatattaatgacaattaattcaagatatgttttctaacttcaacattcagatctcccataggtctgttctgtgttggtttttatcccttagtttgtggtcagtttctttcttttctcccttagtagacattaatttcagggcacgtatggtaactttctaggttttatataacaaaataccacagtcttggtggcttaaacaacagaaatttattttctcacagttctggaagctagacattcaaggtcaagtaggtttgatttctcctgaggcctctctccttgcctggcagatggctgccttcttattgtgtcct

SEQ ID NO: 653990 - DNA, 649 bp, Homo sapiens
ctctggtctgatgtttttcatcagttttggaaaatattatcagccattgtttctcaattactacttcttaccaattttttctcccttttctccttctgcagctccagttacgtgtgtgttagatttttgcactatgatctttgcatcagtatggatatttttttctaattaatcttccagcccacaaattctctctgcagctgtgtctcatgttctattaaagtcaccttaattttaattattgtatttaaaaatttctagagtgtctattctttttcttactcttttcacttctcttatgagattttaaatttttttcatttaatttctggcatattaatgacaattaattcaagatatgttttctaacttcaacattcrgatctcccataggtctgttctgtgttggtttttatcccttagtttgtggtcagtttctttcttttctcccttagtagacattaatttcagggcacgtatggtaactttctaggttttatataacaaaataccacagtcttggtggcttaaacaacagaaatttattttctcacagttctggaagctagacattcaaggtcaagtaggtttgatttctcctgaggcctctctccttgcctggcagatggctgccttcttattgtgtcct

SEQ ID NO: 653991 - DNA, 599 bp, Homo sapiens
tgcttgagtgagttaaggcccccaaatgtccatggagtctgacagctagaataggattgctgcattgggggaacactgggcactagcattaatggtggggaagaggtgcacattaaatgtggattaagggtgaatggaagaaaaccaagtgaagacagaggtaagcaactcctccaagaatttttttttttttttgatggattctcgctctgtcgccaggctggagtgcagtggtgtgaccttggctcactgcaaactctgcctcctcggttcaagtgattgtcctgcctcagcctcccgagtagctgggactacaggcaygtgccaccacacctggctaatttttgtatttttagtagagacggggtttcaccatgttagctaggatggtgtcaatctcctgacctcttgctgtgcccaccttggcctcccaaagtgctgggattacaggtgtgagccaccgtgcctggccccaagaacttttaccatggggaaaaccaaaacaacagggatgcgaacagttttttttttccttgcaaaatgacacacaggtgtaaacatgtttaaatgctgagagaaaagagtcagtggtgaaagaa

SEQ ID NO: 653992 - DNA, 599 bp, Homo sapiens
tgcttgagtgagttaaggcccccaaatgtccatggagtctgacagctagaataggattgctgcattgggggaacactgggcactagcattaatggtggggaagaggtgcacattaaatgtggattaagggtgaatggaagaaaaccaagtgaagacagaggtaagcaactcctccaagaatttttttttttttttgatggattctcgctctgtcgccaggctggagtgcagtggtgtgaccttggctcactgcaaactctgcctcctcggttcaagtgattgtcctgcctcagcctcccgagtagctgggactacaggcacgtgccaccacacctggctaattwttgtatttttagtagagacggggtttcaccatgttagctaggatggtgtcaatctcctgacctcttgctgtgcccaccttggcctcccaaagtgctgggattacaggtgtgagccaccgtgcctggccccaagaacttttaccatggggaaaaccaaaacaacagggatgcgaacagttttttttttccttgcaaaatgacacacaggtgtaaacatgtttaaatgctgagagaaaagagtcagtggtgaaagaa

SEQ ID NO: 653993 - DNA, 481 bp, Homo sapiens
gggaagggaagtctgagtgcatgtgtagacgtgcacgtacacgttcacatgcacacagactgtgtaaatgctgttgaaccgggagctcagtaggcagtatsggggggtagatctttagcggggatccaagaccacacaggcaggatgtcaatcaaggtgggctgaacttaggtaggagagaccacagaagaacatgttatcaaatagagaccctcactgagagggcaggcaccaggcatggcctgggcatacatgtgggcccagcagctagaaccatggggccgaggccctcagtaggccatcacgctgcacacctccagggcaccactgcatggaagtctgtgtgatggagtccttattttgcagtgcactgcctgcacagctgtacgaggccctaaaaccctgaccagtgtgggatcagatagccgcagcagtggggagtggaggaaaatatgaaatgacacatgtaaacacacgccaa

SEQ ID NO: 653994 - DNA, 367 bp, Homo sapiens
tgcaggaataaggtggtagctcattgtggttttaacttgcattttcctcataattagtgatgttgagcattttttcatatgtttgttggctgtttgtrtatcttcttttgacaattgtctattcatattctttgcccactttttgatgggagtattttttcttgttgatttgtttgagttccttgtagattctggatattaatcctttgtcagatgcatagtttacaaatattttctctcattctgtgggttgtctgtttacaacactgaatacttcttttgctatgcagaatctttttggtttaattaggtcccatttatttttgtttttgttgcatttgcttttgagttcttagtcatgaattct

SEQ ID NO: 653995 - DNA, 610 bp, Homo sapiens
tttttcaatgcaattttgtaaagatggacctcatgtaaatctgtcacggtttttctggttcttttgwaatttttcaccatagttggatgaaggtatctcttgaacctattcaaatgtactgcacatattctggataattccatgttagacactctagctatgcacaggcttctcagacttcacatcaatgtcacacatagaaaataaaaatatgtggcacaccagggtaaatttgaggaattttagggacatcttacatgggcctaggtgaaaataatcattgtattttctttacattatatagctatcataaaactaccaagtgaaaggaatgataataaacgttgtttctacaaaacttacaaaataaaatgttttaaaattgtttaaaaagtggacatgggaggcataaaatgaggttagagtgatgcaatgtgagaaggactcaatccatccttgctggcattcaagatgggggaaggggccatgaactaagaaacatagatggcctccaggcattggaaagggcaaggaaacaaattctccctgaaggcccttgagaaaggaatgaagcccagctaacgctgtgattttagcacagcaagacctg

SEQ ID NO: 653996 - DNA, 610 bp, Homo sapiens
tttttcaatgcaattttgtaaagatggacctcatgtaaatctgtcacggtttttctggttcttttgaaatttttcaccatagttggatgaaggtatctcttgaacctattcaaatgtactgcacatattctggataattccatgttagacactctagctatgcacaggcttctcagacttcacatcaatgtcacacatagaaaataaaaatatgtggcacaccagggtaaatttraggaattttagggacatcttacatgggcctaggtgaaaataatcattgtattttctttacattatatagctatcataaaactaccaagtgaaaggaatgataataaacgttgtttctacaaaacttacaaaataaaatgttttaaaattgtttaaaaagtggacatgggaggcataaaatgaggttagagtgatgcaatgtgagaaggactcaatccatccttgctggcattcaagatgggggaaggggccatgaactaagaaacatagatggcctccaggcattggaaagggcaaggaaacaaattctccctgaaggcccttgagaaaggaatgaagcccagctaacgctgtgattttagcacagcaagacctg

SEQ ID NO: 653997 - DNA, 610 bp, Homo sapiens
tttttcaatgcaattttgtaaagatggacctcatgtaaatctgtcacggtttttctggttcttttgaaatttttcaccatagttggatgaaggtatctcttgaacctattcaaatgtactgcacatattctggataattccatgttagacactctagctatgcacaggcttctcagacttcacatcaatgtcacacatagaaaataaaaatatgtggcacaccagggtaaatttgaggaattttagggacatcttacatgggcctaggtgaaaataatcattgtattttctttacattatatagctatcataaaactaccaagtgaaaggaatgataataaacgttgtttctacaaaacttacaaaataaaatgttttaaaattgtttaaaaagtggacatgggaggcataaaatgaggttagagtgatgcaatgtgagaaggactcaatccatccttgctggcattcaagatgggggaaggggccatgaactaagaaacayagatggcctccaggcattggaaagggcaaggaaacaaattctccctgaaggcccttgagaaaggaatgaagcccagctaacgctgtgattttagcacagcaagacctg

SEQ ID NO: 653998 - DNA, 589 bp, Homo sapiens
caagattttgtagtttgtagaactgataatgttagatgttctccataaattcacgaggcttagtaggaaagtacgtagaatttttagaacttaaacagactttagaggtactactttaattcagccccctcatcaaatgaggaaactctgtaggtaagttgaatgaataattcagctaagattctttatctttgtgtaaaatgtagatacaactttgcaaaagaaagagctacttaatcagttttcttacatttttaaaacactgtaacgtttttaattgattctcactgctaatgaartcaaacttgctatttatcaagttagccttgaactttttattattaccaatactcctgatgctcagttcactctaacagtatattatacatatttttggtctgttccacctgaaattataactggccatcatagcttacagatttctatacagcaacagaatatgcaagtagccttttattgttagttcaggtaactgaactcatgcctcaaactgccccttcccattgtccatcaggctctggagtaatgacagttaccatctggctttgggagcttcctgttgtacatg

SEQ ID NO: 653999 - DNA, 571 bp, Homo sapiens
ggaatagacaggtggagggaaagtcacataaaggagcaagtttgtgtagctgtccctcttgccccttttaatcatcctcctttgatatggccatcctggtgggcctcctttgccatttccatttttggtttctttccctgaaaactgtgtgcaggtaattccatgtgccattgttgaaaagaaaaaaaaaaaamaaaaaaaaaacctactttttagattggtgctggtgtaagtagccacttttctctcttgggtgtgtattttaaactttttttgtttttttaaattaatgccaaaaagaaaatgcataatttgtaaacttaattatatgtcttatatcttattagcttagtagttggaaccacttagtctttaggtgcaagactgttgttagatagtactgagaaaaaaaaagtatgtgttatgagactgtacatgtttttttaaaaatagcaatatgcaataaagagatgaattcattgggtgtacatatatgctttctatgaattattaaaacagtgtcatcaaactgctttgcagtttccaccattgaatttcaattttgcaaatt

SEQ ID NO: 654000 - DNA, 571 bp, Homo sapiens
ggaatagacaggtggagggaaagtcacataaaggagcaagtttgtgtagctgtccctcttgccccttttaatcatcctcctttgatatggccatcctggtgggcctcctttgccatttccatttttggtttctttccctgaaaactgtgtgcaggtaattccatgtgccattgttgaaaagaaaaaaaaaaaacmaaaaaaaaacctactttttagattggtgctggtgtaagtagccacttttctctcttgggtgtgtattttaaactttttttgtttttttaaattaatgccaaaaagaaaatgcataatttgtaaacttaattatatgtcttatatcttattagcttagtagttggaaccacttagtctttaggtgcaagactgttgttagatagtactgagaaaaaaaaagtatgtgttatgagactgtacatgtttttttaaaaatagcaatatgcaataaagagatgaattcattgggtgtacatatatgctttctatgaattattaaaacagtgtcatcaaactgctttgcagtttccaccattgaatttcaattttgcaaatt

SEQ ID NO: 654001 - DNA, 541 bp, Homo sapiens
ttgtatttgtagctactgtaaatgggattattttcttgatatcttttcagattgtttgctgttagcatatgtaagcacyactgattttgtatgtcgattttatatcctgcaactttactgtatctatcagttctaatagtcttttcattgtatctttaggtttttccaaatataagatcatattatctgcaaaaagaatgatttgacttcttcctttccaatttgaatgccctttatttcttttttgttgtttttggattgctctagctagaacttccagtactatgctgaataacaatggttaaagtggactttcttgtcatgttccagatcttagagaaaaggctttcaatgtttccctgttctatatgatactatctgttggtctgtcatatatggctttgattatgttgaggtatattctttctatgcccacttttctgagagctttccccatgaagggatgttgaattttataaaattctttttcggcatcagttgaaatgatcatatggtttttgttgttgttgttgttgttttg

SEQ ID NO: 654002 - DNA, 582 bp, Homo sapiens
tgcccccactgttgtcttactaattcatgtgccctccaagcccacaggcttcagatccagcacagcaccaacacttaaccaggaattgcagtccttgtggcctacattgcctttcaagtttatttaggaccccagagcactttagcccacagtggtgaggcttgctggaactcaggttctgaccattgggatgggagattcccctctggctagcggtggtctaaatgctycctccatgggtgccagctgagttctgccttgtgttgctttctgctgagacagggcagcactaagttgaaatacaatgccccacaaccactgcactctttctcctcagtgcacagattctctctctgcaccgtgcaaatgctgccaagggatgggagagagatggcattagcaattcatggctgtcttttctacccttttcagtgcctccttcagtgatatgaaattagaatcgggtactatgactgctcacctgggttttggttcttgttgttgttgttgttgttgttgttgttgattttggttcttatgaagacacttttctgtgtggatagtcattcaatttggtgtccc

SEQ ID NO: 654003 - DNA, 582 bp, Homo sapiens
tgcccccactgttgtcttactaattcatgtgccctccaagcccacaggcttcagatccagcacagcaccaacacttaaccaggaattgcagtccttgtggcctacattgcctttcaagtttatttaggaccccagagcactttagcccacagtggtgaggcttgctggaactcaggttctgaccattgggatgggagattcccctctggctagcggtggtctaaatgcttcctccatgggtgccagctgagttctgccttgtgttgctttctgctgagacagggcagcactaagttgaaatacaatgccccacaaccactgcactctttctcctcagtgcacagattctctctctgcaccgtgcaaatgctgccaagggatgggagagagatggcattagcaattcatggctgtcttttctacccttttcagtgcctcyttcagtgatatgaaattagaatcgggtactatgactgctcacctgggttttggttcttgttgttgttgttgttgttgttgttgttgattttggttcttatgaagacacttttctgtgtggatagtcattcaatttggtgtccc

SEQ ID NO: 654004 - DNA, 247 bp, Homo sapiens
gcaggtgcaaaataggaatgttgttctcaagtgtcacctccagcccagaggtggttccttaggcagcatgtgctcctgggagcctctgacttttgctggaagcasccacagtttggaaggggcaagacctcaacctgttggggtttagggcccatgatggcagacattctaccccttttcctggaaaaactggaagaatgaaaataatttttttctgtggaagagagaaaatgagtgaatattcttc

SEQ ID NO: 654005 - DNA, 593 bp, Homo sapiens
agtactgttttcactatatcccataagctttagtrtgttacatttttttgattcatctcaaagtattttctaatttttttgtgctttcttctttgaccctttatttaggagtatgttatttcatttcccatgtattcgtgaattttccagttttccttctgttattggtttctaattctgttccattgtggttggagaacaggagattatctcctgttctagggtttgtggttgttactctttattattgttgcttgtttagtgacttttctaaactaattctgtaaaattcatattctttgttgtgtgtggccactgaagtctctgctaggttagcctagaggtcagctaatgattagacagaaaattccctaggttcctggatccaatcgttctcccagtctttgccaagggactctgtatgtgttttggggcatgcctccaacactcaggcgggtagttcacaactctatagtagcctttccttcttatttgcacagagcctcaaagttaggcagagatgaaagcttacagcagtctcgagtctttcctgagcatgtgtagaaccctgggcacagccctgtgcatgctca

SEQ ID NO: 654006 - DNA, 593 bp, Homo sapiens
agtactgttttcactatatcccataagctttagtgtgttacatttttttgattcatctcaaagtattttctaatttttttgtgctttcttctttgaccctttatttaggagtatgttatttcatttcccatgtattsgtgaattttccagttttccttctgttattggtttctaattctgttccattgtggttggagaacaggagattatctcctgttctagggtttgtggttgttactctttattattgttgcttgtttagtgacttttctaaactaattctgtaaaattcatattctttgttgtgtgtggccactgaagtctctgctaggttagcctagaggtcagctaatgattagacagaaaattccctaggttcctggatccaatcgttctcccagtctttgccaagggactctgtatgtgttttggggcatgcctccaacactcaggcgggtagttcacaactctatagtagcctttccttcttatttgcacagagcctcaaagttaggcagagatgaaagcttacagcagtctcgagtctttcctgagcatgtgtagaaccctgggcacagccctgtgcatgctca

SEQ ID NO: 654007 - DNA, 424 bp, Homo sapiens
gggcaacacagcaagaccccgtctctacaaaaaattttataaatgagctgggcatggtggtgtgcacttgtagtcacagctactygggaggctgaggcagggggatctctcgagccctggagttcaaggttacagtgagctgtgatcacaccactgcacttcggcctgggtgacagagtgagatcctgtctgtatccaaaaaactaaacgaaaataaagacccggggcccagtttcaacaatgcctgtgttcttgccggatgctgccgtcactcattcattcactgtctcttcgttgaaacagtcttggggtctcttgggccgtatcttggcacttgctgagtgtcaagcttgttttatgctgaccactggccactgggagtcttcagtggccacttcacctctttgcctagccttgggaaagg

SEQ ID NO: 654008 - DNA, 424 bp, Homo sapiens
gggcaacacagcaagaccccgtctctacaaaaaattttataaatgagctgggcatggtggtgtgcacttgtagtcacagctactcgggaggctgaggcagggggawctctcgagccctggagttcaaggttacagtgagctgtgatcacaccactgcacttcggcctgggtgacagagtgagatcctgtctgtatccaaaaaactaaacgaaaataaagacccggggcccagtttcaacaatgcctgtgttcttgccggatgctgccgtcactcattcattcactgtctcttcgttgaaacagtcttggggtctcttgggccgtatcttggcacttgctgagtgtcaagcttgttttatgctgaccactggccactgggagtcttcagtggccacttcacctctttgcctagccttgggaaagg

SEQ ID NO: 654009 - DNA, 424 bp, Homo sapiens
gggcaacacagcaagaccccgtctctacaaaaaattttataaatgagctgggcatggtggtgtgcacttgtagtcacagctactcgggaggctgaggcagggggatctctcgagccctggagttcaaggttacagtgagctgtgatcacaccactgcacttcggcctgggtgacagagtgagatcctgtctgtatccaaaaaactaaaygaaaataaagacccggggcccagtttcaacaatgcctgtgttcttgccggatgctgccgtcactcattcattcactgtctcttcgttgaaacagtcttggggtctcttgggccgtatcttggcacttgctgagtgtcaagcttgttttatgctgaccactggccactgggagtcttcagtggccacttcacctctttgcctagccttgggaaagg

SEQ ID NO: 654010 - DNA, 453 bp, Homo sapiens
gaattcaagaccagactgggcaacacagcaagaccccgtctctacaaaaaattttataaatgagctgggcatggtggtgtgcacttgtagtcacagctactcgggaggctgaggcagggggatctctcgagccctggagttcaaggttacagtgagctgtgatcacaccactgcacttcggcctgggtgacagagtgagatcctgtctgtatccaaaaaactaaacgaaaataaagacccggggcccagtttcaacaatgcctgtgttcttgycggatgctgccgtcactcattcattcactgtctcttcgttgaaacagtcttggggtctcttgggccgtatcttggcacttgctgagtgtcaagcttgttttatgctgaccactggccactgggagtcttcagtggccacttcacctctttgcctagccttgggaaaggtttgtcctgaaa

SEQ ID NO: 654011 - DNA, 424 bp, Homo sapiens
gggcaacacagcaagaccccgtctctacaaaaaattttataaatgagctgggcatggtggtgtgcacttgtagtcacagctactcgggaggctgaggcagggggatctctcgagccctggagttcaaggttacagtgagctgtgatcacaccactgcacttcggcctgggtgacagagtgagatcctgtctgtatccaaaaaactaaacgaaaataaagacccggggcccagtttcaacaatgcctgtgttcttgcyggatgctgccgtcactcattcattcactgtctcttcgttgaaacagtcttggggtctcttgggccgtatcttggcacttgctgagtgtcaagcttgttttatgctgaccactggccactgggagtcttcagtggccacttcacctctttgcctagccttgggaaagg

SEQ ID NO: 654012 - DNA, 450 bp, Homo sapiens
caacacagcaagaccccgtctctacaaaaaattttataaatgagctgggcatggtggtgtgcacttgtagtcacagctactcgggaggctgaggcagggggatctctcgagccctggagttcaaggttacagtgagctgtgatcacaccactgcacttcggcctgggtgacagagtgagatcctgtctgtatccaaaaaactaaacgaaaataaagacccggggcccagtttcaacaatgcctgtgttcttgccggatgctgccgtcactcattcattcactgtctcttygttgaaacagtcttggggtctcttgggccgtatcttggcacttgctgagtgtcaagcttgttttatgctgaccactggccactgggagtcttcagtggccacttcacctctttgcctagccttgggaaaggtttgtcctgaaactgctggacttgaattc

SEQ ID NO: 654013 - DNA, 593 bp, Homo sapiens
agtactgttttcactatatcccataagctttagtgtgttacatttttttgattcatctcaaagtattttctaatttttttgtgctttcttctttgaccctttatttaggagtatgttatttcatttcccatgtattcgtgaattttccagttttccttctgttattggtttctaattctgttccattgtggttggagaacaggagattatctcctgttctagggtttgtggttgttactctttattattgttgcttgtttagtgacttttctaaactaattctgtaaaattcatattctttgttgtgtgtggccactgaagtctctgctaggttagcctagaggtcagctaatgattagacagaraattccctaggttcctggatccaatcgttctcccagtctttgccaagggactctgtatgtgttttggggcatgcctccaacactcaggcgggtagttcacaactctatagtagcctttccttcttatttgcacagagcctcaaagttaggcagagatgaaagcttacagcagtctcgagtctttcctgagcatgtgtagaaccctgggcacagccctgtgcatgctca

SEQ ID NO: 654014 - DNA, 593 bp, Homo sapiens
agtactgttttcactatatcccataagctttagtgtgttacatttttttgattcatctcaaagtattttctaatttttttgtgctttcttctttgaccctttatttaggagtatgttatttcatttcccatgtattcgtgaattttccagttttccttctgttattggtttctaattctgttccattgtggttggagaacaggagattatctcctgttctagggtttgtggttgttactctttattattgttgcttgtttagtgacttttctaaactaattctgtaaaattcatattctttgttgtgtgtggccactgaagtctctgctaggttagcctagaggtcagctaatgattagacagaaaattccctaggttcctggatccaatcgttctcccagtctttgccaagggactctgtatgtgttttggggcatgcctccaacactcaggcgggtagttcacaactctatagtagcctttccttcttatttgcacagagcctcaaagttaggcagagatgaaagcttacagcagtctcgagtctttcctgagcatgtgwagaaccctgggcacagccctgtgcatgctca

SEQ ID NO: 654015 - DNA, 515 bp, Homo sapiens
gaaggttcttggatctgacacaagaaagaatttggggtgagtccaaagaataaggtgaaagcaagtttattagagaagtaaagaagcaaaagaatggstgctctatcctggtacactgtctcatactcatgctcgactgattatgcttatggttatttcttgattatttactgaacaaggggtagattattcatgagtgttccaggaaaggggtgggcaattcccagaactaagggtccctcccctttttagacataggctaatttcctgacgttgccatgacatctgtaaactgtcatggcgctggtgggagtgtcttttagcaagcagatgcattataattagcacataatgagcagtgaggacgaccagaggtcactttggtcaccatcttggttttggtgggtttgggccggcttctttaccacgtcctgttttgtcagcagggtctttgtaacctgtatcttgtgcccacctcctatcttatcctgtgacttagaatgccctaacctcct

SEQ ID NO: 654016 - DNA, 567 bp, Homo sapiens
gtgttatggagattgggttaaaagcatggggtacacaggtgataaagaaaaaaaaaccagtgaaatgaggaagccatgaggaagattgaacctgtacaacagcatgggaaataaagaagaaaagactgatatcagagaaaatgagaaagtagaatcaacaatattatgtgagaaatttacatgggaaagaaaaggaaattaaatgctataattggactcccaggattctttgaacttctgctgctcattttttatttcttaagttagacctgattaatttttatcctttcttctgtaacatgtatacaaaaatttggggatataaattttattatgtatggttttaactgtatcacacaagtttttacatgtagcatatttattaccagttttaggtgatttctaatttccattaaaatgtcttttataattcatatgttatttaaagctgcatatttacattttcaagtgtgtagtactttttaattatcttttattactrgtttttactgagttgtattctgtataataacattgcttaagtcacattgagatttatggtgtagt

SEQ ID NO: 654017 - DNA, 526 bp, Homo sapiens
cgtgaattcctagcaattccccaagctgggcttagggcttacaagggctataggattcttctgtagtgaggactacaggtgtttgtggtgacagtggaggctggtggggttcttctgcttaccttttccctgcaaggggaagtgcctccttactttgggccaatccaggcaaaggagatgaagcagtagagtcagggtgcctcactcccttttctacactgcccttcggggcttccaaatgcccataggcacctctccactcccctgcagcactccaccactctccctttgacagtccagttgaatcttaattgttattacctttgtcctttcttgttaggggtgagcccaaggaacctctagctagtcctcttgctgacatcactcctcttatttctcarcttcttttaaggtttcccattctctgcttatccctttcataatacatgccctccttgctactctgtgtgattgccttgggaaatctcatgcattccttggctttgatgctatctatgcatggatc

SEQ ID NO: 654018 - DNA, 611 bp, Homo sapiens
cttaccccacttgaaatggcttatatccaaaagccaggcaacaacaaacgctggtgaggatgtggagaaaagagaacccttgtacactgtagtgagaatgtaaattagtacaaccactacggagaacagtttggaggttcctcaaaaactaaaaatagaactaccatatgatccaacaatctcgaagtatatgctaagtacataccccaaagaaaggaaagagcataccccaaaaaaggaaatcactatatcaaagagatatctgtgctcccatgtttattgctgcrctattcacaatagccaagatttggaagcaactgaagtgtctatcaacagatgaatggataaagaaaatgtggtatatacacaatggaataccatttagccataaaaagaatgagatcctgttatttgtaacaacatgggtggactggaggatatggtattaaatgaaagaagccaggcacagaaagacaaacttcacaggttctcatttatttgtgggagccaaaaattaaaacaattgagctcatggagatagagagtagaatgatagttaccagagggtgggaagggtagaggagggaaggggtggggagtgagatggttaa

SEQ ID NO: 654019 - DNA, 618 bp, Homo sapiens
gtaaacattgtaatcccaggaactaagtttaattcacttttgagtgttttgttttttatttttgtttgtctgatttactttggggaaaaggctaaaaaaagggatatcaatctctaattcagtgccactaaagtagtcctaaaagtcttactgaagtatggacttttaagctcaggtgtttgtcctcaaatagctgcatggccactaaatgtgaggcattctgctaagtgggaaatacacattaaaatagagaaaatgagaatttcttcccttttatcaaaacaagaagcttgctattactacacttgttgattcaaatattattgagcaaagtcttttctcctcccaaatttggtctgtatagcatgccaattcctactatttcctttgcctggttagctcagtagctacctataagcatcacacattttgagaagtagatgaaacttatatgtttttaatttggaaagccattttataaggagtttggcaggcaggtgaacactaaagagactttccatgaattgggcacaatctaaaaaaaaaaaaamaacaaggtaggaaaaagaaacttatttacaataattagaaatttatctgcaataatagcctgatcag

SEQ ID NO: 654020 - DNA, 430 bp, Homo sapiens
acaaatgcagaaggactggcagaacattgttctctatgttgttgtcctcagatcaccccgttgtttctaacactccagaggatcagctgagattcatgccatcacacttgacctagtcactcctgtttgtacccctccctctccaattttttctattcatggmtaattttatccactgggctctttcttcctttctgtcatatttcttaacaacttcaatacccaaatagatgattgattcagcatcttggcctctcaaatcctcaggttctttgcttccaatgacccaccacttcctccctacctcagcagcacatctggaatctgtaaaaagccctcttcctgataaccacagccttttcttccaactcttctaccctgtagtgccacccaaggaattgttgggcctaccaaagtatcaacccaaccg

SEQ ID NO: 654021 - DNA, 487 bp, Homo sapiens
gggggatgtccgacttttattgttgtgagctctttttagaatgtaacacatcttctttttctttggttctgtgatttaatagccccagataagtttcatcaagcatcatttcacattcatatttggaacaaagttgattggctggttgcattaggtgcagagaagcaagccatggacttaattattcatgcattctttcattcaaatatttgtcaaggttaagtctgtcccaggmactcttaaaggcactagggatataaagatataagacactcaaggagttaatagtataatgaagtagaagtaatgattaaacagtatatgaagtatcacaagatggatcatgaggaatactctaggagaatgtaggagagatacctaacccaagtttgaggttcaagaaggacaaagaatgagcaggaataacacaggtaaagatggggaggggaagagcgttctagcagtaggagcaacatgagcaagggcc

SEQ ID NO: 654022 - DNA, 487 bp, Homo sapiens
gggggatgtccgacttttattgttgtgagctctttttagaatgtaacacatcttctttttctttggttctgtgatttaatagccccagataagtttcatcaagcatcatttcacattcatatttggaacaaagttgattggctggttgcattaggtgcagagaagcaagccatggacttaattattcatgcattctttcattcaaatatttgtcaaggttaagtctgtcccaggcactcttwaaggcactagggatataaagatataagacactcaaggagttaatagtataatgaagtagaagtaatgattaaacagtatatgaagtatcacaagatggatcatgaggaatactctaggagaatgtaggagagatacctaacccaagtttgaggttcaagaaggacaaagaatgagcaggaataacacaggtaaagatggggaggggaagagcgttctagcagtaggagcaacatgagcaagggcc

SEQ ID NO: 654023 - DNA, 550 bp, Homo sapiens
ccagtttgttaacttctctgggcttccatttcctcatgttgcaaggatcaaatgagacaagtcacctaatgcactgaatccactgcctggcacagagtcatctggctttgcaaggaggatgtgcctcacattccaggaatagatcattccaaccacacacaggttcttccttaattttatgcagctagtaaaacgttttacaaattcaatacaaggaaaatggaagacaaatctcactcatgaatggagacaaaaaccccctaaaacaaattggcatatcacatccaatttagcaatatataaaaataaaataataaaacatcactatgggtttatttcaagaactgcaatgttggttggaaagtagaaaatctcatataatttagaatgttaatacattaatarggaaaaatcataatcatctcaacagaggcataaaaacattcagtaaaattcaatacccttcatgaaaaagtcttagcaaacttgcaatatataggacttttaaaatctgaaggtatgtttccaaacactagcactaacattactg

SEQ ID NO: 654024 - DNA, 575 bp, Homo sapiens
gtcacaaagggacaaatattatatgatttcacttacatgaggtgattagagtagtcaaattcatacagacagaaagacaaatggtggttaccatgggttggagggaggtgagaatagagaattagtgtttcattggtacagagtttcagttggggaagagggaaaacttctagagagggatggtgatgataattgcataacactgtgaatgtacttaatatcacagaactatacattttcaaatggtaaattttatgtattgtattagtccgttttcacattgctgtaaagaactacctaaaactgggtaayttatgaagaaaagaggtttaatcgactgacagttccacatggctggggaggcctcaggacacttacaatcatgttagaaggcaaaggggaagcaagacatgtcttctcatggctacaggagagaaagagagagcgaagggggaagggtcatacacttttaaaccatcagatgtcatgagaactcactcactattataagaacagcaagacagcagacagcaagtctgcccccatgattcagtcacctccccccatacccctcc

SEQ ID NO: 654025 - DNA, 586 bp, Homo sapiens
ggaagttgtagtgataaaataaacatgaaacaccaacccaacttaataactaattcattaccaattctgttgcatctttttgtaccactaaatcatggcttaatcatttctggtaatcataacatttgtatttattccaaactctataaccttacataaagcttattttattttatgacataagaactgtaattgccagataatgagcatctttagatggaaaaaagtgcacaacacaatagcactttgagaaagctatgtattttataagcataggaattttattattccattaacacaacttctggagtaactagattaatgaatgtactggttttcaacaaaggagatcttaaccctaaatgattcaatctttttcactctaygaatatataaagcctgtaatacataagcaagacctgcagtacaccaaagttttgtctagttggtctttcaaataaagaggtgaggaataaattatactggaatagacttgagggcatccaccatgttaaatgtttattttagtatctcataaatagccgtgaaactttccttatgaatgttatacatgcatacctcactt

SEQ ID NO: 654026 - DNA, 642 bp, Homo sapiens
cactaactttccttcttcctctctcatcaaatagtgcattaaggtaagggggcatgaataaacttcactgccatgagatatttgtgagaacatatgctgtctcgttgagagatcatttgttttcaagttaacaaaaacctgctgaagctagtgcaagcaaagaagacatttatggaaggatacaaggttatctcatagaacccaagagcaagaatacagctgggcctcaagggggatgaaaggcaggtagccagggttactccctttttagttgttctcattagatgtccatagggaagaaagggaaaggaagagtcaggcggtataaataggtaagaatttttcagacaacaagagtatggctagatatatactcctcaaaaagtatmttttctgtactgcatcaattgaagggaaataccaattacaggtcgcattgcccagtagatttgtatggatttaaagtaataactaaacaatccctttcaactattcccaatcatcctgtcccttcataagtcttgattcttggcattttgtttattctcacttgatcagtctcaagttaggacttttcaactgttctgacacccaaagataagacccctgttttcatctcttctccccagaccttcaacctgt

SEQ ID NO: 654027 - DNA, 569 bp, Homo sapiens
agaaaagaacaagatcatgtcctttgcagcaacatgaatgcagctggaggccataatcctaagtgaattaacgcagggacagaaaaccaaatactacacgctctcacttaaaagtgagctaaacattgactatgtatggacataaagatgggaacaatagacactgtggacttctagagtggggagaaagggggatgtgagctgaaaaactacctattgggtactatgctcactatcttgatgacgggatccataccctaaaccacagcattctgcaatatacccatgtaacaaacctgcacatgtacccccaaatgtaaaataaaagttgaaattataaaaacaaaacaataataaataaataaataaacgcttcaatgcagtgtaataagagttccaggagaaaaaagttttagaattggaaaaaacaatgaatcttttcaccrgaagagcgccctgtggattcagaagtaatcccaataacatgaagtttgaaacagtgaaaagaaataaactctctgaaagaaatgcagagataaaagaataacaagataatgaaagccagagaa

SEQ ID NO: 654028 - DNA, 456 bp, Homo sapiens
tccctaactggcagtgaaacatcattaaatatatgtacacatatatacacacacacaatatagcatgtacacttaacacacrtccatgcatgggtactgagagagcttgggcaagtcagggaagacccttatctgaaggacatacccttggtgccatttgggagaacaaactcctgttactagcatcacaacaaaaacaggtggcaagctttaaagataaactcaagacagcgagtgaaacttcagcaaatacgtgttaatatgaccatgagtaaaaggcccttcctggccaggcgcggtggctcacgcgtgtaatatcagcactttcggaggtcgaggcaggaggatcacccgagatcaggagttcgagaccagcctggccaacatggtgaaaccctgtctccactaaaaatacaaaaattagttgggcgtggtggtgggcgcctgtaatcccac

SEQ ID NO: 654029 - DNA, 456 bp, Homo sapiens
tccctaactggcagtgaaacatcattaaatatatgtacacatatatacacacacacaatatagcatgtacacttaacacacatccatgcatgggtactgagagagcttgggcaagtcagggaagacccttatctgaaggacatacccttggtgccatttgggagaacaaactyctgttactagcatcacaacaaaaacaggtggcaagctttaaagataaactcaagacagcgagtgaaacttcagcaaatacgtgttaatatgaccatgagtaaaaggcccttcctggccaggcgcggtggctcacgcgtgtaatatcagcactttcggaggtcgaggcaggaggatcacccgagatcaggagttcgagaccagcctggccaacatggtgaaaccctgtctccactaaaaatacaaaaattagttgggcgtggtggtgggcgcctgtaatcccac

SEQ ID NO: 654030 - DNA, 588 bp, Homo sapiens
ataaacttttttaaaaagaaagttgccttaaacttttacttatatagaagatttttagaaactatgaatttatatttacattatttccattatccaatattatagaaatgtcactactacatactatastgtacctaattcttattatgatgattttataaattttgacatattttaaattctgcatatttttacttgagggacactggttattataaacgagttggtataattatcatcttgctatttttatggagaagtgaatgctacttaaaaatttttgtttatgttgactcgtattttaggtagggacttttggtaaacccttttctcttgtttgttttaattttctcaactcagagaaaaggatgccatttgttcatgtctataaaattaaagtctcaagaccatttgatgtagactacacattgtgtgggagtcagggttatctagtcggatgactggataattgatcttagctatatggcctcaattttttccggcataaaattagctgtttggagatttccttcagttttcaagatttgaaattctacttaaatatgaaaaacaagacctgaaatatgt

SEQ ID NO: 654031 - DNA, 565 bp, Homo sapiens
tgacaggaggtctaaggatgggtgtgcattagatggaaggggaaggcagtccaggggaaggaaggtgcatgcaaatgctcaagatgggagggatttgggtgtttttggagaaagaaggtagtaggatagagttccgagagcaagatggagtgtggagcaaaatgcagctagtgtgtcctatgaaccccattctggattccagtatctagaatggggttctcagagcaatggcagccacagagcaatggcagccacagaagggggtttgaataggaaggagcacagggctggtgaaattagcatgtttgccttcacaagctgtccctggatgcagagtggagaatgttctggagggcacckcgtgaatgcaggcccccagaggcagttatgggagtggttcagggaagacacgaagtgacttggactcaggagctggtggtggaggagcagctggaacaggcacgaattgctgtgtgactcccaacacacagagcaggaagtgctccatttctttttattccaaaccaaaccagatttggctccaagtggctactcatccttggga

SEQ ID NO: 654032 - DNA, 548 bp, Homo sapiens
ctactatcttagcaaatttcaagtgtacaattcgattactgtattaactatagtcaccatgttgtagattagatctgtagaacttattcatcttgcatcactggaactttgtatcttttgacaaacgtctctccattgccccctccatctacctgctgtcccaccccttcaattttctgcttctacgagtttgactcctttggttccacatgtaactgaaatcatgcattatttgtctttctatgtctggcctgtttcacctggtataatgttcctcaggytcattcatgtagtcacaaatgtcaggatttctttcttttttaaatcaaagaagaaaagaaagagaacgagaaataaaggaaatggtaactatgggaggtaatggctatgttgttaagtagcttgattgtggtaatcatttcacagtacatgcatgtatcaaaccatgaagttggataccttaaatatatgcaattctatgtcaattatattttaatagagctaaaaaaatgacagccatcatgctattatttttaagttggaaatct

SEQ ID NO: 654033 - DNA, 548 bp, Homo sapiens
ctactatcttagcaaatttcaagtgtacaattcgattactgtattaactatagtcaccatgttgtagattagatctgtagaacttattcatcttgcatcactggaactttgtatcttttgacaaacgtctctccattgccccctccatctacctgctgtcccaccccttcaattttctgcttctacgagtttgactcctttggttccacatgtaactgaaatcatgcattatttgtctttctatgtctggcctgtttcacctggtataatgttcctcaggctcattcatgtagtcacaaatgtcaggatttctttcttttttaaatcaaagaagaaaagaaagagaacgagaaataaaggaaatggtaactatgggaggtaatggctrtgttgttaagtagcttgattgtggtaatcatttcacagtacatgcatgtatcaaaccatgaagttggataccttaaatatatgcaattctatgtcaattatattttaatagagctaaaaaaatgacagccatcatgctattatttttaagttggaaatct

SEQ ID NO: 654034 - DNA, 548 bp, Homo sapiens
ctactatcttagcaaatttcaagtgtacaattcgattactgtattaactatagtcaccatgttgtagattagatctgtagaacttattcatcttgcatcactggaactttgtatcttttgacaaacgtctctccattgccccctccatctacctgctgtcccaccccttcaattttctgcttctacgagtttgactcctttggttccacatgtaactgaaatcatgcattatttgtctttctatgtctggcctgtttcacctggtataatgttcctcaggctcattcatgtagtcacaaatgtcaggatttctttcttttttaaatcaaagaagaaaagaaagagaacgagaaataaaggaaatggtaactatgggaggtaatggctatgttgttaagtagcttgattgtggtaatcatttcacagtacatgcatgtatcaaaccatgaagttggataccttaaatatatgcaattctatgtcaattataytttaatagagctaaaaaaatgacagccatcatgctattatttttaagttggaaatct

SEQ ID NO: 654035 - DNA, 607 bp, Homo sapiens
atagcagactgtttatgtgtttaacatggtgtttgaaatagcactgataccgcctggtgcagaagattcagagaataaaaccaaaatttactaagatttttcttttttaccaccctgcttgaaggaagtagtttttaatcaaaaaataattattttaatttgttagcatttatttgtagcctgcacatctatagctaaagctgagcaattggtcagaaaatcactttatgttgtgttatgatttttattataaactcctactcatcattctttcctttccagaaaaatctgttgaactttgagaaaatttgtcctctaagtgagaacattatgtctgctaaatggagatagtcagtatttgaattaaaaagtaaacaaattaccttgggcagtatggccattttcacaatattgattcttcccaccagtgagcatggaatgttcctccatttgtttgtatcctcttttatttcattgagcagtggtttgtagttctccttgaagaggwccttcatatccatcaagctatcaatgactttcttcacagaaatggaaaaaactactttaaagttcatatggaaccaaaagacagcccgcaatgccaagt

SEQ ID NO: 654036 - DNA, 539 bp, Homo sapiens
atctatagtcccagctactagggaggctgaggcaggagagtcatgtgaacctgggaggcagaggttgcagtgagcagagattgtgccactgcattccagcctggcaaaagagccagactctgtctaaaaaaataaaataaaataaaaaatgtaggctctaaaatcttgaaactacatcttttttagggtcttacatcaattgatagatgcttactgtctaatattccagttgagtaaaccaattcctgaaataaattgcctatgattagaagatgaattgtttttcaagaaatgagaatacaataaccttttttggcaatgataccctaaaaacaggaaacttgtcttctcaaaggtaggtaattttccmccaggtatgagttattcactgggaagggtcaggtcagaccatatctatctatttattacctatctatccatctatctatcacaaatctatctatcatctagctagctagctagctagctgtcatcactgacttcaatggaagaatttattcaattgagaaattgttact

SEQ ID NO: 654037 - DNA, 541 bp, Homo sapiens
tagaaatgagattgagttcaccccatgtgcatttaagagggttcaagacttgccttcctccaatttacagacatccacagagaaaccattaagcacaagtacaagctagttgcagaaaaagcagataacgtctcagtccctatatagcaggaaagatggtcawgccatttatgtataagaaaatagttcattttcaatataagaagtgtttaaaacaaagtcttctgtaggaccaaaggatactatgactgttgggagtcagggaagaaaaaatactttttgtttattaacctttcttaatgtagtgaaacgcaactatcaaatcttaacaagaaatggaacatggtcttgttattatttctttccacatcttgatatggtttctgtgagccaggagtccacggattccttatgggggctaatcaggtgtcagctgggctgtgttctcagctatgcaagaatccacttttaatctcattcaggtttggggcagaatcagcttgcagctgcatgattcagagcctcagctgatgctgtttgt

SEQ ID NO: 654038 - DNA, 585 bp, Homo sapiens
tgatagaagacaacgcaatgaaaactatcaagttgcttatgaaaaattcttaggatgacactgcacctaatgtttgtagtcagttgtttgtcattctttcccttgtcctatgctgtgtccaggactgctagataagtaggtacccagcatcctagcgtccagatatcaaaaccatgaaaatgaagcactacaagccagacagataacccccagagggagcaaacgaataaacccccaaatcctgtggatctagaagtagaaaataatcgctgaaccactgatttgagaccaatgagaacattaaggacacctcaaaatagatcagggcactgttcctagcccaactctgtggcagaacataaacctgcaagaaataggattaacatactatcttygcagtaagttaaatcctgaacttctacaaaatacagtttactccaatttagttacactcttcctgcttctggtgtcttacctccacgttggactaaggttttcaattcggtggtggaatacttacctattaaaattacccactttgctttagtgtgagtttctcagcatgttttacacaggagtgacctg

SEQ ID NO: 654039 - DNA, 655 bp, Homo sapiens
tgttagcgatgagatttttattggagcaatttctggggtcagattttaaagttttcattatttataaacagaatatttttaccactcctatctcaaatgtccaggccataacctctgaatttatgagggtggtggctcttcatttttgctaatacgaccaataattttcaattataccacacttcataataagcacactatacccaatataatgatatgtcatttcaatgtacctagcccatgmacttccacaggtttaatgggattttgcgtatttagaatttcatcataaaggggccctttggaatcattatcacatcaatcctttcccattgtaagactcagctctcttaccaggcaaaagcatcagggctcaaggcaaagacttagtctactcttagattgtaagctagatcctaataaaagccttaacacttggggagaacattaatatagggcaatgatgacacattaaaactttttagtgaatcaggagatcgtgaaggcaggcaacaattgtgattaagagaaaaatttcttatgacgtgaagtaatatttagatctgcacattttattcactacttctgggggaaagaactatgtaactgggagcaagttaagtacaaaataactcatgttccatttaagtcacaa

SEQ ID NO: 654040 - DNA, 655 bp, Homo sapiens
tgttagcgatgagatttttattggagcaatttctggggtcagattttaaagttttcattatttataaacagaatatttttaccactcctatctcaaatgtccaggccataacctctgaatttatgagggtggtggctcttcatttttgctaatacgaccaataattttcaattataccacacttcataataagcacactatacccaatataatgatatgtcatttcaatgtacctagcccatgcacttccacaggtttaatgggattttgcgtatttagaatttcatcataaaggggccctttggaatcattatcacatcaatcctttcccattgtaagactcagctctcttaccaggcaaaagcatcagggctcaaggcaaagacttagtctactcttagattgtaagctagatcctaataaaagccttaacacttggggagaacattaatatagggcaatgatgacacattaaaactttttagtgaatcaggagatcrtgaaggcaggcaacaattgtgattaagagaaaaatttcttatgacgtgaagtaatatttagatctgcacattttattcactacttctgggggaaagaactatgtaactgggagcaagttaagtacaaaataactcatgttccatttaagtcacaa

SEQ ID NO: 654041 - DNA, 583 bp, Homo sapiens
caaaacctcagtcagtttagaacaacacagcagtatccaaactttttggcttcgtctggatattgttactgcaagtgttggtgctgcattcctggatgccgtttacagagtgatttcttaaacattggttgtgtcacagtgcarctgaccagtttaaagccttttgctattttgctcacaatcaaagaaaccagaaacatctaattaacgtttacctcatttagagttagaatcacctgattattttactacatttggaataagcataagagatgcttttaatacgacaaattttaaaactatctggattaaaacacctttttattcacttttttattaagataaaactataaattaataattagtctcctattagtcttaagagatttttcaaatgactttggattttaagatgaaaaaagaaaaaaaaagaagcacacatttaactgagtttgttttgtgtgcttgtttgtatatttagactgtgtgtactagaaagaacccgctttgggatagaaataaagactctttgagttctcaccctgtattgggggggtttctgggtacctatgtatgtaatttg

SEQ ID NO: 654042 - DNA, 568 bp, Homo sapiens
cactttcgacctgtggaaggtcttgtctgctgtggttgagcatggaagggtcaattggatgaagaaatcaagtatacagaaggcttactcttctctcagcagaccatcagattcattttgactccctatttttttgctgccacccacaaaacatatgatcttcccttttctgagtacctattatatgtcactctatttagatttaaatagatgatcttatgtmactgtctccaccatcccatggggtttacccagaagggaactgaaacctggattgtctaatattttttctcaggcaccaagctggtacctgatctctatgatgccaatatctgggcttttcccgccaaacctcaagagctctacaaagtcaagtgcatcttcaatcaagggcgtgtttttgctccgtgactccatggggtttactcagaagggagcggggtcctcatgacatcttcactgtagaggagctttctcttagttgcatttcctcagagcatcaactcctgggaccttatgagaaattctttaaaaagaaaaaaatttgaaaactctgtttgcagaacaa

SEQ ID NO: 654043 - DNA, 568 bp, Homo sapiens
cactttcgacctgtggaaggtcttgtctgctgtggttgagcatggaagggtcaattggatgaagaaatcaagtatacagaaggcttactcttctctcagcagaccatcagattcattttgactccctatttttttgctgccacccacaaaacatatgatcttcccttttctgagtacctattatatgtcactctatttagatttaaatagatgatcttatgtcactgtctccaccatcccatggggtttacccagaagggaactgaaacctggattgtctaatattttttctcaggcaccaagctggtacctgatctctatgatgccaatatctgggcttttcccgccaaacctcaagagctctacaaagtcaagtgcatcttcaatcaagggcgtgtttttgctccgtgactccatggggtttactcagaagggagckgggtcctcatgacatcttcactgtagaggagctttctcttagttgcatttcctcagagcatcaactcctgggaccttatgagaaattctttaaaaagaaaaaaatttgaaaactctgtttgcagaacaa

SEQ ID NO: 654044 - DNA, 575 bp, Homo sapiens
ttttcaatgtccatttaaatgtatggaaatttggcttctgctcttattactccattaaaattgctttttcaatctcagtagtgacttgctcatggatacttcttggtttttatcttacatgacctcctcagggcatttggccttatgatcataatcttctcattaaagtagattttgttttactagttatttgtgattcctcagttaatgctcaaccatgcaactaataatgaggaacttggtagaaatgcttgtcttttctctccattacactgaaatcagtgcactgaacattgcactgaaatcaatgcaatctcaaatattgtttgttatactctgatcctaaacctttcacataaaggcataccttggagatcttgtgggtttagttccagaccactgcaataaagcaaatatcacaataaaggaatcactcaactctttttttgtttgtcagtgcatataaagttatgtttacaatatactggagtctattaagtatgcaataraattatgtctaaaacacaagttacatgtcttaatgtaaaaatgcttcattgctttaaaatgcaaat

SEQ ID NO: 654045 - DNA, 592 bp, Homo sapiens
ggcattagctcctaaaaagtcagcctgttctttgaagctttgaacccaggtattggcttctcctctctagctatgaaagtccaatagatggctgttttgtctacatggaaaatctgttatttagtgtaacaccttcgtcagtgatcttagctagattttctagataacttgctgcaacttctatatgagcactggctgcttcaccttggacctttatgttatggagagggcttctttccttaaacctcaggaaccaaattctgctagcttccagcttctgtcagccttcacagaattgaagagagttacggccttgctcaggattacgctttggcttcaggaaatgtttctagtttgatcttatrtctagaccactaaaacttcttccatatcagcaataaggctgttttaccttcttatcatacatgtgttcactggaagagcattttaaatttccttcaagtatttttactttgcctttacaactttctagctgtttggcacatgaggaatggcttttggcctatcttggttttcaacatatcttcctcagtaagcttaatcatctctagcttttgatttaaagtaagag

SEQ ID NO: 654046 - DNA, 591 bp, Homo sapiens
catgtcaaagcattttattgatggatgttggccactcataatccctcgcaggtgccgttctcctggtcttttctactcttctaaaggtgagccaytctttctcatctcctggaggatgagagcattttccttagccttgtcctactactactattgctcactcaaacacctacccagtatcatagcctcttccacagcaaccttcctggaggctctgcattcaggatttaataactaaagtacatgtgcttcagttctctagctgcttctggttttattttctccacagtaaaatttgttcttattccctgtagtagtccgttctcacactgctaaaaaagacatactggagactgggtgatttataaaggaaagaggtttaattgattcacagttcagcatgcctggggaggcctcaggaaacttacaattatggcaaaaagggaagcaaacacgtctttcttcacatggcagcagcaaggcgaagaatgagttccctgagaaggggggggccccttataaacccgtcagagctcattagagtttactatcacaagaacaggatgggggaaactgctcacatgattcaat

SEQ ID NO: 654047 - DNA, 591 bp, Homo sapiens
catgtcaaagcattttattgatggatgttggccactcataatccctcgcaggtgccgttctcctggtcttttctactcttctaaaggtgagccactctttctcatctcctggaggatgagarcattttccttagccttgtcctactactactattgctcactcaaacacctacccagtatcatagcctcttccacagcaaccttcctggaggctctgcattcaggatttaataactaaagtacatgtgcttcagttctctagctgcttctggttttattttctccacagtaaaatttgttcttattccctgtagtagtccgttctcacactgctaaaaaagacatactggagactgggtgatttataaaggaaagaggtttaattgattcacagttcagcatgcctggggaggcctcaggaaacttacaattatggcaaaaagggaagcaaacacgtctttcttcacatggcagcagcaaggcgaagaatgagttccctgagaaggggggggccccttataaacccgtcagagctcattagagtttactatcacaagaacaggatgggggaaactgctcacatgattcaat

SEQ ID NO: 654048 - DNA, 605 bp, Homo sapiens
aagtatgttagagtcaggtaggcttagtcttgatacctaattctatcatttcaaactgttataggcaattgataaagtatcttccctaagagttaaaatatctttcaatgaaatttcaaactttttcactagcctgatcaattatttacatggcttcctgaagttccatattaaccacattttgctttkgtttaagcaaatatcatcttctactttacgtgattggtggaagctgtgttttataaatactttatattaagatttttaaataagatgtagtgatttaaaaaccagagaaatgatattgtcacaaacatggaagcagaatagctctgccaactcctacttgtggagatcgctctgatctccaatattgagcaattaacatttgagttatctttccatgagaagttttgatgaaattttaacggccctctccctcatttccaggatggaggaggattgcaggggctgaagggaaggaatacggaggtttcagaacccacaagcaagtggttcttggcataccctctgccatatgcaaaatttgggcatctcttctctcttctatttaggatgttcatttcttccaaagaactctggtg

SEQ ID NO: 654049 - DNA, 568 bp, Homo sapiens
gtagaaaacaggtgtgagccattttgtcctcaagaatctacaaactgttgtgtgtggacggggcacaggtatgaagttatagaccagtaagagatggggctagacacacaggcatggagactcctccccagccatgtgcaggagatcactctaaggtttgtgagcaaggaagtcacctaccatttacttctgcaaaggtctctatcattacagggtgmctactctgcccagtactattgtaaatacttcccatacattgagctgcacactggggcttattattctcattttactgctgagaaactgagtccctacctcttgggcccttgcccagagccacacatgtggcagctgcagagctggtgccttgacttgggtcccctgagcctggagtcttgtgcacacaactgccgtcatgctacactgccagcgggcaggtagactgagaccagggcatggcccctcatctgcatgtaagcaaggctgctgcttctctgtgtgggtgatgctggtagggtttcctaacccaggccaacaatgaaaacattaagtaacactgggttcaggg

SEQ ID NO: 654050 - DNA, 531 bp, Homo sapiens
atttagtggtgcctccccaccgggggagtgatctgtggggtcttctggagtcttctgaagtgggaatgattcaaatccagctcattggtctatactgttggttctcattcctgctatgaaagccatagctcaacagtctaataagttcttcaaggtcaagaagaacccaggtcctatccctactgttgcatttctttcttgcacttttcactatwcctcatagtaccaggtaactgacatgatttcaagcatcacaggcatgacaatcattatctttgacttcctttagggatttttgtaagagcaaagaaatatttcccaaatctcccagcaaacctgttctgtaacaggtaactagtaacaattggaccatgtgcctttacctaaacccaattctaaagaggagaatcagcctccaggatggacttaagctaaggcaggctcacccaacaactgcagctggaccctggttgccctaaagctgtggctacatgaaagagaacttttactttctttgtagaactggctgtg

SEQ ID NO: 654051 - DNA, 573 bp, Homo sapiens
acaaagacacaacgtaccagaatctctgggacacattcaaagaagtgtgtagagggaaatttatagcactaaatgcccacaagagaaaacaggaaagatctaaaattgacaccctaacatcacaattaaaagaactagagaagcaagagcaaacacattcaaaagctagcagaaggcaagaaataactaagatcagagcagaactgaaggagatacagacacaaaaatcccttcaaaaaatcaatgaatccaggaggtggttttttgaaaagatcaacaaaattgatagaccgctagcagactaataaagaataaaagagagaagaatcaaatagatgcaataaaaaatgataaaggggatatcaccaccaaccccacagaaatacaaattaccatcagagaatactataaacacctctacacaaataaactagaaaatctagaagaaatggataaattcctggacacatacaccctcccaagactaaatcagggagaagttgaatcccaaaatagaccgataacaggctctgaaatwgaggcaataattaatagcctaccaaccaaaaaaag

SEQ ID NO: 654052 - DNA, 607 bp, Homo sapiens
tttttttcttggttaagcttttacctggttactgtaaactttcagttagcttctcgagttctgaaaaaagctaattctgacctttttttgccagtttatttgctagttttatggaacgactagcttttggagttccttagtccatcatttttgccaacatcaatctctaaaagcatatacttttgttttttaatagctctaccagtaggctttcaattttactgataatacaggaattattatttctttttttattatactttaagttctagggtacatgtgcacaatgtgcaggtttgttacatatgtatacatgtgccatgttggtgtgttgcacccattaacttgtcatttacattaggtatatctcctaatgctatccctccccccgctccccgcaccccacgacaggccccagtgtgtgatgttccacttcttstgtccaagtgttctcattgttcagttcccacctatgagtgagaacatgcggtgtttggttttttgtccttgcgatagtttaattagagcttctccaaatgtgcctaagtatttctattgtgtggggtaaagggaaagcacaacaattatattaaaataatttcaggat

SEQ ID NO: 654053 - DNA, 596 bp, Homo sapiens
cttaaattgttatattcaagaaataaatagaaattcagtggatgtaagttggctgaaaagtaggaaaaagaagagcccagarttggaaagagataccttgaaaaatggcagtaatctaatgcctagaacctgggccaggtgaggacggacatggtctgttagaaatttccagtggaggtacagttacagcggatcaagattttaaacttcacctgaacagtgcttttttactgtccctatccacaagcagcatggcccaaacttcgcgaaatctggagtgttctttggttataattttggaggactggagggagggaataaaggcatggtgtaacagcaaaagaatgaacataactaaccccattttataaagcagtctttacccattcctgcacataggctaggataattttagagcacttagataatatgcaaaaacagcactcatgtagtttttgaaaccaactctgggattaaaggggaagtacgtaacaactaattatgtttcattgaagatgtataagggaattgtgacctgaccgagcacaaagcagtccccaatctccatagaccacccagatgtctgtggtcatcag

SEQ ID NO: 654054 - DNA, 596 bp, Homo sapiens
cttaaattgttatattcaagaaataaatagaaattcagtggatgtaagttggctgaaaagtaggaaaaagaagagcccagagttggaaagagataccttgaaaaatggcagtaatctaatgcctagaacctgggccaggtgaggayggacatggtctgttagaaatttccagtggaggtacagttacagcggatcaagattttaaacttcacctgaacagtgcttttttactgtccctatccacaagcagcatggcccaaacttcgcgaaatctggagtgttctttggttataattttggaggactggagggagggaataaaggcatggtgtaacagcaaaagaatgaacataactaaccccattttataaagcagtctttacccattcctgcacataggctaggataattttagagcacttagataatatgcaaaaacagcactcatgtagtttttgaaaccaactctgggattaaaggggaagtacgtaacaactaattatgtttcattgaagatgtataagggaattgtgacctgaccgagcacaaagcagtccccaatctccatagaccacccagatgtctgtggtcatcag

SEQ ID NO: 654055 - DNA, 598 bp, Homo sapiens
gaggctgaggcaggcagatctcttgaggtcaggagtttgagactagcctggtcaacatgatgaaatctcatctctactaaaaatacaaaaattaaccaggsgtggtggcgagtgcctgtaatcccagctacttgggaggctgaggcagaagactcctttgaacccaagaggcagaggctgcagtgagtcgagattgtggcactgcactccatccagcctgggtgacagagcgagaccctgtcttaaaaacaaacaaacaacaacaacaaaacaaaacaaaacaaaaaacaacaaccaaggggtaaaaatagcaaatgatcaacttctttcttattctctacctgaccatgtggtgcattcctaagtcttcagtcactagccattttcaatgcacagttaacctctcacaagcactgcttcttcaatccttccattctcttgctttcttcaactacccttaacagaaaaactgtgtacgtggtaagcctttaatcagattacgtgggaagaatttcttagccaccatggcttaaaaatacatgggttttgagaaaagaatacatgggttctctgcctactctcagtaactacaatgcca

SEQ ID NO: 654056 - DNA, 383 bp, Homo sapiens
gatgcatcccattaaaaaagtgacgtttcgtgagtcagttaagacaacctcactgatgaccctggatcatcattgctctaattaaccttgtacttagatgtgccgcttgatgatattgtgtgtaaaaattaaagcataaacacttaaaagatgtggaggaaatacaccaaggatttgtcccatccagggtgtttacaagatcaactgccattttcaaatgcaragcaggctcagcctgaggaggacaggagttagacccctgtctatcctaatgttgttgaaatgcaaaccctttttggtcaaggaacaatgtcataataccttaggcacaagagcaactgtgtggaaatgggggctgggtccttccgctataatgaagcaca

SEQ ID NO: 654057 - DNA, 590 bp, Homo sapiens
acatgttttatcttagtcgaattggaaaacaatcctgaaagtcagaaaaagcaggtattgttctccctgttttgtatgcaaggaaaggaatgcagagaggttaattgactggccgaggtcacattgctagttagagaaccagcaaggaagagaacctaggtttccagaatctcagtgtaatgtattttaaccacccctggctgcacacagcagttttgctgaacaaagaaattcttcacttatgtacagcttagagaaccctggcgtttttatccagcctcttcctattaataacaatgatgtcaatttcacccctctccagctatgaaatcatatgaccccagaggtcactgggttcatccaccatcacacaacgttcaccagcccaagatcaaattaacctttttgcattactaccaaaatgtttactcctattcaccttaaggccaaacatacacttcatagacatgtatgatgcatagaattacttagctttacttagaaaaatagaatccttgctaaagaacayattccaattgctttaccttggtggagaggagacataagaagaatatgaggtaattacaatg

SEQ ID NO: 654058 - DNA, 606 bp, Homo sapiens
cattaccctttgaaagggaccgcatggccccaccataaaggaatcctagctataggctctagagctaggctgtgtctcccagttcctgactgtcttattttccttatcttatcaggccactcacttgcagcatctttttacctaagaatcttggtgtttgtttcacggcacattaacagtggataaagggactagttctactgtgtcttcaagggaattgctagtaccttaattttcataagaacttggtaaacatttgttggttgtatgaataatatcggttatgtttgcaatggtagaccagaagacgtaatatagtccctcttatacttccattttctctcaaatcacacaatctrtctcaaataacacatttattcattatgtcttcagacaaaatgtcctcatagtcagagcaaatctgataattatttaggttgttgatgtcgaagtgaaagtaagggtacattatgggttgatgagaacacaattctttcttgttttctagccttaaattagagttaggttagctctctatgttaaaaagaaaagtatgtttgaataacacaattctctttctacttttcttactgattctatgtctaa

SEQ ID NO: 654059 - DNA, 566 bp, Homo sapiens
caggataaaattactgatccacaatcacactgttgccttttttattcatatatcagcattcataagttagttgatgagttctggtctaattaaggcaagaacctgaaaaaaagcaatgaagtaaccgaagcaggaaggcaaagggctaaaaattcacaaaggtggccaggtgcagtggctcactcctgtaatcccagcactttggaaggccgaggcgggtggatcaataggtcaggagatcaagaccaccctggctaacacagtgaaaccccatctctactaaaaatacaaaaaattagccaagcatgggggcacacacctgtaatcccagcyagtcaggaggctgaggcaggagaataacttgaacccaggaggcagagattgcagtgagccaagatcatgccactgcactccagcctgggtgacagagtgatactccatccaaaaaaaaaaaatcacaaaggtgcaggtgtgatgacaactgtgcttcttcagtgcccttacaatggtgccatgaaatttactaagctcacctgagcaaagatgaggaccctttgcaaagatct

SEQ ID NO: 654060 - DNA, 603 bp, Homo sapiens
taccttccacctatgagcctgtaaaatcaaaagcaagctagttacttcctagatacaatggagatacaaacattgggtaaatacagccattcaaaatgggggaaattggccaaaacaaaggggatacagaccccatrcaattctgaaattcagtggggcaatgaaattttaaagccccaaaatgatctcctttgactccatgtctcacatccaggtcacactgttgcaaagatgtgttcccgtggacttgggcagctctgtccctgtggctttgcagggtatagccccccacctccttgttgctttcactggtgttgagtgtctggcttttccaggcacatggtgcaagctgttggtgagtctaccattctggggtctggaggatggtggccctcttctcacagctctagtaggtggtactccagtagaaactctctctgggggctttgactccacatttcctttccatactgccctagcagaagttttccatgagggccctgctcctgcagcaaacttcttcctggacatggaggcatttccatacatcctttgtaagactggcagaggttcccaaatctcaattcttgacttcactgcacc

SEQ ID NO: 654061 - DNA, 554 bp, Homo sapiens
caggaataatactttgcatccttcaatccaatcaagttgacactcaatattaaccatcatagtcacggagggaggctcttagccttgctcacatactaaagctttattcacttttatcagccagatgccattactggggctgtttgttaacattctctctgggatctggggaacccttcacaattctggttgattcccattttccttctcaaattaaacttcacagagaggatttttatgtgctatcttgttatttccaagaggctgaggcacatggaaagcatctaatctgccaycttgaaaaaaattaatattttaatattttattttgttaataaatagtttcattctcagcttaattgttttaagggaatatcttttatataataaaattttggtccttgtaattacaactaaggcattatgttaactaaggagagcagcaaaatagtaatccaaggtttcgtcttacttttctcaattcttttacttgaattgaatagtatggagcaaaacttattaaattattttattattataaagttttattagaa

SEQ ID NO: 654062 - DNA, 566 bp, Homo sapiens
aaaaaaccttaaaaatagaaaaaaccgtacaaagtaagaatataaagaaagaaaatatttttctacagctgtacgatgtttgtgttttaaactattaatatgttcttaccattgtagagtcaaaagtttaaaaaaaattcataaagaaaaaagttacaataagctaaggttaatttattatgccctagrcattcacattcactcaccacttactgactcacccggagcaacttccagccctgcaagcttcatttatggtatgtaccctacatagttgtattttttttttatcttttataccatatttttactgtatcttttctatgtttagatatgtttatatacacaaataccatgttataattgcctacagtattcagtacagtaacttgctctacaggtttgtagcctagaagctgtaggcgataccatatagcctaggtgtgtaggaggcaataccatggaggtttgtgaaagtacattctatgatgttccaatggcaaagaaattgcctaatgacgcatttcccagaagtgtccccccacaaccccgacacaccctccacc

SEQ ID NO: 654063 - DNA, 566 bp, Homo sapiens
aaaaaaccttaaaaatagaaaaaaccgtacaaagtaagaatataaagaaagaaaatatttttctacagctgtacgatgtttgtgttttaaactattaatatgttcttaccattgtagagtcaaaagtttaaaaaaaattcataaagaaaaaagttacaataagctaaggttaatttattatgccctaggcattcacattcastcaccacttactgactcacccggagcaacttccagccctgcaagcttcatttatggtatgtaccctacatagttgtattttttttttatcttttataccatatttttactgtatcttttctatgtttagatatgtttatatacacaaataccatgttataattgcctacagtattcagtacagtaacttgctctacaggtttgtagcctagaagctgtaggcgataccatatagcctaggtgtgtaggaggcaataccatggaggtttgtgaaagtacattctatgatgttccaatggcaaagaaattgcctaatgacgcatttcccagaagtgtccccccacaaccccgacacaccctccacc

SEQ ID NO: 654064 - DNA, 612 bp, Homo sapiens
actcaacatttggcaatgcatactgtcaattgtttttcttgcaatgacagcctcgmtttactcattttgagaaaatgtctgccaaatgcccaattctggataaccatacactgtctgttagttgtcctttcaagtaaaaatattgtcccataggaaaaaaacctactagctcagcttgcagctccaacatatcatcagtacctttcattcagaccattatcttactttggttggcaacgatagcacttcatgaatatttctcattttatcgcatagaataatagaaagtacacacgcaaaagtcaagtttcaataacatcaattttttttctgtgtaatcaaggacttacttaagtgaaactagcatttcaaaaaaattgcatgccagtgctagtaaaaaaatacattgactactaatatagtttggagccactgtcttgatccatgttaaggcatcagcagtgccattcacccttacttttatacccagagggaacatgctatttgccatatcaaaggcaaataacatcttagtattattataaaagtacttgaacctcatcgtgaaaagatctcagagatccctaggggcctgcagccagaagttgagaa

SEQ ID NO: 654065 - DNA, 575 bp, Homo sapiens
ggatcttagggcaaagccatggtttagggatgagctttggctccaggtgacacagggaggtcaatgatgtatttgtacgtgacacctcatgcaagaagaatacttcgtggcaacattggaggcttaaaagagataagtaatataaatgtgcctggacaaaacaggtgctcagtagtagttagttatcatgactattcattcacaaagtgaaactggattggcttgctcatagggactgctcctggaagttgttcrgagtttctgaatttctttggcttatctcttaattacatttttttttttaacaacacctcacatccttaagctagcagactgaccatcaatagattttcaatagagtttgaaagtcttaacatatattacagaactaaagtgagctctgatgacttttaatataaacagcattggctattttcgatttccactcccaaaaggctactactgacaagcaaaagttaaaggcatctacacaaattgaaatggttctacaagcaagtgtaaattgatcaacagtggtagtagaaataatgatgcaacttcaaagtggttgttta

SEQ ID NO: 654066 - DNA, 575 bp, Homo sapiens
ggatcttagggcaaagccatggtttagggatgagctttggctccaggtgacacagggaggtcaatgatgtatttgtacgtgacacctcatgcaagaagaatacttcgtggcaacattggaggcttaaaagagataagtaatataaatgtgcctggacaaaacaggtgctcagtagtagttagttatcatgactattcattcacaaagtgaaactggattggcttgctcatagggactgctcctggaagttgttcggagtttctgaatttctttggcttatctcttaattacatttttttttttaacaacacctcacatccttaagctagcagactgaccatcaatagattttcaatasagtttgaaagtcttaacatatattacagaactaaagtgagctctgatgacttttaatataaacagcattggctattttcgatttccactcccaaaaggctactactgacaagcaaaagttaaaggcatctacacaaattgaaatggttctacaagcaagtgtaaattgatcaacagtggtagtagaaataatgatgcaacttcaaagtggttgttta

SEQ ID NO: 654067 - DNA, 575 bp, Homo sapiens
ggatcttagggcaaagccatggtttagggatgagctttggctccaggtgacacagggaggtcaatgatgtatttgtacgtgacacctcatgcaagaagaatacttcgtggcaacattggaggcttaaaagagataagtaatataaatgtgcctggacaaaacaggtgctcagtagtagttagttatcatgactattcattcacaaagtgaaactggattggcttgctcatagggactgctcctggaagttgttcggagtttctgaatttctttggcttatctcttaattacatttttttttttaacaacacctcacatccttaagctagcagactgaccatcaatagattttcaatagagtttgaaagtcttaacatatattacagaactaaagtgagctctgatgacttttaatataaacagcattggctattttcgatttccactcccaaaaggctactactgacaagcaaaagttaaaggcatctacacaaattgaartggttctacaagcaagtgtaaattgatcaacagtggtagtagaaataatgatgcaacttcaaagtggttgttta

SEQ ID NO: 654068 - DNA, 558 bp, Homo sapiens
ttataaaacaaatgattacctttagattgaaagaaagtcatgacccctattgaaaacagacagacaaatgtcggtataggatctgttgaggaacagagggagtaacagtggggaatgcctcaatgctattttgcctttcagcagagatgggcagaagagatttgaaaaagggttcatttttatagatgtatgtaggtatttgtatacgtgtgtatgtgagttcacccacacatgtatgtatgtgtattaataacccactgacctcaragtaagagagaaataggatttacccagtatttacccaagaatccccatcatccttatcccaggattctgcagtcagcaaaccaggctttttaacactctccaatcatgaggtatttaaagagctccatgatttgttttgtatttaacgctgcaataaccattctcagataaacatgtttgagggcttcttgagatacatttttctaaggaaagtttatgggttaatagagctttaattgttttgggtatatatttccaattttccctaccaacatttctgcaaaaggcaca

SEQ ID NO: 654069 - DNA, 558 bp, Homo sapiens
ttataaaacaaatgattacctttagattgaaagaaagtcatgacccctattgaaaacagacagacaaatgtcggtataggatctgttgaggaacagagggagtaacagtggggaatgcctcaatgctattttgcctttcagcagagatgggcagaagagatttgaaaaagggttcatttttatagatgtatgtaggtatttgtatacgtgtgtatgtgagttcacccacacatgtatgtatgtgtattaataacccactgacctcaaagtaagagagaaataggatttacccagtatttacccaagaatccccatcatccttatcccaggattctgcagtcagcaaaccaggctttttaacactctccaatcatgaggtatttaaagagctccatgatttgttttgtatttaaygctgcaataaccattctcagataaacatgtttgagggcttcttgagatacatttttctaaggaaagtttatgggttaatagagctttaattgttttgggtatatatttccaattttccctaccaacatttctgcaaaaggcaca

SEQ ID NO: 654070 - DNA, 643 bp, Homo sapiens
tgtgtgctcaccattgtggtattgcatatacccacctaccttagccacagccaattcttacccatgaacacctctaattaaactgaagactaaattgttcaacccactgaaaaaatactggggaaaaaagtacacatcaagaggaataaaataagcttcaggagacctctgccattccagcaccacaggagacagtggccctattcacacacccrctacattgctactaaaagcacgacctaagaaagccatcagacaaaattctgtataaccaaggaacttacacagagtctttgcaactgaaattacccagacccaaagctagggaatcataaactatacacattatagttacatcctcaaggagaaaaaaaaaacccagttcagtcaaaactcaattcaaaaataataagaagaaacaattctatccagatgagaaggaagcagaaaaataattctggcaatatgaaaagcagagttttgcaatgccctcaaaagatcacattaactctttagcaataaatctaaaccaaaatgaaatcttggaaataccagataaagaattcaaaatattgatcataaagtttctgaatgagatccaagaggaagtcaaaaccaacataaagaaatcaagaaaacaact

SEQ ID NO: 654071 - DNA, 533 bp, Homo sapiens
gaatacaaggatattatgtgttcatggaatggagaaattaataccattaaaatatccattctacctacccaaagtgatctacagattcaatgcaatccctawcaaaataccaaggacactcttcatagaaacacagaaaaaaagtcctaaaatgcatacagaatcataagacttcaaatagccaaagtaatcctgaacaaaagaatctggagacatcacactacctgaattcgaaatatactacaaagcgatcacaaccaaaacatgatggcactggcataaaaacagacacatagatcaatggaacagaattgtgaacccagagataaatccacacatttacagccaactcattatcaacaaatgcattaagaaaatacattgaggtaacaacagtcttttcaataaatagttctgggaacactggatatctatatgcaaaagaatgaaacccccatgtctctcactgaatacaaaaatcaaaccaaaatgaattaaataaatacttcagtgtaaggcctgaaactatgaag

SEQ ID NO: 654072 - DNA, 481 bp, Homo sapiens
ggacccctaagtgccttttaagccaccaagagtattaaatccttccagtgtaactttcccataatgtgtactttattccattgtaagtctttgaaagttggcgatgcatgtagaatatgttatgctgctggccccgaatttcttagtaggaccttcaagaccgtacacaacgatcccaaactgcctgcgcttgtctcctctgtgccctccacgtcctttctgctcccacggcccaggccccagtgcacctcagggaaggtgtgtttcatgttgtttcgtgttttcatattgtcacttacttttgtgttgttcgttgttgggaatatagttagtcccaatggttgctcagtgcattgtaagttctcccaggagtggctgccgccacagtgccgtgggctctggagtggtcctttccmcccagctgtccattcacagtcagctctgcagaaaaagcagagcctgggagggaagaggctgtgaa

SEQ ID NO: 654073 - DNA, 613 bp, Homo sapiens
cagaaggaacagaaagccacctgacctaagctctagctgtggtagaaaaaggtgtgtaggcctgctatggtgacatagggctagttactttacctgtccctttgctctacacaactgatactatgcatagttccttctacctcaatccaggccctgttacctctgtattgtatcaccaaattgtaatttgaaaaaaaaaaaaaaaaaacataataaaaagggctcaaatatgccaagattttgttttattttattattatctttttgagacaggatctcactctgttacccaggctggggtgcagtggtgcattcacgggtcactgctgcctggacctccagggctcaagcaaactttctgcctcagcctcccaagtrgctggaactacaggccacagtgcctggctaatttttacaattgttcttgtggagagagggtctcacatgttgctcaggctgatctcaaactcctgggctcaagcgatcctcctgccttggcctctcaggcatgaatcactgcacttggcctccatgatgttaaaatgagatatttgtgatatacagcatgctgaacaatctctaacatgataattagaataaccttcaaatatgt

SEQ ID NO: 654074 - DNA, 618 bp, Homo sapiens
cacttctatcctacttaatccatcaaatagtggactttagagctatgaagctagagacaacactgtagtcctcaaatgattaccaatgactgcaattcacatggtcccttttcctttgccttattaacaggaaaattatgagagttttcaggaataagacacatggtcacttgagactttgtgtgggtgaacatgacaggttttaatgcctttttaaaaatagttatctacttccaacaatgagaagaaatgctttgtgattcttccatttcaaacatcaatctcttggaggatctctccctaactcccttctaataaaagcactccccagtgatctagtgtcataagaatttkctcagtctagggctagtttattttccaaaaatgccatctgtaagatctacgtcaatttcctttatagcaacattttatgtagtgtagggcattaacaaaataatttttaatcttcattttgcatgggttattcactgaagaatacttctagtctggagaattctgacaaggactacaattaaagctaaaatttagctagaaagcagagttttatttttatgtatatttatggccaccaacttgaataactccaaggtcacttct

SEQ ID NO: 654075 - DNA, 443 bp, Homo sapiens
tgcatcatctacagacctatgagcatgaaataaatgttgctgttgtaagcatctgagatttgaggattgctcgttatactacattatcttgtaaaaatttgactaatataatactgatctttccaattcaaatataacattatagagttgttacttaattcccttgatatttatatattttattttacagtgacaattttggttcctagcaacattacttactttatattatcccgtcatatatatgtaaaataatttaaaaataataatacgaatattactactaagcagtagactrctggtcaaattttaacattttcttgcagttagttcttttacttcttgtcttctctctttcctactacttacatacccaagtgggcctctcccctggacttttcccttaaaggtctttggaagcaccaggacagaaaaggagggtt

SEQ ID NO: 654076 - DNA, 567 bp, Homo sapiens
cagaccatatcttattcatctattcatctctagtttctactccagttcttgcatagagtagctgttcagaaagttactattaaagaatggatgaatagacaggcaaacagagccaaacattcaggcacatctgcaaaccaaagcaggaacaaatgcatctgaacactgcccaaacaagagttgagggcctgtatgtataagtcagacatcttatcacattggccaggcagggtaagccaaaaaggactggcatgtgcatcacttyaaaccaggtagaggagaagctgaggattctaaggctcattaactaaatcatagtgagaaactagatcataaccctgggtataggtcagtgaccaggcatggtggccagagaacatggagggaagtaaagaaggcagggagagagggacccaagatcaaacccacaagacaatgagtcagtctttgtggcttttgggttagcaaacccccagctgctttggtgagactatcatagcttcttaaagtgacaatgctccctggacaggacctgtcactaagttttaggttaaaagaatgaaaatc

SEQ ID NO: 654077 - DNA, 445 bp, Homo sapiens
ttaaacatgccacttttatttatctaagtcattcttataactctatattcatttaatttaccaatagtaaaacacagtgagtattggtaataaatattggtcttctgctcagtccctgattggatttcttctcagggagagagaggagactcgttagaaaggggagggtgagatcaggtgaagaaatggcagggaatgtaggctcttttttggttccagatgaattttaggattgtcttttctagttctgtgaagaatgatggtggtattttgattggaattgcattgaatttatagattgcttttggcagtatggkcatttttatactataagtccatagtcaccacaacagcgtggtactgcaataaaaataggcacatagacaaatggaacagaatagagaacccagaaataaagtaaaatattgacagccaactgatcttt

SEQ ID NO: 654078 - DNA, 629 bp, Homo sapiens
ccaggcaaaggttgtgccttcaattgtgaggatatgcattttatagatgctgaacctgagcctcagagaagaaacgtgaattgtttgtagtggaatataaagctgaaagaaaaactgggacttaaagtatagtctttggactctgaagtctatgattttttcattatatgtcagctgttgctcaactgacccatcaatcaaatgggagccaggagtatcccctcagaatttctccagacttaatgttccaggaaagctgatcacactttactccttttggcagcccatataataatagtgcaaccaaacaggaaaagaataaagaggagagacagagaacattaaggtagtaataaaattcatccacaagctgaccacccagaaataatcaattttgtgcatatcctttttgtcattattttagaatccattatatttcctggmtgatattatttccttaagttctaatcatggggaactatttttgtctttgttccatagaacattagaacagaaagtgacctctgagactatttagtcaaacttccttaatattcagatgaggaagtcacaactagaaaaatgtatctatagaccaaagcaaagtcctaagaagaaaaacaattagg

SEQ ID NO: 654079 - DNA, 617 bp, Homo sapiens
acctaagccacaggtaaaaatagtctatctttgctatttttaactcttttacaatctgacctttgccgcagccattcttcagaaatggctctgtaggtggctgctaaggagagaaccttactactaaatccagtccttccttccctccctcccttccttccttccttcctccctttctccctttctcctttcctccrtcccttccttccatttttttttctaacaatagagggcttttattgcatataaaaaatatcacaaataggtcttagaaatcatccagcatcttctcgtttccatagctggataactcttagaccttattcatcagacagcggaactgttcctttcttagagacatagataccatccaacaattttttggtatccttgtttttaactgctgtaacttgctaaatcaaagaagctgaatttggtacaagtttactgttattagcttcaaaaatgaactcctctttctgggcttgacatactgatggaacaagccacacttggcctcatctgaaccttgcagatgtatttttcacttaagaaatttctaatgtcaacaagagacccattctcctgaatgacaatgctgagtaggaagtaagcat

SEQ ID NO: 654080 - DNA, 395 bp, Homo sapiens
cagttctcagaaaataatcagaactatggacaactctttggggccaaaatattattcttaatcgtttaaaacataactattttactttagcatagttttagatttacagaaatattacaaagatagtatagaaaatttccatatgtactacatccattttcccctaatataaatattgataaggtccatttgtcccagtgaatgaaccaacattgatggtaactaaaatgcataccgtattcagatttccttagttattacctaatgacattttattgctccaggatcctatctagrttatcattacatatagtcatcatgtctttttaggttcttctaagatgtgaatttttcagacttcccttgtttttgctgaccttgacagttttggggag

SEQ ID NO: 654081 - DNA, 365 bp, Homo sapiens
ataaaattgataatagccctttactgaaaagacccccttcctgcctgggaaccagtctgcctttgcaggactaacaaattagttataagattagagagtatggattaggggccatgtagcctctgattccaagagtctgaaccacmcccccaaattgctcctggggataacatcactattgtaaaacctaatttcagtgcttgagatattttgcagaccctgcactggatggatcagctgacactacccagacgggtaatctggctcaaccagttctgccatcccacccaggaacagaagacagcaagaaaactttacttcaaccccttatgattccatctccaacctgacgaatcagcacttcc

SEQ ID NO: 654082 - DNA, 506 bp, Homo sapiens
cccagctggcttcgcctaggggatcccgtgtcagggctgcgggtggagytgccgccagtcctgcgccatgtgcctgcactcctcagcccttgggcagccgatgggaccaggcaccacagagcaaggggcagcgcccgttggggaggctcaggctgcgtgggagcccaccatggtggggggcttgggcatggcgggctgcaggtccccagccctgccctgtggggaggcggctgaggcccggtgagaattcgagcgtggcgtgggcaggctggcagtgctgggggacctggtgccccctctgcagctgctggcccgggtgctaagcccctcactgcccggggccggcagtgccagctggctgctcggagtgcggggcttgcagagcccgcccccacttggaactcgtgctggcctgtgagtgccgcgcgcagcctggtttcccacctgcacctctccctccacacctccccacaagccaagggagctggctccggcctcgactggcc

SEQ ID NO: 654083 - DNA, 549 bp, Homo sapiens
ttggctcatacagttatgaagactgagatatcccaagatctgctgctggtatgctggtgacccaggaaagttaatgatgtagttctactctgaatgctgtcaggcttgagacccagaaagagccagtgtttcagttcaaatccaaaggcagggaggaactgatgtcccagcccaagacagttgggcaggaggagttctgtctaacttatgggaaggccagcattttcttttttttttttcaggccctcagcgactaggggaggcccacccatgctgrggagggtaatctactttactcagtctatggattcaaatgttaatctcatccagaaccaccctcacagacccaaccagaataattctccaccagtgtttcggtaccctacagtctagtcaagtggacacataaaatcacagtgggtttgccttactctctctttatatgtatctgtcacaatagctcataattggttttgcattaaaattcttacgtcaagattaaaaaaaaattgagtcaggtgtttgcttttgtttgtttcactcccaata

SEQ ID NO: 654084 - DNA, 549 bp, Homo sapiens
ttggctcatacagttatgaagactgagatatcccaagatctgctgctggtatgctggtgacccaggaaagttaatgatgtagttctactctgaatgctgtcaggcttgagacccagaaagagccagtgtttcagttcaaatccaaaggcagggaggaactgatgtcccagcccaagacagttgggcaggaggagttctgtctaacttatgggaaggccagcattttcttttttttttttcaggccctcagcgactaggggaggcccacccatgctggggagggtaatctactttactcagtctatggattcaaatgttaatctcatccagaaccaccctcacagacccaaccagaataattctccaccagtgtttsggtaccctacagtctagtcaagtggacacataaaatcacagtgggtttgccttactctctctttatatgtatctgtcacaatagctcataattggttttgcattaaaattcttacgtcaagattaaaaaaaaattgagtcaggtgtttgcttttgtttgtttcactcccaata

SEQ ID NO: 654085 - DNA, 515 bp, Homo sapiens
agcaagtacttttgttggtattaatcagtccaccagggctagccaggtacaagattatcaagaagtagatatttttatttattaatcaagcagtatattttgtcattcaattcttagtactcaatgagataggcaccatactattcccccttctttatagatgacaaaactgaggtacatggaggttaagttgccsaaggctacatcactagggaatagcagggctggactagaaactgaaacctgtcgtaactcatttgtgatattttctctagatgctgaggatctaggcaagagatccctgatttcaggaaccttccagcctagtggggaagataatcaagtaaattcaaaatattaataacaggccatttcttaaaagttgggtagtgtgcaggtagaattgtgggatagagcaaccagggaaaccagtggtatttttttcttcttcctcacccagaccatttttatcttaccagtagcaccatatgcttctacgacttacactttccatg

SEQ ID NO: 654086 - DNA, 623 bp, Homo sapiens
tgtgggccaaattcagctaatgagccatgagtttgagtcctctaacacttgcatgtgaagttggattttatattatttctttcatatttctgttaatattcatcatttgcttaagaattggactttctttatgagggttggagaggggaaagtggaggaggtttaattttctttgatctcagtgccacatgtaagtaattaagtaaacttaattccttttcttcccttcaaaatgggctgaaaaagcagacttctagattttcatgagtattggggatagagagccttctcacccatcattttttggcactcttcctaaaggcattagatactaaggatgaccctggtttacacctgttattctrgtgtaattaccttcactccccagaattctggtccagtttggttaataaattttgtctccttcatgaggaaaccatatattcttacctctctaggtatattttcttccatgaataaaacctttggatttccagaatagttaagatatactgccttctaaagaataaaattcgttaaaagtaacatttttcttctgcaagttgaaatcatctgcaatgtcccagtgcagcaatttgacccaataccacttttcaggggaa

SEQ ID NO: 654087 - DNA, 538 bp, Homo sapiens
gcattgtgaattaatgaagagctcagggaggcagtgggagacttttcacttaacggggccattctaagcaatgaaatggaaaaatgcaggcatccccagaacacaggctgaaaggattagatgaattttgaccagatttaattgtgaccagattgtgggagtgaaagtttcagtttgagtcaagttaactgttttatttcatgtcccattttttatgtttccatatagccatcttgctttttctaaattacatggcttattgtatttgagttcctcctgcttttgacagctccatggcttccaattttgcttctgctgctttgattattattcctgattttgttgttgatgagacgtgtggttttcttcaattagctctgtcactcttacaaatrtgtgtgtctcgcaagtgtcctaattaaagtcaggaggaggaggggggaagattacaggcaattacaacagtgccatcctcctttctcaatgcgcttttctcatcattggggtgcattcttctgtatctccattttgtaagcac

SEQ ID NO: 654088 - DNA, 610 bp, Homo sapiens
tagttttctattttgctattgtaaccaattaccacagatgtagtgttttaaaacaacacagatgtattcttgtgtagttctggaggtcagaagtccccaaatcaaggttatcagagggctgtactcctccaggcggctctagggagaatccatttcctgccttttctggcttctgaaggctgcctgctttccttgactcgtggtttccttcctctatcttcaaagccagcggtgtagcatcttccagtctttctgtgtctctgacccacccgccttcctcttataaggacccttgggattacattgggtccacctgataatatatgagaattgccccatctcaggattcttaatgaaatcatatctgcaaagyttcttttgccatataaggtaatatattcatcagtttggggcattagggcatggacatcttggggcggggggggggtgcatttttcagctaccacagtacccaagtgttctcctgagagctggcttctgcttccgctctcctctccctaatttctcaattacactatctggatctatccacagaaaatgtggaatggaagcatagctcagtgggttctggattcaactgctagtgcaa

SEQ ID NO: 654089 - DNA, 504 bp, Homo sapiens
aagttgtattgctttttatgagctagtcttgaaagtcatgcagagtccttcctaccacatactatttgtccaggaattcacagaggtctgcccagatcagcagaaaaggaaacaaactcccctcttgatgggggttggcaaggtgctggaagagcaaatgagactggaaatattgccatggccgtgtttgaaaaacataatctgttacattctgcgtatacagtcataagccatataataatgcttgggtcaatgacagattgcatatacaatrgtggacctgtgtgattataatggagctgaaaaattcccatcacctggtggtgttgtagcccatcttaacgttgtagtgcaacacattagtcatgtgtttgtggtgacactgctgtgcacaaacctactgtgctgccagtcatacaaaagtgtacagtaatgtcctaggccttcacattcactcaccactgactcactgactcacccagagcaacttctagttttataagt

SEQ ID NO: 654090 - DNA, 596 bp, Homo sapiens
gctatagaaaatgctacataaaaaccatgcagtgggcactgagaattccgaggtaacctcagtctactaagtttattktacttcattccattgggcagtgagacctagatgggtttgtaagacattgagagatgttggtcttttggcagcttatttgtctctatggtaagtactgcatactgggaacaattaggaaattcctcccatctttgtctcaggtaaaccattatctctgcccacttggttggatttctgttggctctggccttggttctctggttgcttatggtatgatttgtaagacatgactcaccttctggaaagctagaggccacatcactgtcaactattgaatatactcttgacctgagaccatgatgcatgttaaatgctctttggtgtggccagagggagaggaatttaattgctttggcttatgatgggccatcttctctttgctcttgatgttttgccagaggcgctcagttgatcttccatgatctcgtctctgtacacagttggtcctccaactcctacttctcttcatagtatatctttgtgtttccatcatttagcacataataattatttgctgt

SEQ ID NO: 654091 - DNA, 610 bp, Homo sapiens
aatgcaccagtgaagggattaatgggttctactcagttgctgttgaataaagaggacctagcaatatacatttccatgttataggatattggaagataaaggattgaatagatatttatatatgtgcacttctttgaaacatggccagaagtcaatatcttctcaggccaaatggcaatacttaagaactggataactttcaaatttgtaggtgctggaagatactaagtatgttggcttagtggaaattctccagcttcttcaattgtcagaactaaatgctattctgagaaggagctctgatgtccccatggtaacagggccccattaaaggcatgacatcacaaagctgtccttgtttgaagacacttgggaatttcaggtataaacggaaatactgttaaaggcaaattatacatacatattctgtgtaattatgtgcacatgtatagatatgtctaatttagccacatctctcatttagttttgtttatcattaggctttttagtgacttaaatctcagaygtggatatagctccaggtgcttaaataaaagctcatttaaattttggagtaaatatcaattcctttgcttatttacttattatt

SEQ ID NO: 654092 - DNA, 603 bp, Homo sapiens
aagcttcatgaactttcacttgcaatgagaagcgttagcaatacattgacatcattgttgtgtgtttttgtgtaatttgggagagtaagatatttttattgcraaaggttaaatcactgactttttacatcttacattactctcatttataattccctttctgtaggtaacattgtcatggctcctggcacctctgggatctagctgaagaagtgtgagttttggcattaatgaaatatatttatgtggttctaagctgcttcatttacagtaattataaaccattctggtataggagtggcttccatgaatattcctatctctctctgttccaacacaccagatgtcgtgacaagaaacaccaaaccagcaatcttatttttaaattttaataaataagtgtatctatttatggggtacaatgtgatatgttgatacatgtttacattatggaataataaaatcaggctaagattttcatcacttcatatacttatcatttctttgtggtgagaacatttaaaatctattccttcggtaattctgaaatatataatacattataattagctgtagccaatacattgtgcaatagatcaccag

SEQ ID NO: 654093 - DNA, 603 bp, Homo sapiens
aagcttcatgaactttcacttgcaatgagaagcgttagcaatacattgacatcattgttgtgtgtttttgtgtaatttgggagagtaagatatttttattgcgaaaggttaaatcactgactttttacatcttacattactctcatttataattccctttctgtaggtaacattgtcatggctcctggcacctctgggatctagctgaagaagtgtgagttttggcattaatgaratatatttatgtggttctaagctgcttcatttacagtaattataaaccattctggtataggagtggcttccatgaatattcctatctctctctgttccaacacaccagatgtcgtgacaagaaacaccaaaccagcaatcttatttttaaattttaataaataagtgtatctatttatggggtacaatgtgatatgttgatacatgtttacattatggaataataaaatcaggctaagattttcatcacttcatatacttatcatttctttgtggtgagaacatttaaaatctattccttcggtaattctgaaatatataatacattataattagctgtagccaatacattgtgcaatagatcaccag

SEQ ID NO: 654094 - DNA, 603 bp, Homo sapiens
aagcttcatgaactttcacttgcaatgagaagcgttagcaatacattgacatcattgttgtgtgtttttgtgtaatttgggagagtaagatatttttattgcgaaaggttaaatcactgactttttacatcttacattactctcatttataattccctttctgtaggtaacattgtcatggctcctggcacctctgggatctagctgaagaagtgtgagttttggcattaatgaaatatatttatgtggttctaagctgcttcatttacagtaattataaaccattctggtataggagtggcttccatgaatattcctatctctctctgttccaacacaccagatgtcgtgacaagaaacaccaaaccagcartcttatttttaaattttaataaataagtgtatctatttatggggtacaatgtgatatgttgatacatgtttacattatggaataataaaatcaggctaagattttcatcacttcatatacttatcatttctttgtggtgagaacatttaaaatctattccttcggtaattctgaaatatataatacattataattagctgtagccaatacattgtgcaatagatcaccag

SEQ ID NO: 654095 - DNA, 616 bp, Homo sapiens
cccaatctgatcatttttggggatacatctttagtttgactagcatcaaagtgctcctccaaatggcagcaccattgtgcagttccaccagcagacaaagatttcttgatacttggtgatacaggttaactacgtgtcaccaccaatatcatgttaaaatgtgatccccactattggakgtggggtctagtgagaggtgtttgggtaataaaggcagatccttcatgactggcttggtgccattctttcagaattgagtgactgcgctcgctcttagttctccagagacgcctctgttaaaaagagcctggcacatttttcctttccctgtcttgctccctgtctcagcatgtaacatgccaactctccttcaccttctgccatgactggaagcttcctgaagccctcaccaaaagcagatgctggcaccatggtacttgtataaccacacgaaaggaagaattcctatgccaattaaagggtatttgtgtgtacgtgtgtttgcatgtatgatgaacacatataaatagaatctttttggcatgtagtttactattagcaagcaatatacgcagtatattcataaattaggtaaaaaattcaacaaaactgtggc

SEQ ID NO: 654096 - DNA, 616 bp, Homo sapiens
cccaatctgatcatttttggggatacatctttagtttgactagcatcaaagtgctcctccaaatggcagcaccattgtgcagttccaccagcagacaaagatttcttgatacttggtgatacaggttaactacgtgtcaccaccaatatcatgttaaaatgtgatccccactattggatgtggggtctagtgagaggtgtttgggtaataaaggcagatccttcatgactggcttggtgccattctttcagaattgagtgactgcgctcgctcttagttctccagagacgcctctgttaaaaagagcctggcacatttttcctttccctgtcttgctccctgtctcagcatgtaacatgccaactctccttcaccttctgccatgactggaagcttcctgaagccctcaccaaaagcagatgctggcaccatggtacttgtataaccacacgaaaggaagaattcctatgccaattaaagggtatttgtgtgtacgtgtgtttgcatgtatgatgaacacatataaatagaatcttyttggcatgtagtttactattagcaagcaatatacgcagtatattcataaattaggtaaaaaattcaacaaaactgtggc

SEQ ID NO: 654097 - DNA, 570 bp, Homo sapiens
ttaaatgtagacaatgtgggggctgtgatactatttacctgagaaaagtgagaaaatatgaaggagacagaaacttggaatctgtaaaacattgcgtccgtacactcttcttattataaatcttttygacagtgatataaattgacattatgttcagggtcaaatgaatagctttgtcactggatttttttatatgttaaggaaagcaaaatttatccacaacctttacaaagcatcaaacagaatggaagtacgtaagcttaagtactcagcactaaagcataatatattacatatgtaatatattcatatttatatagatactaatacagttttgtaatttagcattttgtttcctttatcttgctatatgttagttgatttctgaatgacttagtctatttttatcaaatatttactaaacatcaaatttgtgtgtgtgtgtgtttgtgtgtttccagaagttctattaccagcatacaactgaaaagacatgctcatagccctcaaagaacttatagcaggaataagctattctacaaaaataataacacaatgtacttagttctg

SEQ ID NO: 654098 - DNA, 556 bp, Homo sapiens
agtttatgggagaagattctaaccttacctgtagctgagtcaatttagagagctgagcaaaatacaggagtagaggaagcagcggaaaaggtcttatgaactcgctgggtccccaagcaggccattcctgcctggcaccagaggaatccttcaggagggcagccagagaggcaggaaaaatgccacaggaagacggaagtctccagctgaactttataacaatttgaacagggtgagaascctcctggccagaactcgggggagggtgtgaatcctgtgtgcagactccaaaggcagggaaagaacgaaaaccctactttcttttgtagctggaaggtgggtagcctggggcaagttctcaaccctgctttcccactgcctggaaacagactcaatgctgttggggggcacagtgggaggagattggccctttggattgtgtgggagctgggtgaggtctgtgactgccacctttcccctacttcactgacaacctgcatgactcagtagaggcagccataatccttcaaggtacataactccattgacctgggaa

SEQ ID NO: 654099 - DNA, 590 bp, Homo sapiens
atatccctcataatgcagagatgttaagttaatcaagcttgtttgatgtgttgaattgtatgggaagtattgtcaaataacaaagtgatgttaaatcttttaaaattatattttatggatatttcagaaattgtatgaaattcatagaaatctaatagtcctggcataactttgtcattatttttccttactagttctgttggcccagctcactttgttgaaagaacttcttagaaaaatataatgctgccaattcctttcctcaaaaagaggaaataattcttgaaatggaccgtcacccattgtccatttttttaacacccttgcctattcttgcccttaacccaaatcacaaaaatgctaagaggtaaactttttaaaaasacgttcctgaggaaatttcaactaaatccactacagacattgcataaattcactgggcttctcccataaagtttcaaattggcccaaacagccgcttcctaatataagacagttgatattcctttggttgattgagtattggtgtttctttgattgacctccctttggttgaggttgatgcgtttatttgggaatttggggacagt

SEQ ID NO: 654100 - DNA, 497 bp, Homo sapiens
tctctcctaaaaaagacattaacatcttattttaaggaaacaacttagaaaaaagttttccaggtggattaacatgaaagagacccaggtaccaggaagtttgcattttcatccaaaaggctttgtctatacagattttcacttcaataaagctgaggatgacctttaaaagagggaagactactccagcatatagatccagtggtcctaaactcacctcagtatgctgagcarcaacattgttcaattatttatgatttagtcttatcaatggattattatttcaaaaaaacaaaatgtttatgaacagaactttaaaaatcatacctacaaccaactgattttcaaaaaagtcaacaaaaagatatatactggggaaaggacaccctgtcgataaatggtactggaaaacatgcatagccatatgcaggagaataagatggaacccatctctcaccatatacaaaaactaactgaagatgggtaaaaaatgttaa

SEQ ID NO: 654101 - DNA, 497 bp, Homo sapiens
tctctcctaaaaaagacattaacatcttattttaaggaaacaacttagaaaaaagttttccaggtggattaacatgaaagagacccaggtaccaggaagtttgcattttcatccaaaaggctttgtctatacagattttcacttcaataaagctgaggatgacctttaaaagagggaagactactccagcatatagatccagtggtcctaaactcacctcagtatgctgagcaacaacattgttcaattatttatgatttagtcttatcaatggattattatttcaaaaaaacaaaatgtttatgaacagaactttaaaaatcatacctacaaccaactgattttcaaaaaagtcaacaaaaagatatatactggggaaaggacaccctrtcgataaatggtactggaaaacatgcatagccatatgcaggagaataagatggaacccatctctcaccatatacaaaaactaactgaagatgggtaaaaaatgttaa

SEQ ID NO: 654102 - DNA, 497 bp, Homo sapiens
tctctcctaaaaaagacattaacatcttattttaaggaaacaacttagaaaaaagttttccaggtggattaacatgaaagagacccaggtaccaggaagtttgcattttcatccaaaaggctttgtctatacagattttcacttcaataaagctgaggatgacctttaaaagagggaagactactccagcatatagatccagtggtcctaaactcacctcagtatgctgagcaacaacattgttcaattatttatgatttagtcttatcaatggattattatttcaaaaaaacaaaatgtttatgaacagaactttaaaaatcatacctacaaccaactgattttcaaaaaagtcaacaaaaagatatatactggggaaaggacaccctgtcgataaatggtactggaaaacatgsatagccatatgcaggagaataagatggaacccatctctcaccatatacaaaaactaactgaagatgggtaaaaaatgttaa

SEQ ID NO: 654103 - DNA, 497 bp, Homo sapiens
tctctcctaaaaaagacattaacatcttattttaaggaaacaacttagaaaaaagttttccaggtggattaacatgaaagagacccaggtaccaggaagtttgcattttcatccaaaaggctttgtctatacagattttcacttcaataaagctgaggatgacctttaaaagagggaagactactccagcatatagatccagtggtcctaaactcacctcagtatgctgagcaacaacattgttcaattatttatgatttagtcttatcaatggattattatttcaaaaaaacaaaatgtttatgaacagaactttaaaaatcatacctacaaccaactgattttcaaaaaagtcaacaaaaagatatatactggggaaaggacaccctgtcgataaatggtactggaaaacatgcatagccatatgcagragaataagatggaacccatctctcaccatatacaaaaactaactgaagatgggtaaaaaatgttaa

SEQ ID NO: 654104 - DNA, 389 bp, Homo sapiens
tatagtttttaaaccattagagtatacggcatggtactggcataaaagcacagatcaccggaacaaataggaaacccagaaacaaatccacacacctacagtaaactcattttcgacaaaggtgccaagaacatatattgaasaaaggacagtctcctcaataaatggtgctgggaaaactggatatccacatggagaaaaatgaaactagacctctatttcttgttatatacaaaaatcaaatcaaaatggattaaagacttaaatctaagacctcaaactatgaaactactgaaataaaacattggggaaactctccaggacgttggactgggcaaagattcttgagtaataccccaaggacaggcaaccaaagcaaaaatggacaa

SEQ ID NO: 654105 - DNA, 293 bp, Homo sapiens
aattccctctgctttcaagtttttagaatgtgtattatctattttactgctcaatacagggaggaaaacatagataagtataattatagagtgtatcaktcaattatttaaatctattcaatatttgaataattaggcccacttcatcttctatcaactgttttaatatttgttcagctgagcttcacgcctcaagtctcatcccactttcttaccttctccacatctttccctcagcctcacagctgcattgctccaacatagccatacagttttcttttcaaagcaaatat

SEQ ID NO: 654106 - DNA, 293 bp, Homo sapiens
aattccctctgctttcaagtttttagaatgtgtattatctattttactgctcaatacagggaggaaaacatagataagtataattatagagtgtatcagtcaattatttaaatctattcaatatttgaataattaggcccacttcatcttctatcaactgttttaatatttgttcagctgagcttcacgcctcaagtctcatcccactttcttamcttctccacatctttccctcagcctcacagctgcattgctccaacatagccatacagttttcttttcaaagcaaatat

SEQ ID NO: 654107 - DNA, 335 bp, Homo sapiens
cgctcccactcctgattggccgggccagcccggggmggcccggcgggaccccggcccgcgtctcagctataaagatagccccggcatgacagccgcggcgaagctcttctagttcatctgctggccggctctcagtccccgtggcgccccctttcctcttgtcccagagcgctctcgactccaccatgccaaggggattcctggtgaagcgaactaaacggacaggcggcttgtaccgagttcgccttgcggagcgtgtcttccctctgctggggccccagggggcgccgcccttcttggaggaggctcccagcgcctccttgcccggcgcggag

SEQ ID NO: 654108 - DNA, 335 bp, Homo sapiens
cgctcccactcctgattggccgggccagcccggggaggcccggcgggaccccggcccgcgtctcagctataaagatagccccggcatgacagccgyggcgaagctcttctagttcatctgctggccggctctcagtccccgtggcgccccctttcctcttgtcccagagcgctctcgactccaccatgccaaggggattcctggtgaagcgaactaaacggacaggcggcttgtaccgagttcgccttgcggagcgtgtcttccctctgctggggccccagggggcgccgcccttcttggaggaggctcccagcgcctccttgcccggcgcggag

SEQ ID NO: 654109 - DNA, 529 bp, Homo sapiens
ggcaccagggaccagtttcatggaagacaatttttccacagatcaggggtgggcrgagtttgggggaatggtttctggatgattcaagcggattacatttgttgtgcaccatatttctattattattattgcattgtaatatgtaacaaaatagttatacaactccataatgtagactcagtgggagccctgagcttgttttcctgcaactagacggtcccatctgagggtgatgggagacagtgacaccaaagtgtgctgcttatgtccagtctacttcgtaatctcattttgattgctgtcactgcagaaaaccctgtaacattctcaaaattctattctctctagggtaaaattaaactgcgggacatagcgcagaagacttgtcacaatttaggaccaacctaccaagacttcttgatctctttccacttcttgcccctcactgtgtttgatttctgccttccagtctgaacttctcactatattccagaaaaggcctgttaaagagatctggtagtcaaaagca

SEQ ID NO: 654110 - DNA, 524 bp, Homo sapiens
cccaggctcacacatcactcaataaaggtttgttgaatgaaacaataaatggatgcaagactaaatgaacaaagaaaagccacggggaagataacaatgttatgtcataattcaggatcatctttttctgttttttcccctccagctttattgaggtataattgacaaataaaaattatatatattcaaggtgtccaacaagatgttttgatatacatatacattgtgaaatgattaccacaatcaaactaattagcatgtccattacctcacataattaccttttttatgtgtgctgagaatacttaagatttgctttcttagcaaattttaagtatacaatacattatgattaactatagtcatcatactktacagtaagtctccagaacttacttcatctgcaggtttgtactctgaccaacatcatcttatttcactccccaccccactttcagcactggtaaccacatttctattctaagccttctggtgaaatttctttcttatttcactcccagtga

SEQ ID NO: 654111 - DNA, 519 bp, Homo sapiens
gtgaaatttctttcttatttcactcccartgagtaacacaagagaaaaataaacaacaaaagccagtcaataattataaagtgaatcttaccagtatagagttataagccttgtttttacttcactgataatgttgtcgtgaacactgtttgaataatgaagactaaaggaatgatggcatgcactgtgagttcttgatgtggttgaagcaaaattcccaacaaacagacattttgctatttcattagtgtttatggctgataaataccttgtatgtttgctatactattgtgttagtaacataattttatttttatgtaacactaacaataaatagataaaagcaaaattgggaggcctaaaattttaatttcaagttgttgtttggaaaaaaaattacattttgtttttaagtaactgactttgagctccaaggatttaattcagtaaattgtctctcaggatgcatgaatatataagcagattaactgatgggcagtgaaatgcaattaccaaatg

SEQ ID NO: 654112 - DNA, 388 bp, Homo sapiens
atggaattcataacgtatgtggatgtactcaagggaggcctacagtataatgatgagtattaattcagaccactggaatcacatcccagtgtggtatccaatattcatgatggcccctaattatccccagttcctggtattcatatccttgtgcaatcttctccccttgagtgtgggctgaatttagtgacttccttctaggaaatagaatatggcagattttttgtactgttatttctgagagtaggttacaaaaagactatgactttcttcttgggtgctccctatttgctctctttttcttgctctaaagtaagtcagatagctgccatgttttgagttgcyttaggagaggcccacaaagcaagaaactgagggagatctctga

SEQ ID NO: 654113 - DNA, 515 bp, Homo sapiens
cattcttctcagtgggagcctctgacaatggctgtttctagttggccatcttggcccctcctctgcagtgccttttttagtaccttagttgttcctgttttcttcagtcatatcacgtttattatcaatagtcttaaatacttctacataccactctcctaacagatgatccaaaataagagaggtaaaattatgctgagtagcactcagagtcgaaattakgcctctgcaaatgagcttccaagagaataaatgagcttccaatagaatcagtggcgaagatctggacaatagtgatgatctttcctgcagctttggctgagagaaaataaaaaacaggattgagggtaaagaataatagtcttcagattcccagaaatagattgacaattgcacagccatggttagtgttagggttagaactgattttaaacttgtccaattgtctaattcgtgctaatgatcagtaatgagtagtggtctcactccaatgaacatgcttctcaggctgacat

SEQ ID NO: 654114 - DNA, 560 bp, Homo sapiens
atatgatttggctctatgtccccacccaaatctcatcttgaattgtaatctccataatccccacatgttaagggaggaacctggtgggaggtcattggatcatgggggcaattttccttttgtattctcatgatagtgagtaagtctcatgagatctgatggttttacaaagggcagttgtcctgcactggtgcttctctctctcctgcarccttatgaagaaggcgccttgcttcccctttgccttctgccatgattgtaagtttcctgaggcttcaccagccatgcagagctgtgggtcaatcaaacctctttcttttataaattacccagtcttgggtagtatctttatagcagtgtgaaaacggactactacaatagagtaggggatagattatattttccaagaagctatgatagggttatattgttcatgtccctgattcagtatttattcaatatatacagagcatcctttggtacttaaaatataagtatattggagtaagtaggtatcatttagggagtcaagatgacttcaaatatgcatgtgtgattac

SEQ ID NO: 654115 - DNA, 657 bp, Homo sapiens
cctaatacacatctgaaaatgacacttgtgtaatcgcttataaaacaaaactggggattaaractataagcttgcattttgatgttcaaatacataaaaggaaccaaaataataatgcggatatcctttgttacacagaaactgcttgtgtagaattttggagattacagaattaaaaggccaaggaaaggccttgatatccaatgagtcaaatgaaaaataaaagtaggatggatttgcattttactctgttttcaggcttaatttaaatacttactttttccaagatactcaaagaacattatatatttaaagaaagaaatgcttagaccatctgttgatattggtgaatctgcttctccagcagttgatgtgatttgctgttctgttaacagaactttgctttctttcttcatgtccttggttcaagctgacctttctatgcctttctttttctcaaatcctattcatttttttcaaggacacctcaatccccctctcactttgaatcctttgctaataaccttggtttagaagtttttcttcttaactcatggagtttttgttctacatatttggcttatttaactattgtttacaagtcagtagtgctaaatatgtctctgtggatttatgtctttcatttcctatcactgg

SEQ ID NO: 654116 - DNA, 657 bp, Homo sapiens
cctaatacacatctgaaaatgacacttgtgtaatcgcttataaaacaaaactggggattaagactataagcttgcattttgatgttcaaatacataaaaggaaccaaaataataatgcggatatcctttgttacasagaaactgcttgtgtagaattttggagattacagaattaaaaggccaaggaaaggccttgatatccaatgagtcaaatgaaaaataaaagtaggatggatttgcattttactctgttttcaggcttaatttaaatacttactttttccaagatactcaaagaacattatatatttaaagaaagaaatgcttagaccatctgttgatattggtgaatctgcttctccagcagttgatgtgatttgctgttctgttaacagaactttgctttctttcttcatgtccttggttcaagctgacctttctatgcctttctttttctcaaatcctattcatttttttcaaggacacctcaatccccctctcactttgaatcctttgctaataaccttggtttagaagtttttcttcttaactcatggagtttttgttctacatatttggcttatttaactattgtttacaagtcagtagtgctaaatatgtctctgtggatttatgtctttcatttcctatcactgg

SEQ ID NO: 654117 - DNA, 601 bp, Homo sapiens
tggaaaacacataaaattgaaagtggaaaatagcgtttgcaaagaggagtttagtatgattgccatttgccttatgaataatctttcattgaagcaattaacctgcaaaatagaatctgaaccaggaaaaaggagggggggatctttattgcatcagatgcaaatagttctaagcatattctttccctaccttaacattccctcagcttgactaaactttaaacaggcttcttactgaccataggttcctgttctccctcttcttaaaacatttgctcagaaaacttataaattctttctctgtccctttgatatgtaaatcttctacaatccagaaatatttttctcaaggacctaggacactttgaaatttaatcatcaagaaagctagaattcttgtctagctgtgggagggtaggagcctaacttctataagcaacaattagtaaacacagatggcctaatcatgttgaccaacagctccactaatgtctgtcagaacttttccgttagctcrctccagcatttacaaatcctcctgccttttgtttcagtggagttgagttcaatttttctcccctgttataatagtctctctctc

SEQ ID NO: 654118 - DNA, 608 bp, Homo sapiens
tgttctgaagcaactagaaatacagaaaacagataggagtttaggctgtacccactgatttgggggtcacttccaagggaagtgaggaaatgcaggttagatgacactacaggaatattaacaacttcatccaaagtatagattaataacaactcaagagaaatactgatagcggtgggctgcagggccctctggttagtcttgtctcatttaacwtttttatctgtgaatgggatgaaaaaatgtaagtatgatgaagaatgtcacaaaagcgggaatggtgactgatgcactagaatcaagattcaaaaaaaagatctcaactgcttaagtggtgcactgaagctaacaggatgaaatttaacacatagataacagatacatatgtatgtatgtatatgtgtacctatacatatgtgtatatatatatatgtgtgtgtgtgtgcatgtatattccctcatatttaaaaaatgtaaatcaacagcacaagtacagggttctagaaaccagggtaatttacctaaaaaaggcctgcagcttttctgaccacatactttataagccaaaagtgtaatgtcattgctaaaaatgctgatgtaaagtcaaa

SEQ ID NO: 654119 - DNA, 608 bp, Homo sapiens
tgttctgaagcaactagaaatacagaaaacagataggagtttaggctgtacccactgatttgggggtcacttccaagggaagtgaggaaatgcaggttagatgacactacaggaatattaacaacttcatccaaagtatagattaataacaactcaagagaaatactgatagcggtgggctgcagggccctctggttagtcttgtctcatttaacatttttatctgtgaatgggatgaaaaaatgtaagtatgatgaagaatgtcacaaaagcgggaatggtgactgatgcactagaatcaagattcaaaaaaaagatctcaactgcttaagtggtgcactgaagctaacaggatgaaatttaacacatagataacagatacatatgtatgtatgtatatgtgtacctatacatatgtgtatatatatatrtgtgtgtgtgtgtgcatgtatattccctcatatttaaaaaatgtaaatcaacagcacaagtacagggttctagaaaccagggtaatttacctaaaaaaggcctgcagcttttctgaccacatactttataagccaaaagtgtaatgtcattgctaaaaatgctgatgtaaagtcaaa

SEQ ID NO: 654120 - DNA, 650 bp, Homo sapiens
gggatgtaaataaatgagcacattaatttgatttatggaatatggaaatgtgggaaataaactgggtctttggcgaaagacacatgaaacaaatattgatcaagggcaatccatggtcattttgcttttaaaggccttccatttcaatttttttcatggattcaccacaggaattgtatctcatgaaaactgagaagtatttaaatgttacaaagaataagagagttaagaaacattaagatatgattttcttaacctgaaaataatagatattttacatatatgtgtgtgtgtgtgtgtgtatatatatatattattattattattattattattatttttgagacagttgcccaggttggagttcagtggcgagatcttggcttactgcaacctccgtctaccgggtttaaacgattttcctgcctcagccacctgagtagctgggacttacaggcacacaaccccargcctggctaattttttgtatttttagtagagactgggtttcaccatgttgcccaggctggtctcaaactcctgagctcaggcaatcctcccactttggcctcccaaagtgctaggcttacaggcgtgggcctccacacccagcctatttcaatatattgttaacccattttacataaatg

SEQ ID NO: 654121 - DNA, 386 bp, Homo sapiens
gcctcagctatttttatcaccgcagaagctggtggccaaggacgtgctgggctacctttgcaggaggtgttgytgtagaaatgagctgtgggttgtcagggcagctgagcctctgcctcaaggttaaatccaaagtgcctgacctggaacaggagagcacttgatcttcttccattctgcagcaaagtgccccagaggcatatgctggggaagcagatgtcccaaggaggggacactgtggaaggactccggatgggagggagaggcaaacagagtggacatgtgtgaacatgtacctgggtttctcctacccagactgggaaatgggatatcttaaccctaggcagctggcttcaatcacctgcacagtaccagccaaggaattc

SEQ ID NO: 654122 - DNA, 613 bp, Homo sapiens
ttctacgggacagaaccaattttctcattactagaactcaggcctcttgaggaagagatagtcctgcatatggcactcttagaggaatagggtgaagggttttattcattgactacagtgtctgcaatggcaataatttatttttccataaattgtagtgatcatgtgaatggcttgttacgtttaaagagaaagtgtataaaatccctaaatggtttttcatgatagcttattaactttttttgtctttagtcattcagcttttctactgagaaagaataatatatgaaatgctggcattgcaagtacccaggagtttaagtaaagatcacctaagattggccagatgaccaaaacttttaaattattagtctcttagtcactaaaagggatccaagcacaaaaacattagacttaagttcaagtggtaatatggaatgacatcagagtaccagccaaaagttgggaacaaaagrcaacataaatgcgggtgtgaagtaacaaattctttattgaaggaattctttttagctccaacaattgataggttctattataatcaaaccctttatagcagattgatttcattaatcttaaccgctcaaattcttca

SEQ ID NO: 654123 - DNA, 613 bp, Homo sapiens
ttctacgggacagaaccaattttctcattactagaactcaggcctcttgaggaagagatagtcctgcatatggcactcttagaggaatagggtgaagggttttattcattgactacagtgtctgcaatggcaataatttatttttccataaattgtagtgatcatgtgaatggcttgttacgtttaaagagaaagtgtataaaatccctaaatggtttttcatgatagcttattaactttttttgtctttagtcattcagcttttctactgagaaagaataatatatgaaatgctggcattgcaagtacccaggagtttaagtaaagatcacctaagattggccagatgaccaaaacttttaaattattagtctcttagtcactaaaagggatccaagcacaaaaacattagacttaagttcaagtggtaatatggaatgacatcagagtaccagccaaaagttgggaacaaaagacaacataaatgcgggtrtgaagtaacaaattctttattgaaggaattctttttagctccaacaattgataggttctattataatcaaaccctttatagcagattgatttcattaatcttaaccgctcaaattcttca

SEQ ID NO: 654124 - DNA, 666 bp, Homo sapiens
catcattaaatctatggaaaagtttgcccaagagtaagaaaaggaaggataaagggtggaactgggggaagcttcaatatttatgaggtggttagagaaagaggctgaaagaaattttcaaagacagaagaagtagataagtatgatgccaatgctttcatccatctatccacccccacacacactacctggccacccatttagtcagcagaaattcatttattgagaatttatgacatgacagggaaaagggactgtgataggcactgcagggatcatagagatgaaaaagatgtgatttttactcttaaagaatttctaatctagtcagaatgagagattggggatgttraatcatgttcatttaaaaaaagaaaacacaaaaagactgagcacagtggctgacacctacaatcccagtggtttgggaggctgaggtggaaggattgctggaggcctgaagtttgaggcttcagaaatctatgatcatgctgctgaactccagcctgcgtgtcagagcaagaccctttcaccaagaagaaaacaaaaagtaacgagaagaaggaaaaggagggtactcatttcaatttttagcccttatcaccgtactcccgttgtgagtctagaggattttgatatctacatcatattttgagagaagcccac

SEQ ID NO: 654125 - DNA, 330 bp, Homo sapiens
ctgtagcttgactaagggtgtcttaaggcaagaaatytgcaacttgtatggaaaatggactaacgtaaggagagattagagtcagggagaagagttagaaggtaggacctgaattatatccttcatgatggcttttttatttaaaatgtaactctgaatgtgggccctaaaaattttatgctagggcatatttaaaaaatacatgtttatataaggagattagaaaaatttaatttttaatgagctctgttctaatgtccagagtgttctttgatagtaaattaggtgattaggacctgcattaattttttaaggctaatagggaacctt

SEQ ID NO: 654126 - DNA, 582 bp, Homo sapiens
atcagctaatatagccctcttattttacagatgaacgacaactttggtgattggcaggctgttgttataattaatttttctggtctctgtctgaaaggtagtgtgactgcaatgttttggaaacaacagtggtgtttcttggtagtaacaraagttcttgttttatgaagtgaaatgtctagatgtttagagcagtcttctaatttttaataaaatgaagtttacttcaagttgttctatatagtctttaaattaagactttaagattttactttaaatatatgtagtcaaatatatataatttaaagactatagtctttaaattaagacattaattttgactttaagatatataaatgactcattagatattttaaacaataatttgctttctgatgacaaaaaatattttcttggggaaaatttggaaaagagaaaagtatacaagcagaaaaaatatcactagtaatccgaatactctgaaaaccactgttaatgttctttcagttttggtggaggggttggcagtggagatagataatacatacagatctatgttttaacataattggaattatgctg

SEQ ID NO: 654127 - DNA, 582 bp, Homo sapiens
atcagctaatatagccctcttattttacagatgaacgacaactttggtgattggcaggctgttgttataattaatttttctggtctctgtctgaaaggtagtgtgactgcaatgttttggaaacaacagtggtgtttcttggtagtaacaaaagttcttgttttatgaagtgaaatgtctagatgtttagagcagtcttctaatttttaataaaatgaagtttacttcaagttgttctatatagtctttaaattaagactttaagattttactttaaatatatgtagtcaaatatatataatttaaagactatagtctttaaattaagacattaattttgactttaagatatataaatgaytcattagatattttaaacaataatttgctttctgatgacaaaaaatattttcttggggaaaatttggaaaagagaaaagtatacaagcagaaaaaatatcactagtaatccgaatactctgaaaaccactgttaatgttctttcagttttggtggaggggttggcagtggagatagataatacatacagatctatgttttaacataattggaattatgctg

SEQ ID NO: 654128 - DNA, 523 bp, Homo sapiens
aaccccgtctctattaaaataccaaaaaaaaaaaaaaaattagctgggcatggcagtgtgtgcctgtagtcccaattactcaggcaggagaattgcttgaacccgggaggtggaggttgcagtgagccgagatcatgccactgcactccagcctggcaacagagcgagactccgtctcaaaaaaaaaaaaaaawatatatatatatatatatgtataaaataacacaatataaaaaagttgtcatgtgatgtaatagtatgaacactaaggcaactgcaagatgatcacgtttccataaattttaaaatgctcttactaagcgtaaacaattggaattttgttacatagtcttgtgtactatgagagtacataagaaataaatttctaccttctctagactttgattatttttttcttttcacttattcattacagtcaatggatgcttttcatcctaggctgtgaatgtgttttccagacatcttagtagttattttaacaaaatttcaaataacaaaacat

SEQ ID NO: 654129 - DNA, 661 bp, Homo sapiens
tctctagactttgattatttttttcttttcacttattcattacagtcaatggatgcttttcatcctaggctgtgaatgtgttttccagacatcttagtagttattttaacaaaatttcaaataacaaaacattgtgcttactctgtggcattcatcatccattcatacaacaaatataaccacctactgaaaagaacatcaggaaacaaaacagatcaagcccctgccctcagggagctcatatcctagtaaatcacattacagtgagactgtgcattccacttttatttcttagggtcatttaattacaacaacaacaaaaaagatggtagtgtttgtttcatgaactgagtcctctcacaatgttaaatctgtcaaattctacagaatatgttaccttactaagtggaatcagaaaccagaatatttcattctggtagctttaaactactgtaattctagtgactatttccaaagaaagtatctccaagcagccttttagaaaatcaattgaagtaattstgaatgactatttctgttttggtaatgttctaataatttaaatatgtgtggacatgtgtgctgtgtatgcatgtatatacacatacatatatgtctatttgtacatatgtatatggatgtgaatatattttctaatagt

SEQ ID NO: 654130 - DNA, 403 bp, Homo sapiens
caaaatgaatatgaattttagaagtatagtagttcttcagaaattaaaaaatatatatactatagcactaacagtaacgttcaactcctgattactggtggaagacaattatttttctctacctattaaactagtgtagtayccctattgcaagtgggtgccccataaatactgctgttatttctcttattctgagtaagaaaagcagtagatctagagttctaggatgtggtactggctttatataatagttgacaaataggtcccttaatttctctggtccttaatttcctcacctataaatgagaggatagctagataatcttgtagcaatgttcaattcttaagtgatatgatcttctgattactggttttgtaaatagccatgctacaatttgaattc

SEQ ID NO: 654131 - DNA, 525 bp, Homo sapiens
gaattctacttttgagagaaaaattatttccacctgtcatccttaggttcaaaacaggccacacagttttcctacgccaagaacatgctttggagagaacccgctacaattagtyaacaggaagtaaagaagaggaaaaaatccaaagtttattcttgatatattttgttcctaattggactcatttgcaaaaactaattttttatggaacaaaaataattttcaaaaaaatataaaataaatatcaagaggataaaagtccatccttctttaaagatatacttaaaattaattctacatgtgattattaaaaataaattttaaatgctttgtaaaataagtgagaagaatcatgggtaaggagattatagtaagagaagtaacacagaatcctaaaactggaaggaaattttgaaatcatcttatcttgctgtttctttaacagataatcctaaaactggaaggaaattttgaaatcatcttatcttgctgtttctttaacagataaaatggctgatacctaga

SEQ ID NO: 654132 - DNA, 527 bp, Homo sapiens
ttgaattctacttttgagagaaaaattatttccacctgtcatccttaggttcaaaacaggccacacagttttcctacgccaagaacatgctttggagagaacccgctacaattagtcaacaggaagtaaagaagaggaaaaaatccaaagtttattcttgatatattttgttcctaattggactcatttgcaaaaactaattttttatggaacaaaaataattttcaaaaaaatataaaataaatatcaagaggataaaagtccatccttctttaaagatatacttaaaattaattctacatgtgattattaaaaataaattttaaatgctttgtaaaataagtgagaagaatcatgggtaaggagattatagtaagagaagtaacacagaatcctaaaactggaaggaaattttraaatcatcttatcttgctgtttctttaacagataatcctaaaactggaaggaaattttgaaatcatcttatcttgctgtttctttaacagataaaatggctgatacctaga

SEQ ID NO: 654133 - DNA, 571 bp, Homo sapiens
tattttaaagcctcatgtaaatatcttgaaatgttctataagcattctatttctctctttccctaatcaaaagcctgctgtacttccctgcaagaaagacaaaggatgttactttttttgtctgcatctcctattccctacattcaatttctcattcataattaaatttgatatttctcacttttttctcttcatgtttcttttatactttctgtgtcttattttaaataattactgcagtatcaggagtaattcttccacagttatttttacttctttaacaatagttggtatcaataattctcacaggttcattttttagccattatccattcaaatttctttctctaattttattcttgcatactatacrttgtagctgtgagcgattttttcaaaagaagcccctgctgccacatttttttaagattggtcatgtctgcaagtatctctctgttacttccctatacaaatggcatgatgtggttcattattcttgagttgcactttttcccctctgtagaagatgtcatcacattgtcatccagcattgctcactgctgtggaaaaa

SEQ ID NO: 654134 - DNA, 583 bp, Homo sapiens
ttaccctagaacttaaagtataaaataaaataaaatctcataataggtctcaggattttgtaaaatatctaaaaatgcaatggtttatacactcgctcgagctaatatgcccccacagactcacagttattatttctccgtttctcctaaactcaaatatggtaagtattctgtgtcattagttaaaatgtgtaaatagttaatcacattcccctcttatacagtttcctctaaacactatgtaaacatgatatgaccggaacaaaaacacaaagggatttctgatttctttgtgatcagtggttcctaataatgtatggtaagcattatacccaatcaattcactctttccrtatctaatttctgtaattcatcatgcaggacaaacatgaaagacagcatatgcttccaaaagccctagaccatgcaacctttaaaaatggtttgctatcttcgtctttagtagttttgattccaaagcacattgtctcagagcactggacctgagatcctctatgtacccactgcatcaatatctgcagccttgctgtatcacagcaaacctccaagttcacacactgct

SEQ ID NO: 654135 - DNA, 462 bp, Homo sapiens
ccaactgaacaagtattcttggaagaatcttaacttcccagtgattctgcttgacattgttgttagctttcctgaagtccaattccagtacttaagacaagattttaaaaatgaaattgtaaaaaattttaagtaagtgtgattaaaaagaagcatttcatctttgagaacacaagccctcctgagaactggtaactgttgttcccacagcagtcaaggcctttgactttagcagaaacaagagatgacatgaatggctttggcagtaaatgaaatgtagcacacttagcactggcatgcaggacccacatctgaaccaacattcatggccacaggcagtggtgtcctagcaggagtttcatccttagaacagcctgagtragccaagagttcttagcaggcccaactggagcagagaggaaggaaatgtattctatcaatttcctgactgggatagtcact

SEQ ID NO: 654136 - DNA, 566 bp, Homo sapiens
gggccagggcctttgcgttcctgcttgggatttgaagtcagaaagaggaggggaagggggcctgtccgttcagcyggcacctctgctcacctggagtcccacggaccagactgaggggaggcactgagggtctgcgctgctgctctctatgtgaccgctgagtcatggaggaaaaagggacctgaggcatgtgccctgccccccgggaacacttggctaaaaaccacctcactgtgatttgctgcacagactcgccgcagggcacagcaccctccagaaaaacaggtcactgaaaataatatcaggggaggaagtcaagaaggctgctgtattcattctgctttaatgagtagaggtaagaattctcaaggcataaacaccagccctgtgtggggccctgtttggggcaggtgctgaaatttcagttttttataaaagcaagaggctggcctgggcagagatgggccaggaaggtcatggactgtgagaaccacagagacaaagtggggcaggtggagagaggagaggcctggtcagcgggacaaagcctccctgaggacaggatg

SEQ ID NO: 654137 - DNA, 566 bp, Homo sapiens
gggccagggcctttgcgttcctgcttgggatttgaagtcagaaagaggaggggaagggggcctgtccgttcagccggcacctctgctcacctggagtcccacggaccagactgaggggaggcactgagggtctgcgctgctgctctctatgtgacygctgagtcatggaggaaaaagggacctgaggcatgtgccctgccccccgggaacacttggctaaaaaccacctcactgtgatttgctgcacagactcgccgcagggcacagcaccctccagaaaaacaggtcactgaaaataatatcaggggaggaagtcaagaaggctgctgtattcattctgctttaatgagtagaggtaagaattctcaaggcataaacaccagccctgtgtggggccctgtttggggcaggtgctgaaatttcagttttttataaaagcaagaggctggcctgggcagagatgggccaggaaggtcatggactgtgagaaccacagagacaaagtggggcaggtggagagaggagaggcctggtcagcgggacaaagcctccctgaggacaggatg

SEQ ID NO: 654138 - DNA, 569 bp, Homo sapiens
ctgagagtgatgtcagccaagaacattctacagtatccacaggcatccaaacagttataatactatatcctaaatctaggcctaatcctagttgaagatttgtcctagcctcctggttttcagtgacacatgatacacaagaacctcaatagcacaaagaagctttgtgctctgagcacatacactgtcttactaaaattagagcaaatctgaatgacttatactctttgctaggaatctataagaagctcarcactccacctaggactacaattcaaaataaaacatagctatatgcgcaagtaactttatcatctttttataatagcagaaaagtgaaaataacctaaattcacaataataaggaattttggacatttttccttgatgggactatgcagatagtaaaatgaaagtttttaaatggttcataatagtatgggggaaatgcttatgttaaaatgctaagtggaaaatcaggacacaacattgtgtatgcaaatattgaataatcaaaattacatcaaaataaaataatacatacagaaaaaagcagaaatacaccataa

SEQ ID NO: 654139 - DNA, 569 bp, Homo sapiens
ctgagagtgatgtcagccaagaacattctacagtatccacaggcatccaaacagttataatactatatcctaaatctaggcctaatcctagttgaagatttgtcctagcctcctggttttcagtgacacatgatacacaagaacctcaatagcacaaagaagctttgtgctctgagcacatacactgtcttactaaaattagagcaaatctgaatgacttatactctttgctaggaatctataagaagctcaacactccacctaggactacaattcaaaataaaacatagctatatgcgcaagtaactttatcatctttttataatagcagaaaagtgaaaataacctaaattcacaataataaggaattttggacatttttccttgawgggactatgcagatagtaaaatgaaagtttttaaatggttcataatagtatgggggaaatgcttatgttaaaatgctaagtggaaaatcaggacacaacattgtgtatgcaaatattgaataatcaaaattacatcaaaataaaataatacatacagaaaaaagcagaaatacaccataa

SEQ ID NO: 654140 - DNA, 567 bp, Homo sapiens
cagtggtataccaacacacccagaatattgttattcaattctagctaacaaaacaaattgtgcattaagtgcaagggactctcttattctctgccaaagcactaatgccccttcatatgcaataaacttttccactgtcttctccttgaatgtctagttttacaagtttgcagttgagtctatgttctgtgatgatttttttctctttctaactaaaagtctaatgagattttacagtaacttccagaagcaaacttccaggctacaaaatattttacaatgcagtgtttaaatccatgttttcttggggtttttgtttgggacttttaaaatccttaatcctgagcaattcctcctggcgttgtatagtctttaaaaatactatttctaaaagatgtatatgccacctaataatggtccataattaatttaacagtttcactgttgttgagtgtttacgctgttttcagtttttccttattatatgtaatgccgtgctcatccttactgataaagcttcaggtaagtagaattaatgaatkatagatataaatattttaaagtctc

SEQ ID NO: 654141 - DNA, 653 bp, Homo sapiens
cagttgcagaggagtggtgaggacaagagccaggctgctttgcagtatatggaagattgagtggtagctactgcctaaatcaggaccctttctgttgcaagtattagaaacccaacttgaactcatttaacaaaaaagaaatttattgtatagtataaatggaaagtatacaggtagagctggcttctgtcacagctattratagacccagggacactcagaaatagttttcagaaaatggtttggatctctatctctccaactatccccttttttatcctccgcttcatcttttaattctgaatttaattttaaacctctgccttattccctccttattcagatggacttcttccaagaccaccatagttagttaccaaatttcaaatactctcagaatcataaatcggaatgagaaaaatcttagctttatcacaagagttcagcgacaattctaactggcccatcttaagtcatgcaccgatccccaaaccaaccctgtggccaggtgaatggagaatgctgattgcatagtctctagcaggtgtgcaaccaagacatagggcagacacttttgctgatacccaggtgcacacggagtagggaaaggatgtttcccccaaagaagagattctggatagaggaacaatata

SEQ ID NO: 654142 - DNA, 579 bp, Homo sapiens
tagcacttttaatttccttcaataacttctcctttgcattcacaacttggctaactgtttgatggaaggcctagcttttagtctatcttggctttcaacataccttccttactaagcttactcatgtccagcttttgatttaaagtgagagatgtgtgactcttcctttcacttgaacacttagaggtcattgcagggctattagttggcttaattttaatattgttgtatctcagagaatagkgaggtctgaagagagggaaagacaaggctgttcagtggagaagtcaagactcacacaacatgtatagattaagttaaccattttatatgggttcagtttgtggcacctcaaaacaattgcaatagtaacatcacagatcaccataacgaatataataataataatgaaaaagtttgaaatattgtgcgaattaccaaaatgtgatgccaagacacgaaatgagcacatgctcttgggaaaatggtgccaatagacttgcttgatgcaagtttgctacaaaccttcaatttgtaaaaaacgcaatatctgcaaagtgctagaaagtgaagaataac

SEQ ID NO: 654143 - DNA, 575 bp, Homo sapiens
ctcttccatctcctctcctgaagcaaaaggaaggggtcacttttggagccatgagctatgcaacccggggtgggtggggggtgatgccagcactcccttagacaccccaactggtgtctcagtaggtcacgtgcttcccctagtccactgtttctgggcccagttcatcccaggaattgcctaggtgttacaatccttgtggcctagactgcctttcaagtgtatctggggctccagagtactttagtccaaggtgatgaggcttgcgggaactgaagttcgtactgctgggatcagagattcccctctgtctagggtttaaatgtttcctctgtgggcakgtgtcagcttagtttggtctggttttgctttctcttataacaagggtagcactgaattcaatgcctcacaattgctggtttcagtgcctctctcagagatatgaagttaaaaccaggtactgtgagaattcacttgatttttgggtcttacaaaggtgcttttaaattgttaatagttgcttttaaagcaaaggaaaggtgcttttaaattgtttaattgttgttaaattggtg

SEQ ID NO: 654144 - DNA, 575 bp, Homo sapiens
ctcttccatctcctctcctgaagcaaaaggaaggggtcacttttggagccatgagctatgcaacccggggtgggtggggggtgatgccagcactcccttagacaccccaactggtgtctcagtaggtcacgtgcttcccctagtccactgtttctgggcccagttcatcccaggaattgcctaggtgttacaatccttgtggcctagactgcctttcaagtgtatctggggctccagagtactttagtccaaggtgatgaggcttgcgggaactgaagttcgtactgctgggatcagagattcccctctgtctagggtttaaatgtttcctctgtgggcatgtgtcagcttagtttggtctggttttgctttctcttataacaagggtagcactgaattcaatgcctcrcaattgctggtttcagtgcctctctcagagatatgaagttaaaaccaggtactgtgagaattcacttgatttttgggtcttacaaaggtgcttttaaattgttaatagttgcttttaaagcaaaggaaaggtgcttttaaattgtttaattgttgttaaattggtg

SEQ ID NO: 654145 - DNA, 575 bp, Homo sapiens
ctcttccatctcctctcctgaagcaaaaggaaggggtcacttttggagccatgagctatgcaacccggggtgggtggggggtgatgccagcactcccttagacaccccaactggtgtctcagtaggtcacgtgcttcccctagtccactgtttctgggcccagttcatcccaggaattgcctaggtgttacaatccttgtggcctagactgcctttcaagtgtatctggggctccagagtactttagtccaaggtgatgaggcttgcgggaactgaagttcgtactgctgggatcagagattcccctctgtctagggtttaaatgtttcctctgtgggcatgtgtcagcttagtttggtctggttttgctttctcttataacaagggtagcactgaattcaatgcctcacaattgctggtttcagtgcctctctcagagatatgaagttaaaaccaggtactgtgagaattcacttgatttttgggtcttacaaaggtgcttttaaattgttaatagttgyttttaaagcaaaggaaaggtgcttttaaattgtttaattgttgttaaattggtg

SEQ ID NO: 654146 - DNA, 575 bp, Homo sapiens
ctcttccatctcctctcctgaagcaaaaggaaggggtcacttttggagccatgagctatgcaacccggggtgggtggggggtgatgccagcactcccttagacaccccaactggtgtctcagtaggtcacgtgcttcccctagtccactgtttctgggcccagttcatcccaggaattgcctaggtgttacaatccttgtggcctagactgcctttcaagtgtatctggggctccagagtactttagtccaaggtgatgaggcttgcgggaactgaagttcgtactgctgggatcagagattcccctctgtctagggtttaaatgtttcctctgtgggcatgtgtcagcttagtttggtctggttttgctttctcttataacaagggtagcactgaattcaatgcctcacaattgctggtttcagtgcctctctcagagatatgaagttaaaaccaggtactgtgagaattcacttgatttttgggtcttacaaaggtgcttttaaattgttaatagttgcttttaaagcaaaggaaaggtgcttttaaatygtttaattgttgttaaattggtg

SEQ ID NO: 654147 - DNA, 522 bp, Homo sapiens
aatccatagaaaaggtcgaagagaccccaagaattgccaggtgggctcatgggtgaagatctttgtctcctgaagccaatcagtaaagactagaggaaatgactccttcttcaaatgcaactgtcacaagaaacaaagaaggtcattatataaaggcaatggggtcaattcatcaagagaatacatcaattgtaaatatacatgtacccaacctcaaaccacttaaatattataaagcagatataactgaagaaataaatacacagcaatacaatcatagtaggagacctcaatagyccactttccagacacaaaattaataagaaaactacagacttgaataacactatatgccaaatggactgaccagacatacatgaaacattacatccaatagcagtagaatatatattctcaagcacacatggaacattccctgggatagattatatactaaaaaccagtcttaacaatattaagaagatgaaaattataacaagtatcttttacttgaccacaatg

SEQ ID NO: 654148 - DNA, 534 bp, Homo sapiens
ctcttcttgcactttggggccattcttaagtacataagggtggcttgaacacaggcactaagacgccgccacagtccatctgatcactgagatggctattaagtgactcagggtaggtaggcagggcttacagtgtgaatctcccagaccaagggatgattcccatcctggatgggactgaacaatgaagcatgagatttcatcttgctactcagaatgttatgcaatttaaaacttataaattgtttgtttctggaatttttcacttaatatttttggactacagttgaccctgggtaactaaaaccatggataaggggggactactgtactaatttcaagttgactgcaagtatagtgtttcttcccagcattgctaggtagggttacttcttccaagaagttctgaaagattaactcaggcccttctccttctttgggagtatttctttacygtgttcatgatactttctctagtttgagtacttggttctctctttgtgtgctgaggttctgtgagcaaagaatgagcta

SEQ ID NO: 654149 - DNA, 457 bp, Homo sapiens
gcagtctggctccatagcctaaacttttaatcatagcctcttcattgatgttagactttccagagatgtttctcaagtaaaattaattgagcattttaaaaacagagttaaagaagtcacgaaggtgaagctaggttttaaggtacccttcactgccgcctccactgcccttaatccattctccatgtcaactgcagtgayccttccaaagcacccatgtgactgggctgctctccttttctagaggttcaaaggtctcactggtgcttaggatgaagcacaaacgcctttgggcacagcaagccctcctgtccccattcctcagtggtcctacccaccagtcatactgaagtcaagcaggcagtgagattttcacaggttctgagaaaagtcttgagacctttaccattcacaaattactaaatactcctgtaccagtgttcccataaaactatct

SEQ ID NO: 654150 - DNA, 452 bp, Homo sapiens
tcagtcaagcacaaagctgtgaaaagtagtgtgtggaaagaatcatactgaattttaggaacaagtacctgactatgatactttttacagagtgrctacaagttgtaggacagtctttgtgtgtgctgagtgtcaacagctgcctgcctatgtgttgatgttttcatcctttctttgttgaatgagggtataaccatcaaaaataaaatacctttcaaatagtccaaagattctgaacattgaacttcacctgatccaatcctgtcagtttatggttaagacaataggctgagaatggctaagagatttaccaaagatcatggagattctcagtcaggagtagaacctgtatcttcttgctctaaagtctagggatcttttcaccatactataccaccttctatgtgtaaatgtgcacataataataaagcagccacattagcccttaaaaa

SEQ ID NO: 654151 - DNA, 452 bp, Homo sapiens
tcagtcaagcacaaagctgtgaaaagtagtgtgtggaaagaatcatactgaattttaggaacaagtacctgactatgatactttttacagagtggctacaagttgtaggacagtctttgtgtgtgctgagtgtcaacagctgcctgcctatgtgttgatgttttcatcctttctttgttgaatgagggtataaccatcaaaaataaaatacctttcaaatagtccaaagattctgaacattgaacttcacctgatccaatcctgtcagtttatggttaagacaataggctgagaatggctaagagatttaccaaagatcakggagattctcagtcaggagtagaacctgtatcttcttgctctaaagtctagggatcttttcaccatactataccaccttctatgtgtaaatgtgcacataataataaagcagccacattagcccttaaaaa

SEQ ID NO: 654152 - DNA, 640 bp, Homo sapiens
tataaaacataagaggatcagtttctaatctgtctactctccacactcaccatgtactctgttgcctatagaatgttgaaatactaatctcaacctattttcagttatcccacctaccccaccttccattggacactttattgactcactcatcctccagtctcagttttaactctacttccacagggagtttttccatgaccactggtccatgtcatagccttgtgattcattctcactgcaacctgcacttcaccgttcatgatactcttaagaactgaaatgattaattttctatgtttcctgctacaccacaagttctgtgacatcagagactgtgtctgtactatgtttggcagcatgtatatccagtgcttagcacataaaggaatcccaataaatatttgttgagtggattaatgaagatgataggactctttgatttctgctttgatagcagaagtttccaagaaaaatttgccaaattctaaaatgagtgtccacccatttgtcactatcttcagaaatagactctaatttctattgaatttgcagatgtcaatgtccattttaagtacaagtggaatgcacaattgaacatttkgaacacaattatgtgctcttcttagaaaaagaaatg

SEQ ID NO: 654153 - DNA, 411 bp, Homo sapiens
tgtgcaacctaatctgcaaaacacaggggctcagaacctgtcccttgcttcagatttcaaggacccccccaatgakacagtttctggcttttcaagaagcttcatggatgaggctggttcactgaagggcaatcagggctcagcatccagccttctgaagaagctgtttacttgttgttctttacaaagtcaggacttggccaggaactaaacgtagccctcagtatgggaaagggagaaatttggaagacttggtggaaagtctaaatatgtaaggagaatgcttcttaaacccctgatgtggccaggcactatggctcatgcctgtaatcccagcactttgggaggcagaggtaggttgattacttgagcccaggcgtttgagacctgcctgggcaacatggcaaaacc

SEQ ID NO: 654154 - DNA, 566 bp, Homo sapiens
aatccattatcaactgagatatttctagtcatttacattagaaagtcatgaaatttgcaatggcttgccaggaagcttttaaaaaacacatatactcagtacaatggactgakatggatggcaggagcttcccagagattcttttgaattcaagttgtgttctggataatgcctgagaacaacccacttctgtgtttcaggatgaggtctgcaatgacaactttctgatccttgctccctcagcttccagtggttgggtaagccattaatttcctatttagtacttgttacatggaatacatcaaatggtttctgttttcttgactgaacactgactgatacatggagtaaggtatagtctctatttttgttctccaaggtgtaaagatttttttctgtaaagagataaatagcaaatatttttggcttttcctggcagagtatcctttttgtaactactcaactctgccattgcatcacaaaagcagccatagacaagatgtaaacaaataaaagtaactgtgttccaataaaattttatgtatcaaaataagtgctaaaaccta

SEQ ID NO: 654155 - DNA, 521 bp, Homo sapiens
acccagcagagcttcctgtatcaacatgagccctgtgattaagtgcagctcatcaaatcaaacttctcctttctggataataaatttaatcttagagtgggatggcttgttcttcctgacacctgatatcaatcaggactattccagctcatcagacatctcctaataccctaataactttgactgttcaaagagatatatccttagtatactctccttctgcacctcccctcatcataatacattataaaaattccttgtgaacattaatggcaagtatgcaccaggatcttgtcaagccaaaaactcctggaaatgctagtttttaaatcgggcttagattaaaagaaacaaaattaytgatgaccttatgaagaggatgtagttactctaattctccatatccaaaccatagtaacagttttcagaataataggtgagtttcatagcatcctacagaagtgaacaattagcttttctaagtattatgaacccatggtttaaatgtatcaatgtgtttt

SEQ ID NO: 654156 - DNA, 427 bp, Homo sapiens
ggtatgtgaggtttcttaaaaagaattacatgtatatcaatcagcaacagtgaaacggcataatcctgagtctttgaagggcactggagtttgagaatgatgttctcatgggtgtcacatttcrtttttcctgcggtatctacctgtgagttgttggcagtaatccaactgtaatcagacaccatctgtgattgcttttctgtttaacatcaaaacttcactgaatataaatacctcccttccttccatcaccacccctctctctgcttcctcctccctaacagacttcggatttgttctctagtcagtttattcctacccaagaggtccacaggttacaatgtaagagcaagttgcgttttccaagtgtctgtgtgtaaattgtacgatcgtgtatcagtagatatatgagtatgacctaaagcat

SEQ ID NO: 654157 - DNA, 574 bp, Homo sapiens
aatatctgtcataatcattactatgatctcctacctggacaatataaggtggcaatggcttccccagagagcttggcttcaattttattgttttggaagtggcacagagtagaccctgttcaaagaaatgcagacaagtttttctttaaaaaagcaataaattaatggatctagttattgatcataaccagacattatgtgcctcctaacagaacaacattacacagtctaacaagtaatcttgattaaaaaaaaatcaagcaggagtgtgactaaattaacctctaggtcaatttacaggaaatgcaggggaacagaagaacatgtaaaccatactgcaattagcaaaatccaggctgtgaaatattcaaaagaaccaacaactcagttttttaaaataacaaattcaaggaaaaaagaaggtaatgaggaaattcatagattaaaagatacacaaaagtcttaccaactagccacaatgtgtgtgcttaattggaacaaatggtagcmagaaaacatgcatgacttagatgatggatgaaaatgtcagtggtagatatttgttaataaaagg

SEQ ID NO: 654158 - DNA, 565 bp, Homo sapiens
cttggagaagaaacagttttttttcctgtctccctggcacagaagttgggggctggcagatagaaaggactcaataatattgtgtgggatcaccctcagatattccccaatactgaccakgctgggcaccaccacgctaggcttcacccctccaacctccccacatggctgatcagtctgttattaaccgtattatataggacagccgagatgaaagggtgaagtcatttgcccacaattgcacagctggtaccagggctccccaaagcccatctcagcaagggatggtttggtcatataaatctgctgtgttcaccaaattgtaaagaagccagtgcagtgtcatcctgaagctcattccaaggggcccatgacttcctgtctcctgtatgactttattcctaccaagctcaatgcagcatccccaatgggtgacaacaaaatcacgttctcccagggaaaggcggagagtaaataaacaagtaaagacaatgtcagagggtgataggagaaaaagagaacagagtacggggaagaggaagggctggggatgagtgtgtgggtg

SEQ ID NO: 654159 - DNA, 565 bp, Homo sapiens
cttggagaagaaacagttttttttcctgtctccctggcacagaagttgggggctggcagatagaaaggactcaataatattgtgtgggatcaccctcagatattccccaatactgaccaggctgggcaccaccacgctaggcttcacccctccaacctccccacatggctgatcagtctgttattaaccgtattatataggacagccgagatgaaagggtgaagtcatttgcccacaattgcacagctggtaccagggctccccaaagcccatctcagcaagggatggtttggtcatataaatctgctgtgttcaccaaattgtaaagaagccagtgcagtgtcatcctgaagctcattccaaggggcccatgacttcctgtctcctgtatgactttattcctaccaagctcaatgcagcatccccaatgggtgacaacaaaatcacrttctcccagggaaaggcggagagtaaataaacaagtaaagacaatgtcagagggtgataggagaaaaagagaacagagtacggggaagaggaagggctggggatgagtgtgtgggtg

SEQ ID NO: 654160 - DNA, 501 bp, Homo sapiens
agtttaattaatagtgatggactgatactagttgactaattttgacatgtacactatggtaatgtgagktgttcataataagggacacagggtaaggggcatacaggaaacactgtagtttttacaacttatctgtaaatctgaaactattctaaaatgtcttttgttttgagatagggtcttgctctgttatccaggctggagggcagtggtgcgatcatagctcactgcagcctcgacctcctgagttcgagtgatcctctcaccttagcatcccaagtagctgggactatagatgtgcgccagcacaccagactaattttttaattttttgttgagatggggtcttgctatgttgaccaagctggtcttgaatttctgggctcatgaaactctccgacttcagcctcccaaagtgctgggattacaggtgtgagccactgagcccagtgtaaaagattttaagcacaataagtgttttagaatttttctttttgtaaa

SEQ ID NO: 654161 - DNA, 455 bp, Homo sapiens
tgcaatactggaaaagaacaaaccttatcttccttgtccctactgagatattgatcatcccaccctagagggaagaatactgtcccttctggctctggaatacatctcatcaggcccatgcttctgccttaatcaactattctccccttggacagcatatctgrttggctacaaagtgtgaagacaaagggaagatgcttctctacatgggaatttcggttgcccaggattcctggaaatgaagaaactacttcctgtcctccaccatctgcactctacagaggagtcagtaagctggaagggattcagcgggaggactcagaaatactcacatttgcctaaataaggtagagggggctggcccccagcatatcctgcccacacagctgccccaggcttccgtgctgggcgctgaggcttgcgttgctgcaaacagactctgcactgtcagggct

SEQ ID NO: 654162 - DNA, 601 bp, Homo sapiens
gcacctattttgtgagtaaaatgaggttctgagagaaagggtaacccagccagcagattgcagagccagtgtatacatccatatttatctgactgtaaggtcaaagtcttttccactgtatcaagtaattgaccaagagacactagctctcagagcagcagaatgttgccacatttttattgacaaagaattaataacataaattatgtttatattgcaaagtttatttagggaaatttgayactcctttttacattttacataaatttattgagttataacactgcctgatgccaggtaaagcaaatacacatctgggttcagagactcacgtgtgcaacaaatttaactttctggatattttaaaaactcagcttaatttccctaggtgcctcattagcctgatggcagaaattaaatctcaggcaattctgggttctcccacaagtacacttttcttcagagttgtgctgaagttctgaggaggatgggaagggactaggaaatggccagtcctttgcccatctatcctctggcattctcccaccctgtcccaggttgtcagtccacacaggtggctggtgcatcactcctcattctt

SEQ ID NO: 654163 - DNA, 502 bp, Homo sapiens
gctttttcttctagtcccattcacagctggctctttatcaccttaatctctgttcttatgtttctcccaatgtgtaccacccaggacttgcctaaaaaatactctaatactcatcctattasttcctgatgatgtttctgggtgtcatgttcatgttggattctgcttttgtcatgggccacctggggtcatctttgaacaaaatgatgaggctacaaaaacctatttttccaattgttgatggatctagacaatgtgaagcctagaattagcccatgagaaatagccctagttatatcctcaaaggctggtcaactattttgtgttctttaataactgtcagcaaaagttagagataagggtagtttatggaatgacctagaataatgtagcctgtgctaaaaagaaggcaaaacctttctaaggtttttgttttttgggttttctgctgctggaagctccccagcaaacccaaccagacctctgtctactcactcactca

SEQ ID NO: 654164 - DNA, 652 bp, Homo sapiens
attgctagtggaaatgtaaagtggtacagtcactgtggaaaacaggatggtggttcctaaaacaattaaacatagatgtgccataaaatccagcaattttacttctgtgaatatacccaaaagaatggaaggcagggagttgaacagatctttatacacccgtgttcacagcatcattattcacaatagccaaaaggtggtttaaaaaaatgtccaacaacagatgaatggaaaaataaaatgtggcatatacatacaatggaatattacttagccttaaaagcaatgaaattttgatgcacactrtctgtaataaacaaatattaaatcatagatgagcctagaaaacattatgctatgtgaaataagccaatcacagaaggacaaataatgtataactatacttatatgaggtacctagaatagtcaaattcagagatagaaagtagaacggtggttaccagggcccaggccaaggaggaatggaggatttattgtttaatgggtgtagagtttcagtttggtctcaatttattattatttttttaagatacagtctcactctatctcccaggctggagtgcatgggagaagaaaagatctcggctcactgcaacctctgcttcccggggtcaagagattcttgtgcctc

SEQ ID NO: 654165 - DNA, 430 bp, Homo sapiens
gagattcttgtgcctcagcctcctgagtagctgaaattacaggcacctaccaccatgccyggctaatttttgtagttttagtagagacgtggtttcaccatgatggccaggctggtcttgaactcctgacctcaggtgatctgcgcatgcccagagtttcagttttggatgataaaaaagttctggagatagatactggtgatgattgctcaacaatgtgaatttacttagtgccatttaactgaataattaaaaatgcttaatataatacattttatgtcatatatttttcaccacaataaaaaatacagatctcagatcaataaaaacccaaaaatatgtaatctttgactcccttctttctccaatatcctacaaccaatccattagcaaattctgtgggttataccttcaaaatatatacagaacc

SEQ ID NO: 654166 - DNA, 516 bp, Homo sapiens
tggcagttagcatccttgagcgggggtgaggacagaaacaggaatgagtcaggcgtgagtcacccaagactctcactcagccccaagaggatggagtgactctgagtcatgccgaggcatgtctttagcatgtgctccagcacagtgtgcatttatggcaaggtgaaaaatacatttttgcacatgtcactaggaaaatggtaccttcttctcaggcatggcagatgaagtaggaaaatgcccgcctgctctctggtatctttagaaatactcacacccatccagcctatgtaggatacaatgtttttcatgaagttttatgaagattctgtttttcccaaaggagaaatagccaaagctgtgtttattgatagctgtgatgaggaaaatgaaggccaacaggtagcagtggggtctggtgctgtttataccytttagggaggttccttcaagtcttcataccacccattacaaggaaaactttagcatccgcctttcagggtttccagatcttag

SEQ ID NO: 654167 - DNA, 598 bp, Homo sapiens
cctgcacaagttctctctcttgcctgctgccatgtaagatttgcttttcaccttctgccatgattatgaggcctccccagtcacttggaactatgagtccattaaacttctttttctttataatttacccagtcttggatatgtctttatcggcagtgtgaaaatggactaatacacctgacatgcatacctaattgtgaggcctgttggtatattagcaaattaggcaaaaagctgttaagtttgtttcatttactcaactgttttggcagaatacacacatcaggtctgttattcccagaagacaggccttcccttggaacattagtctctgaagattgattctttcatgatgtttctggaaaaatcttggttgaattcaagaatcaatagtcaaataatttcaactgctgagataagaagctggtgcactagatttttatgcattttcgaactgtgggaaaaaggaatattttctaaaaactggaattaagtaaggcaattttatatacatttatttctagagataaaaattcagatgtggttaacaaaaggaggtmgattaaaagtctcaagggtacatttttttttcaagcca

SEQ ID NO: 654168 - DNA, 403 bp, Homo sapiens
gtgtatcatacagataacatgtaatttacttaattggcttactattattggacatttatattatttccaacattttgctatggtgaaagctctttagtaaactctcccgtagttatttctgcctgtcatcataattatttttggtaagataaattcttaaaagtaaatttttgtatgtcaaagaagattttaaagtttttttaagatttttaagtttacatttttgtgcatttttaagttatttgatttaccaaattgcactccagaaatttacagtttagacagcagcacctaaggaaacccaacatggagaattatgtgtgtgtgtgcrtatgtgttttctattacttttctagcatatttctatttttcaagttataacttttacatgtttttttaaaca

SEQ ID NO: 654169 - DNA, 591 bp, Homo sapiens
atctacctgacagtaacaacatgagcaaagtgctggagccagcaatgagggcgacaagttgaggagccaaaggaaggttggctggaataaagggtgtgctttggagaaactgggcgggctgaaactatgatgacccttaagtaaaaaaagtgtgaaagtaattggtagccagtgagaaagaaagtgaccataatgaaagtgaggatttgggaagatgaatctgggggcagaagagagggatggcttagctgggccgaagccctgaagcagagcaagkagctgacaagttgctgctggaatctcagcacaatgtcacccagcacagccagccctggggacaggccaaacccaaaactggaggcagtttcagtgctagatctgtccaagtaagacctcagagaaccatctctgacattctttcccactttatccttttaggattctaatagactcaggttagaatttgggtggtggctgtggtttttaagaaccatttctaaagaggaaactgatggactctggtagctcattaacagtggcaggggtctttgaagagtaaacgcagaaaactgaatgaacaacggtgctgat

SEQ ID NO: 654170 - DNA, 622 bp, Homo sapiens
ttcttgcctaagcaaagtgcatctacactccaaacctttgagagaacggctagtagttgtacttattacttctrctcacattccattgaacagaacttggtcacgcttaactgcaaggagactggggaatgacattgtctattgggggggcattttctgtctggctaaaactctgggtagctattacaaaaggaaaagtagaaaagtagattggaggacaaccagctgtctgcaatgagaggaagcaagagcaatgctactacataatacttagtagtgttgtgtagaagaagtaatacaattgtcttaaactgtacaaataaaattcctttgagaaattataacaccccaagaatagaatgggacacagaggataacaaaaagcattgagttcaatcctctacgtcacttctttcagaaagggtccaggaccctgaatgggcttggagaccaaaaacaatttgtgaataatagatatgcttattctcttgattatggtgatggtctcacttgtgtatgcatatgtcaaattttcaccaattttacatttttaaagatgtgcaatttattgtatgccactgataccacaatgagcttttttgttttttaaggaaaaaagagc

SEQ ID NO: 654171 - DNA, 590 bp, Homo sapiens
cactctaatcttcataactggacctccaaataaatagattaataatatttgctaggaagaagtgactttatctccaaaatgtccctggcaggatgtcctggttcaggattacctatgaaaaacaaacccaagatatacaagaaatggctctcatgagaatgtcatttaagttacataattctttgacttcaaaattttttgacttcccaatttaaatgctcccgctgtgtgaaatggtgctgcaaacttaatatagaggtctcatcttttattctgagccagaaagacatgtctcacagaagaaaacagaacctgggaagccagcctcaatgcccctatcttatctctgctttttctgaaatgattgttttcaaattgaaattaattagtaaagcttgctaaggtgtaagatctctgatatattgagtttgatttgatacttttattctgtgtcttagcttatatgtatacaataagacccaacaattytactcttaggtaaatgccaaacaaatcattcactgtgctctgctaaaccttggaattgttatattcataacagcactattcttaatggtctcgaactggaa

SEQ ID NO: 654172 - DNA, 639 bp, Homo sapiens
tctggccagtcacgagtgcagtgggccaggctggaatatatatgcccccctgcctaaggggacagctgtgactcagctttggaagaatgtgtgcatgtatgtgtgcgggtgttgtgtgtttgtgggtgcacgagagagagggagttcagggaacacttaaaaggaatggagcagaaaacggcctccttaaaattatcattccttgagacttattcacctgcattttttgttgtagattaaaaaacaaaaaacaccacgccacaactcgccattcttcttagagtagccaaaaaatccactctaacaatcttaagtgtgcaatttctggacagctttcacatatacatctaatatggagttactagaactaaagaaaaatcaaagtaaaaaaataagattttattttacggtagtgaatctgtagaagaaatattagctaatgtattgaatttatatgtttttaaacatattgaatttgtattttttcaaacatatgcttagtgtgtttcttttccttcaagattttacagtgyggaatgggtgaccacatacatggtctgcattcacagttataggtaacggagattaaactgagcattatggatttatatatatatatgtagattgatacacatatat

SEQ ID NO: 654173 - DNA, 625 bp, Homo sapiens
tgggaatccttagtttgaaagaaagtccaattagttcaatcctgaaagaattcagagtatgtaattccaagtatttgttcatttgcttggaatatataggggctccattatgtttggaacagatatgatttcaaagatcaactgttatggatatgtgaactaaaatggccaattttaaactttgtcagaaaatctatattctaatttcaaatgctattattgtcactacatgacctattgaattcctgagaggttctattrgtgggtaatacattaattcataattcattaattttggctttctactaatctttagcatcccaagccactcccagctcaactggtgttctcattattgttcacaaatgtgtggatgccctttaggtcagaggcttctttagtggtaaaaaactactgcactcagaagtcagagtgggaacaagatctgcagggagtagggagagactttgttgtcagtgtgtggtacccaggagcgactcatcgtcctgcgtgttgggcgtgataagagaggagcctatagactctcatactgaaaagtgtaatattgtcaattgtccaagtaaatgatgaaccgtggagctgtccaaagggatcactgaagttg

SEQ ID NO: 654174 - DNA, 625 bp, Homo sapiens
tgggaatccttagtttgaaagaaagtccaattagttcaatcctgaaagaattcagagtatgtaattccaagtatttgttcatttgcttggaatatataggggctccattatgtttggaacagatatgatttcaaagatcaactgttatggatatgtgaactaaaatggccaattttaaactttgtcagaaaatctatattctaatttcaaatgctattattgtcactacatgacctattgaattcctgagaggttctattagtgggtaatacattaattcataattcattaattttggctttctactaatctttagcatcccaagccactcccagctcaactggtgttctcattattgttcacaaatgtgtggatgccctttaggtcagaggcttctttagtggtaaaaaactactgcactcagaagtcagagtgggaacaagatctgcagggagtagggagagactttgttgtcagtgtgtggtacccaggagcgactcatcgtcctgcgtgttgggcgtgataagagaggagcctatagactctcatactgaaaagtgtaatattgtcaattgtccaagtaaatgatgaaccrtggagctgtccaaagggatcactgaagttg

SEQ ID NO: 654175 - DNA, 383 bp, Homo sapiens
agggacctctctgccaccactaatatgtcctagtccttcgtcacacatcaagaatttttaaaacctgaatctgcacgcaacagttgccatagcctttttaagaggtgggaacagggatttcttccagctcatggaaatccacctaagttagctccatacctggtgtcctgaagtgctgcaaagcatgagttgtaaaaaaaaaaaaaaaaaaaaaaaaakgctacacatggtcaaacttgtttttgtgtctaatttgtcatattttatagagaattgtctttttcaaggtatcctgggcacatcatcactattcacagtgaggtttctgtggagcaaactattgcaactgctaaccagccaatttacaaaagggaatttggaat

SEQ ID NO: 654176 - DNA, 586 bp, Homo sapiens
  misc_feature 568, 569, 570, 571, 572, 573, 574, 575, 576, 577, 578, 579,580, 581, 582, 583, 584, 585, 586: n = A,T,C or G
ttactttaaaaaaagagtggttacttctcctttccattgaattctggatcttaaaactactctcttccaggtttccagattccttttgcataattaaaaatgcaaatgttaaagcatttttaatccatgaagaattaatcagtcacatcacaaactcctctctttcagcatatactsctctgaatagataggtgagacttcaagcctgcaaggaaggatacccaggttcaggcttaggcagctgggaaggaggggacagtttaggagaaacaagactatctggacagtgcctggttatcagttttaacatattttgggggactgttactagagcaccaccagccttattattttggtgcaatgaaagtaaatagcctggagaagcgacagataaaataggcagtgtctgcagaatgtgaaccagtggttacaggctagccaacaatggacaaaattgttattcggcttacctagaatttcaaaagtaaagtagtgaacattttaaatttgggagagaaagcagtctttctagcttcttttaataaaaagcaacaccaggccagcatcnnnnnnnnnnnnnnnnnnn

SEQ ID NO: 654177 - DNA, 545 bp, Homo sapiens
caattttaatgctgtgtgtgtgtgtgtgtgtgtgtgtgtgtttaagctttgaaattaggccctcttatgtgctttctctttatttcactgttcagtttaaagggaggaatcaaatggtaagtgttcaacttgtccaagtaatgagtaaagttgattttctttgttaattttaagatgccacctctctcttcttgccttcctaatagaaatattccaacaaaactaagagttatgggacttttaagtataaaataaatattgatttacatatttcacattttaaataatawtttcatgtaacaaagaaagagtgaaaacacttgtcatatctggtcatctttttgtttgtcagccttcaacttgatcataattttatgacacatgggaatatatttttaagagtttcaaggatgtaagccagtacttcatcaatatcagttgtcagttttatttaatacttgatttttccttagaagacaaactttttgataattactgttgtaactataaattaaacaacattttttactcatttaggataacat

SEQ ID NO: 654178 - DNA, 607 bp, Homo sapiens
agtttcaataatatctaatgatgtgtgggaaaccgtagaatttttcatacaaactgggacaaatgaacatgcatactattaaaatacttcctacaataggcataaaatgggctttcttaggtgaaccaggaggtatagttagcctaatcatatgctatgattattagtaatggttttctgtgttttatcattcatatttgtaaatcttttttgaatgactacttggaaatgatgactgaatctcatactgtgtacacacttcatcagaggacacttaattgtattgattaacatttttttgatcttamcttctgttagagtttcagagaggttcataatccagaaaaattatcatgttttcttttttccttttggagattatctgttcagactcaggtcatgtgtttcttctgattcctcaccccagctgtcatctttttcattaaaataatttaaaattaaaaattgtttttaaggagggagtcttgctctgttgcccaggctggagtgcagtggcgtgatcttgactcactgcaacctctgcctcctgggttcaagtgattcttgtgcctcagccttccaagtagctgagattacaggtgctcgc

SEQ ID NO: 654179 - DNA, 607 bp, Homo sapiens
agtttcaataatatctaatgatgtgtgggaaaccgtagaatttttcatacaaactgggacaaatgaacatgcatactattaaaatacttcctacaataggcataaaatgggctttcttaggtgaaccaggaggtatagttagcctaatcatatgctatgattattagtaatggttttctgtgttttatcattcatatttgtaaatcttttttgaatgactacttggaaatgatgactgaatctcatactgtgtacacacttcatcagaggacacttaattgtattgattaacatttttttgatcttaccttctgttagagtttcagagaggttcataatccagaaaaattatcatgttttcttttttccttttggagawtatctgttcagactcaggtcatgtgtttcttctgattcctcaccccagctgtcatctttttcattaaaataatttaaaattaaaaattgtttttaaggagggagtcttgctctgttgcccaggctggagtgcagtggcgtgatcttgactcactgcaacctctgcctcctgggttcaagtgattcttgtgcctcagccttccaagtagctgagattacaggtgctcgc

SEQ ID NO: 654180 - DNA, 241 bp, Homo sapiens
cacacacagctaatttttatatttttagtagagacggggttttgccatgttggccaggctggtgaacaggtttttaatgtagactaaagtgccctattctgtggggggaaaaatgccacaaagaacatttattagtaaggaaggaaagtgagcactaagatttaaggcaggaaggctaactytaatgtttggtgcaaatacaatcagatttgtgatcagaactgccattatttataaagct

SEQ ID NO: 654181 - DNA, 616 bp, Homo sapiens
tagaattctagaataaacttagtttgaatagaactttcttttgttgctgaaaagccattgaacatgtattcattttcttcccttagaaataactgagcctcggctgggtgaggtggctcatrcctgtaatctcagcactttgggaggccgaggtgggcagatcacttgaggtcaggagttccagaccagcctggccaacatggtgaaaccccatctctactaaaaataccaaaattagcagggcatggtagcatgcgcctgtaatcccagctacttcggaggctgagatggaagaatcgcttgaacctgggaggcggaggttgcagtgagccgagatttcaccactgcactccagtctcgtgacagagcaagactctgtgtcactaaaaataaataaataaataaataattgagtgaatgtacgaaatcttgaatttagagttgtagtatctcaggtagccatggctgacctgttgggtgggcactgtgccagctactgtggaggctaaagaagcaggacatggcagccaccctcaaggagagtgcacagggcaagactgcaagtgccatggaaatgcctgctgtagctccaagttcagaggagccatgatggctg

SEQ ID NO: 654182 - DNA, 419 bp, Homo sapiens
cttcagtaaagaaatctgcataaaccatagcttcctgtctttactttgccayaaatccttttgtggaagaaagtttggggaaacattaatgggctaatctgttaacatcagtgtacattccctaagcttattagctaaagataaggagagaggtctaggaacccatcactgaaggggctaatctagagtgaagaaagcagaaactacgagctggcagtacctgaacttctaaaagcagaaggaagattaacagaatttaagaaacagaatatttaagatataatactgaaccattttatggaataaattagattgaacagatttattttttcttccaatctgtaatttgttatgataaaaacaatatatgctcattgtataatacatggaccattcagaaaagtttaaaaaggaggggg

SEQ ID NO: 654183 - DNA, 419 bp, Homo sapiens
cttcagtaaagaaatctgcataaaccatagcttcctgtctttactttgccataaatccttttgtggaagaaagtttggggaaacattaatgggctaatctgttaacatcagtgtacattccctaagcttattagctaaagataaggagagaggtctaggaacccatcactgaaggggctaatctagagtgaagaaagcagaaactaygagctggcagtacctgaacttctaaaagcagaaggaagattaacagaatttaagaaacagaatatttaagatataatactgaaccattttatggaataaattagattgaacagatttattttttcttccaatctgtaatttgttatgataaaaacaatatatgctcattgtataatacatggaccattcagaaaagtttaaaaaggaggggg

SEQ ID NO: 654184 - DNA, 615 bp, Homo sapiens
atacatacagacaagtactatttaccccaaaattattaaataggctagtaagtttcaggacacatttggaaatataaaaatcttcacatttctaaagtgccttcaatgtttcttttttcaatactttggtctccttggctattgttacactcttctagccttacctttcacaagattaatcatttttacaccaagtacatattttactagaaaataattttttaaactccttccataagccaatactgatatatcctcttagataaatcctgtaagatcacatgattttatataggtaataccatcattggtagaatggcaatgtacccatgttttctcacccaattgtccttgggagcaaaaatatttgtgagtctaagggtagtatgagtggttacaacacagcaaagctaactaaccatcactgcaattsaatctgtgactttggcatcattttcagtcagttcatttagccacccacacctatgagataagcactgttaatgacaaataactacatttggaaaatttttgatactcctatcagtgacacagctacactgatttctttttaaaaaactatgttattttaactaactagacaattttgctaat

SEQ ID NO: 654185 - DNA, 450 bp, Homo sapiens
gaaaaatttaaaaattagccatgccatgctcccatctagagtctcaggacctataaagatcccatattgggtgttgagagaggtctccttaaatcaagaaagaacttctgattaatacatgtgagtwgacattttaatttttgaactgaacatttgttttttaaatagaaataaaatgcaacctttattatttaagagtgattattgagtcatggaccttgggcatgaaagaacaatttactgaaacctaaaaggaaagtcagagacaaaaataaagttactttcataatatgttacagtttattaatatataccactatagctttattattaaaatgcaagagaaaatgaatcaccttaaatattgaaatatagaaaaagattaaagtaaattttatcccataatatagacataataccaatttagtcatctctagagaatttggaatt

SEQ ID NO: 654186 - DNA, 371 bp, Homo sapiens
tattaaatgctgcttgcagaaatataatttaaatgtttttaatacatgataatgtatatttctagtttgaactagtaatttaatttttgtgacttcactagagcaatagatctaaaatattaaaagttaaatgataatgttatctggtctatactattcaaattactttgctatttattcatattaactttatgatacaatatgtcactctttatcaatattccatgtgcttctgagaaagatgtgccttttttgggggaaatagagaattctatatatgttgtcctatcaaatgtattgatgtgttactcacttcctccatacaytaattttcatcattttgatcacttgatttctgaggaggtatatta

SEQ ID NO: 654187 - DNA, 371 bp, Homo sapiens
tattaaatgctgcttgcagaaatataatttaaatgtttttaatacatgataatgtatatttctagtttgaactagtaatttaatttttgtgacttcactagagcaatagatctaaaatattaaaagttaaatgataatgttatctggtctatactattcaaattactttgctatttattcatattaactttatgatacaatatgtcactctttatcaatattccatgtgcttctgagaaagatgtgccttttttgggggaaatagagaattctatatatgttgtcctatcaaatgtattgatgtgttactcacttcctccatacactaattttyatcattttgatcacttgatttctgaggaggtatatta

SEQ ID NO: 654188 - DNA, 678 bp, Homo sapiens
atgccaaataaatgtatgttgaagagaagaggagaagtactgagggctagtaatcaggcaccagtcttcaggactcttatttctaaacatgtaaactggagaatgaaatgaaataagtgagatattagtagtaaattcaatgattcaatgacagtgaaatgtatttaaataatatatatttttaaattcacaatttaattggcagagttatcaaagcataaggaatatagaaattgtttaataagttaatcccaagctgactttatgcaaaaatacacaaacaagtgaaaaaaaattgaatcctttaattatctccacactcaatccttatatataatggttatttataaaaatggtatggtataattttaaatgattttttgattactggaaaatgtcagtagttgaaatacctgtagtatatatggcctgatggaaaagcaatgctctaagcaaaagagtatttccccatgcttcagacagtcacagcatcacccaggcaggcttagataatcagggccagaagaaagaacgccaacaatggcaaaattgagatcagtatttctagttttataccacaaagccaaattcagccatgtaactaagctacataaaygttaatgaggagaatgcttcactctgatccaatttgtggtattttacagtctcagtcatata

SEQ ID NO: 654189 - DNA, 638 bp, Homo sapiens
aatcttttgggatcttggtcttaaactttgttgggtgggaccatagcaacatttatttgaggcttaatttttctccactattgaacatgctactaaatatcctatcaattttgaagttttccactatgatttgtgagaaaatgaactatttctagccaagtgtgagctctggggattttcttccttctaatcctttctraactctattccaggtttgttagtttcctcatccacatcctgattagtgctcaacagaatactcatgagatagttgcatctttggagttctctctctgtgtaactctgtcatcactgatactctgccctgcaaactctggccatcttggccttcttagaccgccagttctgttttttgtgctcatgtagagtagcagactccatcttgcttttttactcagtgccacaatctagtatctctctctaggtagtaaactggggatattgtagggctcatctacctgttttcctttttttagagatcatggttctttgctgtgatgtccattgtcttgaaaagcattgactcatgtatttgtattgtttttgaaaattgttttaggcagttttatggacaaattcagtgtctccccaaaatacatatgtcgaagccctaacca

SEQ ID NO: 654190 - DNA, 481 bp, Homo sapiens
tgtgcatttagtttgattccttgtttttgctattgtgaatagttctacattgaagatatgcattcatgtatctttatgataaaatgatttctattcgtttgggtatataaccaataatgagattgctgggttgagtggtacctttcttaaacttctttragaaatcaccacattgctttctataatggctgaactaatttacattcccaccagcagtgtataggcattctgtttgctccataaccttgacagcatctgttattttattttttgactttttaataatagcccttctgactggtgtgggatggtatcccattgtggttttgatttgcatttctctaatgattagtgatgttgagcatttttatacacttgttgaccatgtgtatgtcttcttttgaaaaatatctgttcatgtcttttgctcactttttaatggggttgttctttacttgttaatttgtttatattccttata

SEQ ID NO: 654191 - DNA, 481 bp, Homo sapiens
tgtgcatttagtttgattccttgtttttgctattgtgaatagttctacattgaagatatgcattcatgtatctttatgataaaatgatttctattcgtttgggtatataaccaataatgagattgctgggttgagtggtacctttcttaaacttctttaagaaatcaccacattgctttctataatggctgaactaatttacattcccaccagcagtgtataggcattctgtttgctccataaccttracagcatctgttattttattttttgactttttaataatagcccttctgactggtgtgggatggtatcccattgtggttttgatttgcatttctctaatgattagtgatgttgagcatttttatacacttgttgaccatgtgtatgtcttcttttgaaaaatatctgttcatgtcttttgctcactttttaatggggttgttctttacttgttaatttgtttatattccttata

SEQ ID NO: 654192 - DNA, 557 bp, Homo sapiens
atctactaaaactgaacaacatatatcctgacaactagcatctgtacacctagttatttatccaagaaatataaatgcctatgtccccaggaagatattaaaaatgctcagactgcattatttataatkgccataaacaggaaacaagccaaatttccaccaagaggagaaaataatccagcttatttaggagtggcaatattgacattttggaccaaataattatttttgtgggaattatcttgtggattataggatttgacagtatccatggcctctatccactaaatgtcactagcaatctcacagttatgacaatcaaaaatatctccagacattgccatatgtaccatcagggcacgaaaactacctccatttgagacccactgagatagaataacatggtatattaattttctggtatattactcaacaataaaaattaatgaaccattaatcaacacaacataataaaactaaaacaaggtagtgtgttgataaatgtttaacaacatgttctctgaggggaaggtgacggggaggcggatatggagcat

SEQ ID NO: 654193 - DNA, 570 bp, Homo sapiens
gctgtttctttaaattatgggttttggagttagtctacctagatctgaatcctaccctcatgaccagctatttttagtataactttggaaaatttaatttatctctttatacttatgtttcttcatcagaaaagtctagacggtaattaatatttttttcagtktgtttataagtatttaattgcataatctagataaaacctagataaaaacctaggcataatctagttaaaaactgtaagagtaatactaataatgaatgcttattatgattattactaagaattgcattctattttaggaatattttcatacaaatatcttactactaatgaataaaggatattattttactaatgagtgttcacatggtagttaataattcttttaaataattttaatagcatacttatgatgtgtattccaaatggtcataagatatactcaaattcataactttataatccatctgcttttgtgtttgttgtttaatattaagtaaaatgggctcaagatcaaagacagaatattacatatctgtatctgcttgttacacacacaaatgcaaaa

SEQ ID NO: 654194 - DNA, 630 bp, Homo sapiens
aaaatgtgcattaagcaaaaatacttaacggtattaacattttgagaacaataaatttctcaaagcattattaacattgtcttaagtagtatttgtgttagactaatcattttataaatgttctaatgacattgtcattctaataccattaaatttaacatatctatttaattgcactaacccactacttctaatatgtcttcagtattagttccagcttacgtgaggaaagtaacrttgatatatgatcatcattacacagccacaaaggctcacagcctacatataaacccagatacgtctattgtcaaatttcatgctgttttcattctgatgcattttctttgtctactaatctcacacatcctttgcagccattcactgtattagatgtctcttatctcctggtttgcatggtatttatatagcaagatgcagggagcaagttagaaattaggtaagaaggaactttttttttaatcacaaagagttagaacaaccaaaatttcttttgtattgggtatgccagtatgagcatggattaaggtggacagcataagtatactggaagaaatattaggtctctgttagatgtggctctttaggaagagagacagattgataactact

SEQ ID NO: 654195 - DNA, 499 bp, Homo sapiens
aatgttctctttaatctgtgatgtgggttaagaagagttttgactgattatgaggtagcatatgtaccactaaagtttctcacctacattgggctttcatctttcatctattaaagtataagtttattcatgtataaggctggctgcaaaattcttcacaaataaaagtataccctataactgcttataatagatcttcttttcatttctattgttcacagaggcataaacaaagaaagatattcaaagataagagtctygtgatagtagacattttgagccatgatcctgggaaaagctgttcagatcaaggacgccatcttcttctggagagaaactttcctggttagttttactttaagggtaccaatgggtgtacagttccagggatgtggcaggacctttctcagttgtgagattaggaacccaaggttcaaaactccaaagttttgctgtagtgtggatggcgaggacagtctttctctgatgttctcagaag

SEQ ID NO: 654196 - DNA, 543 bp, Homo sapiens
tgtcctctgtgaaccataaaaagctttctttacctggtgaaaatacactgtagcataataatctactgttataacatcagcccccttgcatgggaaagctttatacaaccagaaaacatgcactgaaaataacaattgaatgaaatccctttataaatttttaaatggcccatcaggtagccaaatatacctkaagctttgattgtctttccaggaatatggaaccaaacactggttttaaactatttacacaatttataagtcaccatatcaatatatttgatttggattattttatcttttccatgacaagtcatggaatgcagaacctttaataacaaaacttttaggactcaggaaggacaaggtggacgtcttgggtctttatgagtccatgcttaacatcggacttatgtcctcttgaataccagttgtttctccaatgtagctgcatagcactgataactaatgggttatcataggtaatttgacttagaccatgtagctcattcaaatagtatatttaaacaattttagtattgg

SEQ ID NO: 654197 - DNA, 581 bp, Homo sapiens
cgccatcttcttctggagagaaactttcctggttagttttactttaagggtaccaatgggtgtacagttccagggatgtggcaggacctttctcagttgtgagattaggaacccaaggttcaaaactccaaagttttgctgtagtgtggatggcgaggacagtctttctctgatgttctcagaagatccagtccttaggttctagattgtgaaggaactgtcctctgtgaaccataaaaagctttctttacctggtgaaaatacactgtagcataataatctactgttataacatcagcccccttgcatgggaaagctttatacaaccagaaaacatgcactgaaaataacaattgaatgaaatccctttataaatttttaaatggcccatcaggtagccaaatataccttaagctttsattgtctttccaggaatatggaaccaaacactggttttaaactatttacacaatttataagtcaccatatcaatatatttgatttggattattttatcttttccatgacaagtcatggaatgcagaacctttaataacaaaacttttaggactcaggaagga

SEQ ID NO: 654198 - DNA, 424 bp, Homo sapiens
caactagacccctatctgtcatcataacaaaaataaaatcaatatgcattgaagacttaaatctaagccttcaaaatatgaaactactaagagaaaacattgggaaaattctccaggactttgggtgggcaaaaaattcttgagtaatactccaaaagcacaggtaaccagagcaaaaatggrcacatgggatcactttaagttaaaaatcttctgcacagccagggaaccaaacaactgaaggaagagacaacccacagaatggaagaaaatatttgcaaactatccatctgacaagagattaataaccagaatatgtaagaagctcaaacaattcaagagaaaaaaataatatgatttttaaaagggcaaaagatcagaatagacatttctcaaaagaagacatacaaatggcaaacaggca

SEQ ID NO: 654199 - DNA, 565 bp, Homo sapiens
tgaattgggagcttatagacagttttatatagttcattactatatgtgtaactggtgggaaagcctgtgatatgtaactgatggaacagcctgtgaagccaccatgtgtagatgaagccactgtatctggcagtctgacagctatgttctctttagaattacagcctttgcttcacttctgtttcccaaatcctgcgctagttcctctcattggtaaastctaatctggatccatataggaaagaatataataatgaagtgtttccagtcttgcatgtggtggttatgcctaatagacaacagacaattcatccgtttgtcatctcagcagccatacaaagctttttaaatttatctgaatataggtaaagagtgtatcatgcttctgtctaagctggcataactatcctttatacaacattctagggttacatacacaaaataaatgtttatagaaaaccaagataggggccaagatggcccattagaagcagctgcagtcagaggatctcactgagaagaatgaaaatggcaagtgaatcctgcactggcaactgaggtatcc

SEQ ID NO: 654200 - DNA, 567 bp, Homo sapiens
ggaattctgtcagtgtctctatcactatttcagagaaaggttggagctgggcatggtggctcacacctgtaatcccagcactttgagggggccgaggcaggcagatcacttgagatcaggagttcaagaccagcctagccaacatggtgaaaccccatctctaccaaaaatacaaaaatcaggcagcgtgatggcgcacgcctgtagtctcagctacttgggaggctgaggcaygagaatcgcttgaactcaggaggcggaggtcacagtgagccaagaccacgccactgcactccagactgggtgacagaatgagagcctgtctcaaaaaataaataaaaaataataataaaagaaaggttggaacccattaggctggacccatgggggaggggaggactaccaggcttggcaccaatggggccgtcaatgtttgataccaccagctgctaaggtcttctaattcattgcccttgctctgagtacagcctcactgagccacttgtttataatatgcttcccatttagactttcctactgggagaaaatgcacagccggtgtagtat

SEQ ID NO: 654201 - DNA, 571 bp, Homo sapiens
agcaaagtatgtatggcagaaaaataagcattcatcttaaaacatctaaaagtcattgacgagtgatgaaatcacaggcactaacctaacatttcaatacaagataaaccaagcctctttatctttaccaggaatgatctaaaatgtagaaccaaatctggctgttttttacagatccacacatgtccagagaagagatcaaaaagaaaaagcgaagcctcatctggctgcwccatcaggtagagaaacagcggttctgtttcctttaaagttgaagtttccaaaactaacagatcccaagtggatcatctgacttagaaagaaaccagagcacagaaccagaaccatgggcaaacagctcaagaaaaacaacaacgacaacaaccaaggaggcagagggggcagagctgcctccgctgcaggctgagcggctatcaggggtgagctgacgggtgccccggaagtggctgaacccagatgaaccacgtccactgcctgggcaggtcacattgccggggcaatgaaaaatcatttacctttgttgagtgaatgacccatttgaagtgaattc

SEQ ID NO: 654202 - DNA, 447 bp, Homo sapiens
atgtgaggtgtggtcaggacacctacaaggacaggcagctgggattttgttgatcttaaacatcaagttttagagcctagtgtctgcttactaataagtgtctgcatatggcacagggtttggtctgagawgtgcttttattataacctggtagcaaagttgcaggagagtagctaattatcaacctcctccaactactgatggacatgaacgtcagtaactaccacgaagaactaaatatgtgcacatggtgagattggcttatgttagtttacactccctggcaaaagtactaccttttgcacaaatgggagggattttgttttccactttatgtaagatccgtttaagtaacaacctggacaaccaaatccctagcaaattacatcttacttagtgaagaggcacaactttcatctttaatataagcctcgattccccatgaaa

SEQ ID NO: 654203 - DNA, 581 bp, Homo sapiens
tgaatgaaacagtatttaaggtgatgtgtttccttacctgttgcccattaggcaccaccactcttttctaaagctaaagattatttttcccagaatcctcctccctgtatgtggttcctagttggagtgtgccaataacaggcgttcacgtgtgatttagcacaaagaagtgaaacagaagccattatttctgagaagcagttgcatcctgaagcttatgcagaggagagatttacagcatgtctcccggctcttgagaactatttacttcatcactgcaacctaagtagttggtaggacctccttagagaatcttggcaactgcagaaatttacaaactagctcctgagaaacagatttcactgcttcaatttgacaacgttggtgtgaaatcctctattgtggaagctctcttcactaccactctcytgatctttcagtggttttaaacccctaatattatcctaagcaccttttacttgattaaacagagtggcttctgactttttatatgattttttcactggcacaggtgcttcacagagtagtaataaactagttaattttaaacaggagccaaa

SEQ ID NO: 654204 - DNA, 472 bp, Homo sapiens
ccattaataaaagtttaggtttttcaaggtgttgtttgtttgttaattcatgtgtttgcttttgtttcagttgttgttgtgtgtttgggggtgaggctggggatatttgtttcctgaggacctctgcattttctgacttttatttgaatgtgctaaggcaaactgagaaaattcaaaattgtgtccaaccrtttgacttctcaagtcacataccaaaacaaaaactatgggattacatcaaagggcatagtagggattcctgggttaaggagaaaaaagtgtgtaacattcctaactagagtgatggagtatgaactatataaggaaagctatcatcaccattgacaaatatttgttatgttaggcactagcctccctgtaaaggaagacaatacccatgaattcagaatgtaagccacccacagccctatactgaagttatcctggactttcctgcctgtgtccacacaga

SEQ ID NO: 654205 - DNA, 532 bp, Homo sapiens
ctcattattcagtgtagttacggtctagaaagttccatgaacaaataaaaagttaggtttcagcaagctactggtcacayttttgtaagcttaccaacacctacttttgttgtatgtgtgcttatttaatatatattgttggccaggcacagtggctaacgcctgtaatcccagcactttgggaagccaaggcgggcagatcatttgaggtctggagttcgagaccagcctggccaacgtggtgaaaccccgtctctactaaaactacaaaaaaaaaaaaaaaaaaaaaaaattagccaggcatggtggcgcatgcctgtagtcttagctacttgggaggcgaaggcaggggaatcgcttgaacccaggaggcagaggttgcagtgagccaagactgcaccactgcactccagcctgagcaacagagtgagactctatctcaaaaaaaataataataataattaattaaatgaagaataaataaataatatacattgttcattcattaacattgaactcacagccaacggca

SEQ ID NO: 654206 - DNA, 532 bp, Homo sapiens
ctcattattcagtgtagttacggtctagaaagttccatgaacaaataaaaagttaggtttcagcaagctactggtcacacttttgtaagcttaccaacacctacttttgttgtatgtgtgcttatttaatatatattgttggccaggcacagtggctaaygcctgtaatcccagcactttgggaagccaaggcgggcagatcatttgaggtctggagttcgagaccagcctggccaacgtggtgaaaccccgtctctactaaaactacaaaaaaaaaaaaaaaaaaaaaaaattagccaggcatggtggcgcatgcctgtagtcttagctacttgggaggcgaaggcaggggaatcgcttgaacccaggaggcagaggttgcagtgagccaagactgcaccactgcactccagcctgagcaacagagtgagactctatctcaaaaaaaataataataataattaattaaatgaagaataaataaataatatacattgttcattcattaacattgaactcacagccaacggca

SEQ ID NO: 654207 - DNA, 532 bp, Homo sapiens
ctcattattcagtgtagttacggtctagaaagttccatgaacaaataaaaagttaggtttcagcaagctactggtcacacttttgtaagcttaccaacacctacttttgttgtatgtgtgcttatttaatatatattgttggccaggcacagtggctaacgcctgtaatcccagcactttgggaagccaaggcgggcagatcatttgaggtctggagttcgagaccagcctggccaacgtggtgaaaccccgtctctactaaaactacaaaaaaaaaaaaaaaaaaaaaaaattagccaggcatggtggcgcatgcctgtagtcttagctacttgggaggckaaggcaggggaatcgcttgaacccaggaggcagaggttgcagtgagccaagactgcaccactgcactccagcctgagcaacagagtgagactctatctcaaaaaaaataataataataattaattaaatgaagaataaataaataatatacattgttcattcattaacattgaactcacagccaacggca

SEQ ID NO: 654208 - DNA, 546 bp, Homo sapiens
cttatttaactaaatgctgtaaggactcaggaaatccattctttcaacaaaagttactgaagactttccccattagtatcctaaacaatgtctgcaaaattggttttcatacctggataccttgtcttctaagagacacggcagrgaaagatcataggaaaaaagtcactatcaggcacagctaacaactagcaaacccatagtctttaaaagactgatcctttgattcctatctctcaagtaaagaggtttaggtcatcttcatattacaggaaagtatccctaccaaaaacttctaactaacgactcttaggattcttccaaaagcaaatagtctttgggagaagacagcttccatcaaatgcctttggatcaagtgaatcactatatgagatatcggtatctgcaaaccaagatccacaaaaaaagatccattgtttgtcatatttaatctgtatatcttgagttttcattttcctagttaactttatctttttatgcttaaggttacatttaattactttacctataaagctactattccta

SEQ ID NO: 654209 - DNA, 582 bp, Homo sapiens
tctatttctttggtaatcttaaaatgcttcaagtttgcttatgctttagagaggggtggtaaactaattgtagttaggatttctgtgctttatcttcaaagcacaggttttagaattctgatagagttcttatcttgattctgccacatatcttgaataaattacttaaaatttcaactttagtttatctratacctacatcaaaggttttggtgcagattaaaagtgactggttcatagaaattaaatatgaagtaattgttagttttccttttttccttcttggtgtggtgataatgggcaaaacagttctccatcacagataataggagactattgtcccatcatagcttagttgctaactggtacaaaattggaaagaaaagagaggctggattggggagatttgttgaggggaaaaaagtgtgctggtgatttttttatgtatactctttccactagccccagtaagaggggtctctgctctgagccacacactttaaaatctccttttataccatgtttgtcatgggatgagagctctaggtactcaagcccctgaaatagcccccagacagcccc

SEQ ID NO: 654210 - DNA, 528 bp, Homo sapiens
ttttgtgactggctcatttcacttagcataattagccttcaaggatcatccctgttgtagcatgtatcagaatttcattcctttttaaggctgaatcatattcaattgtatgtattaatatataccacatttttgcttatccgtttatccatygacagacacttgtgtggctttcacatttagtatttgtgaatagtgctgctatgaacatgggtgtactcatatcccttcaagagcctgcttcaattcttttgggtacatactcaggagtggaactactggattatatggtaatcgtatttctaattttttgaggaactaccataccgttttccacaatggctgtaccattttacattccaaccaacagtgcacaagggctccagttcttccaccttttcaccaacatttattttctgatttttcgatagtagtcattcaaatgggcgtgagatggtatctcgaagttttgattgcatttccttagtgattagtgatgttgagcatcttttcatgtgcttattggcc

SEQ ID NO: 654211 - DNA, 572 bp, Homo sapiens
gtactgaaacctaacagacaggtaggtgatcatagaatctcagatgttactgagaacttcttaaatccaaagtctcagcatatagcctcaaatacaacccacgcaaagctgacgtgcatctccagtcaccygcatgtgatcacattcaaaagaaacatcaggctggcatttaaaagggaactgatgggatatctattaaatggagattatattgcataattaaatttaagtaaatcagcttaaaatcttgtatccactcttctaaaagtgtgcaagtattttttaaaatattatgcaacaacaagaataactgaaccctccaaaacaaaaagtgaagcaaaaaacagaaaacaagcaagcataaaaacgagtaaaatctcgtaggtaaggtttacgtggctgatccctatctttcaattgctaattttatttctaaaatacagtctcattgttctcactgatttagtgctatacatttccatgtaagacatacatattaattatattaaacaatttttatcactttccatttggttgccatgggaaattccatctgaagatgttggaaatga

SEQ ID NO: 654212 - DNA, 582 bp, Homo sapiens
cttctgaaccaaagtacctgctgtcacgctgcctaaaattccattagaaatccatccctttgttgtaattaatacttaccatggcagtgccatacatttgtgttacacttttcagtttatgatgcactctaacagacataatcttattttattatttttgtttttattatatgtatttaaggtagacaatgtgatgttttgatatacatatatgtatatgtagtaaaatgattacttttatcaagcaaattaatatgtccatcacatagctcttttttagtgataaaattactctcctggcaaattttcattatacaatacaatattattgattatagttcttatgctatccattacatctctagacttattcatgctacataactgcaacttaatgccctttgacttacatctccccactcccaccctgctctctgccctttgtaactcctgttttactctcttattttattatttttatatcaactcartgaagtaagaagaaaaaatccccattttgtaaatgttcatataatttgaattttatgatgcaagaaaactttatgtatagtcgagacctgt

SEQ ID NO: 654213 - DNA, 587 bp, Homo sapiens
gccttttgcaaaaaatatgcaagagtgctgaaacttggataaaacgggtcatgtatacagagaaaataatctaaaagttatctttaagagggttttagtagtgtcaactttttaaaaaagtactatgtgaccataacatacgtatattttaaagagggattaagattaaattaaaataaatggattcataaaattgctatttaaatacagtatttacttttgtaattgaagcatgattccacaaccagctgtggcattttatttcacttttctagatcagaggctttaatttgtagttaatcatgatgtggaaagtcatcttctctctactccatcaatttttttcatccgtttttgaacatgctgaagcactttgatcttgccataagtgttgtcctataccactaggtggtgttcactaatgggagggcctcagctcacyggctctccaatttgggaaaaagcaagtacctcctccctaccatcagcagaaactgaatgaaattaatctttgcaacttgaatctgttttaagtagcattaccaataagcatagtggtatctgaataaggaatgacatttacatta

SEQ ID NO: 654214 - DNA, 393 bp, Homo sapiens
tggaatgcctagggacctctctgccaccactaatatgtcctagtccttcgtcacacatcaagaatttttaaaacctgaatctgcatgcaacagttgccatagcctttttaagaggtgggaacagggatttyttccagctcatggaaatccacctaagttagctccatacctggtgtcctgaagtgctgcaaagcatgagttgtaaaaaaaaaaaaaaaaaaaaaaaaaaaaatgctacacatggtcaaacttgtttttgtgtctaatttgtcatattttatagagaattgtctttttcaaggtatcctgggcacatcatcactattcacagtgaggtttctgtggagcaaactattgcaactgctaaccagccaatttacaaaagggaatttg

SEQ ID NO: 654215 - DNA, 549 bp, Homo sapiens
catgctcctgggtggagaactcctggcctagactaactgaggcaagcagaagcagctgtgatcataccatgagaccatccaatactacatttttacaaaaaaaaaaatgtttaacatgagatctttctacttaacacatctttaaatgcataatacagtattgttaaccataggaacaagcttgtaaaccagatttttagaacttattcatcttattcattgaggtggtaaaccagatctctagaacttcaatttattcatcataactgaaagytgatgttcatccagtgctacttgataaagacgtgactaagagaataagagaacttagctctaatgcatctgctgacaataaacatgacctttctgaaatcgaaaaattgaaaaaatgaaatttggggttttatttgtgatggtgttgccagtgatttccttgtgggaactgaccagaaccctgtaataatgtcagtaggatttcatctcttgctttattagcagggcttgatttggcattttataaaattgccatttgagggcaagataagggca

SEQ ID NO: 654216 - DNA, 599 bp, Homo sapiens
gatctaaaaagtatgttttgactatgaaaaaggccatccaagatccatcacccataaacagggtggtgaatggattagtgctcatctaccctctatttgctcttatgccacccctatggttcaccatttatccactcaagaaatatttattaaggacctcctatgtcctagacatggtccccgtggcagtgctttcagtctaatgcggaagacaaagaataacaagtaagggaaacatacagaaacacaaattgtaacacaggctagtggaaatkaacttggtgcagtactcattggtgggcatcgagcatcttgcttagataggagatccagggaaggactcttggaggagattaggcataggaccaaagatcagaaacaggtatctggacctgactgtgatgctgggattagaaatgacacccacacatgtgaaaacacttattcctcagaaggtagtctacagctatttgttgccaatccccaatctaaaatatgtactatagctttatcttgaacatactcagctgatcgttggaatccagacagtgttaatcctgcaagtatgcaagtatctactgatctctggtgatctcgat

SEQ ID NO: 654217 - DNA, 587 bp, Homo sapiens
tttcaagattttttgactccacatctttaagtggtggtacctattggcaaaagggcggggaagcaagttttaacaaatactgtaaacaccagagaagttctcttttctgatctccacttaactctacaaactaacgcgtgctttccacttcttcagtaaaacatcctgactcacgtccgtagctcactagatgtccgtgaccaaaagatcactttctaatatgctcacctacttctcccttcagcagttgagttctgtgtttatcaggagtcagttaagtttgttcccaatatgttaatgcctattgtactaattattgagactatgcaatttaattatatgtaaaccaatgaaacgtgaatgcaaataagaagactttttttctatgaaaattaagttgagtgttttggaaagaacagataatggtgattagctaatcctgtcaaattagatgtgggtgagatactacaaaatattagggagaaattttaaaattatagaagaattattttttcaggttgcttcacaattgtccttaagttcccgctgtaatataaaggaatcaaaracagatattatagatgatg

SEQ ID NO: 654218 - DNA, 577 bp, Homo sapiens
gggccttaaaactgagagggttaggattaatgattccaatacctatgcttggacatctccaaaagtgggttccaacttcttgtcctcaagtctgtatagaaactagcaaacttccagagttcacaaaaggctcaaagagaacagatgttttatagaaaattcttagrgcaagtttcacgcataatgttgctgatgtgtgtctgccttttcaataaacatcactatgctttatcacaagatttaataaagcagcttagttaaaaatgccatctgggtctctggacacattaaacaaagcttaaaataaccaccccagcaactgggaggacccagctgttctcataatctgtcccactccttttacttccccataaaaagagtgaatgaagaccacagactaaaagcatccagaatgaactgacacaaacagggagatagatggagccaagggctcctgtaagtttgctattgctcacataatagatttgctaattccacaacctggggatggggattcagaaagggaagcagaaagagggaagagagaatcatagaagggctcattcaagtcttctaa

SEQ ID NO: 654219 - DNA, 508 bp, Homo sapiens
aggctggcacaggtcattgaagccctagctttttatctataattttaaaatccccaaacaatttatactaatttttcttgtccattatttccaaataatcttgtttaaatgttattacagtgcttgctcatgttactgttgtctaacagaagggtatccggggccttaaaactgagagggttaggattaatgattccaatacctatgcttggacatctccaaaagtgggttccaacttcttgtcctcaagtctgtatagaaactagcaaacttccagagttcacaaaaggctcaaagagaacagatgttttatagaaaattcttagggcaagtttcaygcataatgttgctgatgtgtgtctgccttttcaataaacatcactatgctttatcacaagatttaataaagcagcttagttaaaaatgccatctgggtctctggacacattaaacaaagcttaaaataaccaccccagcaactgggaggacccagctgttctcataatct

SEQ ID NO: 654220 - DNA, 546 bp, Homo sapiens
ctttctctccctcccttctttcttccaccccaagaatttgttccccagatagttctagtaaatgcaaaaccaagtatattctcattctttagagcaaccagcttttcatggccaactggaatcaaatacaacctgcacaaacatctatctggaggacactcccaaggctcctactgagccagccttctgcataccactgcatttcagcttcctagttcacaagacactgagacattcttgaattctgcaaggtgcactgtgtgttaatatcattgctgctcatcatgtggccaataaagkgcatgactagtcaacaaatacattttctcttggctaaaacttgcaacaaaactgtaagttgtttaccaaggggcccactacaggttatattcaatacatacagtcaaatcataattatctgagatatattcagttgaccatacacctttatatttcagtaaaaggtctttacatttcccagtgctatcgatgttacaaagtgctttcatatgcagtgcttcatctgatttccaggataattaaatg

SEQ ID NO: 654221 - DNA, 546 bp, Homo sapiens
ctttctctccctcccttctttcttccaccccaagaatttgttccccagatagttctagtaaatgcaaaaccaagtatattctcattctttagagcaaccagcttttcatggccaactggaatcaaatacaacctgcacaaacatctatctggaggacactcccaaggctcctactgagccagccttctgcataccactgcatttcagcttcctagttcacaagacactgagacattcttgaattctgcaaggtgcactgtgtgttaatatcattgctgctcatcatgtggccaataaagggcatgactagtcaacaaatamattttctcttggctaaaacttgcaacaaaactgtaagttgtttaccaaggggcccactacaggttatattcaatacatacagtcaaatcataattatctgagatatattcagttgaccatacacctttatatttcagtaaaaggtctttacatttcccagtgctatcgatgttacaaagtgctttcatatgcagtgcttcatctgatttccaggataattaaatg

SEQ ID NO: 654222 - DNA, 546 bp, Homo sapiens
ctttctctccctcccttctttcttccaccccaagaatttgttccccagatagttctagtaaatgcaaaaccaagtatattctcattctttagagcaaccagcttttcatggccaactggaatcaaatacaacctgcacaaacatctatctggaggacactcccaaggctcctactgagccagccttctgcataccactgcatttcagcttcctagttcacaagacactgagacattcttgaattctgcaaggtgcactgtgtgttaatatcattgctgctcatcatgtggccaataaagggcatgactagtcaacaaatacattttctcttggctaaaacttgcaacaaaactgtaagytgtttaccaaggggcccactacaggttatattcaatacatacagtcaaatcataattatctgagatatattcagttgaccatacacctttatatttcagtaaaaggtctttacatttcccagtgctatcgatgttacaaagtgctttcatatgcagtgcttcatctgatttccaggataattaaatg

SEQ ID NO: 654223 - DNA, 546 bp, Homo sapiens
ctttctctccctcccttctttcttccaccccaagaatttgttccccagatagttctagtaaatgcaaaaccaagtatattctcattctttagagcaaccagcttttcatggccaactggaatcaaatacaacctgcacaaacatctatctggaggacactcccaaggctcctactgagccagccttctgcataccactgcatttcagcttcctagttcacaagacactgagacattcttgaattctgcaaggtgcactgtgtgttaatatcattgctgctcatcatgtggccaataaagggcatgactagtcaacaaatacattttctcttggctaaaacttgcaacaaaactgtaagttgtttaccaaggggcccactacaggttatattcaatayatacagtcaaatcataattatctgagatatattcagttgaccatacacctttatatttcagtaaaaggtctttacatttcccagtgctatcgatgttacaaagtgctttcatatgcagtgcttcatctgatttccaggataattaaatg

SEQ ID NO: 654224 - DNA, 585 bp, Homo sapiens
ttctcatttattccctaatccattcaaattaaatataaaaatccaagcatccacagtgatattcaaaaaagcaaaagtgagacaaaacaaaattcatttgtcacctgtggaggtagttaactcaccaaatcttcactccaaacaccagtaatttttaaaagacagaaataaacatatgttctgccttcccggaaggaactatgtttcagggtagccaaataacccagttgtgaagaaaatggtctgcttatagaaaaatgccagctaaaacatgtatatagaattagagaattagaaattcaccattttgaaacccctaatgaaataatcaactcaagcaaggatcattaataaatgctaaaacaatcaagtaaatattgatacagaatataactgaatatacacatggtacaaagttcacgtcacagactactggcttgacccaagggggaatataacagaggagataggcagtgatcgccctaaccttgcgatcatctcaccatcactratgatgggatgtgaatacacattattgcctatgaaatagtctttaaaaaaagaagttgaacctgaatctaacta

SEQ ID NO: 654225 - DNA, 549 bp, Homo sapiens
tcttgaaacagtcgataacagaaacataatatactgaaacctatgagatacagtgaaagcagtgtcaagagggaagcttatggctataagtgcctacattaaaaaargtagaaaaacttcaaataaacatacttatgaggcatcttaaaaaactagaaaaacaagaacaaaccaaatccaaaatagaagaaaagaaataacaaagatcagagcagaaatgaatgaaattaaaatgaagaaaacaatagaaaataaaatgaaagttcattttctgaaacaataaacaatactgacaaacttttagccagactaagaaaaaaggaaagaagaattaagtaaataaaatcaaagacggaaaaggagacattacatctgacaccatagaagttcaaaggatcattagttgctactatgagcaactatatgccaataatttggaaaatctagaagaaattgataaatttctggatatatacaacctaccaagattgaaccatgaaaaaaatttttaaaaacctgaataccccaataagaagtaacaagacgaaa

SEQ ID NO: 654226 - DNA, 572 bp, Homo sapiens
aatctttactgcatcaaattcccaaaactacgcctttgaagtaagttgacataatacttgttgtttcttctcaaatttttaatggttctccacagtatgctaggtccttattttctcattggctgtaatttgacaagttctccaaaagcactatcatgaacttaattagataatactttccagctgtacttaaatcagaaggatcgtaggcctgataagcaggtcaacctgaagctaccaggcagctctggaggctcccgtggccatagctaacagtgcacaggagggcccctggcccaggatgagccctcagaaccttttagagagagtgaaattcagggtctactgggtgtccaagctgcagagtggagcgtgagaggtcagctgccatgtgatagaaagagctgacataagagaaaagacccccacacagtgaaaagctggaagagaaacaaaactcwcaacctgacagcagagttcctggttccaactgttgagacctgtctctacctccaatggtcacagtatatagttacccaggcctggaaatctccctcttttcctaattagtt

SEQ ID NO: 654227 - DNA, 620 bp, Homo sapiens
taaggtatagggaacaaatattagataacatttactgatcttctgctacatgccaggcactgcagtaagtgtgctatccatgaggtccattctcttcttatttgaagctgaggaaactgaaagcatggcttgcctgaggtcacttcacttccctctggtcctgactggagtcaggctggagctctcctaccctatattctctctcaaagaaaaggagacaggctagtagaagacatagaaaaggtaagagcaaataggtagggcttattccactcattctgggctaacagccctttaaagaaaagtatttggctacaaattgtagaaacacagagctcgtgtgcctattggctataacagttacaacctttggaagaggggtttcggtgtcctttgccatttagcaagtaattgagcaggagagaaagcagatgagcagaaagaagcaaagaagttgaaataagtagagtgtgggcagggactccgcagtgtcctggaggaggcacacctgtcattggtgccctgggaastcatgtattagatatttcttgggatcacagaggatgttgggggtggggaggatcagggccattttcagggagctgttttaaaggaagaat

SEQ ID NO: 654228 - DNA, 594 bp, Homo sapiens
ggcctttgcaggcccggcctcctgcctctcgaggcctgcacgggcccggcctgggcctcggcctcacagcggactctccacgcccagctagctctcgcctcactgggggctccccagtccaaagctcctgcctttcggccactttggcaggtccagctcctgcctgccagtggcctctttaggcccagcttattcctcacgtcggccattccaggccccgtttttcccttccggcagcctcttggcctctaatttgtttatcttttgkgtataaatcccaaaatattgaattttggaatatttccaccattatgtaaatgttttggtaggtatttaatttggagtgagttttgcgccaagcccgaattttttattttattttccttattatttgggtgttaaacaggtttaatgacggtcatggcaactttttggcacaatgaaaaatatcgcccccgatcaacgtgttctgtctggggaaaggggcaaaggcagggtgaatcactttcttaaaaagtatagctcaagttgggagtgcagagggaatggggagaaaaccctcccgctgcctgtgtcgaagtgcaggagccccca

SEQ ID NO: 654229 - DNA, 564 bp, Homo sapiens
attgacttgtgagaaatgttaagcttggaagagtcagcatcgctgcacttattttttattctactctgacattagaataatccttgagtgggggaaaggttaaaaacccccctggataagtgttactaattaatgatgattgttttaaacaatgtttggataatttttccttgtcccttgacataaacttgataaataactgagaagtgagaaggagattagtgggttgattaaattccattcaggtacttaaagtkagctccaaaaatttagctatttgtaaattgtcatgcattgttaatgtataagagatgtagatttcatttatctttggtggagcgagatcaagcagtgaatcattgaagactgaaagaaagaaaaaggtcttttcccttttctttaagaagcatcattagttaaaaacatgttagttgataccacagaactatatttaaagggacagcaacaagcaaattgattactctggtgattattggagtgacattgccttttagttgtactttcacaaaaattcacaatatttgccaaagtcaagttatccat

SEQ ID NO: 654230 - DNA, 536 bp, Homo sapiens
agatcaagcagtgaatcattgaagactgaaagaaagaaaaaggtcttttcccttttctttaagaagcatcattagttaaaaacatgttagttgataccacagaactatatttaaagggacagcaayaagcaaattgattactctggtgattattggagtgacattgccttttagttgtactttcacaaaaattcacaatatttgccaaagtcaagttatccattacactattaatttgtcattcttttgtttatatagtcaatatctctatctcaattggatctatctcaactgcttctaaacaagccaccagtctctcccatttcaacaatctcttccaagtaccacttcatttcttcttttcatatttttgaaaacttttgaaaaactacctattttcctcctccatttcttgttcattccattctagtggacatggaatctgttcctcctccaaaacggaatttggtcacccttaaattactaaacccaaaacaatatgttgtctttatctttacctctctgtggcatttaat

SEQ ID NO: 654231 - DNA, 659 bp, Homo sapiens
taattagttctgttctattttccattaaaatatttaaatcttgtatgaatttttgtcagattagaaatttagggcgtttcttaatttctctatactctagcttttgactttttttttctgacctaagaggtatttagagcacattttagattttttattttgactaatcatttaaaatgtatactaatcttcaatttaaataaaaaactggtctatagtgacaaaaattacaaatgagcctaactaataaattatcagctgtgtttatatgtataagcatgcacagattttggtaaatatgtacatagtatattggtgagcttatttttatcattcttaactcattgtgtagtctaaacgttggggaaaaaataaaatacaataatcagatggtgtgaataagaaaattgttctaatgtttgtaaaccaagcaactgttttaactgctcccctcttcctgattgacttctaaaagggattgatccatattgggtcctatcatatacgtcacggtataacatctccagctataaaatggaaatttgagawtaactttgctgctactcagatacattttatttcaaaaacatacactaaggtgttgctgttggatctttccaaaaacatattcacacagaactttcaatcacactgagcca

SEQ ID NO: 654232 - DNA, 680 bp, Homo sapiens
tgtggttttctgcattattgtggtggtgatgtgatttagctcctttaattagttaatgtaatgaattacatttgtagattgctctaactattgaaacaagcttgaatttctggaataagcccaatgtgatatttattcaacaaatattcattgagtatacctagtatgtaacatgctttaagaatacaccagtgaaccaaacagaaatatctgacattacagaacttaacattccagtatttggagacagacgataaaaaagtgaacatgtatatttacagtttgtcaaggaatgataaakgaagactcttaaagtagatggggaattgggagtgaagtctgtaatttaaatagggtgggcaggaaagcttcacagagaatgggacatttaagaatagacttgaaggacaggcaagagcaatctctatgtttatatgggagaaaaggttccaggcagatgcagtaacaatggcaaatatcctgaagtaggatcatgctggagtttttgtggagcagcaaggaggctagtgtgactgccacagaatcacccaagggaagatgagaagatcagaccagaccagcacttgggcatctaatgggaaaaagtttctcaagccatcataaaaatttcacttttactataaatactacgagaaaccatgggatgttttacagtaaga

SEQ ID NO: 654233 - DNA, 564 bp, Homo sapiens
atcctatgtattataatgataaaagtttaatattaattagggccttatgctattattggaagagcttggtgaatagatattagaaaagcagctagacaaaaatcagaagaggtctgttttatatcagagatcttagcctgacagtctagagtgtgggcacagaacccaagcttataggaatttctgaaaggtctgtaaatcttatccagatggacagtgggagctcataaaggattctgcaagccatcacatctgtcaaacctgctatgtctaatccttaagcctgctttatgtgaagacctcctcttcactcctcayttccagctctcatgagtttctttcataggcaaacccaaacctggaacaatgtgcctgaagacttcgggtgacacagtacccagacttaaataggaggggagccatggtggaagtggccatccagcacaattttcttggtctttactcatagttttgattccttaaaaaaattaaccacattaaaatatgtgtttcataatctacatctaataatacaaatatttaaagtcttttcaagtttgaata

SEQ ID NO: 654234 - DNA, 414 bp, Homo sapiens
aatttatactttatattatgaatgagattcacaaaaggagcatgataatatattctgttgtcatcgcatacaaaataataacatatagagtatgaatcaataatttttcaaatacaaagctattacaattaggaatacaaagaaatcataattaggaatacttctacaatattaacacacaatagtggtaacacttgcaaaataaaaagtggtggttttttttttttttttttttccccgacagagtcttgctcttgttgcccaggctggagtgcaatggtgtgattttggctcactgtaaactccatctcctgggttcaagygattctcctgcctcagcctccctagtagctggtattacaggtgcctgccaccacacccagctaatttttgtatttttagtagagatggggg

SEQ ID NO: 654235 - DNA, 536 bp, Homo sapiens
attatatgaatgcatgaattcaatatayatatctatatatctatatatctagatatatatatatatctatatatctagatatatatatatatctagatatatagatatggagacaggatctcaatattgagacaaggtctcgttctgtcgtgcaggctggagttcagtggcacaatctcatctcactgcaacctctgctgcctgggttcaggctattctcgtgcctcagcctctgagtagctgggattacaggtgtgcaccaccacacctggctaatttttgcatttttagtagagatggggtttcaccatgttgtccaggctggtctaaaactcctgatctcaggtgatccgctcgccttggcctcctgaagtattgggattacaggcatgagccattgcacactgcccaatgtcatgtatttttatgtaaaacttcattaatcttccaaagtcaaagacaaaggatgttctaaaaaagtaaacttttaatatgaatgttccaaaatattttgaaatgtaatagtgatttgggaa

SEQ ID NO: 654236 - DNA, 589 bp, Homo sapiens
caaatttgcaggtatgtgcatgagcaggattacaactaagtttttgtgaataggggatcctggctggggaacaaagagagcaggtattgctggaatacagtggaagacattaaggctaggggcaagtgtgccaagagtaaggtattcttctagaatttctcacacatttcaagataggaagataaaagtaattttgtattttcagcggtcatgttggtctaatagaatgccataagcaaatatctgcttgttatatgaggcttttttcttttccttttttaatgatcatgatgattaacatttctttataagcgtcagtccacatctgctacaaagctgagtgggaattcttactcccactgatgtaacctttaggtaaagggtaatgaatgagaactcatcctcctcatttcttttttgctttgttttgcttttttgttcttttgagtcagtagagaagaagccagaaaaatggtagtgattagacaattaaaccaactaattatagcttttagttataatcttttycttttttcctaggattgcagaagattttatttattaaaatatttctgacccataattatat

SEQ ID NO: 654237 - DNA, 592 bp, Homo sapiens
agaccttagggagagacccctgcatggctactaggtttagataccaaatggaagatgagaatcaaatcacctacttcacgggattacatgagataaaaatttatgaaaattctacttacaagcagacagcactacatacactgaatgtagatagaactttaagaaggaaaaacaaaaaactgcaaatcacagcaacataaggcagaacgaggtcaagatccccttcttcttcagaaagacaaggagctgccttgtagttagtccagtccygatcaacaggatgaagagagaaacagggataccaggctgtagctcagttcaaatacagaaaatgtatccagtggagcctcctttcccaagcatctctcagagctccaagcccagcaaatgttgtagtagtgggactatgctacttcctctcacctttattttgacttttttctctttgcctctctttatttctcctcttttaaacttcactcttgctttaactttggttttgtagagcctcctagtaagacaagtatttctttcactcattggctggtctagggttgggggaatgggtggaataaggaatttgccaatgcct

SEQ ID NO: 654238 - DNA, 584 bp, Homo sapiens
ggcttctttctaagtttccctttcacactactctatttccwttctaacgataattataactgtctttttcttcaaaatatatttcctcattagttgtctctctttgaatgtaagactgatgagagcaggaaccttgtctatcttttcactgatgcattctgagtgcctagaacaatgcttggtgcatagtagatgctcattaaatatttgctgggtaaataaatgactaactaggtagtatcggggcagggattaaaaccaagtttagggattccaatctctgtgtttgtatttaactactccactatcctaactttaatagtacaattataggatcagagacttttctttctgatctgcaggggaagatgttagcaaccttctggggatttgtcaaaagaactgaactcaaggttttgaacttggagttgtttgctctttagtcctattcctttccttccactttgtaatggggtgggccagggtctgtgtggcagctacagggtttggggttagtgagctccttccatctacctaagacagtttatcaccagacccagtggaggtttaatacattattttac

SEQ ID NO: 654239 - DNA, 575 bp, Homo sapiens
aatactgaaatatcagaaatgaagaaactagcaagttctagttattcttagagtttgtttagatacattcaaccagaaactcttgtgtttgtctaaattggccaattcagtcatggtcattaaaatttatcattcaaaaattgaaaacagaattaccacatgatctagcaatcccacttcagggtacatagccaaaggaactgaaatcagtatgtcaaaaagctatctgcactctcatgttcactgcagcattattcacagtggctaagatatagaagcagcatacatgtcaatcaacagatgaatggataaagaaatgtggtatatatacacaatggagtactattcagcctttaacaagaaggagatgytgtcatttacagtaacatgaataaagctggaggacattatatcaagtgaaataagccagttacagaaagacagatactgcatgatcttacttgtatgtggaatcttaaaagagtcaaacctatagagtagagagcagaatggtggtgaccattctactgtcattccagaggatagaattaagggggatgagaatggggagatgt

SEQ ID NO: 654240 - DNA, 627 bp, Homo sapiens
gtttttggtagtcatggtagtagcagacaagttgtatatttagaataatgagtactcactccagccacgcattttactgatctgactcagtggctttaagatggtttatagcaggagaattccctttctttcctgakgaaatcagacacaaaatctccatttcataaagcgaatagcaggacactgctctggtggaaccgggacagatagccgggactcctgcccacctggctcccccacctttctgtggaagtccctcaagttcctgcaagaaattccaggatgactcacagcagtttgaaaaccacaggtttcatttacaattgccattttatttaccaatgccagggacctgaaaggtagagtctgaacttaggggctatccaaacatgacaccctaagtgtggtcactctgaagcaggtccttgccacacagggctgtcactgctcaggcggaggccttcccttcactcacccgcacaagcaaaatgccctgccacaaacctttcctgtctccagccggtcttactcatgcctacctgaaacctctgtcccacaccagcccctatcttatttacctctcaacgtgacaatcacaactcatacaccgagcttagctttactttt

SEQ ID NO: 654241 - DNA, 355 bp, Homo sapiens
ctgcaacctcctcccaggttcaagcgattctcctgcctcagcctccctagtagctgggactataggcacaccaccaccatgcctggctaattttttgtgtttttagtagagatggggtttcaccatgttggccaggctggtctcaaactcctgacctcaagtgatctgcccgccttggcctcccaaactgctgggattacaggtgtgagccaccccgcttggctgctcataatatttttaaaagcaatttaacacagtatggtaaacagstaatctttgccagagggaaactagggtgaatcctgctactcaattgaagataaattgaaattttcccatcttaaaattattaatt

SEQ ID NO: 654242 - DNA, 592 bp, Homo sapiens
cctaagcaggctctcagcggggcacacaggtgaggtgtagagggcayggtagggcccgagaaaaaccagctccagaaccagccagccctcactttgcatggtggagccactcttgaggaacaatggaatggccaatgagttctgaagcaaaaatagcctcatcccaatcccccaccttcaataggtggggatatcttataaatgaaaaatataacccaggaaaacactttctccaaaccgagaatagggaaaaggttgatccattcacctgaagtttggagaacatgataccaggaaaggagcattgatcaagcaggaaagaaaatgaacaataaattcagccctcgataatatttactttccttatagtccaggtacagctttcatcctcccttaccttttctgttctcttcagtgaaaaatgatctaagaaatcaagagtaactgtcatagcagtatttgctgaagaaatatcttttgacaactagaatgactttgaaattgaatatcacttaggatataagtaaaggaagtacgtaaagaaactcttgctacgtttctaattttaatttttcctcaaaatatgtattca

SEQ ID NO: 654243 - DNA, 469 bp, Homo sapiens
aatatttgttaagcacaggtcaaattgtagttttcaccttaatttcatttcttggtgtttatgtcttacagaaatgcaatctcctrttgtacaaatatgcctaatcataaaacagttgcggacagtactgtatttcaaagtgtatttcaagttattcactggggcttttgtgacagattctttcaaatgatcatgctttttgaaaaatagttccttttatgaacagataaatatatgtctaccaaatacaaaacttctaatgtatggaatcaactggtgtgcaatctttttttttccaaagacatatttttgcctaaaggaaaataaggctttgaggctctttttccctctccctttctataaaaagagaaatgatgatattaaaaaaagatagaaacaataagatactttatcttcaaagtgcttgataaattcacagaagaaaatagtttctatattcacccattac

SEQ ID NO: 654244 - DNA, 471 bp, Homo sapiens
aagcacaggtcaaattgtagttttcaccttaatttcatttcttggtgtttatgtcttacagaaatgcaatctcctattgtacaaatatgcctaatcataaaacagttgcggacagtactgtatttcaaagtgtatttcaagttattcactggggcttttgtgacagattctttcaaatgatcatgctttttgaaaaatagttccttttatgaacagataaatatatgtctaccaaatacaaaacttctaatgtatggaatcaactggtgtgcaatctttttttttccaaagacatatttttgcctaaaggaaaataaggctttgaggctctttttccctctccctttctataaaaagagaaatgatgatattaaaraaagatagaaacaataagatactttatcttcaaagtgcttgataaattcacagaagaaaatagtttctatattcacccattacagattaagaaca

SEQ ID NO: 654245 - DNA, 551 bp, Homo sapiens
ccccctaatggcagtgtgggcgatggatggagacagggcagttgaagcttagaatatatgccaaggagatattaaaaaccatgtaactacctggaagtgatacaaaaaaaaaaaaaaaaaaaaacaggcaagaaagcagacgtctgttaaaattctggaatatgttttctgtttatttctctattgttctgcacactattctacttattgttttctattttctatttttatttttatttgtttagatgaagcctctttctatcacccaggctggagtgcagtagtgcgatcgtggcgcactgcaacctctgcttccctggttcaaatgatcctcctgcctcaacctcccragtagctgggactacagacactcaccaccatgtcgggatattttttctatttttagtaaagacggggtttcaccatattgccaaggctggtctctaactccaaacctcaagtgatccacccgtctcagcctcccaaagtgctgggattacagtcatgaggcactgcttggcctatcctacttactcttcataatgccttca

SEQ ID NO: 654246 - DNA, 534 bp, Homo sapiens
tttcatttgtctcttggggctccacttaagagaaatacagcaccactatcaatcagagcgataggcccgaggtgggatggctgccttgtggtcccaagccaagaagccctgcttggtaatgagcctggggagagggcgatcatgtggaagacagactggcttcttctccttatggtgactgtggcattctgctggtgtgaataaagcactcagggtctttgttccttctccagtctcacggcagcaaaggcagtggcagtggcagaggttacctctggaagccttaccccagggaaataccaagccactagcagtgggaatgctcagtcagggaaggggcaactgttctgtggtcctgagccaagggcccttcctggtgaagagtargtggtggggtcttacagggaagagagactggggtcctctctgtgtggtggttgcagcatgctggaggtgccagtgatgcaaccaggccctttgttccttccctagcccaagggctataagggcagtaccactgcagctgcaatggga

SEQ ID NO: 654247 - DNA, 534 bp, Homo sapiens
tttcatttgtctcttggggctccacttaagagaaatacagcaccactatcaatcagagcgataggcccgaggtgggatggctgccttgtggtcccaagccaagaagccctgcttggtaatgagcctggggagagggcgatcatgtggaagacagactggcttcttctccttatggtgactgtggcattctgctggtgtgaataaagcactcagggtctttgttccttctccagtctcacggcagcaaaggcagtggcagtggcagaggttacctctggaagccttaccccagggaaataccaagccactagcagtgggaatgctcagtcagggaaggggcaactgttctgtggtcctgagccaagggcccttcctggtgaagagtaggtggtggggtcttacagggaagagagactggggtcctctctgtgtggtggttgcagcatgctggaggtgccagtgatgcaaccaggccctttkttccttccctagcccaagggctataagggcagtaccactgcagctgcaatggga

SEQ ID NO: 654248 - DNA, 410 bp, Homo sapiens
tgcttggtaaaaagcaagagttcaatacacattagctttaaaaataaacacctacaatgacagcaaaactaaaaggcagatgrcacccccttttaatgtctgaagcagatttagctgacttaaaaattaggcttctaggggcttgaactggctctatacaattagccaaagtgtccaggagatcctgtttgagggcagaatgagaaagtaagagaatccttattttttttaaagcataatggattaaaaccccataagtcaaattcagtggaatttaagaggcaggccaaagacagagccaagaggaaggaaaccagataggcaaaggcatggggagaaactcagaagaagggatggaaaggaaaagaggcatctagttcttaaaggccattcataggttgtcagtggtt

SEQ ID NO: 654249 - DNA, 590 bp, Homo sapiens
taccattaaaagcaggagtctgcacatttgtcttttgactttgtgtctgttctactttccattcttctttaaacagttgttcttctataaaggctcagcagggagctgttccccacaggctcaatgaagtgttcacatccgctggtctctctagcagcagattcaatacatttatttggacaaaattagtcccttgaaacgtggtgagttctcaatttattgaatggtaaagcaaaaaacaaaccaatcaaaaagactaaacagacacttgtatttccaatctcccaaatgtaacatccatcrgatagatcttgataaattttttaaaaatcaaaactttgcaacttcataaacaaagagaaaactccaagaaatctccttcatgtaaaagataaataaaaataagaatgtctctgtattctttatacctttcttttgaaacttaaattataagaaaacaacaaatattctgcattaaaatgtttaaaataataagcttacctaaatttctgatgatattgtgtaactaaatgtaattcaaatttaagaaagataaatatattctgcacgaagtacatatcaaacatgtt

SEQ ID NO: 654250 - DNA, 596 bp, Homo sapiens
aattgtatctcattcatttttgattttatttaactgggtcttctctctttttttattagtctagttaaaggattgtcrattttgcttatcttattgaaaaacaaacttttcattttattgatctatcttatttgtgttttttaaggtgtaaattttatttgtttctactctgacctttgttgtttctttttttaatactaattttgcattttgtttttgtttttatctagttccttgaggtgcatcattagattctttatttgatgtctttctacttttttattagaaacagtctcattctctcactcaggctggattacagtggaatgatcatagctcattccaccctggaactcctgggattaagtgattcacccatctcagcctcctaagtagttgagactataggcttgtgccatcacacctgaaggattttaaaagttttttgagagataggtctcactatattgctcaggctgtctcaaatgcctggcctcccacctcaaccagctgagcagctggaattacaggtgtgagccaccatgcccagctctttctactttcttgatgcaaatgcttattgctatacatttttc

SEQ ID NO: 654251 - DNA, 596 bp, Homo sapiens
aattgtatctcattcatttttgattttatttaactgggtcttctctctttttttattagtctagttaaaggattgtcaattttgcttatcttattgaaaaacaaacttttcattttattgatctatcttatttgtgttttttaaggtstaaattttatttgtttctactctgacctttgttgtttctttttttaatactaattttgcattttgtttttgtttttatctagttccttgaggtgcatcattagattctttatttgatgtctttctacttttttattagaaacagtctcattctctcactcaggctggattacagtggaatgatcatagctcattccaccctggaactcctgggattaagtgattcacccatctcagcctcctaagtagttgagactataggcttgtgccatcacacctgaaggattttaaaagttttttgagagataggtctcactatattgctcaggctgtctcaaatgcctggcctcccacctcaaccagctgagcagctggaattacaggtgtgagccaccatgcccagctctttctactttcttgatgcaaatgcttattgctatacatttttc

SEQ ID NO: 654252 - DNA, 592 bp, Homo sapiens
gccccccggcagaacaggtggggagtcaatccatggggagcacatcaggcatgttcagagatggtatctcttaactgcagcagggtgggggtccagagcagtccacatggaaggtggaattttcaaattgtatatagaagataaaaaataaatatyaataaggcaaaaaggagggggatactccagttagagagaaaagcaattgcgaaaccattgaaatattattccatctccttattgacaagaagcattaactattgcctggccaacatgtgccaagacacacactggacactgcagaaacagagattttaaaaagtaattggttcctgatctctacactacatcatgtgagagagtagatcaggaagtaaataactacaaaatatggggataaaaatttcagaatgagcttggctaaggcaactaactgcctgggaaggtgagagaaatcatgcccaaggagaatttcctatgagttcaaggttgaggaggagagagggaggactcggctggcagagcaaaaactcggagtttaaaaaaataaaaaaagtctagcatattttggaaactgcaagtagctttaccccag

SEQ ID NO: 654253 - DNA, 534 bp, Homo sapiens
taataggctggggacagtggctcatacctgtaatctcagaactttgagaggccaaggcgggcrgatcacttgaggtcaggagttcaagaccagcttggccaacatggcgaaattccgtctctacgaaaaatacaaaaattagctgggcatggtggtgctaccctggaggctgaggcatgagaatcacttgaacctgggagacggaggttgcagtgagccaagatcgcaccactgcactccagcctgggcaacagagtgagactccgtctcgataataataatgatgataatgataatcaaagtgtctgcaaggttgtgtcccttctggaggcctcctggggagaacacacttcctcgcctgctccagctcctagaggccacctggattcttaggcttgtggtcccttcctccacctcaaagccagccagcatcggcagctcaagtccttctcacaccacatcactccaacctcctcctctgccttcttccactttaaggaccctcgtgattacatggggcccacctggataatc

SEQ ID NO: 654254 - DNA, 535 bp, Homo sapiens
ataataggctggggacagtggctcatacctgtaatctcagaactttgagaggccaaggcgggcagatcacttgaggtcaggagttcaagaccagcttggccaacatggcgaaattccgtctctacgaaaaatacaaaaattagctgggcatggtggtgctaccctggaggctgaggcatgagaatcacttgaacctgggagacggargttgcagtgagccaagatcgcaccactgcactccagcctgggcaacagagtgagactccgtctcgataataataatgatgataatgataatcaaagtgtctgcaaggttgtgtcccttctggaggcctcctggggagaacacacttcctcgcctgctccagctcctagaggccacctggattcttaggcttgtggtcccttcctccacctcaaagccagccagcatcggcagctcaagtccttctcacaccacatcactccaacctcctcctctgccttcttccactttaaggaccctcgtgattacatggggcccacctggataatc

SEQ ID NO: 654255 - DNA, 559 bp, Homo sapiens
tccctctcaaatggcatttatattttgatagcttaacctactttgaatcccctgagcatcttgtctgtttttattagtagattttgctgatcttttttaacttttcaaaggctctttaaattatcctaaagtcatatatttaccatgagaaagcaggtgtctttttagagtgtagatgcttaagtcgctcataaaattaatttcctcgggttaggagaacattttgaaactctaatttgaaaaactctaatctggcttctaaaaacactgtatcagtattcagaaataataaaaayggaaacataacaacataataaatttaatttaacctagcatagcaaaagagtagggcatttttgcataatcagctagatagttttcagaggcaaacacagagcagtggagactttgtttggagacagccattgtttcaagaaatgggtgttgccttgatgaagctacccttgcttgtcactgcagatccgtctcctgctatcaccagctctgtgtaacattgcctatgctgtggacacacagagatacttgacagtcagtggat

SEQ ID NO: 654256 - DNA, 559 bp, Homo sapiens
tccctctcaaatggcatttatattttgatagcttaacctactttgaatcccctgagcatcttgtctgtttttattagtagattttgctgatcttttttaacttttcaaaggctctttaaattatcctaaagtcatatatttaccatgagaaagcaggtgtctttttagagtgtagatgcttaagtcgctcataaaattaatttcctcgggttaggagaacattttgaaactctaatttgaaaaactctaatctggcttctaaaaacactgtatcagtattcagaaataataaaaatggaaacataacaacataataaatttaatttaacctagcatagcaaaagagtagggcatttttgcataatcagctagatakttttcagaggcaaacacagagcagtggagactttgtttggagacagccattgtttcaagaaatgggtgttgccttgatgaagctacccttgcttgtcactgcagatccgtctcctgctatcaccagctctgtgtaacattgcctatgctgtggacacacagagatacttgacagtcagtggat

SEQ ID NO: 654257 - DNA, 559 bp, Homo sapiens
tccctctcaaatggcatttatattttgatagcttaacctactttgaatcccctgagcatcttgtctgtttttattagtagattttgctgatcttttttaacttttcaaaggctctttaaattatcctaaagtcatatatttaccatgagaaagcaggtgtctttttagagtgtagatgcttaagtcgctcataaaattaatttcctcgggttaggagaacattttgaaactctaatttgaaaaactctaatctggcttctaaaaacactgtatcagtattcagaaataataaaaatggaaacataacaacataataaatttaatttaacctagcatagcaaaagagtagggcatttttgcataatcagctagatagttttcagaggcaaayacagagcagtggagactttgtttggagacagccattgtttcaagaaatgggtgttgccttgatgaagctacccttgcttgtcactgcagatccgtctcctgctatcaccagctctgtgtaacattgcctatgctgtggacacacagagatacttgacagtcagtggat

SEQ ID NO: 654258 - DNA, 559 bp, Homo sapiens
tccctctcaaatggcatttatattttgatagcttaacctactttgaatcccctgagcatcttgtctgtttttattagtagattttgctgatcttttttaacttttcaaaggctctttaaattatcctaaagtcatatatttaccatgagaaagcaggtgtctttttagagtgtagatgcttaagtcgctcataaaattaatttcctcgggttaggagaacattttgaaactctaatttgaaaaactctaatctggcttctaaaaacactgtatcagtattcagaaataataaaaatggaaacataacaacataataaatttaatttaacctagcatagcaaaagagtagggcatttttgcataatcagctagatagttttcagaggcaaacamagagcagtggagactttgtttggagacagccattgtttcaagaaatgggtgttgccttgatgaagctacccttgcttgtcactgcagatccgtctcctgctatcaccagctctgtgtaacattgcctatgctgtggacacacagagatacttgacagtcagtggat

SEQ ID NO: 654259 - DNA, 525 bp, Homo sapiens
actcccctacagatcacaccacaacctgcttaggccgcaagcggctcacccggaacaatcccttcgtgccacaagtccctggctcagtgcccttaaccactcaaatcacctrggttttttttttttttttttttttttttttttgagatggagtcttgctgttgcccaggctggagtacagtggcgtgatctcagccccctgaaacctctgcctctcccgggttcaggcaattctcctgcttcagcctcccagctagctgggattacaggcacccaccacgatgcccagctaattttttgtatttttagtagagacggggtttcaccatattagccaagctggtcttgaactcctgacctcaggtgatccacctgccttggcctcccaaagtgctgggattacaggcgtgagccaccatgcccaccccaccctgggatttaagatgcaaatttctaggtctgggatggggctttaaatgatacatttctaacaaattctcaggtgatgccaacgttcacagacca

SEQ ID NO: 654260 - DNA, 525 bp, Homo sapiens
actcccctacagatcacaccacaacctgcttaggccgcaagcggctcacccggaacaatcccttcgtgccacaagtccctggctcagtgcccttaaccactcaaatcacctaggttttttttttttttttttttttttttttttgagatggagtcttgctgttgcccaggctggagtacagtggcgygatctcagccccctgaaacctctgcctctcccgggttcaggcaattctcctgcttcagcctcccagctagctgggattacaggcacccaccacgatgcccagctaattttttgtatttttagtagagacggggtttcaccatattagccaagctggtcttgaactcctgacctcaggtgatccacctgccttggcctcccaaagtgctgggattacaggcgtgagccaccatgcccaccccaccctgggatttaagatgcaaatttctaggtctgggatggggctttaaatgatacatttctaacaaattctcaggtgatgccaacgttcacagacca

SEQ ID NO: 654261 - DNA, 525 bp, Homo sapiens
actcccctacagatcacaccacaacctgcttaggccgcaagcggctcacccggaacaatcccttcgtgccacaagtccctggctcagtgcccttaaccactcaaatcacctaggttttttttttttttttttttttttttttttgagatggagtcttgctgttgcccaggctggagtacagtggcgtgatctcagccccctgaaacctctgcctctcccgggttcaggcaattctcctgcttcagcctcccagctagctgggattacaggcacccaccacgatgcccagctaattttttgtatttttagtagagacggggtttcaccatattagccaagctkgtcttgaactcctgacctcaggtgatccacctgccttggcctcccaaagtgctgggattacaggcgtgagccaccatgcccaccccaccctgggatttaagatgcaaatttctaggtctgggatggggctttaaatgatacatttctaacaaattctcaggtgatgccaacgttcacagacca

SEQ ID NO: 654262 - DNA, 525 bp, Homo sapiens
actcccctacagatcacaccacaacctgcttaggccgcaagcggctcacccggaacaatcccttcgtgccacaagtccctggctcagtgcccttaaccactcaaatcacctaggttttttttttttttttttttttttttttttgagatggagtcttgctgttgcccaggctggagtacagtggcgtgatctcagccccctgaaacctctgcctctcccgggttcaggcaattctcctgcttcagcctcccagctagctgggattacaggcacccaccacgatgcccagctaattttttgtatttttagtagagacggggtttcaccatattagccaagctggtcttgaactcctgacctcaggtgatccacctgccttggcytcccaaagtgctgggattacaggcgtgagccaccatgcccaccccaccctgggatttaagatgcaaatttctaggtctgggatggggctttaaatgatacatttctaacaaattctcaggtgatgccaacgttcacagacca

SEQ ID NO: 654263 - DNA, 520 bp, Homo sapiens
ctgttgacccaaaatattccaaataaacaatgagtacagccacagattcaggtttggagaaagttgttggacaactcactttatgggacaagttaataaataagattttgcaaacccaaktgcactatcatcctcactattctggaaaggttgaatggactaatggtatcttgaagctaaaattagttaaaccaacagagtcaagtgttttatcttggtcaaaagtttttaccactagccttaatggtaattagattaacccctgtgggaaaacacaaactaaccccttatgaaataattactggaatatctattcctttgatagtacgatgttgtgtattccctgtacttgttagctctgatgtgactcgacaatgcaaggccttgatgcattttacaaatgtacatttccaccagttgaagtaggctttctgtgaaccaccaattgagaatgttcagatcttccatcacctagaacctaaagattgggtcttttggagatgacactagagaaaaactg

SEQ ID NO: 654264 - DNA, 586 bp, Homo sapiens
caaaatttggaggctggcagctggaccaactggaactcagacatctctctctctctctctctttctttctctctctctctcyctctccctctctctctctccccccactccatctctataaaaggtaatttgagttactgtattgcttacttgccagctgaagattctcaaagtgtgtttccacgagaaataagcataagctgggtgggcttttagatcctagactcaaaagccatgcagtgtcactttgacacattctgttcacccaggcagtcaaaaggtcagggcaaattgtgaagggaagggatgtccactccatgtcttcatgggaactgtgttagagaatttgtagatgtgttttaataccaccatgatatctctatacgtgcatccataattacatcattctcacagcaacccaacaaggttagttacaatagtatgtccattatcaaaatgaggaaaccttgcctgggagagaataaataatttgccaatgatcacaaaactgataattctcggagccttcactccaaccaggatgttctgagtcaaaagtctgtaattccaatctgtatgggatact

SEQ ID NO: 654265 - DNA, 586 bp, Homo sapiens
caaaatttggaggctggcagctggaccaactggaactcagacatctctctctctctctctctttctttctctctctctctctctctccctctctctctctccccccactccatctctataaaaggtaatttgagttactgtattgcttacttgccagctgaagattctcaaagtgtgtttccacgagaaataagcataagctgggtgggcttttagatcctagactcaaaagccatgcagtgtcactttgacacattctgttcacccaggcagtcaaaaggtcagggcaaattgtgaagggaagggatgtccactccatgtcttcatgggaactgtgttagagaatttgtagatgtgttttaataccaccatgatatctctatacgtgcatccataattacatcattctcacagcaacccaacaaggttagttacaatagtatgtccattatcaaaatgaggaaaccttgcctgggagagaataaataatttkccaatgatcacaaaactgataattctcggagccttcactccaaccaggatgttctgagtcaaaagtctgtaattccaatctgtatgggatact

SEQ ID NO: 654266 - DNA, 666 bp, Homo sapiens
ctggtaccctaaattctaaagactgtgattccttttcctccataactcaagtgagtcatgggtgtttctgctggaatgagaaggggcagcaagagggggaagtggtaggtatcaccctctataatagaaattgggaagacattaagcacagatactggccaaacctgcaaacagctgagtgagtttggtgtatttgggaccaaacacagcaaacatgatgacatatgcagggcagtgaccatgactatctttggtctggataaattgcggctctggaaaggcaacacacttgaataggaattatttgaaacagtgcaggtgttttactgcaacatattctaccacaggaaagaagtttcaggagtatctctttttaatcatggccatatcactcgtgtaaaataaatgactttaccatatgtataatgctggtgagtgctgaggagcctttggttagctttatttctgaaagcagtctatcctaatgtacatgcataaaaacccaaacctaatgcattttattattggcagtggagcmaatccaccattaacaaagattataaggaccactttggtcattgcttatacatctcgttgaacacaaattataatactaattatagcaataaatagcattgtactaaatagtctatgcttcatttaatc

SEQ ID NO: 654267 - DNA, 593 bp, Homo sapiens
ttggaacctccttcatgccagctcctgtgtccttttgacatgctcccatctttctttgaacgttccataatttctggcacaacatgatattctaggtttattttgccttttcctgtattctcctggaaatcactcgtttctccarggagccctggttccttttattggagaatggtaattagaaatcaagatctgggccctaggtgtgcccattacagctatttcctcatcagcagacagggctaggaaatgtatgtgtgtgtgtgtgtgtgtgtgtgtgtgtgtgtgtgtgtgtgtgtatctgtctgtctttccatccatgctgatacctccaattttaatccaacatcatggggttcattctaactttcctcttttccacttttataactttgtttctcaatagtgaagaacttggctctcaatattcactatatatttacctctctgctcaattctaaaatatacataaagtatttttggaattgccaacctataccactatgaaagacaaattgactaattggagttcaatctttattttctacagctttttttgttttgattttagcctgaagtgctaaagtgtgaat

SEQ ID NO: 654268 - DNA, 593 bp, Homo sapiens
ttggaacctccttcatgccagctcctgtgtccttttgacatgctcccatctttctttgaacgttccataatttctggcacaacatgatattctaggtttattttgccttttcctgtattctcctggaaatcactcgtttctccaaggagccctggttccttttattggagaatggtaattagaaatcaagatctgggccctaggtgtgcccattacagctatttcctcatcagcagacagggctaggaaatgtatgtgtgtgtgtgtgtgtgtgtgtgtgtgtgtgtgtgtgtgtgtgtatctgtctgtctttccatccatgctgatacctccaattttaatccaacatcatggggttcattctaactttcctcttttccacttttataactttgtttctcaatagtgaagaacttggctctcaatattcactatatatttacctctctgctcaattctaaaatrtacataaagtatttttggaattgccaacctataccactatgaaagacaaattgactaattggagttcaatctttattttctacagctttttttgttttgattttagcctgaagtgctaaagtgtgaat

SEQ ID NO: 654269 - DNA, 609 bp, Homo sapiens
ccattttagactatttcatatcagrtttatctatcttccaaccttaactgttctaaagctgtacttgtgctcaagcttctgaaattgtgccccagtgaacgttgtaaaaggacttgtggccattctatccatttagtatctctactctatcttaatattctggagctatttagaaatcctcctacctacccagaactaatgttcacaaagccttctttacttcattgtgtggaatgctttcgcaacctagatcggaactcctaccctttcctgctgaggatgtttatcagtgacattgattaaatggagaatgttctcatacaaagtgtatttatgttataatttatcagactgactgccactagctctactctgacttttccttttaatgatacattgatgtcactgattgagagtttctcaataagatgttttatctttctgaattaagttgagtgataattaattttaaattaattcttctgaatgaatttatgagtgttttaatactcttagatgtaggtaacaacaaatttttcttctgtcttctaggtctttgtccatttgcttcattagaaattcatatatatatacacatatatgtaataa

SEQ ID NO: 654270 - DNA, 609 bp, Homo sapiens
ccattttagactatttcatatcagatttatytatcttccaaccttaactgttctaaagctgtacttgtgctcaagcttctgaaattgtgccccagtgaacgttgtaaaaggacttgtggccattctatccatttagtatctctactctatcttaatattctggagctatttagaaatcctcctacctacccagaactaatgttcacaaagccttctttacttcattgtgtggaatgctttcgcaacctagatcggaactcctaccctttcctgctgaggatgtttatcagtgacattgattaaatggagaatgttctcatacaaagtgtatttatgttataatttatcagactgactgccactagctctactctgacttttccttttaatgatacattgatgtcactgattgagagtttctcaataagatgttttatctttctgaattaagttgagtgataattaattttaaattaattcttctgaatgaatttatgagtgttttaatactcttagatgtaggtaacaacaaatttttcttctgtcttctaggtctttgtccatttgcttcattagaaattcatatatatatacacatatatgtaataa

SEQ ID NO: 654271 - DNA, 531 bp, Homo sapiens
tctttgttaccaacagtcttctctagctttgaggacttaatttttttgatgacttatttaacgtgctccagattctctgagtttggcaaagaaaactttcaattaraaaaataattaactgccctctttgtgaaattgatgggtctcaatcactgtatggtgaatttttaccaaatggaagaaacgaattcagcaatatagaaaaatcttgttagataacctcagcagatattatgagataaccaggcaaaattattctaattaccttatcatagaacatatacataattttactacatcttcttttttttaaataattttttttgaaatagaggtagggtctcactatattgcccaggctggtctcaaactcctgggctcgagtgatcctcccacctcagcctcccaaattacagagattacatgcatgagccaccacacctggccgccttcttcttcttttttttgtttttaacaatgaacttgcaagtagtggggaattaaatttaatggaaattagattaaaatttg

SEQ ID NO: 654272 - DNA, 380 bp, Homo sapiens
agatataaaagacttgataaacattctcaaccaacttgatctaattgtcagttacagagcataccacacaacaaggcttgaatgcatgttttcaagtcatatggaacatttgtcaagatatgtcatattttgattcaaaatacatgtttaaattagtttataatgattcaagtcrtacaaggtatattctgtggccacacagaataaaactagaaatctaacagaaacttgtctagaatattctcaaatatttggaaactaaatagcataattccaaataacccataagtcaaataactaactaaaaaagttcttgaaaatattttaaattaaataagcataaaagctggaccagtcactgtggctcacacctgtaatcc

SEQ ID NO: 654273 - DNA, 423 bp, Homo sapiens
ttccaagatagcccccatgaccctacctctgccttgtggttttcacactcgcatgtgagctggacctagtgattccaacacacaaaatatggcaaaagtgatggggggtcactcccgggattaggttacaaaaagaccagctgaggttcagcaagaagggtctccagatgggtaggaagggagtagtttcctagttcttatcctgccaggccagtctaaccagggacagtggcactgccagttcacctagtrtcactggacccccgagctaattcctaaagtcatgccgctttcaagatattttgagaggaaggttccaacaagacagaccatgagctacgtgacacaaccatatcttaagtaactatatattcctaacacctggcacaatacttactgcctagcagggactcaataaacgct

SEQ ID NO: 654274 - DNA, 487 bp, Homo sapiens
tacaggcatgagccaccgcgcctggcctttttttttttttttttttttcaaacagagtctcactctgttgcccaggctggcgtatagtggtgtgatcttggctcactgaaacctctgcctcctgggttcaagagattcacctgcctcagtcttctgagtagctgggattacaggcacgcatcaccacgcctggctaatttttgtatttttattagagacagggttttgccatgttggccaggttggtcttaaactcctaacttcaagtgatccacccgccttggcctaccaaagtgccgggattagagatgtgagccactgcgcccagccccaagttgcctaattaggcgttattgaaatggaagaccaagcaggaagctggtggctcaraagatggggcttgttcttcatgtccacggtgctcactagtagaaggttcgggcaagtgcttatcttcattggaagaggatgatggctaatatcaaga

SEQ ID NO: 654275 - DNA, 487 bp, Homo sapiens
tacaggcatgagccaccgcgcctggcctttttttttttttttttttttcaaacagagtctcactctgttgcccaggctggcgtatagtggtgtgatcttggctcactgaaacctctgcctcctgggttcaagagattcacctgcctcagtcttctgagtagctgggattacaggcacgcatcaccacgcctggctaatttttgtatttttattagagacagggttttgccatgttggccaggttggtcttaaactcctaacttcaagtgatccacccgccttggcctaccaaagtgccgggattagagatgtgagccactgcgcccagccccaagttgcctaattaggcgttattgaaatggaagaccaagcaggaagctggtggctcagaaratggggcttgttcttcatgtccacggtgctcactagtagaaggttcgggcaagtgcttatcttcattggaagaggatgatggctaatatcaaga

SEQ ID NO: 654276 - DNA, 688 bp, Homo sapiens
gacaacatactgggctggcaagtccatttcatgtaataacttctaaggaataggaggggtagcatgcaacgaggaacagttttttttgatggcagttttgtttttattacagtcaataattgctcacaattgtttagaactagggcctccctactgtgcgttcattcaggacatagctgaaagaataagcccacctctgaccccctgaagtgtcatttcatcaaaagaggcaggtgtgagtgtgttgaaacagtgacgtcttggcattgctgggcttgattcctcctcctctttccattgttcctccaaggatgaccctggaggaattatttctggcactaataagtaggaaggtgaggttctctttgatgggggttacaaatctccacttttttctcacccagcaggtattaggaagatgcaccctgccgtgctatcctgaagaaaacctctgccccaggaacaaacagtcaggacagtctggactctattatttcatttcttccacacaactaattgtttgtttctagagaaactgaacatgygtcatcttgtttcactgcttttggtaactacacatttcagtgattactattctacagagtcacacagagtttctttaaggcacataacctacttaattataaggattcttgtattcatcacttcttcacatcttcaatggtcc

SEQ ID NO: 654277 - DNA, 513 bp, Homo sapiens
agatgtctcttcaaatatacagatttccttttttaattagtccattttcactctgctgaaaaagacatatccaaggctgggcaacttataaaagaaagaagtttattggactcacagttctacatgactggggaggcctcacaatcatggtggaaggtgaaaggcatttcttacgtggtggtggcaagagggaagagcttgtgcagggaaacttttgtttttaaaaccatcagctcttgtaagacccattcacattatacagcacataaaagacttgcccccatgattyaattacctctcaccaggtccctccaacaacacatgggaattcaagatgagatttgcgtgaggacacagccaaaccatatcattccacccatggcccctcccaaatctcatgtcctcacatttcaaaaccaatcatgccttcccaacagtcccccaaagtctcaactcatttcagcattacatcaaaaattcatagtccaaagtctcatccaagacaaggcaagt

SEQ ID NO: 654278 - DNA, 660 bp, Homo sapiens
tcagctgtatctcttaatggctgtgggatcttgggctagttcctcatgaatcattttcctcatctgtacttggtggaggaaactgaagtttattattttcccaagggcaacaaaaatagtcactggaggaactatgccatggattcctgttgatttaaagaactataagaaacatttcactgcagtgtcacaacagtgaatcagctaagaagcctggcctcctctgctgttctgtgtctacattcaggcatcaagaagcaaccatatggtggtgttaatacaacttatctctgtgaattataatctctaatatgtgtgcgtgcatctcccaaggatattgaagtttgatccctaggggaaaaattatacatgactttattcttgagaaataaacaattcattctaatgcacccctggttgcagcaygtgtaggagtgtgaggttcacactccaaagtctttattcattgacagagttaaaacagaaggaaaaataacataaaaatcatggcaaatgttatagattcctttaaagtactatattaatatattgggattaagaatgaccacaccaatcactttttttttccatgcctgggacacgcacaaggtgaaatagttgcacacctcacctagggatgactttgtattgtttggaaga

SEQ ID NO: 654279 - DNA, 420 bp, Homo sapiens
gaattctgaagggatgaagtacagaaagcacctactccaatcacagttggtgagcagggagactctacagttcacgcattccatagcttattgcagtttcattgtcgggggccattaaagcaggagagcagagacaaaggaaaggtggccrctgtccttagatctagtgagaaccctactttcccagcactgaaaaccacctttatggcctgagtactatctactctctctgcttccaaccaaaatttagtgaagatttgtttttaagttcaaataatgttttggtttatcacccattatttcagttatatttgctaaaaacttctgaatatttcataccaattacatttacttttatgattaagaagtcatcatccccttaacacccacaatcagatgaaattttatagtcttctattc

SEQ ID NO: 654280 - DNA, 420 bp, Homo sapiens
gaattctgaagggatgaagtacagaaagcacctactccaatcacagttggtgagcagggagactctacagttcacgcattccatagcttattgcagtttcattgtcgggggccattaaagcaggagagcagagacaaaggaaaggtggccactgtccttagatctagtgagaaccctactttcccagcactgaaaaccacctttatggcctgagtactatctactctctctgcttccaaccaaaatttagtgaagatttgtttttaagttcaaataatgttttggtttatcacccattatttcagttatatttgctaaaaacttctgaatatttcataccaattrcatttacttttatgattaagaagtcatcatccccttaacacccacaatcagatgaaattttatagtcttctattc

SEQ ID NO: 654281 - DNA, 537 bp, Homo sapiens
agtctgcccaggactctgtctatccatttaattcgattcatttattttttgtgtctcctatgacacaaatgggagacctaataggtttctctgatggctgtgacctgctcttacgttttaatgttaaagaaaacaatacacctggaatacaggcaggtcttaaaatgtgcttaaaagattaaaaaaggcttttcaataacaggaaaacatgggttcctgtattagacacacacccctaaatgcacaaagagaatttcctcctgtgtttatgtaaatcatacaacatttaagcctgggaaacatraaggctttctttctaactttaaagttgttatgagctcctattttcacttctggtccatttgcttccaagtaatttacagcattttaaaagcttcaacacaactcgagatcactgtatattgcgggcatgttttaagattcacatctaaggaaggtaagttccattgaaagtttgtcattgaaatgaggcatgcaggaaccccaactattatgacaaatgaccccatggaattc

SEQ ID NO: 654282 - DNA, 493 bp, Homo sapiens
actctgtctatccatttaattcgattcatttattttttgtgtctcctatgacacaaatgggagacctaataggtttctctgatggctgtgacctgctcttacgttttaatgttaaagaaaacaatacacctggaatacaggcaggtcttaaaatgtgcttaaaagattaaaaaaggcttttcaataacaggaaaacatgggttcctgtattagacacacacccctaaatgcacaaagagaatttcctcctgtgtttatgtaaatcatacaacatttaagcctgggaaacataaaggctttctttctaactttaaagttgttatgagctcctattttyacttctggtccatttgcttccaagtaatttacagcattttaaaagcttcaacacaactcgagatcactgtatattgcgggcatgttttaagattcacatctaaggaaggtaagttccattgaaagtttgtcattgaaatgaggcatgcaggaaccc

SEQ ID NO: 654283 - DNA, 571 bp, Homo sapiens
cttgtgaaatggtcaagtttgtcyctggggccctccccttctcctccttctgtttcttccttcccatcttagaatctggctctctggccagattcccaataggacccaaaggggtctgacatgggatacttaaatctgcgcgttttttgttctgttttgctttcaagacaggtctcactctgttgcctctgctggagcgcagcagttgcagtcatgactcagtgcagcctcaatctcctgggctcaagcgatcctccctcatcagcctcccaactagctgggactacaacacatgtgtgccactacacccagctaacttttattttttttgtagagatgggggtctatgttatccaggctggtctcaaacttctgggctccagtgatcctcccaccttgtcctcccagagtgttaggattacaggtgtgagccaccatgcccgacctaaacctggatgttttaaggaaggtctgtttcttttcttttctttttctcaaaagaacagcaacaacaaaaacggtggtacttcagtcatgtgcaccaagccactggggaaaaatgtaggatgcc

SEQ ID NO: 654284 - DNA, 671 bp, Homo sapiens
tataactcaacctctagcccctctcttctcccagatgttggggtatggtggggctgaaagttcccatcctytaatcacgtctctggtctttctggtgaccagtccttatcctaaaactgtccaaacccccgcacccccactcccgctccaagttaccttgttagcataaactcagatgtggtcaaaagggacttattatgagtaacaaaatatactcctaccatttaggaaatcccaagggttttagaagctgtgtgccaggaatcagggacaaagacaaaatatattttttattatgccacagagtgacagtgaagcagcctgcaatcctgaagttcaggtttcccattaagaatgagattagaaatatcaaacatttgatgaatcagattagctccagtacttcagggaaacatctggaagtgaagtgtgtgatgggtagttttcaagaatacttgagctttaaaaatgttaacccatgttcagtccctataatatacttcaacatttgcaggtctgagttgtaacttcatcaatgtatgtaaccagaatgaaaaatataaacgtgattaaaaagaaagatcatagacattctgtaggatagaaaaaagtaagtgtatgacagttgtttggcacaggcaggggagagaaaaaaacctaggtgtaggaga

SEQ ID NO: 654285 - DNA, 599 bp, Homo sapiens
tacactttggtgctttatttcattatgacttttataaaaagcggtaaaggtaaatcatgtattcatccttattttttttcctgaaaatcagcaaaattctgaacctgttaatttatcatcactagcaactaaggaattctcaacaaaaagtaagcatcatacttagaacacattcccaactattaatttttccactttcatgattcaattttaatctcatagcaaagatgaaaaggtttatsttttagaggaaattcactctcctcagcccttcttcctaaaatctatatttggattcaacagtcagtggtctcaaacattaatggaggcttccattgagccattactctttttctctttttgttttgcaaacagggcttattaaatctttgctgtaggcaccagggatgaaaaacagtgagaatgtgctgatgtgaaaggtttcactgaactcaggcaaatcatttctgatttgccacaactccctaatagtaaatgccccaaaagtacactatttgggtggcaaatataaattaccatcacataaaacacactaaaggaaaaccaaaacccacccctctccctgtgccaggggttta

SEQ ID NO: 654286 - DNA, 576 bp, Homo sapiens
acagatgctgaaaaggcttttgacaaaattaaacgtccatttctgacaaaaacatgtagcaaaatagcaatcaaagaacgcttacttactacacacacacacatacatattcttttcatttttacttttttatgtaactcctagataatttaatattatacatgtggctcatgttatatctattagtgctacttcaggtctattttataggaaaatagaggtttataggaaatagaggatggagaartaggttaagtgactacatgaggaagcatttagccggaggcaaaaatcaggataggaactgccctgaagtttcaaaaagtcagtgttattaaagaaaagataaagtgtgaaaattattgtatattaaaagggtccccagagacatggcaaccaaatgcaatatggcaagcttaactggatgttgagtatcaggaaaaaaacagacattttggggacaattcagaaatatcaatatagattggataggtttcaggtgacattatgaagttttgccacctgaagtgttcttagctataataatgataatgtagttttataggataatgtccc

SEQ ID NO: 654287 - DNA, 576 bp, Homo sapiens
acagatgctgaaaaggcttttgacaaaattaaacgtccatttctgacaaaaacatgtagcaaaatagcaatcaaagaacgcttacttactacacacacacacatacatattcttttcatttttacttttttatgtaactcctagataatttaatattatacatgtggctcatgttatatctattagtgctacttcaggtctattttataggaaaatagaggtttataggaaatagaggatggagaagtaggttaagtgactacatgaggaagcatttagccggaggcaaaaatcaggataggaactgccctgaagtttcaaaaagtcagtgttattaaagaaaagataaagtgtgaaaattattgtatattaaaagggtccccagagacatggcaaccaaatgcaatatggcaagcttaactggatgttgagtatcaggaaaaaaacagacattttggggacaattcagaaatatcaatatagattggataggtttcaggtgacattatgaagttttgccacctgaartgttcttagctataataatgataatgtagttttataggataatgtccc

SEQ ID NO: 654288 - DNA, 474 bp, Homo sapiens
gagtcagcccctctgctgagtgctcaagcggggattgagctgtgaagattctggccagtttggatctcatagaaacacagggttagggaggagttatacagttactgactggggtggccctgggggcttcagctttctccctctgcacggagtctagaaaatgctagactccttgtctgctctttgtcactgcattttcagaaatccccaaaggagtttgggcytctgcgtttgaaggcagctctactcccttgtctgccatcttcagtgggagctagccttctggaactagagcttccaccccagggaggaggcaatttctttatttccgacctttggaccacatccaagtagtgactcccaggaaggcgtttgccataaaacataaaatactttggataaaatggatttgtccacagggtcttgattctaacttctggaaaatggaaatgatataatttaggtatgggaaaa

SEQ ID NO: 654289 - DNA, 474 bp, Homo sapiens
gagtcagcccctctgctgagtgctcaagcggggattgagctgtgaagattctggccagtttggatctcatagaaacacagggttagggaggagttatacagttactgactggggtggccctgggggcttcagctttctccctctgcacggagtctagaaaatgctagactccttgtctgctctttgtcactgcattttcagaaatccccaaaggagtttgggcctctgcgtttgaaggcagctctactcccttgtctgccatcttcagtgggagmtagccttctggaactagagcttccaccccagggaggaggcaatttctttatttccgacctttggaccacatccaagtagtgactcccaggaaggcgtttgccataaaacataaaatactttggataaaatggatttgtccacagggtcttgattctaacttctggaaaatggaaatgatataatttaggtatgggaaaa

SEQ ID NO: 654290 - DNA, 474 bp, Homo sapiens
gagtcagcccctctgctgagtgctcaagcggggattgagctgtgaagattctggccagtttggatctcatagaaacacagggttagggaggagttatacagttactgactggggtggccctgggggcttcagctttctccctctgcacggagtctagaaaatgctagactccttgtctgctctttgtcactgcattttcagaaatccccaaaggagtttgggcctctgcgtttgaaggcagctctactcccttgtctgccatcttcagtgggagctarccttctggaactagagcttccaccccagggaggaggcaatttctttatttccgacctttggaccacatccaagtagtgactcccaggaaggcgtttgccataaaacataaaatactttggataaaatggatttgtccacagggtcttgattctaacttctggaaaatggaaatgatataatttaggtatgggaaaa

SEQ ID NO: 654291 - DNA, 633 bp, Homo sapiens
ctgctcttctctctggtgcactgaagataattcgaactcaccagtcagtgtgccttttccagcttaagaaccagtcggtacctggaataaaagaagacaagtagaaaataaatgtttttttaacttctagctggaaacgttaaaagagagattttgatttgttcttctttctcaattatttggatgcttcttcaatgaaagttataagtatttcttacctgagagaaagtatgagagtgtagataaaatttgttcattcaatatatatttattgtgcagcatctatgttggtattagatatggaaarggaaggccttccaaaacagtgagaagatcaggcccatattgtgggctgctgagacccacaagtcacctcagcagaaaccagacaaccaggcatcttttattaaaggaaagataatggcagataatgggctgctctggacctatatttgctaattggggtagatgtggctcacagataggaccgagtgcccctactgagtgcactcttgcatatgtgcagcatcagagagttgggacaggtatgcagagatggggaggcaagactgatgggctctcccaaggcagtcaaaagactgtttggctggaaaccccaggtcacagccaaaa

SEQ ID NO: 654292 - DNA, 626 bp, Homo sapiens
ttgtgcaaagcaaagggaaactagactaaaatcacctgcaggctcaactagagggcggcccgggagtcaccagtggtatcatcccagggaaggagagatataaggaggaattaaaaaaggaaaaagaaaagagatgcccaaaaaagacacccagcattaaatgttgtattaatcctggttaataagttggtcagaagataagaaaaaacagytggaagagggagtctcgtttaaatctcccaaaggtaggtgtgaacttgagcatattaaatagctttcaataattcgatgtgctcattttgtcagcattttaattctcatccctttatggaccaatttgagtgacataactcagcccacacctggtttgacgtgacagatagattcgaagcaccacacattgttctcacctttacactgctaagaaacttactagaacagattcagagttgagtgagttgtgctccactctaaccttccacccagggcatgacatgtctttgaaaggacagcactttgagaatcaagttcaggggtagaatcaacgattgctcttcaagcctggtaaatatgacaagatatctagcactgtcttttcttttctcttcaagcctgcttatattctt

SEQ ID NO: 654293 - DNA, 633 bp, Homo sapiens
cacttataagtgggagttgaacagtgagaacacatggacacagagagtggaacaacacataccagggcctattggagggtggggagtgaggggagggaacttagaggatgggtaaataggtgcagcagatcaccatggcacatgtatacctatgtaacaaacctacatgttctgcacatgtatcctgttttttcttttttagaagaaataaagaaaaaaatcttatggagaagctcaaaaataagcttttattgttttcctgtgaatactagcagtggtaaaaagcattactccaaaattacaaagaggagctgtcctggttaataactctgagtrcccacaaagccccaaacaagtttatgaaactttgagaccaatacaaatgtatactacaggcctcatattttgctgcagtctggttctaattttccctgttggggtcagggttttgagacactacaatgccactttttaatgatggtaaatttttagcattgccttcacatttgggggtagcatccattttgatcctcttccttatcttctccttctcctttgccttttgcattatgattctgccttcctttctcacccttaggaagtagactttcagatccactccagtgattagtt

SEQ ID NO: 654294 - DNA, 688 bp, Homo sapiens
gacaacatactgggctggcragtccatttcatgtaataacttctaaggaataggaggggtagcatgcaacgaggaacagttttttttgatggcagttttgtttttattacagtcaataattgctcacaattgtttagaactagggcctccctactgtgcgttcattcaggacatagctgaaagaataagcccacctctgaccccctgaagtgtcatttcatcaaaagaggcaggtgtgagtgtgttgaaacagtgacgtcttggcattgctgggcttgattcctcctcctctttccattgttcctccaaggatgaccctggaggaattatttctggcactaataagtaggaaggtgaggttctctttgatgggggttacaaatctccacttttttctcacccagcaggtattaggaagatgcaccctgccgtgctatcctgaagaaaacctctgccccaggaacaaacagtcaggacagtctggactctattatttcatttcttccacacaactaattgtttgtttctagagaaactgaacatgtgtcatcttgtttcactgcttttggtaactacacatttcagtgattactattctacagagtcacacagagtttctttaaggcacataacctacttaattataaggattcttgtattcatcacttcttcacatcttcaatggtcc

SEQ ID NO: 654295 - DNA, 605 bp, Homo sapiens
gtgtgtatacagttaagactgacagtttagtttgatgttcagtggtaattcaaagattttcgggtaggaaaatgagggagtatgcaagagtggaggctggaaaggtaaaatggttctgttacattgatttatagtgggaaaaaattggaggctacacagatgtccagtgtctggatacttcattacataaatagatgaaaagggcctctacaaacattaataatgcatttgagaaataacaatgtacatttttgttaaaaatcctttgtaaaaaggaaytggtagattcagacaatgtggaaatgtgtctcaaataaaaagccagcatcattcacaatggtgaaacattagacttcccattaaaataaggacttaaaaatagatgactgttatttctactgtcatttaacattatttcaaaattcctatgccatgcaattagttcatagaacagaatgagaattataatcactgggaaggagaagcaaattttaattatttctggatggtatgatttatacttgttaccctgagagtaaattgaaaaatatatgagaaacattaaaataattcaatcaagggaatgggcatgtgatttctattaa

SEQ ID NO: 654296 - DNA, 605 bp, Homo sapiens
gtgtgtatacagttaagactgacagtttagtttgatgttcagtggtaattcaaagattttcgggtaggaaaatgagggagtatgcaagagtggaggctggaaaggtaaaatggttctgttacattgatttatagtgggaaaaaattggaggctacacagatgtccagtgtctggatacttcattacataaatagatgaaaagggcctctacaaacattaataatgcatttgagaaataacaatgtacatttttgttaaaaatcctttgtaaaaaggaattggtagattcagacaatgtggaaatgtgtctcaaataaaaagccagcatcattcacaatggtgaaacattagacttcccattaaaataaggacttaaaaatagatgactgttatttctactgtcatttaacattatttcaaaattcctatgccatgcaattagttcatagaacagaatgagaattataatcactgggaaggagaagcaaattttaattatttctggatggtatgatttatactkgttaccctgagagtaaattgaaaaatatatgagaaacattaaaataattcaatcaagggaatgggcatgtgatttctattaa

SEQ ID NO: 654297 - DNA, 645 bp, Homo sapiens
tattttggttttgtctgttgatttgtttaagttctctatagattctagatattaggtgtttgtcagatggacagtttgtgaatatattctcccattctgtarattgtctgtttgctctcttgatagtttcttttgcttttgcaaaagtttctttaattatgtcccacttgtctatttttgggtttgttgcaattgttttttgggacttacattacatggagatgtaaaaatacataaaaagatcaatgaaaccaagagtttcttatttgaaaaaataaataagattgatagactcctagctagattagcaaggaaaaggggagggaatgtccaaagaaggaatatcagaaatgtcaaaggtactattataactgaacccacaaaaatacaaaagatcctgagactgtgatgaacaactctatgcacagaaattagcaaatgtagatgaaatgaataaattcctataaccatgcaatatccaaagattgaatgaggaagagattgaaaccctgaatacatcaatatcaatttctgaaattgaatctgtaataaagaaactgccaaccaaaaaaatccctaaagcagatggatgcacagctgaattctaccagacatacaaataactgttaccaattctactaaaag

SEQ ID NO: 654298 - DNA, 405 bp, Homo sapiens
gttataaatttaataattaaagagatagattttctataagccttcattggaagtttttaaactgtatttttkattgtttttatatctaaatgtcagataaggagaggtttctgttcttattttgttattttacacatgattaggttttgacttgttatttaattttttctctaaagttttatctgatttgcattatggttatagtatgtgttctgtactatttttgatttttgaaatttattgagatattctttgtggactaaataatttttaataaatgaaaagcaatataattattttattaatacatgatttgaaaattccacaagtactatttcatagtaattaaaatgatagccaagtaattagattaattttaagttctcacataagcaatatttttca

SEQ ID NO: 654299 - DNA, 584 bp, Homo sapiens
catcactgttagacttaagatatgttgcaggctcatcttctacttttccaattctagccttgaaatcagctattttgccaaaggagacctgcttcatgtttaaagataatggttctttgaaacgaaggtttgggcattatctgtgctaattgatactggtgtgtcattgctttcaggccccattagtgaaataaaccaagatctatgaactatgcatgtttgttttaactgccgtgtctttgctyttagaactactcagtggacataaccatatttctgtgtggatgtgaatgtgtgcacacacatatctatttttttctctcttcatgagtagatagatatatacatacatatatacacacatacataatacataaatatatggattgatattgacatttcctacctcatttcaaccacacagagtaaattctagtcggcccagttttcatatctgtaactcccttctcaagcaatgagaaacctggcccacattatcatcaatgttttcacttattcaagcctagaatacataaaaaatacttccagaattgctaacccacaaaactgcaaaaagtaaactt

SEQ ID NO: 654300 - DNA, 564 bp, Homo sapiens
atgatgctaattgtaggtttttcacacatacctttttattagattgaggaatttttttccctctcttcttagtgtgctgagagggctctttaaaatcatgaatgggttttaacttttatcaaatattatttkcttatgcattgaggtattcatgtttttttcctttattctattaataaagtgaattatattgattttcaaattttaattttaatactgagataaacctcatttggtcataatgtataaacttttgatttattggagtaggcagaataaaactccaaggatggccacatcctaatcttcaaaacctgtaaaactttacatggtaaaagggactttgcatatgtgattgattccattacgaattttgagatagggagattattctggatcatctaagtggacccagtataaacacagggcccttataagagggaggtaggaggatcaaattcagagaggagacgtgaccaaggatacagaaattggtgtgatgtagggtgccacaattcaaggaaaacagcctctagaagctacaaaatagaagaaaatgaattc

SEQ ID NO: 654301 - DNA, 625 bp, Homo sapiens
atacttgctgttcacatggtatataattttccacacttttactttcaacctatacccagtattatatttaatacacatctatattgcacagcatatacttaggttttgttatttgatccagtgtagaaatctgtcttttaattgaagtgtttaatccacttacatgtaaaacatttattaactttattgggtttaccatttgctctctctctttctttctttgtttctcccactcactaatttttcctctgttcctcctactgtgtattctgttgagttaaatgctttttcttgagtactccatatttatttcatttactttagctatgcctctttatattatatatatttataataggaatataactaaatatataatatatttgtaatataaatataaatatgtaatatatttataatataaatataactaatatatattataactayataacatatgtaatatataacatataacatatataatatataacatatataatataaatatatcatatatttatgtttagttatatttatattaatattaatgtatatttagttatatttatattacaatttattatattgtatatataatatatatttatattacaaagatata

SEQ ID NO: 654302 - DNA, 625 bp, Homo sapiens
atacttgctgttcacatggtatataattttccacacttttactttcaacctatacccagtattatatttaatacacatctatattgcacagcatatacttaggttttgttatttgatccagtgtagaaatctgtcttttaattgaagtgtttaatccacttacatgtaaaacatttattaactttattgggtttaccatttgctctctctctttctttctttgtttctcccactcactaatttttcctctgttcctcctactgtgtattctgttgagttaaatgctttttcttgagtactccatatttatttcatttactttagctatgcctctttatattatatatatttataataggaatataactaaatatataatatatttgtaatataaatataaatatgtaatatatttataatataaatataactaatatatattataactatataacatatrtaatatataacatataacatatataatatataacatatataatataaatatatcatatatttatgtttagttatatttatattaatattaatgtatatttagttatatttatattacaatttattatattgtatatataatatatatttatattacaaagatata

SEQ ID NO: 654303 - DNA, 490 bp, Homo sapiens
ttgggcacattttatttcaacacaattaatatatattttattgtggtttggattatatttttacatttaatcagccatcacttatgtttatctatgtgtawtgtgtacttatttgtatgtttgctttgaaggatttttgtttgtatttaaccttaatagtttaattctgttgcacttaagtatgatgttctttgattaccctgcttgaggcttgctgagctacttgatctacttgattcacaagtttatgtttttactgcattttagaaggtttgagccatttttttcttccaaatatttctgccttttatactcttttccttctctcataaaccccaagtttccttaaaatagactactttatattgtgccctcagtgactgaaactcttatcatttattttcaatcattgtctcactgttttacaagttggataatttctattgagccatctttttaagttcatttatttttttcttttgtcactttc

SEQ ID NO: 654304 - DNA, 544 bp, Homo sapiens
ggagagaggggtaaaatgagagatttccttaacccttttttgaaactttgcatatttgggggaccttacaggagtcaaagatgaaagatccagctcagaggagcaatgatttgtatagttagtttccctctaattccagtttaatgaagagaaagactgtcaggaggagccactcccttttccagaacagggaaattagaaaggaaatgaagggacctataggtctgcacagccttgtcagaaattgtaaatctataaatgataccgatggctttagtttgtgatttgggagctgttatactcagcccatggagatatgcccacaccaaacagaggatgacaaacataggtttgctatttttcctayctggattttttccaagacttattactttgggatgttgggtcagttttgtagagttcaatgattatacaaccctccaggaattataaacacttaaaagtccttaaagtcttagtgccaataaatgtatctacaaattttccttctgcctccaaactgaacaacttttcttaggaaaaa

SEQ ID NO: 654305 - DNA, 279 bp, Homo sapiens
aattgtacagttcttcctctttgttaataagagtgatgcaatttacttctcctttttacccaggctgagaggaagcactgggcaagatacaaatttattcaaagtgaccatgttcatcttaactacatattccttcaccaggatattccatttttaagccacttcaaaacatttttagaaaaacgcacaaataaattcaataatatctatttacagggacccagcagaatttcttaccaaaaagaragagaaatggggaaagtgtggggtgggggagag

SEQ ID NO: 654306 - DNA, 404 bp, Homo sapiens
gaattctcctgggtatttcacaagaccaccaagcagtactcccatgagttagcaaaagtcacagtattactaaacttggggtgcctcctaatgcacatgtcrctgcagtgaccaaagatttagattacagaactcaatgccctttgaatacttggaaagcagttccaagaagaatgcatacaaagcagccaagaccgtggagactacgataaatacctaactctttaatgcccagacattgacaaacatccaccagcatcaagacttcccaggaaaacttgacctcaacaaatgaattaaataaggcaccagtgaccaattctggagtgacaaagatatgtgaattttcagatagagaactcaaaataactgttttgatgaagctcagtgaaattcaagataac

SEQ ID NO: 654307 - DNA, 603 bp, Homo sapiens
ttgatcaagcagaagaaagaattagtgagcttgaagaaagcctacttgaaaacacagtcacagcagacaaaagaaaaaagaataaaaaagaataaggaatgcctgtaagtttaagaaaaatacgctaaaaaggaaaaatctaagaggtactgtccttaaagagaaggtagagagagattgggggtagaaagttcattctaaaggataataagagaactgttgaaacctagagaattatatcaatattcaatttcaggatgattacagaacacaatcagacttaaccacccaaaagacaaccttgatatgatttggctgtatccccatycaaatctcatcttgaattgtagttcccataatccccacatgtcatgggagggacctggtggaaggtaatggaatcatgagggcagttacccccatcctgctgttcttgtgatagtgagtgagttctcatgagatctgatggttttattatgggcttttccccctttgactcttcttgctgctaccatgtgaagcaggatgtgtttgctttcccttatgctgtgaatgtaagtttcctgaggcctccccagctatgctgaactgtgagtgaattaa

SEQ ID NO: 654308 - DNA, 608 bp, Homo sapiens
tatattactttattactttctccttggaagagcaaagtttcaaaattaaagaaaaatatgattgtcatagaatgtgggttttaaatggaaagagattgctcagataaaaagcaacagagtttgtacttgaaatgattggaaaacttggttgaaaccagcaagatgcaataaaggctcactattaaatcttgtatcccctcttcaagtatatttcatggctttggaatcaaaaaatattaattttatggcaattgataattttggaaaatgactatttgatagtacggttcatactgttaggttgatctaatttcaaaatctgttttttttcattttctagtaatttgggggcagattaacctaagtggtaattattaacaatactttaaaaatattatgcccttctcttctccctggaaccctatgcctatctcaagcttaatcattaccacattggaaatgatrtgattgttggattactttttctattacgtgtaagctttttgatggtagggactattgctttgtttgtatcttgtgcatctgatgcaagcatcatgctttgcttctggaatctgtttgataaacgtctttgaaactgaactgag

SEQ ID NO: 654309 - DNA, 568 bp, Homo sapiens
tgatttttgttgccagtatgttatatgcaaaatacaaatctgatcaggcatttaacttgcttaaaacatatctgttgcctttagttgaaatcccataacactattacaacattctccatgataagacttcttttgaaatcaccattctcatctcctgaaattccctcttcatttgctgcagccatcttgggctttttaaatttcatttgatgtagcagcagtctcttatctctactactttgagcatagtttcctcatacaaatatactcttgtctatcttttcaccacgtaaactttttatacttatgttcttttcctcaacaagaacttctcaagtcccctagaaggtatattagagtattccatgttcccgtagttatcttctrtaatatttataaacattcattaatttgtttagtgtattaagtttcttttaggctttgtttcctgtgacaattctatctcaaggttgaatatattgagattggatatactataccctatctttttatttattgaaatacttgtataaggaaaattattgattgttttaaacaacttcaagta

SEQ ID NO: 654310 - DNA, 381 bp, Homo sapiens
aaggtttgtctatgctttttaaacattgaggttgaactataccttaaaatattgtttaatattattattacttatgtaaatagcatctgcaagaaaattttgggagtaaatgagttcctaaaattctaataagtgctttctcagtaaatttcaacaaattattatactttttaatttaaaaatatcaagtcacatttaattctaatgyttatagagctatttgatatgttcactttccttcagtaatatgattccagagttatcattagcatttactttatccttttgaccatgtttctcctaaagtgtgtttatatacaaaaccagcatgactttatacacaaacacacatatttaatatctaaatgccatgcacagatt

SEQ ID NO: 654311 - DNA, 483 bp, Homo sapiens
cgcggacttcagtccgcagagcatgccgggagtctggcagtccgtgcggcagcagtggagcgcagaggacagggccggcctggagcgcttggcgtctccccgaagtctctctgagagctggggaggcggttggcccgctaggtcactaggtcgggcaggggtcttcccccaaacatggaagttttcaccgatatttcgccggtgacattggggccttgtgccaacagactttgctgaagtgaacccaaagttcaaccctccgggagagtccttgcaacgattcggccactcagttctggagccgtcggcactacattctaagttgcggtggactccactggcatctgcgtgactatctccggccggtgtgcataggcgcccgtcgggtcgggggmtgaggaccttggacagggcggccacacccctctcgtacagcagcgcctctgtccattctgcgcaggcgcctctggggtcagggacgga

SEQ ID NO: 654312 - DNA, 483 bp, Homo sapiens
cgcggacttcagtccgcagagcatgccgggagtctggcagtccgtgcggcagcagtggagcgcagaggacagggccggcctggagcgcttggcgtctccccgaagtctctctgagagctggggaggcggttggcccgctaggtcactaggtcgggcaggggtcttcccccaaacatggaagttttcaccgatatttcgccggtgacattggggccttgtgccaacagactttgctgaagtgaacccaaagttcaaccctccgggagagtccttgcaacgattcggccactcagttctggagccgtcggcactacattctaagttgcggtggactccactggcatctgcgtgactatctccggccggtgtgcataggcgcccgtcgggtcgggggctgaggaccttggacagggcgsccacacccctctcgtacagcagcgcctctgtccattctgcgcaggcgcctctggggtcagggacgga

SEQ ID NO: 654313 - DNA, 623 bp, Homo sapiens
cagaattcaccactacaatgtagccatgctacaaaactgcacttttattccctaaatttatttaaaattttagaaatcaactgtgaacctagacatgaatacctaatgaaactatttttacaacaagtgcaatatctattttctgacaaactaaaacttaaaaattatttctaagagaaattcaaaagaatatattccaggaagaataaaaatgaatccagaaggaagatctgagatgaaaaaaagaatggtgagccaagaagataaatatgtgagtaaataaaaacaaatgttataataataatgttgattaccttataagattgtaacttaaagctaaaatactggaaaacaataacatatatttggggatgggggtgatcagagttatagattattttaagctcttataatgatcaasaaaaggatacacgtattgactaactttggaagttgttaggaaaatgttaaaatttcaagaataacacaaaaaaatagacatagagtgtacaaatttacaattagtagaggagaaaaaaaattcagtcaaagccaaaagaaggcaagaaaagaagaaagacaaagagggagggagagaacatggaacaagtggaaagcataaa

SEQ ID NO: 654314 - DNA, 598 bp, Homo sapiens
ggttgcaagggctgtgagaggagtgaactgaggaatgactttaatgggcacaggatctccttttggagcaattaaaatattttgcaaccagaggtgatggttgcacaacattgtgaatatactaaatgcctctgaattatatactttaaaatggttaaccttatgttatataaattttacctcaaaaaaattctaaaagcccatgctgggaagaaaaaaacaaaacaagaactagtagtagtatataaacttattgaacctagctcccactgaattaaaagtacattcttatgtttgatkaagtataaaaactacaaaaggaggtccatgagtaaatggtaaaaatcattatttcaagaaaactgcacaatgcaatatgcattttaacacagtaaaacatatcctacattcatcagttatcaaaaaattaaataattatttgatcatttggtaatgtaaaattaaaaattaactaggcactatgctcactatactggactcatcagagtatctcttctggaaatttggaattagaattcaaagatatgtggttaggcttagcatgtggttaaaacttagacctaaaaatcggccagga

SEQ ID NO: 654315 - DNA, 636 bp, Homo sapiens
tacacatttttgtctgtatttggtgttgtcacaattttttattttagccattctaataggtgtgtaatgatatctcattgtagttttaatttacatttccctgccagttaatgatgtgaaatgtcttataatgtacttatttgccacctgtatatcctcttcactagtatgtctgtttatgtcttttgctcattttctaattgggtttttccttgttaagtttttagaatagtttatgtattatagatactagtcctttgccagatacatttttgcaaatattttctcttaatctgaagcttgtctcttcatcctttcaacagaaccttttacagagcaaaagtgtgaattttttttttttttttttttttttgagatggagtctcactctgtcrcccaggttggagtgcagtggcgtgacctcggctcactgcaagctctgcctcctgggttcacaccattctcctgcctcagcctccagagtagttgggactataggcatccaccaccatgcccggctaattttttgtaaaaagtatgaaattttgatgaaattcaatttatcaatcttttcttttatggcatgattttggtgtcaaatctaaaaattctttagtcttagattctgaagagttt

SEQ ID NO: 654316 - DNA, 553 bp, Homo sapiens
cattctcaaaaaccctatttcaacagctctttacttaaaatttccactagttgctactgaaacatatgacctctgagtttaatcaaggctgagtaaaatattttgagttcaataatttatttttgagctggttttggagaaagtgaatgacataaatggaagtaatatatttgaatataattcttggggaaattttatattcaaaaaccagtttcattaagtgtagtgacacaatgaatcttctacatacccctactgcatgagattttccaaagagaattttgtcgcaaycaacagacttgcagccaatatccaagcagtgcttggatcaactgggatattacagtaactagtcctgtaatgctgtaacgttatttaatatgttaaataaccctgtatgctgatgtgggctagaatgatgactatgaccaggggaagagactatgaccaggggaagagatgaatgtaattaacttttattgtttggagatagcttacaggtgttgccagataatatactgcagaacactgagtttataccctttactccaca

SEQ ID NO: 654317 - DNA, 527 bp, Homo sapiens
tttattgtttggagatagcttacaggtgttgccagataatatactgcagaacactgagtttataccctttactccacaggtactccacaggttggtatttgtcctctaacttctcctgcccccatgagatttgttccattcactgaacaggccmaacatgggagaactagattgtagagtttataggcaactccttggtcacctcagaaacagaaggtgaggtgagactaaagtttacagatagcacagctgtgctacactcataattcctcatgaatgggatttctgatgaagtaaaattggggtttcaaagcaatatggtagtccttgggttaaggttcggcaattccatttcattcttgatagttcagcctatgcaattatcctaataaataataaaactgttgactcctgtacataaaagagtggagaaacattaaatgatggctacttttcagtctgcattcttttgcagctttcacgtctaagcagtgtattcagagttgtgaaagaagctggcttttgta

SEQ ID NO: 654318 - DNA, 640 bp, Homo sapiens
attttttagcaataaagtatttttaattcaggtatgtattttttcagacataatgctactggacacttaatagacttcagtatagtgtaaacataatttttataagcaccaagaaacaaaaaatttgtgtgacttactttattgcaatatttcctttattgttgttgtctggaactgaacctgcaatatctctgaggaatgcctgcatataaatgtattattttaaacaaccacaaagactcctatataatgcttcatgtgaaaaatttcttttagaaccaagtgctggcgggagtataaagctctccctgagaaaatggtaggtgctttccctcctgaaragacttaccacataattaggaagaggaaaaagaatgtataatcccatttgcaatgaatcctaacacctggacactcatttggtagttaagctaaaagttcttatttcaaagagctggataattctgcctcagaacctttataacagacactacttgattctatcacacaccagaggccaataataatagcaatagctaccatttatcctactgagtcctcacggtatgcaaggcagggagctgaacactttgaaagtctcaattaatccccctattaataatagaacatatctcataag

SEQ ID NO: 654319 - DNA, 640 bp, Homo sapiens
attttttagcaataaagtatttttaattcaggtatgtattttttcagacataatgctactggacacttaatagacttcagtatagtgtaaacataatttttataagcaccaagaaacaaaaaatttgtgtgacttactttattgcaatatttcctttattgttgttgtctggaactgaacctgcaatatctctgaggaatgcctgcatataaatgtattattttaaacaaccacaaagactcctatataatgcttcatgtgaaaaatttcttttagaaccaagtgctggcgggagtataaagctctccctgagaaaatggtaggtgctttccctcctgaaaagacttaccacataattaggaagaggaaaaagaatgtataatcccatttgcaatgaatcctaacayctggacactcatttggtagttaagctaaaagttcttatttcaaagagctggataattctgcctcagaacctttataacagacactacttgattctatcacacaccagaggccaataataatagcaatagctaccatttatcctactgagtcctcacggtatgcaaggcagggagctgaacactttgaaagtctcaattaatccccctattaataatagaacatatctcataag

SEQ ID NO: 654320 - DNA, 588 bp, Homo sapiens
cgatttccttcacaaactcagaatgaaaagaaaaaaaaaaaatcacaagttccagaatacacctctcataaaaaccaagaaaggacagtatatttcaacagaaattcaatctattgctagtggaaatttgtccagaccagacataaaatattggtacgcttcgaaattatttcttcatacacacaatattgccaaattttgtaaatatttatagacctataaatctttacattgattttagaacaagacaaagccatcacttggttctccccttgtactgaaccaattaaagctttggttacgaaaaagcaagaaaacaacttctaagagagaatgaccttaaactgaaaaataggctttaatatgaaacgtcttagaaatattttaagttctagaaaatcacaatgagctggagaatcragagattggaattaagaattctgagtttactactcatttatggtagaattgtactgcctcagttttctcacctgtaaaacagaggcaggcagaaagatgagagtacaggaggaagagatgacaaaggggttagatatccaaagccttttcctgctcaaaaacaattga

SEQ ID NO: 654321 - DNA, 568 bp, Homo sapiens
acctgggaaataagagctaatgttgttcattagccaagagaagctaaggttattgggcattgtgacaaaatggcacgttactgggttcagtccaagagaatgagacaaaataatgttttccctgagccccagagactacaaaatccagttatattttaagtagccatttttagagatttatatactgttcagtgataaaaataaatgagagtcccaggcttaaggcaccattattcagcttttaaaattgcagcatgttttcttgcaggatttggttcagycaactacaggatgaaaaaaaagtatttctaagctacataggtgagcaatagattggatcctgggttcacaaattagtggaaaacatatgagccattaacgaattccacaggcaaggcaggctcttctctggatgactgagatcttcaaaagtcaatactctaaaaaactattactacattttgaatttcctactgtgaccagaaaagcaacatattcggagtactggctgttttttgtttttgtttgtgagacaggatctcgttctgtcacccaggtgcagtacaac

SEQ ID NO: 654322 - DNA, 482 bp, Homo sapiens
agttcctgcggacctaccgatcctattctctcccacccagtccctagggaagcgtaataggaaggggagaaggttcgttatgaaatcctggggccagaaccaagggcagatacaccccggggactttctcctaaagaacaagatgtctttccaaattctccacctgcaggtcctgtcytctgtgaagatgaacggggtggggtggtgaggtggcggggtgttgtaaacctgaggaaaggttggagggaaaatcaagccacccacctactccagccacgttgcccggcggtgttggtgaggctcgatgccggcgtgcacggcaagcgcgaattcggaacctggcgcccttgaccaagcctgagatcggaaagggggcatcgcccagggccagcgccctgggggcagggtgccgtgcccgccagaaaagctcgcctcagttttggcagtaatgattttcctagaagatgccagagttcgcgaag

SEQ ID NO: 654323 - DNA, 538 bp, Homo sapiens
agggacacgagtccctctctgcgcgcacaaagcagctgcgccggggcgcgcggccccctctcccgccacccgccaacttggaagaatctctctgggagcctgcctactcccctggcctcacagccacccgcctcggacggagcgccaggcgccccaacagccgtggcggctgcaaccgcatctcccgggcttggcctccgccctgaccgcctggctcccctcgccccggtcctaccgtgcagcctggctcgcgccccwgccgtgccagtgcgcggcacgcgtcccagagcacgaggctcctccccggggggctgccccgcgcggggctccgggctccggacaaggcttagccggcccgggtgctggctcgccgccgctcgcggctcccgcgccggctcctgctgccgcgcgcgaaaagggaggggttggggggaaactcccggcaactccaactccgggcgctggagctccagctgcagccgcgcgcccgcccgccgccgagtgcgagcgcctgcgaagcaaacctgcccgcgcggcc

SEQ ID NO: 654324 - DNA, 281 bp, Homo sapiens
agttggcacaagactgtgccagaactcaaaagactaggagaattgagacagaaagcagattagtagttccaggggctggggagaggaagaataaggagttattgtttaaggggtatggtgtcttctttttggatgatcaaaaaggaactacatagcggtgacagttatactaaatgctactctattgtacactttaaaataagtaaaatggtaatattatatattttarcacaacaaaaaaaataggcagaaaaaagaaaaggaactagtagtagggtcaa

SEQ ID NO: 654325 - DNA, 581 bp, Homo sapiens
gcaggcagttggcagtggcaaatgtaycagagaagctgagaagactaagaactgcaatgaggctattggatttggcttttagtaattaagcaatggtcttcaagattgctatttcagcaaagtgctcaagactgaaaataatacagtgggttgagaagtcagtgggaaattaagaaggggaggcagagcccactcaagaagagtagtgtgaaggaaagggagacttggcctggtagttttagagattagcagggttaaaagaaggccctttttttctcagatgaagttcttgagaatgttgcaggtagaagggaagaagttgttttttcagaaggaggtagaaaatgccagagagggatagggcataattgattgatgggccaagatccaagaacagatagaaaggcaaagaaccaagaccacttggaaaatgaagaaagtgaagaatgaatgaggattctgtaaaatattgagggtttttaagaatgtaaatggggacaacccacactggaaggcttcaatatttcttagccaagtaagacgtgaagttgtctactttacatgtacaggagagaagtggg

SEQ ID NO: 654326 - DNA, 581 bp, Homo sapiens
gcaggcagttggcagtggcaaatgtaccagagaagctgagaagactaagaactgcaatgaggctattggatttggcttttagtaattaagcaatggtcttcaagattgctatttcagcaaagtgctcaagactgaaaataatacagtgggttgagaagtcagtgggaaattaagaaggggaggcagagcccactcaagaagagtagtgtgaaggaaagggagacttggcctggtagttttagagattagcagggttaaaagaaggccctttttttctcrgatgaagttcttgagaatgttgcaggtagaagggaagaagttgttttttcagaaggaggtagaaaatgccagagagggatagggcataattgattgatgggccaagatccaagaacagatagaaaggcaaagaaccaagaccacttggaaaatgaagaaagtgaagaatgaatgaggattctgtaaaatattgagggtttttaagaatgtaaatggggacaacccacactggaaggcttcaatatttcttagccaagtaagacgtgaagttgtctactttacatgtacaggagagaagtggg

SEQ ID NO: 654327 - DNA, 575 bp, Homo sapiens
tcgtaagaaattcacattctagagaaagaaatccaagtcttaaaatgcctacatgtcacatacaacttttacgcaaaagaacatgcttgatgtgtttttactatcagggagactcctggtttgtgaacttactaaataggatgtgaaaaggattgctggaatcataaaattaagctaggaaagcataaaactttaaaaaartaaacaatatattccaggctacaaggaagcatgtagaaaaggagatggcatggcttcacacaatacttcgggctctaattacatgtgtatttggtatgagaactaaaaggaaaattataaggcttgcattgaagaaaagaagttggcagatagaggaaataggagaaattggaggtaagtgccgtccagctgtatagtacatagtgcggagtatgcagttaaacgcttcttagaaattactacaaatagtccagtaatggcagaatcagtaacctggtcaactagatgccaggtataaagtagtatctctaattttacatatttgcacttaagcacaagcgtgtgtaataagaattttttattcaccagaattc

SEQ ID NO: 654328 - DNA, 553 bp, Homo sapiens
aaaatggtgccaagagaaaactcaaaatagaagccccaggacagaatgatcattttattcagtaagtttaaatgtagtattagaggttaacataaccaaatagagtatccaggatattatttaaaatttcgagttgaaactttcaaagagatgggtaaaaaggaaggagtacctgcaagaagttttctccaagatctatgcctgctaaaagacctccaaatacatatcccaagcatgtgaacaggcactgttgctaggtattgttgattcaaatttatttagttttttagaattgtaattatmgtgtttggaatagttactaagctgctattatgtgcacggtattgtgtttaagtgtttctggaagctgaggtgatgatgtctatgtttatgttccgtaagacaccaggagtggaagtctgtgggtggtagggggagcatggaggaggcaggcccaccgggcacgtggttgaagagatcatagtggaactgtgtcatacaaatgcagcctgttgtattgaatgtacttgttctcactacggagtaatcctga

SEQ ID NO: 654329 - DNA, 610 bp, Homo sapiens
aggctacaaggaagcatgtagaaaaggagatggcatggcttcacacaatacttcgggctctaattacatgtgtatttggtatgagaactaaaaggaaaattataaggcttgcattgaagaaaagaagttggcagatagaggaaataggagaaattggaggtaagtgccgtccagctgtatagtacatagtgcggagtatgcagttaaacgcttcttagaaattactacaaatagtccagtaatggcagaatcagtaacctrgtcaactagatgccaggtataaagtagtatctctaattttacatatttgcacttaagcacaagcgtgtgtaataagaattttttattcaccagaattcttggaaaataaacagaatgtatttgtgctagttggtagggtataaaaggaaggacttctcactcctctacggccgcccctatgtgggtagaactttgattaatgttcaagggagaaagaatatgaaatagggatagaattggcagagctggtgaaagaccacccatgtcatactgtgactcttcaagtgttcactaaagcctatctgatgggactagatttcctatggaaactggtatgagggaaatgctg

SEQ ID NO: 654330 - DNA, 575 bp, Homo sapiens
tcgtaagaaattcacattctagagaaagaaatccaagtcttaaaatgcctacatgtcacatacaacttttacgcaaaagaacatgcttgatgtgtttttactatcagggagactcctggtttgtgaacttactaaataggatgtgaaaaggattgctggaatcataaaattaagctaggaaagcataaaactttaaaaaaataaacaatatattccaggctacaaggaagcatgtagaaaaggagatggcatggcttcacacaatacttcgggctctaattacatgtgtatttggtatgagaactaaaaggaaaattataaggcttgcattgaagaaaagaagttggcagatagaggaaataggagaaattggaggtaagtgccgtccagctgtatagtacatagtgcggagtatgcagttaaacgcttcttagaaattactacaaatagtccagtaatggcagaatcagtaacctggtcaactagatgccaggtataaagtagtatctctaattttacatatttgcacttaagcmcaagcgtgtgtaataagaattttttattcaccagaattc

SEQ ID NO: 654331 - DNA, 532 bp, Homo sapiens
aaatatatggatattgtcatgctaaataatatatctgagctataaagacagtagagggtgaattagtcttgtaaattgagaagcacaggcttccatcaaatgtctttgaaaaattaggaatgtagattcatttctggaatctaagagcaagacacagcaagtgaattatttccttttctctcccttcaaataatatttaagwtgagtgtgcaaaactggtgtatcatcctcttatcctatctatgggtttgagaagaactttcacaatctctttccagaaattaaaataatgatcacaataaaatcccccaaagcttgtctaagcctgaagcactgcaatttattgagatcctgatgtatgtgtcctggcagcacaaccacagggctaagttgtaatcctttgcaagagtcacccagaaatccccgggattcagtctgatactctaaaaatatgccttgaaaaaacactgtcgggaagactctgaatcttaaccccttagctaactccagataggtcttgtggccttctgaa

SEQ ID NO: 654332 - DNA, 569 bp, Homo sapiens
ggagtattttctgcagtaactgtttgactaattgccttcattctctgcctctgtgtgcagacagcctatgcccctgactatcttatcagggtatatttkcttctcttccaaagttatttgaactgtcttataatatttcctctcaatagtccttttggatatggcagagagtagcctatcaattccatttgggagatggagaatggaccttgatggtggttttatgtgattattgctggtggaggtggagccagacctgagtcttgtgactcatagtcaggaatgcttcctcccacactgcactgcggaatgtgttccttgtcactgaaagttacaactgaaaccattaaaagctagcaagaccagttttcctagtaaaagtattcagtcttacgatgaatgtctaagaaactcaagataaaaattatgccaacttcaaagccaaccactgaaagatcccaagggggcggggaggcagatctgcctgttgtatgagcacttagacatattcatctgtactgacaatccatctgcacctactgaaaggaggcagaatattccctgcaccc

SEQ ID NO: 654333 - DNA, 601 bp, Homo sapiens
ctgctgcctgtcctgataactgcaggtttagcactgtatcctctttgaggaatccctgatgcagcctaaaagtgtaaggcacccaaccccactactgaagtacaacgtctcggggtcgatgacggtgactgttagtggctttctcttcccctctcccaccatctgcctagtctgtgcagtggcgctcatcttctggtttcctctgcttggactgcagccacaaaaccaactccagctctcttggtcgggtccctgacaccctgccttgtccattagccgcaattactcaggcaattctttgaattcttcccactttgtttgcttgtaactggaccccagaatcccagaccccatgcaactacttccctaaatgcttttgcttcttccagtgggctgacacttcagattctccttctgatgttttgatcrcagcacaatttttgagtttccttgcttcttcagtaccagtacacccctcctaaggagcagatcttggctttgtggtgcccatagctcattcgattttgggaccttcttaatatacaaaatcatcaatattaacttagatattaaaggagggaaggatgtgccatcccacaac

SEQ ID NO: 654334 - DNA, 559 bp, Homo sapiens
gtgtgtgaaacagagatagactgcaccgttccctccagcttgccagtcctctctcttctggtgcagaaccccactgctgtgtgattttagtgactgactgctctgctggaagactgaatgcctttatggagcttcctgtaatattgtggggtgtggccaggcataaactgactaaccaccttgggataggtcacacatggagaggcaagaacctakaacacccccagccaggccttggaggccccagaggtgtgttggcagctaggcagtggcatggtatccatggggctaggagacagacgagtgggatcatctgatgaagccaggagcattagggaggtcaccactggaaaaacagggatcctgttaggcccatggacttcagcactgtgactctctctgccttgaacgggggacccagagaggagagctgagggcccagctctgggcatctggcaagcactgcttcaagcaccacctggggtacagagggagaattttggtccctagggacttccctagaggactcttaagagttagcaagagaagagtcaagcaa

SEQ ID NO: 654335 - DNA, 579 bp, Homo sapiens
tataaaacggtacacctaaaaacatcgattttgcaatatgtataatgcatctcaatatcttgatttttaaaaagctaaatgcggcttacagagggaagataacttgagattgagtatcttgtttctaaacataaattgttgrtgtgttggcaagtacaacttctatctttaataaaagttgccgtggattctctcaacgatgcacacttaaatgcagactaaaagtaaatattgatcttttgggatttatcttcatttttcctgtcttcctttccttggcttttaaagatcacttcactagaaagaaagataaaggatattagttgttatctctggaagtgggatcacaggattaaagaattttgttctttatatatttttgtatttttcaatgatactatggttaccatgtattatttttataatcagaaaacatattaaaagaagacagtaccccaaattaccttaagattgctatttgaagatatctgactttccagtgctacacacgcagagtcactctctttctgccacctatctaatttagattggttcctaagagactaacagatgttggtc

SEQ ID NO: 654336 - DNA, 530 bp, Homo sapiens
tatgaggaatgatgcactccagcccagatactatgcttttcccacagtcttcacaacccgcagaccaggagattccctcgggtgcctacaccactggtgccctgggtttcaagtacaaaactgggtggatgtttgtgcagacaccaagctagctgcaggagtttttttttaatatcccagtagcacctggaatgccaacgagaaagaaccgktcacccccctggaaaggaggctgaagctgggagccaagtggtctagctcagcagatcccaacctcatggagcccagcaagctaagatccacaggcttgaaattctggctgccagcacagctgtctggatttgacctgggacactccagcttattgaggggaggggcatccgccattactgaggcttgagtagaccatttcccctcacagtgtaacaaaggctattgggaagtttgaacccggaagagcacaccacagctccacaaagccactgtagccagacttcctctctaaatttctcctttctgggcagggcatc

SEQ ID NO: 654337 - DNA, 537 bp, Homo sapiens
ggtgtccaggggagctttgcccagtcttgtgcagatggacttaaattgtttcaacatggagtaaaggagcggaaatggagttcagtaaagaaagtaamccaagaactggagctagatgagctggctctcctagaagggagactatctgaggtagactggggaggagacttttctacatgactctggttcccagaagtctccacacactgaagtaaatgagccctagacaccatgaagagggccaacagaatcactgtgaagagaaggatcctcagctccagggatttcctctgcctacaccctgcccttaagatcaggaccctttggccctcttcatagtgtctggggctctgggggataacccttgagctatggcaccaaaaaacataccagtagcaacaacatccagggggccttctcttctccttgggagagcttcaactcatttcatcacatttcttccatgcacctgcacaactgggcttccaaaagtgcttcaaagacttcagagcttcattctaatgtcctccccctacc

SEQ ID NO: 654338 - DNA, 500 bp, Homo sapiens
gcaacaacatccagggggccttctcttctccttgkgagagcttcaactcatttcatcacatttcttccatgcacctgcacaactgggcttccaaaagtgcttcaaagacttcagagcttcattctaatgtcctccccctacccccaccccaccatgaatgggcaaaaagaagagcagttatagctcttatcaggatgcttacctgtgcaagactccaaaaccagtaagcttgggaacatccacggagccacagggacatgagaaagcccacattgctaatgagatcttgtaagaagtccacagttcataagaggaaaggtaaataaaaatgtgtgctcgtgatgaaaatacacactgtgatagaacgcctcttagcttagggaggtgggagtttccccatctatataagctgatctcaaactcctgagctcaggtgatctactctcctcagcctcccaaaactgctgagattacaggtgtgagccaatgcgcctggcaat

SEQ ID NO: 654339 - DNA, 317 bp, Homo sapiens
tttgctgcagtttaaggaatggaaggcctggtgaggaaaggttcagacactctcaacaccgagaatagatgagctaggtttgagacaggtgaataaggttttttaaacactggcccctgtaacccgcccctgggcagtatttacggaatggacaccagggggtagcaaaatctcactctcctagctcgcgggccctcgtaatagagaacctggagagtgtcggtgactcgagggtcccctagccgggtgttagaaaragctccaactccacggctctaactgtgcggggaagatggttaccggggcttgttgccata

SEQ ID NO: 654340 - DNA, 589 bp, Homo sapiens
tatatttaagttttacaacttcatgttttgatatacaaaagcactgtgagataatcatcacaatcaagctaattgacatatctgtcatctcacatagttaccattttcttttctttttcttttttttcgtggtgagaacacttgtggtctatccttttagtaaatttcaaatgtgcaatacaaaattgctaactctattcatcttgctaaacactgcatctcctgacccatctcagttttgaattgtactaatagaatacacatagtactaatataattctcaaagcaaaaatatattttctttttttttctttttctttcttttttttttttttatgagactgagtgtctctttatcacccaggctggagtccaagggcgcgatctcggctcactgcaacctccacctcccgagttcaagcaattctcgtgcctcagcctctcaagtagctgggattacaggcacccacyaccatgcccggctaatttttgtattattactagggaagggtttcaatatgttggccaggctggtctcaaactcttgacctcaagtgaacacctacctcggcctctgaaagtgctgaga

SEQ ID NO: 654341 - DNA, 377 bp, Homo sapiens
actggtaagtagtatactcagatttagtcaatatttactgaatgcctgttcacctatctaatagtatataatctttccaataaccctctataattaaattagcccccatttacaagtaagaaaaatgaggcttcargaagtctgtttccccagtggcctgcaggctcggggatcctcagtgcaagcccaacatctcacatcgccaccaaataaaatcaatgcacgtgggaattgaggaggagtagacacacagcagttttctggatctctttaaaacgtgactcccactccccgggaaagaaaagagtagatacaatgacccgccgatgttggcacagcactgatggggcaggagtggcttacaaaagatcacttgc

SEQ ID NO: 654342 - DNA, 411 bp, Homo sapiens
accctaaccccaggtagatagtgtcaggactgaattaaattgtaagacacccagttgatgtcaaagaattggttggtatgagagagaagctcacatatgttgttccacaagtgttatgttgacagcatagtaggaaaaaacaatttgtctttttcctattacacaaaagatgtaactgatttaatgcactgtttaaaccattcmttttccccaacaaactgtgtcaaatcaaatgataacacaaattctaaagtgaacacacaggctagaacaggctataagagctggccaaagttcaaggactttgagggtgagagaatgaggactttgaaaatgagaaaaaagtggaacagcttcccagactttcccatgttactcatggaatggcacctaaagttcagtgacttcatt

SEQ ID NO: 654343 - DNA, 411 bp, Homo sapiens
accctaaccccaggtagatagtgtcaggactgaattaaattgtaagacacccagttgatgtcaaagaattggttggtatgagagagaagctcacatatgttgttccacaagtgttatgttgacagcatagtaggaaaaaacaatttgtctttttcctattacacaaaagatgtaactgatttaatgcactgtttaaaccattccttttccccaacaaactgtgtcaaatcaaatgataacacaaattctaaagtgaacacayaggctagaacaggctataagagctggccaaagttcaaggactttgagggtgagagaatgaggactttgaaaatgagaaaaaagtggaacagcttcccagactttcccatgttactcatggaatggcacctaaagttcagtgacttcatt

SEQ ID NO: 654344 - DNA, 366 bp, Homo sapiens
tactctctatcttcatgggtcaattgttttgctttttagctcccacaaataagtgagaacatgtgatgtttgtctttctgagcctggcttatttcacttaacataatgacctccagttccatccatgttgttgcaaatgacttaatctctttcttttttatagctgaatagtactccattgtgtatwagtagctacggtgaacagtgctacaacacacaagggagtgcagatacctcttcaatatactgagttcctttcttttgggtatatatctagcagtggtattgctggattgcatggtagcactatttttagttttttgagaaacctccagactgttctccatagtggttactaatttacac

SEQ ID NO: 654345 - DNA, 366 bp, Homo sapiens
tactctctatcttcatgggtcaattgttttgctttttagctcccacaaataagtgagaacatgtgatgtttgtctttctgagcctggcttatttcacttaacataatgacctccagttccatccatgttgttgcaaatgacttaatctctttcttttttatagctgaatagtactccattgtgtattagtagctayggtgaacagtgctacaacacacaagggagtgcagatacctcttcaatatactgagttcctttcttttgggtatatatctagcagtggtattgctggattgcatggtagcactatttttagttttttgagaaacctccagactgttctccatagtggttactaatttacac

SEQ ID NO: 654346 - DNA, 604 bp, Homo sapiens
tatggttgcagcaatcaaccccttgtgccacagttggccccactttagtagtatgaacactagctgrgtgtccagctccaccagttgctgctctgggtgacctcaagcaagtggctactctttatcagattgtaggaaaattaaatgtgatggtcattattcatttacagtttaccacgtgccttccacattcagccttacctcgctgaatccttaaaattactctataatgttggaggccaatcaactattatcttcattttacagacagcggaaactgtatcttgctctcagtactatggtgcccccatgagagatgcagactcagggcacccagacccccagccatctctgcatctgcaacacttatacaacacaaaagccacaatggctgaagtgtacagcattcccaaaagcagcaccctggccctggccccctcatgctggtccttgaacagcagttgcccgcattctgtggccccagggcctacatgggccgggttccctgtggaaggagggcaaagtagatattcattcttttacagattttacataaagatctgtgtgttttttttttttaggtttatgttagttgacatggaat

SEQ ID NO: 654347 - DNA, 601 bp, Homo sapiens
cccttgtgccacagttggccccactttagtagtatgaacactagctgagtgtccagctccaccagttgctgctctgggtgacctcaagcaagtggctactctttatcagattgtaggaaaattaaatgtgatggtcattattcatttacagtttaccacgtgcyttccacattcagccttacctcgctgaatccttaaaattactctataatgttggaggccaatcaactattatcttcattttacagacagcggaaactgtatcttgctctcagtactatggtgcccccatgagagatgcagactcagggcacccagacccccagccatctctgcatctgcaacacttatacaacacaaaagccacaatggctgaagtgtacagcattcccaaaagcagcaccctggccctggccccctcatgctggtccttgaacagcagttgcccgcattctgtggccccagggcctacatgggccgggttccctgtggaaggagggcaaagtagatattcattcttttacagattttacataaagatctgtgtgttttttttttttaggtttatgttagttgacatggaatggaggcattaatcagg

SEQ ID NO: 654348 - DNA, 604 bp, Homo sapiens
tatggttgcagcaatcaaccccttgtgccacagttggccccactttagtagtatgaacactagctgagtgtccagctccaccagttgctgctctgggtgacctcaagcaagtggctactctttatcagattgtaggaaaattaaatgtgatggtcattattcatttacagtttaccacgtgccttccacattcagccttacctcgctgaatccttaaaattactctataatgttggaggccaatcaactattatcttcattttacagacagcrgaaactgtatcttgctctcagtactatggtgcccccatgagagatgcagactcagggcacccagacccccagccatctctgcatctgcaacacttatacaacacaaaagccacaatggctgaagtgtacagcattcccaaaagcagcaccctggccctggccccctcatgctggtccttgaacagcagttgcccgcattctgtggccccagggcctacatgggccgggttccctgtggaaggagggcaaagtagatattcattcttttacagattttacataaagatctgtgtgttttttttttttaggtttatgttagttgacatggaat

SEQ ID NO: 654349 - DNA, 530 bp, Homo sapiens
accagttgctgctctgggtgacctcaagcaagtggctactctttatcagattgtaggaaaattaaatgtgatggtcattattcatttacagtttaccacgtgccttccacattcagccttacctcgctgaatccttaaaattactctataatgttggaggccaatcaactattatcttcattttacagacagcggaaactgtatcttgctctcagtactatggtgcccccatgagagatgcagactcagggcacccagacccccagccatctctgcatctgcaacacttatacaacacaaaagccacaatggctgaagtgtacagcattcccaaaagcagcaccctggccctggccccctcatgctggtccytgaacagcagttgcccgcattctgtggccccagggcctacatgggccgggttccctgtggaaggagggcaaagtagatattcattcttttacagattttacataaagatctgtgtgttttttttttttaggtttatgttagttgacatggaatggagg

SEQ ID NO: 654350 - DNA, 530 bp, Homo sapiens
accagttgctgctctgggtgacctcaagcaagtggctactctttatcagattgtaggaaaattaaatgtgatggtcattattcatttacagtttaccacgtgccttccacattcagccttacctcgctgaatccttaaaattactctataatgttggaggccaatcaactattatcttcattttacagacagcggaaactgtatcttgctctcagtactatggtgcccccatgagagatgcagactcagggcacccagacccccagccatctctgcatctgcaacacttatacaacacaaaagccacaatggctgaagtgtacagcattcccaaaagcagcaccctggccctggccccctcatgctggtccttgaacagcagttgccmgcattctgtggccccagggcctacatgggccgggttccctgtggaaggagggcaaagtagatattcattcttttacagattttacataaagatctgtgtgttttttttttttaggtttatgttagttgacatggaatggagg

SEQ ID NO: 654351 - DNA, 530 bp, Homo sapiens
accagttgctgctctgggtgacctcaagcaagtggctactctttatcagattgtaggaaaattaaatgtgatggtcattattcatttacagtttaccacgtgccttccacattcagccttacctcgctgaatccttaaaattactctataatgttggaggccaatcaactattatcttcattttacagacagcggaaactgtatcttgctctcagtactatggtgcccccatgagagatgcagactcagggcacccagacccccagccatctctgcatctgcaacacttatacaacacaaaagccacaatggctgaagtgtacagcattcccaaaagcagcaccctggccctggccccctcatgctggtccttgaacagcagttgcccgcattctgtggccccagggcctacrtgggccgggttccctgtggaaggagggcaaagtagatattcattcttttacagattttacataaagatctgtgtgttttttttttttaggtttatgttagttgacatggaatggagg

SEQ ID NO: 654352 - DNA, 543 bp, Homo sapiens
tgtctcccactccagtattttcccttaccattcatatactctcttatggctaacatccatccctcctactgcaggttcagtgtaccatcagagactcaccctttaaaatctcttcgtgaaatccagaattttcaagctgaaaccataaggctcttttcactctgttccggttttactctctttcccattgaatcttctcttagctrtcttgggattttgtccctaaagtctgggaagtactcacgttccttgacaataaggggaagagagaaacaggggtcctaaacctgaagcagagacaaaaagtagggagtctgtggttctgcttctgtaaaatcacctctcctctcctctgagaggagaccagctctgatcttgaaaattttgaaaatggtcaagatcaatggccaaccatgatattaggacctccttcctatagagctactacacagaaccacaaagcacaatggagctgtaagaccgaggaaacaccaagggacctgggaactggggaaagttattaagaaccatgtcaaccacaag

SEQ ID NO: 654353 - DNA, 471 bp, Homo sapiens
ttgtctctacatccccacatcgcctcaaacaccaggcttcctctctcagcacaggaagatgcagggaacagagggacccaggggttgaagactactctagaacacacagagggcytttcctgcccccagctccgtttccaggctgatcggtggaagctttggaagaggaatcaggacagcccttctcttgatactcaccatccccactgccaccctcaacaccacacctccagacccctccctcctctgccctggaccaaaataccagggtggggcagaagtgtagctcagatttctcgggctatatttaggggccaccccacactctcaggtagggagtgaaacttgtagctcagtgactgagtattctaaaggacagggtaccaaaagacgggactgtgagagttcacaattgaccatgaccttcaattaaagccccaaagtcggcagctcaaagggggctaaaaatga

SEQ ID NO: 654354 - DNA, 454 bp, Homo sapiens
gagactgacacccttgcgtggccggtgccaagcgccccggaccttgcacacaacctcgcgcgcaccccaaacacgccctgcagctcttggagcctcagcctttgtgcgcagcaaccgagcgcccgctccgtgctggccctttcccccgagcctccagctccaggggacgcggatcaatcacaccgcccgccggcccggctggcgccttccaggccctacggsccctcgcctgcccctccccctacctgctgccgccgcggccgcttccaccttcacttgcctttgactcgggcccgccccggctcgggcttcccgcagacccgcccccggcccgccccagcccgcccacgggcgctaggctccccgcagacccgccccagacccccagtaaacacgccccccctttcaccccgcccagactgccgctcaggaaagggttgtgctggggccgggg

SEQ ID NO: 654355 - DNA, 454 bp, Homo sapiens
gagactgacacccttgcgtggccggtgccaagcgccccggaccttgcacacaacctcgcgcgcaccccaaacacgccctgcagctcttggagcctcagcctttgtgcgcagcaaccgagcgcccgctccgtgctggccctttcccccgagcctccagctccaggggacgcggatcaatcacaccgcccgccggcccggctggcgccttccaggccctacggcccctcgcctgcccctccccctacctgctgccgccgcggccgcttccaccttcacttgcctttgactcgggcccgccccggctcgggcttcccgcagacccgcccccggsccgccccagcccgcccacgggcgctaggctccccgcagacccgccccagacccccagtaaacacgccccccctttcaccccgcccagactgccgctcaggaaagggttgtgctggggccgggg

SEQ ID NO: 654356 - DNA, 641 bp, Homo sapiens
ctataattcagagaaggaaaagggctttgttcctaggatgaaccaccaaatgagaagtgcaaccatggartacttgagtgggagtgaggggcattctatccaggcacagagagagcatgaaggacagtttggaggcagaaacattcaggttactttggagaactgaatagtagcttcccatgtattatcccctaataccgtaaggttagtgttatcgtcctcactgtacagatgagaaaattgaaactcagaaatgtttagtgagttgcccaagtccactcagctagtaaatgacatatctaggattcatttccccaccccggtccattccactccagggactatgctccttccactcccaagtagcctgtcaagtgtatagcaattaggccatatgaccccagctgcagaataatctggttcttaggttttttgtttcttggggttctttttgttttgttttgttttgttttgtttttgagatggggtctctctgtcagccaggtgggagtgcgctgacacaatcctagttcactgcagccccaaactcccgggctcaagcaatcctcccacttcagcctcctcagtagctgggactacaggtgcatgccaccactcccaactaatttttttattattat

SEQ ID NO: 654357 - DNA, 592 bp, Homo sapiens
gcccagaactaagttttaccccacatcacctccatcatggggcacatgggacagaagagcttactgactgctaagggtagctcaggaagatggccagatgaggcaggctgccaggattccaagagcaggagttctggtgcactgaagaaaaagcaattaaatcacaacagagtcagatgtgtgttattaactttttattttgaattgattatgggttgacaggaagttacaaaaaatggtacagaggggkctcgtgtgcccttcacccagtttcccccaatggttacatcttacatactcagatgtggttttagaaatttatgttcgattagagccgggcctgcctcattcgctgcctggtcaggggcagactctggagtctgggggatttgggaggagcttctggaagagaagggaagcaggaacctctggggaatgggtgagagaagataccttgaaatgccagtgagccaaggtaagaagactggaagaaaaagaggttggaaaaaggaaggcagggtgactacggttgttgggagtgtgggggagacagtcctaggctccatggtaagaggaagcaggagaggacagt

SEQ ID NO: 654358 - DNA, 572 bp, Homo sapiens
gaacatggagacacaaaagggatgagacttaagggaaaggggagaggacaaagagtgacaggcaacagggacagaatgaagggaacagaaatacaagatgagagatggggccacagggttgttgttggggctgcagtgkatgtggacacacagaagaagaggcagagatgagacacaaagtgaggaaaggagacaaccgagtagggagatgggtgactagctcatatgagcaggtataagaggactaatttctcaactgaacacctctgtcccagcgacccctgccctccatcctgactgctcctcctaagagagatggcaccggccagagcaggattctgcccccttctgctgcttctgctgctggggctgtgggtggcagagatcccagtcagtgccaagcccaagggcatgacctcatcacagtggtttaaaattcagcacatgcagcccagccctcaagcatgcaactcagccatgaaaaacattaacaagcacacaaaacggtgcaaagacctcaacaccttcctgcacgagcctttctccagtgtggccgccacctgccagacccc

SEQ ID NO: 654359 - DNA, 562 bp, Homo sapiens
ggctgtgggtggcagagatcccagtcagtgccaagcccaagggcatgacctcatcacagtggtttaaaattcagcacatgcagcccagccctcaagcatgcaactcagccatgaaaaacattaacaagcacacaaaacggtgcaaagacctcaacaccttcctgcacgagcctttctccagtgtggccgccacctgccagacccccaaaatagcctgcaagaatggcgataaaaactgccaccagagccacggggccgtgtccctgaccatgtgtaagctcacctcagggaagyatccgaactgcaggtacaaagagaagcgacagaacaagtcttacgtagtggcctgtaagcctccccagaaaaaggactctcagcaattccacctggttcctgtacacttggacagagtcctttaggtttccagactggcttgctctttggctgaccttcaattccctctccaggactccgcaccactcccctacacccagagcattctcttcccctcatctcttggggctgttcctggttcagcctctgctgggaggctgaagctgac

SEQ ID NO: 654360 - DNA, 595 bp, Homo sapiens
gaacttacaagacagtatgatagtggcatatggatagacagataaattaacagaaaagacaaccctaaatactcatgcttacatgccaattaattttcaacaaaggtgccaagacaaatgaagaaaaggatagtgctggaataataattacataactatatggaaaaacatgaacccttcacttacctttccttaaacataaaaattaacacaaaatggagtatagacctaaacataagagctaaacccatacaatttctgcaggagaacacaggataacatctttgtgaccacaggtaagacaaagattcttttcaagatagaaaaagaacatggtttaaaagaaaaattttataaataggaatgggagtccaaggcaggaagatcacttgagcccaggaggtaaaggctgcaagggagccatgatcacaccactccagcctgggcaacaragcaagaccttgtctcaaaagaaaaaaattaaagtaaaaacttttactctttgagacagatttagaaaattaaagacaagccacagatgacaaggaaataaatatttgtaaaacataaatctgacaaaggacttctgcctaga

SEQ ID NO: 654361 - DNA, 507 bp, Homo sapiens
tctttagtaggggatacagagcattgatgtgagagcaagagacctgtgtttaagtgttaacactaccatgcactaactatgagacaacagcaattccatgaactggtagagttttgagctggaagattggtttttgttackctctatggttaatttcttttaatacttggtatgatttaaagttacaggctgtgactttacaactgcaaagccactggtaaaatattaaaacattcacaagctatgaaataaaatcccataattttaaattaaagtcatttgtttaagcttactcattaataaaatatacatgcaaacataaccctagatgtttccaaatgcaaaaaacaccagaaaaaaaatctatatatattacagaaatgtttttatcagtcttgtataaaaacttagagagaaggagcgagagaataaatatataattcagaaacatccagataagataaattgttgcataaatcattgtattaagtaaattagactgatttt

SEQ ID NO: 654362 - DNA, 606 bp, Homo sapiens
gtgcttcatcagtggagcagctgctgctaaactccaacattgttgccttcatgaagtgctagcccactctgcacactgaataaaaaacacaggggaaacaacgagaagccctttgttccaatgctgctgctttatcaggtactgaggccacctctctctccatcctgaaaggcagattgaatgctttgctaagtatcatagttgcctgacaagatacatagtagttacagtcatcattatggtctttgatagagattggattggcaccaaattcctggaatttgatcgtttttggaaaggctgtaaatatttcccttatattgccctgcgtaaccaaggttctaaaactgtgttctttgtccatcaaaactgggtagagtttccagtgacacaactttttgcattttttgaccatcgattggttgctatcggtacagctatgtagagaactargaaaatgaatcaagtaacaatgatttccccatgtctaaacctaactttccctttgtactgttagttcctgaaaatcgctcctaatttaggcttatccaagttgctggtccactctgcgagtgaggcaaggtgggccaaagagagaggccattg

SEQ ID NO: 654363 - DNA, 566 bp, Homo sapiens
ccatatttgatagaggattgggctataacattaatctgtttaaaaatttggcaatacacttagtattattctcatttttcctaggagaacatcttagagacattcaatatggtgatataaaatataaatggaattatttattagccattgtaactcaaactttacttcaagtcactaatataaatgagatctatgccttgtagaccttcttatatcagcaaaataagaataattggatcatactttatctgcaaatgatactaaattcctttcatctaacctaaaaagttgtcattttgctcatagtacaaatatattacagtgctgaattatctgcatgctatgggagaaaaggtttaaagtttaaaacatttttatgtaatagaaaatgtagtatacaaagatacttatgatccaaattargttttgagttgacttttgaaaaattttttgcatctatcttaacatttattttcttatttttatgaacaataggatccatgtaaattgtccagtaaggtgttgatcaaggtcttcaagtaactgatatgagtttataaatgaaa

SEQ ID NO: 654364 - DNA, 559 bp, Homo sapiens
tggggtgattatgaatgaataaagctgttataaacattcatatgtaagtttttgtgtgaacatatatttctaaattagttggtaaatacttaggagtccaattgttggtcatacggtaagactgtatttacctttgtwagaaactgctatggtcttccaaaatcagtgtataattttgtatttttaataaatgttcctgttctgcatctttgtcagaatttgtgaacgtcagtttttttttaattttatgtattctagtagtgctatttcattgctgttttgatttggtactccataatgaaatcgtgtgctgatcatcttgtcttatatcatttttttcattagtataatgttctttggtgaattgtctgttcagatcattttccttaaaattacattgtttattctcttattgatgacatttaggagctgtttgcaaattttgaatactaaacacttattagatatgtgttgtgcaaattttgtcctagtctgtcctttgctttacatttggtaacagtcttccacatagtaaaacttttaattataataaagtcca

SEQ ID NO: 654365 - DNA, 495 bp, Homo sapiens
ttacctagattttctcctatattatcttctagaaatgttacggttttgcattttacatttttttctctagtttcttttgagttaatttttgtgaaatatgaaagctctgtgtctagattcttttttttttctcatatggatatccaatttttccagcaccttttggcttgcttctttgtcaaagatcaaagatcagttcataatatctgtgtgggtctacttctgggctttctgttctgttccactgacaaattgaaatatagtaagtcttatagytgggtaaggtcttcccactttgttgtacttattcagtatcatgttggctatttcgttgtttttttgttgttgtttttcctttttttttattttttttatttccgtataaacattatctctttgtggatatctacaaagtagcttgctgggattctgacaggaattgcactgaatctttagatcaagctggaagaattaacatcttcacaatattaactt

SEQ ID NO: 654366 - DNA, 495 bp, Homo sapiens
ttacctagattttctcctatattatcttctagaaatgttacggttttgcattttacatttttttctctagtttcttttgagttaatttttgtgaaatatgaaagctctgtgtctagattcttttttttttctcatatggatatccaatttttccagcaccttttggcttgcttctttgtcaaagatcaaagatcagttcataatatctgtgtgggtctacttctgggctttctgttctgttccactgacaaattgaaatatagtaagtcttatagttgggtaaggtcttcccactttgttgtacttattcagtatcatgttggctatttcgttgtttttttgttgttgtttttsctttttttttattttttttatttccgtataaacattatctctttgtggatatctacaaagtagcttgctgggattctgacaggaattgcactgaatctttagatcaagctggaagaattaacatcttcacaatattaactt

SEQ ID NO: 654367 - DNA, 495 bp, Homo sapiens
ttacctagattttctcctatattatcttctagaaatgttacggttttgcattttacatttttttctctagtttcttttgagttaatttttgtgaaatatgaaagctctgtgtctagattcttttttttttctcatatggatatccaatttttccagcaccttttggcttgcttctttgtcaaagatcaaagatcagttcataatatctgtgtgggtctacttctgggctttctgttctgttccactgacaaattgaaatatagtaagtcttatagttgggtaaggtcttcccactttgttgtacttattcagtatcatgttggctatttcgttgtttttttgttgttgtttttcctttttttttattttttttatttccgtataaacattatctctttgtggatatctacaaagtagcttgctgggattctgacaggaattgcactgaatctttagatcaarctggaagaattaacatcttcacaatattaactt

SEQ ID NO: 654368 - DNA, 556 bp, Homo sapiens
ttttttctcttttaacataagtggaactgaggcttagatagtgtaacctgcccataatttcactgttggtaatagttggagcttggatacaccagggaatgtgactgtggatgctgtggtcttaacaaatatgctgtgataataaattagtaattcactatgtgtgtggtaagttccagtggcagaacaataaagtcatctgtaaactctggtaagtaaatgcttattgtagtaaacttcaaatcacagaaatttttctatttttactacctgctgtaattcaaagattagtatttggcagacaggtcatgaaaaataaagtaatgatggggagattagttttaccagatatttatacactctgtaaatcctctaaaattaaaggagtatggaaccatatgaccacatgaatgaaatggagtaaaacactcagaaaaaaattaaagaatagtttaaaacgtaacatatgataagattcgcatttcaaaattcttcaaaatrtataaactttttaataaatggtactgggtaactgtatagccacttggaaaaagaa

SEQ ID NO: 654369 - DNA, 533 bp, Homo sapiens
caaagttgtcccccactggaactaaataactctacctccaacagctgttasatatgggctttcagctgttagattttgacccttattaaggcatctttctgcagatgagatgactctgaaaaattcaacagctgaagggtctggtacaggatagctgtacaattaatgtgtaataaatgaatgaatgggtaatgaaggtgtcatggagatttttcagtaaatacaatagattaagaaaatattaaataaaatattaaaagttagcatgctatctctaccagtatttattcatcaactgcttatttaaaatgtcaaaaacatttccaaactaattcagccatcgccaatataatgacataacaatgaatacaatgaaacatttagtgagcatctgaaagcttgtcaagtacctcacatctggctacttgggactctgtaaattctgtgttgaatgtaactcttcatcatggtgttttggctcaatgtagacacagctgtgcaatcctgctggcaagtcccacctgtgaacacta

SEQ ID NO: 654370 - DNA, 635 bp, Homo sapiens
tatatattttctgtacaataactgagaaaaattcccccattgtctgcctggtgcattgcaagaagctgagggggaaaaaaagacagaacattgtgtggataagagaaagaataagagaacataatatggaaatcatttcagtaacaaaacgatagatcatgagtgaaactctatagcagaaaaatctcagttcctttgaaaaatgcagtactagagaaaaaatgcagcctgaatgtgcatgttaaaaagatagagaatcccagcatcacacagccacaactagcattgtgaagaacatattagaaagaagaaaaaacacacatgcacgaaacaaagttatttaaagcaaaagtgtaaatagggacacaagctttcaycaaagaagcaaatatcttcagcacatacgacctgctcaaaagcaacttaatggaattagaagcgaatatttatatgtagttggattaatatctgccatgttcatactgttttctattcatttcactagttctttatttcttatcttctcctttgttttgtcttttctgagtttaaccaatcattttatatgagtccatattcttagcatgtcaataataatttataaaaattttaatggttgtgtagtttgcaatata

SEQ ID NO: 654371 - DNA, 589 bp, Homo sapiens
cgacttttagcttctggaagtagaaaacttaggatgaataaggaattaggaagtccaattacagattttggtggctatgaccctatatatttattacaaagtaagattcaaagaggctttatatatttccactgagataccacatctaaacctccagagaaatcagctaaatagctgtatgatgggtctgtttttagttttaagttgtaaatactaaacaaataaaaatcaacatgaacagatatacaatgtaaagcaaaggtttggcttcagtaaagacgtgataaagtgactccatcgtgctactttaaacctacattcattctgctctgtgtgtccctacatagactcaaggtggcttttattaaawtcagtggtacatgctttcgcattcatatccagaaggacagagaaaaatatttgtcttcacattgccttcaacaatcctatgattgactggtatagaatgagcttgttctgtgcagtatcaacacaatcatcagccagtgtaatggagtgtattgattacttttgtcctaaattccttcctccctattggaattggtgggttaggattgtctcctctaga

SEQ ID NO: 654372 - DNA, 603 bp, Homo sapiens
tttggcttcagtaaagacgtgataaagtgactccatcgtgctactttaaacctacattcattctgctctgtgtgtccctacatagactcaaggtggcttttattaaattcagtggtacatgctttcgcattcatatccagaaggacagagaaaaatatttgtcttcacattgccttcaacaatcctatgattgactggtatagaatgagcttgttctgtgcagtatcaacacaatcatcagccagtgtaatggagtgtattgattacttttgtcctaaattccttcctccctattggaatwggtgggttaggattgtctcctctagaaccacatgaggcctgcaatggaaatttgaattgttaggagggaggagagtatgaatacaataaaaatatttctacaatagtcaccatttaacacgacatacactattttgaagcagcctagtgtcactgcagcagtctcattgtctgaggtattacctagagttctttgtctcacaaccaagaaaattaaggagtgtggacaccaacagagaggttggagtgacagtgtaataagaaaaagaggtaatctttccacaatggagaaaggacctggga

SEQ ID NO: 654373 - DNA, 526 bp, Homo sapiens
aatgaattcttattgcttctgttttgtgcagtttacaaaacacttattcttaaaaaaaaatgtaagccaaaactccatgccattatcaccatccctgtaaagctagaaaagatactttaattaaggctgttgaccaactgttgatattctacaaagtagaattattgttcaaagaagtataataaaaaaactgccccaaacacacataggttttaatctaacctccaggtctgtaagatatctaacctgatgctaataaagttttagactctcaagcatttcagaaaattgataattgtgtctcatttttctaataattacagtctgcacatttatctcatattggttattctatcatctgcaacaaatatacagaagaacattggtagaattaaaatagactatagtgttgtaacaaataactactgaatctatgtttttaaatgtaaatgtatcacttatgcaaggactgtcatakatttggacttctctttggggcagctgttccctttgtagcaactagaca

SEQ ID NO: 654374 - DNA, 526 bp, Homo sapiens
aatgaattcttattgcttctgttttgtgcagtttacaaaacacttattcttaaaaaaaaatgtaagccaaaactccatgccattatcaccatccctgtaaagctagaaaagatactttaattaaggctgttgaccaactgttgatattctacaaagtagaattattgttcaaagaagtataataaaaaaactgccccaaacacacataggttttaatctaacctccaggtctgtaagatatctaacctgatgctaataaagttttagactctcaagcatttcagaaaattgataattgtgtctcatttttctaataattacagtctgcacatttatctcatattggttattctatcatctgcaacaaatatacagaagaacattggtagaattaaaatagactatagtgttgtaacaaataactactgaatctatgtttttaaatgtaaatgtatcacttatgcaaggactgtcatagattyggacttctctttggggcagctgttccctttgtagcaactagaca

SEQ ID NO: 654375 - DNA, 615 bp, Homo sapiens
tccatggattctgtccctagaaaggatcaacacatggtaaattagcagttttctggtataaaagttaaaatataaacttgttaaaataactataactacaacagttttttaatggatacacaatataaaagatgtaaattgtaacattaacagataaccagtttgattatgatgtcatggaagtttcttctaccttctgaatatcaaggtgtctcgtatacaatatattctaatatgctgagctatttaggcataattgaaagtttgaatagaacatgtattcatttatttccctgtagtaaacgtttactgagttcttcaattctgtgcttggcattaaggatagagaaggaatagccatagtatcctagttaaacaggacttagagcataggtattcataccactttataactttcagccattgaccttagttttctcatttgtgtataaactatggttcgatcacatctcatagacccttacatatttgagttagtatacctctatgagacagatttaactaaccttggcaaaaagaaaattttaaaaaatgaatatacattgactcacacaaacccaggtagggcaraggtgccaagattagggggttgtg

SEQ ID NO: 654376 - DNA, 553 bp, Homo sapiens
caaaatgatcacatcaatatgtaaagtttataactataaaacttttagaagaaaaaaatattttgggccttgggttcttatatatgatagtatgatgtataacaaataaatcataaattgaatttctcaaatttggagatttctggattttgaattacactggtaatggaatgaaatgacartctacatatggggaaaacatttgtaaaccacatatctggtaaagaatatgtgattcagaatccataaaaagcagccaatattcaaaaataagacaacaaaaaactcaataacaaattgtcagatgatttgaacagacagataactaagtaagatacaggaaaggaaaatgagcagtgagaaaatgttcaacatcattagttggtagagaaatgccaaccaaaactgcacagagacactactatatgcctattaaaatgtctaaattttcaaagattgagcatgccaaatgttggcaaggaaatggaggaactgaaatatttatactgttagaacataaaattgtaaaaccactttgcaaaagagtttggca

SEQ ID NO: 654377 - DNA, 566 bp, Homo sapiens
ccttcttcacatggtggcagcaagcagaactcccacacaaaagagggaaaagctccttatgaaactatcagatcttgtgagaactcactcactatcacgagaacagcagtatgggggtaaccaccccccataattcagttgcttcccaccaggtccctgcaatgacacatggaaattatgggaactacaatgtaagaagagattttggtgaggacacagccaaaccatgtcactaaacttcacattgtatgatagaagtccaccaaagtagtcaatgctgttgcatctctctactgcacaacacaatttcatctctagtaataataagatgttggagacctaatgaggcaacgtacagccagataatttagctgggagattttatgcagtaggactcattttataagcactctaaacaaaggttggatctatggaacccagtacaaaragtaaatggtcctagttaaatgatagaaagaagtgtcattaaaggaagcagaatataatgctttctttattattctatggtctctgtctgtcaacttgacatagtgttttgtgtttac

SEQ ID NO: 654378 - DNA, 429 bp, Homo sapiens
tagtgcccaatattggtaggctagaaccaccaatacccctgatcccattctttccrcttagattgcaatctaccaaaagtcacttggagacactgataaggcttggctctgtgttcccaccaaaatttcatgttgaattgtaattctcaatgttgggggagggacctggtgggaggtgattggattatggagatggatttccctatgctgttctcatgatagtcattgagttctaatgagatctgatgttttaaaagtgaatgacactttcccccttactgtttctctcctgccaccatgtgaagaaggggcttaaatcctcttcaccctctgccatgatcattagtttactggggcctcccagtcatgcttcctgataagcctgtggaattatgagtcaattaaacctcttttcttcataaattacct

SEQ ID NO: 654379 - DNA, 513 bp, Homo sapiens
aagcaaccatgatccaatttagaaaggtcatttttatatcagtatagcttggaaagaggtgaggaagggctattgaagtatttcagataaaaggtaagtgagcrgatggctgcatttctatctaagggtatacagccattgattttctattacttttgtttttaaagcttcttttccaaagagacctcagccattttgcataaaaccaaagattcaacaaacatttttttgattacctacacatgctgcaagccctggggatctgaccctatccccgtagctagcagatatcatgaaatcattaagttgtactttctcaccatgctcagcctcagaattctgctcaaatcagaccccaaagacagccactagtaatagataaaaattggcttttgaaatgaaatccatttgccttcttctgtttagtctcatagaatgagtttcaaatgtggggatgaaaataataattatactaatagacccaaatcaacaaattagtgtaggaacttgaat

SEQ ID NO: 654380 - DNA, 513 bp, Homo sapiens
aagcaaccatgatccaatttagaaaggtcatttttatatcagtatagcttggaaagaggtgaggaagggctattgaagtatttcagataaaaggtaagtgagcggatggctgcatttctatctaagggtatacagccattgattttctattacttttgtttttaaagcttcttttccaaagagacctcagccattttgcataaaaccaaagwttcaacaaacatttttttgattacctacacatgctgcaagccctggggatctgaccctatccccgtagctagcagatatcatgaaatcattaagttgtactttctcaccatgctcagcctcagaattctgctcaaatcagaccccaaagacagccactagtaatagataaaaattggcttttgaaatgaaatccatttgccttcttctgtttagtctcatagaatgagtttcaaatgtggggatgaaaataataattatactaatagacccaaatcaacaaattagtgtaggaacttgaat

SEQ ID NO: 654381 - DNA, 513 bp, Homo sapiens
aagcaaccatgatccaatttagaaaggtcatttttatatcagtatagcttggaaagaggtgaggaagggctattgaagtatttcagataaaaggtaagtgagcggatggctgcatttctatctaagggtatacagccattgattttctattacttttgtttttaaagcttcttttccaaagagacctcagccattttgcataaaaccaaagattcaacaaacatttttttgattacctacacatgctgcaagccctggggatctgaccctatccccgtagctagcagatatcatgaaatcattargttgtactttctcaccatgctcagcctcagaattctgctcaaatcagaccccaaagacagccactagtaatagataaaaattggcttttgaaatgaaatccatttgccttcttctgtttagtctcatagaatgagtttcaaatgtggggatgaaaataataattatactaatagacccaaatcaacaaattagtgtaggaacttgaat

SEQ ID NO: 654382 - DNA, 513 bp, Homo sapiens
aagcaaccatgatccaatttagaaaggtcatttttatatcagtatagcttggaaagaggtgaggaagggctattgaagtatttcagataaaaggtaagtgagcggatggctgcatttctatctaagggtatacagccattgattttctattacttttgtttttaaagcttcttttccaaagagacctcagccattttgcataaaaccaaagattcaacaaacatttttttgattacctacacatgctgcaagccctggggatctgaccctatccccgtagctagcagatatcatgaaatcattaagttgtactttctcaccatgctcagcctcagaattctgctcaaatcagaccccwaagacagccactagtaatagataaaaattggcttttgaaatgaaatccatttgccttcttctgtttagtctcatagaatgagtttcaaatgtggggatgaaaataataattatactaatagacccaaatcaacaaattagtgtaggaacttgaat

SEQ ID NO: 654383 - DNA, 609 bp, Homo sapiens
agaagctagactttctttcactttccagaggctataactattctcctgtggggtaatatcagagacaaagtagggagcgaggactttcatccctgctggttggtaacgacttgtcccctctcctcattcatgctgcagtatcagatggtagatttccacttctacctaacaaaaattatgtacccctgccccttcttgctggggctgtgatattggagacctaatggagacttgggacttttaccattgcctagtggtcatggkgctaccctcacatcagtgtctgaggaggccacagagagatctagaaaccccaaccatatccagcagttaaaataaattcccacttgggtgtcagcgaaggccaagtggggaacctggacctttatacctggcaatatgagatggcattcttccttcccctatgggagcaaggtcaggaaaagccagtgaaaacagaaggtttaaataaggttcaaggtctcagagcataatataaaaatgttcagctttcaattgaaaatctctctttatacaaagaaccaggaggacctcaaattgtatgaaaagagacagtcaatagctgccaacattgggatgactgtcaga

SEQ ID NO: 654384 - DNA, 607 bp, Homo sapiens
ctttacctatcttcatccaatctgttgtttatttcaggtgtagatgctgccgtgactgttatcttgattatgaaggctttcctctcttgaaatttagtttatcatgtcttcctttcatctacccctacttgataaccccatagaaaacccctttcctctcttgaaatttagtttatcatgtcttcctttcatctacccctacttgttaaccccatagaaaagtatgacattttatttaatctttttttgtttttatcatgagagtgaaatcaatttgcattattttatgccatcactagaagcagaagccttatgaaatacatttaaattactcctattatttccaagaattcatccaactttggctccctattgctggtagwcttcaaaagggattgaaaatatataaagaaatcctgaacgtctaatacttccactaagaggatgttgcctttccctagttaagtatggacattttttaagtatgaagagagaaaaaaatgaaatctgtacaaccatctcattatataaaagttatattctggaactatttagctttaatttacttttccataagacttaatattcactgccgtattttactttc

SEQ ID NO: 654385 - DNA, 583 bp, Homo sapiens
ggacaccactgtaaccaaataacaaactcagcattattattattwttttttgagatggaatctcactctattgcccaggctggagtgcaatggcacagtcttggctcactgcaacctctgtttcctgggttcaagcgattctcctgcctcagcctcctgagtagctgagattacaggtgcacaccaccatgcctggctaaattttgtatttttagtagagacggggtttcaccatgttggctaggctggtctcaaactcctgaccttgtgatctgcctgccttggcctcccaaagtgctgggattacaggtgtgaaccacggcaccctgccaaaactcagcattattaataactgggcattctgacctgctgtgcttcctgatgggaaaaaagctagaactacactgtagcacatattaatttttcattccagaaatgttcaaaccttatccactcatgagaggacaaccagggaatttagaaaacttggcctcaattctttaaaaaaggtcaatgttataaaggatcagagaaggctggaagactgtcctagattgaagtgaacaaaactcaatgggtgatc

SEQ ID NO: 654386 - DNA, 583 bp, Homo sapiens
ggacaccactgtaaccaaataacaaactcagcattattattatttttttttgagatggaatctcactctattgcccaggctggagtgcaatggcacagtcttggctcactgcaacctctgtttcctgggttcaagcgattctcctgcctcagcctyctgagtagctgagattacaggtgcacaccaccatgcctggctaaattttgtatttttagtagagacggggtttcaccatgttggctaggctggtctcaaactcctgaccttgtgatctgcctgccttggcctcccaaagtgctgggattacaggtgtgaaccacggcaccctgccaaaactcagcattattaataactgggcattctgacctgctgtgcttcctgatgggaaaaaagctagaactacactgtagcacatattaatttttcattccagaaatgttcaaaccttatccactcatgagaggacaaccagggaatttagaaaacttggcctcaattctttaaaaaaggtcaatgttataaaggatcagagaaggctggaagactgtcctagattgaagtgaacaaaactcaatgggtgatc

SEQ ID NO: 654387 - DNA, 578 bp, Homo sapiens
taatacatttttatgagtttttcctgttaatctgttcattgtcagtttatttcagcagaattaaagactcaaaccttcagaggaggaagaataaatttccttcacccttacctaaagtaatgagaaaattctcagtatactttgattatagtggtcactgaaaataacagcgcagaatggtgcttttgagtgaaatatggtaagcccatactgtagatatttacagggtccttttgacaaataattgtgatgcttgtttgttacatagtaggagaatcacttgaaccttctaggcggaggttgcagtgagccaagatcatgccrcttgttaaaggatactaaatatggtctgaaaaggactccatacttctatatttgagtccttgtggatgaagtgtaacctagcttaatagacaaaactgaaaacctaacttagtagtatgcccctgtaacaaaagctgagtgttggctaatcccagcagccatacttcaaccactcatagactgcagaatgttcaaactgcattcaaataagccaaatgccgagttgtaaccaatctcactgtttctgtacctta

SEQ ID NO: 654388 - DNA, 430 bp, Homo sapiens
gctaataatgacatgccaaagtgaatcattattacacaatcaacagaaatattccacattatyccgacatgggggcatacagctctatctgttcacatatatttatccattgattccttcttttagagaatatttattgaatacttattctgtcctcatgaacgttacattctaaccagagagacgtaatataactaattattccaatctttgttcagttataattatgagaaatactgttataaagaggcacaagatattgtgagcatttatggtccaggccctgtgggtcagggaagggtgaagaaggtgaaaaggaaggcagaagaaactgaagtgtgagggcttcttgatgtagaggaggcaatgagttaggtgttgtcagctacagaagagaagccaaattatattaatgtgtatgagtgaattc

SEQ ID NO: 654389 - DNA, 430 bp, Homo sapiens
gctaataatgacatgccaaagtgaatcattattacacaatcaacagaaatattccacattattccracatgggggcatacagctctatctgttcacatatatttatccattgattccttcttttagagaatatttattgaatacttattctgtcctcatgaacgttacattctaaccagagagacgtaatataactaattattccaatctttgttcagttataattatgagaaatactgttataaagaggcacaagatattgtgagcatttatggtccaggccctgtgggtcagggaagggtgaagaaggtgaaaaggaaggcagaagaaactgaagtgtgagggcttcttgatgtagaggaggcaatgagttaggtgttgtcagctacagaagagaagccaaattatattaatgtgtatgagtgaattc

SEQ ID NO: 654390 - DNA, 430 bp, Homo sapiens
gctaataatgacatgccaaagtgaatcattattacacaatcaacagaaatattccacattattccgacatgggggcatacagctctatctgttcacatatatttatccattgattccttcttttagagaatatttatygaatacttattctgtcctcatgaacgttacattctaaccagagagacgtaatataactaattattccaatctttgttcagttataattatgagaaatactgttataaagaggcacaagatattgtgagcatttatggtccaggccctgtgggtcagggaagggtgaagaaggtgaaaaggaaggcagaagaaactgaagtgtgagggcttcttgatgtagaggaggcaatgagttaggtgttgtcagctacagaagagaagccaaattatattaatgtgtatgagtgaattc

SEQ ID NO: 654391 - DNA, 556 bp, Homo sapiens
ctgttatctctttaaatattgtctccctctcattttccattcccttggagattctattagatgtgggttggatcttccttatatctctatgtttcttaaccaattttttcatatttttttattttttaaatctcattggtgatttccttggatctgtcatacatttacttctccaattatgtctagtctattatttaacctttaacctttccattgagktttttgtcttttagcaactgcatttttttttttttttttttttttttttttggtgagacaaggtctggttctgtcacccaggctggagtgcagtggcatgatcttggctcactgcaacctccacctcccaggctcaagccatcttcccacctcagcttcccaaatagctgggactgcagtcacctgccaccatacccagctaatttttatattttttgtagagatggggttttgccatgttgcccagtctagtctttaacttgtgagctcaggcaatccacccaccttagcttcccaaagtgctgggattacaggcatgaggcaccacacccagcct

SEQ ID NO: 654392 - DNA, 498 bp, Homo sapiens
atcagtaatctaaggagctcagactacaactagatcagcaatgtgaatatggacttacacactcaaccctgacaaagtctatatgacagagtaggtgcaatgcagccatttcagccattcacatacccagtgggggtctttgcaagatcagttcagatgtggtcatcaaaaactatggaaagactggaggaaagaacaacaaattcaactaaggcctggccctgccctgccctgccctgccctgggatgggagagggctttcccctctactctttcctttcttttcattttgtagtgcttttcactccatcaagtcattyttcctttcaggttggggagtgcctgataaagaaagcattataaggctggattgccaaagcactgaatttttaaaccctctaaataggacattagttcatagcttgaatgttttgaaatctgatcaacgtgccgtttctcaatacattaagcaaagcaagcaaaattagtctgctttat

SEQ ID NO: 654393 - DNA, 560 bp, Homo sapiens
aagaacagaattttctcactggtattttaggtcacatgactaccaaaccagagacagcattgcccagcccaccttggagctagatgtagacagtsattaagttttcaccagtggaatcaaagtgtggcaggcctggtcttactaatgcaggcctccataacaactgattcagcactgactgagtggttaagttaaatattaaaagctgatagagccagtgcccttacacaaaggctggaatgtaacaaaagcccaccaagagttttgcccacacctttcctgggccttacacgataactaagataacaagacaatgaaggaattcttaacagggcccgtttagaattaaacgagttttactggggttttgaaaaaactctccagacttccacgaacaagtttactgggggtctgaaggaactccccaaacctccataatttagcagaagacaagataagggtaatcaccccagcacctggacacatttaggttaagtaaatttactaaggatccagaaggaggtcttcaggactcagatcttggttatagattaaaagaa

SEQ ID NO: 654394 - DNA, 503 bp, Homo sapiens
ataagacaatgcaagaaactagaatgaaaaaccagattaatggggtatttggtatatttcccaaaaggtatttaactcataatagggaacaattagttmtaggaaaacatttctaattctgccttacaaatcttaacaacaaaactttaaaggatcaaattatttccaggtaacataaaaacaacccagaacagaattcaaggatattaattgaaatacaaaaatatgcagtgccccacaaagtaaaatgtaaagtgtccaacatctaatcaaaaattttcatgaggcaaagaagcaagaaatacaactcatgagataaattagtaaaattgaagctgacttggaactgacagagatgttagaattagcagacaaggacactgaaacaattattataactgtgttatgtatgttcaaaacattaagaagagacatagaagacattaaaattacccaaattgagctactagagatgaaaattacgaagtgtgagatgaaaaata

SEQ ID NO: 654395 - DNA, 503 bp, Homo sapiens
ataagacaatgcaagaaactagaatgaaaaaccagattaatggggtatttggtatatttcccaaaaggtatttaactcataatagggaacaattagttataggaaaacatttctaattctgccttacaaatcttaacaacaaaactttaaaggatcaaattatttccaggtaacataaaaacaacccagaacagaattcaaggatattaattgaaatacaaaaatatrcagtgccccacaaagtaaaatgtaaagtgtccaacatctaatcaaaaattttcatgaggcaaagaagcaagaaatacaactcatgagataaattagtaaaattgaagctgacttggaactgacagagatgttagaattagcagacaaggacactgaaacaattattataactgtgttatgtatgttcaaaacattaagaagagacatagaagacattaaaattacccaaattgagctactagagatgaaaattacgaagtgtgagatgaaaaata

SEQ ID NO: 654396 - DNA, 503 bp, Homo sapiens
ataagacaatgcaagaaactagaatgaaaaaccagattaatggggtatttggtatatttcccaaaaggtatttaactcataatagggaacaattagttataggaaaacatttctaattctgccttacaaatcttaacaacaaaactttaaaggatcaaattatttccaggtaacataaaaacaacccagaacagaattcaaggatattaattgaaatacaaaaatatgcagtgccccacaaagtaaaatgtaaagtgyccaacatctaatcaaaaattttcatgaggcaaagaagcaagaaatacaactcatgagataaattagtaaaattgaagctgacttggaactgacagagatgttagaattagcagacaaggacactgaaacaattattataactgtgttatgtatgttcaaaacattaagaagagacatagaagacattaaaattacccaaattgagctactagagatgaaaattacgaagtgtgagatgaaaaata

SEQ ID NO: 654397 - DNA, 588 bp, Homo sapiens
ctaaaacccacccaaaccaagatggtgatgagagtgacctctggacttcatcacagctgcactcctaycagcgccttgacagtttacaaatgcccatggcaacatcaggaagtagccctatatggtctaaaagggggaagtgtgaataatccaccccaataaataaccatgaaaatgggcaactagtggcccccagggctgctttgtctatagagtagccattctttaattcctttactttgttaataaacttgctttcactttgcactgtggacttgccctgaattctttcttaagtaagatccaaaaactctctcttagggtctggatccaaatccctttctggtaacagcatcatatacaaagaaatattgtcattatcttggaatacatgaattctgaaaatcaacatctacatatattattttacttaacataaacttataaaacatggaatatagcgctcaagtaacttagaagaaatccataagtcagtaaaagggaatctcagagaaacaactgtatgtgtgtgtgtgtgtgtgtgtgtatatatatatgtattgttttctcattaaatgtttattttat

SEQ ID NO: 654398 - DNA, 588 bp, Homo sapiens
ctaaaacccacccaaaccaagatggtgatgagagtgacctctggacttcatcacagctgcactcctaccagcgccttgacagtttacaaatgcccatggcaacatcaggaagtagccctatatggtctaaaagggggaagtgtgaataatccaccccaataaataaccatgaaaatgggcaactagtgkcccccagggctgctttgtctatagagtagccattctttaattcctttactttgttaataaacttgctttcactttgcactgtggacttgccctgaattctttcttaagtaagatccaaaaactctctcttagggtctggatccaaatccctttctggtaacagcatcatatacaaagaaatattgtcattatcttggaatacatgaattctgaaaatcaacatctacatatattattttacttaacataaacttataaaacatggaatatagcgctcaagtaacttagaagaaatccataagtcagtaaaagggaatctcagagaaacaactgtatgtgtgtgtgtgtgtgtgtgtgtatatatatatgtattgttttctcattaaatgtttattttat

SEQ ID NO: 654399 - DNA, 588 bp, Homo sapiens
ctaaaacccacccaaaccaagatggtgatgagagtgacctctggacttcatcacagctgcactcctaccagcgccttgacagtttacaaatgcccatggcaacatcaggaagtagccctatatggtctaaaagggggaagtgtgaataatccaccccaataaataaccatgaaaatgggcaactagtggcccccagggctgctttgtctatagagtagccattctttaattcctttactttgttaataaacttgytttcactttgcactgtggacttgccctgaattctttcttaagtaagatccaaaaactctctcttagggtctggatccaaatccctttctggtaacagcatcatatacaaagaaatattgtcattatcttggaatacatgaattctgaaaatcaacatctacatatattattttacttaacataaacttataaaacatggaatatagcgctcaagtaacttagaagaaatccataagtcagtaaaagggaatctcagagaaacaactgtatgtgtgtgtgtgtgtgtgtgtgtatatatatatgtattgttttctcattaaatgtttattttat

SEQ ID NO: 654400 - DNA, 588 bp, Homo sapiens
ctaaaacccacccaaaccaagatggtgatgagagtgacctctggacttcatcacagctgcactcctaccagcgccttgacagtttacaaatgcccatggcaacatcaggaagtagccctatatggtctaaaagggggaagtgtgaataatccaccccaataaataaccatgaaaatgggcaactagtggcccccagggctgctttgtctatagagtagccattctttaattcctttactttgttaataaacttgctttcactttgcactgtggacttgccctgaattctttcttaagtaagatccaaaaactctctcttagggtctggatccaaatccctttctggtaacagcatcatatacaaagaaatattgtcattatcttggaatacatgaattctgaaaatcaacatctacatatattattttacttaacataaacttataaaacatggaatatagcgctcaagtaacttagaagaaatccataagtcagtaaaagggaatctcagagaaacaactgtatgtgtgtgtgtgtgtgtgtgtrtatatatatatgtattgttttctcattaaatgtttattttat

SEQ ID NO: 654401 - DNA, 502 bp, Homo sapiens
ggattcacagacccattaatgaacactttgcaccaaaatagttaggtcccttgctcctggcacctgtcctggtgagaaagggaagcacagttgcccgctgcctggcctcacctcctgcctcagaagtcagagaacttargaagaaagtgcagtgagccatgtagatgcttcataagtaaactaatgagcataggctaaaatatttcattttctatttgaataaatgtatgcggtacaagggcaattttgttacatgcatagattgcctagtggttaagtcagggctctagggtacccatcacccaaattatgtacattgtacccataagtaatttttcatcatccaccccctctcactctctcacctttccaaatctccatcgtctatcattcctctctctacgtccatgtgaacacattttttaacacccacttaggagtgagaacacacgatatttgatgttctgtgtctggcttgtttcacttcggataatgacttcca

SEQ ID NO: 654402 - DNA, 594 bp, Homo sapiens
aattttggttcaaagattctccatgagcctgaccaaatccttgttggagccatgtttcctatacaatcccactaccccaatgagactacctaacctagtytgaagtgtttcccacccagtcttccttctttctccctctcacgcacaggggacagacctccatcacagtctgaaggctctccttgctgtctctggcttacccctcaacttctgtttttcacagatgttttttctaacaactcttgtacttctaatctcacttgataattgcttctaggagaatataaacatacacagcatcaaagatagggtgcaatccttactacacttaaagcttgttattagataaatatacagaattcaaaaacaactccaactagaacgcatttggagaggaggaggtaacctttttcctattagctctcagcttgacctcaacagaggctaaagtagattgagtttgccttgaaggcagaggcacagtaggtagcacttggtaaatgttaaccactgtcataactgttgaaaaaattattggcaacaagagcatcattaacaatagcaatgtcgctattaaagccaatggcattagta

SEQ ID NO: 654403 - DNA, 424 bp, Homo sapiens
tcctgagttaaaattcaagcttctgatgtcagattctacctttttcctcctttttaaatacaaacctgacattccttagggcaactagcatagggcttagaaaatgatgggtattttgaaaagtcctgaaaaataatggagagagagacagtctgagggcaagaggaaaaaaaaattaatggataagcaattggataattcagtgaactaatgactttattggttctggtagaaatctaccacaagatcagggaaactttcttcttctcattttcactatcatttttatcaacattatttactrcataaagcatctgccacagtaaagtctgtgtccatttaattgacattataatttttcttaattataaaaatctcacacacacacacacacacacacacttcaatgaaactgagtaaatta

SEQ ID NO: 654404 - DNA, 424 bp, Homo sapiens
gtagggagattaaacatctccttcatacctgttgtcttcacatgttattaagagtacttgctttcatctcaaaagtatcctarcatggatagtaacttataggatcacctatgtctgagttaccaatgaaggaggccctcactcactcttcaatctcagtaactcttctgtcatatttgtctcagtggaaaattttagtatagaaaacaagttttaatgttgtagcaatacatttttaaaccctgactccttcacttattcactatgtgacctttgaaattttgctttctactccatatattttttcttcttctgtataataggaaacaagtgttttccttacaggataaataaagaagttcaaaacaaaaagtttctggtgtaattaatatggtgcctagcacaatgaacaggaaaccattcc

SEQ ID NO: 654405 - DNA, 539 bp, Homo sapiens
ccaacccaccaccccacacagaattatactagttgacctagaagtttaccttcatctccatcaatcactgagatctcctcatccatcatcatcaagggatcaccctagagaaggagatccacccaataggatggagcggggagggaaagggggggaagttggcactctgaaatcactttcttgtgtgtgtccttctatggcaccaagggatcaagaaaaacttctaaagaaatatatccccacaaaaacttggaaacaatcaactaaaagaacaagaaagtagaacctgaaaggtcagttcctattaaygactcaaagataatagaagtcaggaatttattagtcaaataatatctttcagtgtccagctcctccataaagttatccctgatctccccctactggcattacagtcctttccattaatattttctattctcaaatggtataattcattttccattttgtattataaattaaccaatatatttcaagattcagagaatggttgaagacttaaaactatttagtaatagaga

SEQ ID NO: 654406 - DNA, 523 bp, Homo sapiens
gaattcttgcacttgggcccgacctcgagagcgaaatttttcaacaatggattgttccttggctgttgtagtatttaatagctctaggatctcctgactgacctgtgacagaagtagccttggacttaaaatgtcttatagatcaaaytggctcttagaccaactccgcaaattctttttgacattaatgtcttctaagagataaatcaactttttttttttttttttttttaagagatgggatcttgctgtcacccaggccagagtgtagttgtgtaatcataactcactgtttctcccactgaactcccaggctcaagtgatcctcccagctcagccttcaattgtagctgggaatataggtgcgtgacaccatgccagctaatgttttaattactttactttctatagggatagggtctatgttgcccaggccggtcttgaactcctcgcctcaggtgatcctcgcgccttggcctcccaaagtgttgagattacaggaatgagccattgtgcctagacc

SEQ ID NO: 654407 - DNA, 576 bp, Homo sapiens
aatttttgactgcaatagaagagtggtacaataaaatatttatttgagctaaattattttatcctaaaatagcctgagcttactgtgtaatagtattcaagtgctaggaattatgggacatttcataaaatttccaacatactgcactatttgtttttatatactgctatatgaaggtatgccttacatttccatataaaataaatatatttctaaaattcaaaaaaagaagtatacaataaatattagctattaccattaccataatataatttttactcttaaaatttgaattcctcttgctatctttatctctgagtctttgtctctgttttgcctagctctatcttttgcctaatgttgttcaattttctcatcccgttgaataagaaatgaatacataaaccattaatctgccatkcaatttataatggatatttctggcaaaaataaccagcacaaattaaaactgaaaatggctatgactgtatgtggcaaaaatgtgatattgactaaaagtggagcaaatcttgaaatgcagatctgcaaaatttgacccaggaaaattggatctca

SEQ ID NO: 654408 - DNA, 527 bp, Homo sapiens
tgcatgtttgtttgtttatgcactgagtgttgtcatcagtttaaaacaatagattacaagggtatttgcaagccttatggtaacctcaaataaaaaacaaacatacaatggatacataaaaattaaaaagaaaaaaattaaatcataccaccagagacartaaccttccctaaaaggaagacagaaaggatggaaataaggaagagaagatgaaaaagcaatcaaaaaacaaattttaaaacggcaggaataagtccttacttattaataataacattggatgtaaatggactaacctctccaatcaaaagacataaagtggttgaatggattaataaaaaaaaaccaaatgatctgttgcctgtaagaaacatctataaagattcaaatagactgacaactaaggatgaaaaaagatattccatgacaaaggaaactacaaaagagcaggagtagctatatttatgtcagccaaaatatcagacaaaatagatttcaagataaaaactgtaagtagagacaaagaa

SEQ ID NO: 654409 - DNA, 546 bp, Homo sapiens
ttttataacgataaaagggctcatctgtctggaaatataataaacgtacaagcacatgacaacagagcccccaaaatacatgaaacaaaacctggcagaattgacaggagaaatagacaacctaataataacagagacttcaataggccccttaaataatgaagtctaaaaagtaaaaaaaataaataaatttcaaaaaatgtttatwaaataagaatataaagaaagaaaatatttttgtacagctgtacaatgtgtttgtgtttcaagctaagtgttattacataagagtcaaaaagtttaaaaattaaaaagtttttaaagcaaaaaaagttacagtaagctaaggttagtttattactgaaggtaaaatttttaaaataattttagtgtagcctaagtgtatagcgtttataaagtgtcccaggccttcacattcacattcactcaccgcttcctcactgaatcacccagagcaacttccagtcctttaaaaagctccattcatggtaagtaccctatacaataaagtgtatcattttctat

SEQ ID NO: 654410 - DNA, 520 bp, Homo sapiens
aggatgtttattatttaaataaagatacatgttcatgataaaatcataaatattatccagattctatgtaagcaaacattaggagtgtgtcataatggtgatggtgggctacacattatcaattagaggaggagacattgttgccataaagtccttccacmtttccccccgaaaaggattgacaagtaaatgtccaaaaaatgttccagtattctatgctagtatagtctgtaaagaaaaaaatatttattttacttttttaaattataattacctcaacacagtgtcacttatacttttgtgaaagctcacaatttgtgatactgacactctcatgtgcactgtctctgcaaagaggtattttagatatcttgtccccaaggaagacaatgggacactgcagcttaattgcctatgaagcccttgctccccacctctagtttttcgattattttactttatctaatgttttcacatttcctctgcaatctgtgatggagatgtctttggtatgtgttct

SEQ ID NO: 654411 - DNA, 520 bp, Homo sapiens
aggatgtttattatttaaataaagatacatgttcatgataaaatcataaatattatccagattctatgtaagcaaacattaggagtgtgtcataatggtgatggtgggctacacattatcaattagaggaggagacattgttgccataaagtccttccacctttccccccgaaaaggattgacaagtaaatgtccaaaaaatgttccagtattctatgctagtatagtctgtaaagaaaaaaatatttattttacttwtttaaattataattacctcaacacagtgtcacttatacttttgtgaaagctcacaatttgtgatactgacactctcatgtgcactgtctctgcaaagaggtattttagatatcttgtccccaaggaagacaatgggacactgcagcttaattgcctatgaagcccttgctccccacctctagtttttcgattattttactttatctaatgttttcacatttcctctgcaatctgtgatggagatgtctttggtatgtgttct

SEQ ID NO: 654412 - DNA, 520 bp, Homo sapiens
aggatgtttattatttaaataaagatacatgttcatgataaaatcataaatattatccagattctatgtaagcaaacattaggagtgtgtcataatggtgatggtgggctacacattatcaattagaggaggagacattgttgccataaagtccttccacctttccccccgaaaaggattgacaagtaaatgtccaaaaaatgttccagtattctatgctagtatagtctgtaaagaaaaaaatatttattttacttttttaaattataattacctcaacacagtgtcacttatacttttgtgaaagctcacaatttgtgatactgacactctcatgtgcactgtctctgcaaagaggtattttagatatcttgtccccaaggaagacaatgggacactgcagcttaattgcctatgaagcccttgctccccacctctagtttttcgattattttactttatctaatgttttcacatttcctctgcaatctgtsatggagatgtctttggtatgtgttct

SEQ ID NO: 654413 - DNA, 603 bp, Homo sapiens
ttataccacctaggtttttgtaagtacgtgctatggtgttgacacaatgacgaaattgcctaaaaacacatttttcagaatgtattcctattgtaaagcaatgcatgactatgtatacacacacacacacacacacacacacacacacaaacagttcagctcacttatagataaagctatttttcaaattacaaaagaaagcatcatatattctactcaaatttttaccttctctactgagagatcatgtgaagaggaaagctaaaacaccaagattgagatgaactgagatatactctgacaagtcaggttggggaacatgggcaagccatttactgtacttatctgatttttaatttcacttgtaaaataatatttaaaattcccctgaatgttgttaattctaatttttctgtaattttatttaagtgtaactatttagaaacatatttagtatatgaggcaaattacctattgtttcattcttttaatgttataatactaaatatatatatttatatttaggaaatgaatttatggattsagctgttttaattttttagtaatattttataattggtcacttacgacttgtaagtctat

SEQ ID NO: 654414 - DNA, 590 bp, Homo sapiens
tgattatgtatgaataagagtacagaaaacaatgtatctggacatacactataactctgggatatttctattctaagaaycaattattgcaaagtcaatgagtcccctactattttaatgagttcagttgatattcatcagaacttaaaatacatagtaatagtaatgattaattgttagggttattgaggcataagtgtataataaaccagaactcacttaggtgccatctgcgatagtacaaacttcagtagaacatttagtacaacatagactaattttagactcatttagattacagacatattcattatagcaaactaatttgtcccaagtgactgaaaaataatcaacatcatttaagaattaatatatagaatatactgttacacatgtatttatcaatctaaagtatgattctaagaatttgaatgtaataaaacataactatttaaaatttcatgcaaattaattgagtctttgctatttcctagaactttctaattgtttcaaggttattctttcaaacatcaattatctatataccatacagccacaaaggtctacactagttttgtgattatcagata

SEQ ID NO: 654415 - DNA, 590 bp, Homo sapiens
tgattatgtatgaataagagtacagaaaacaatgtatctggacatacactataactctgggatatttctattctaagaatcaattattgcaaagtcaatgagtcccctactattttaatgagttcagttgatattcatcagaacttaaaatacatagtaatagtaatgattaattgttasggttattgaggcataagtgtataataaaccagaactcacttaggtgccatctgcgatagtacaaacttcagtagaacatttagtacaacatagactaattttagactcatttagattacagacatattcattatagcaaactaatttgtcccaagtgactgaaaaataatcaacatcatttaagaattaatatatagaatatactgttacacatgtatttatcaatctaaagtatgattctaagaatttgaatgtaataaaacataactatttaaaatttcatgcaaattaattgagtctttgctatttcctagaactttctaattgtttcaaggttattctttcaaacatcaattatctatataccatacagccacaaaggtctacactagttttgtgattatcagata

SEQ ID NO: 654416 - DNA, 525 bp, Homo sapiens
tagtatttttacccacacaaaaagggacaaaatgaaaacattacaagttacattaaaatgtatacgctacactgtaaaataaccaggaatacaatttccacccaattaagtagcacagaatacattctaatgactgcwtttatggaagataccagcaatacttagtaaacaaactgcatgttaattcaccaggtgactgggaacaccagggtgataaagtttctttaagtgcactgaatatgaaaacaaacaaaaaacaaaagtgggcagcaaacaaagcctgtattctttgtaatgaaccttataattaccaaaaaggctaattgttaatggagtttaaacagtctgctatctaaaatccttatggagtgaaatccagttaagttttgttaagacaataatgctatgtaaatcaagcagaaataaagaagaataacattataacattttctacctcctgggaggaaaacacaatgtgctgacagtgggcaaagaggtggtttaattgagtgggggaagaaagca

SEQ ID NO: 654417 - DNA, 525 bp, Homo sapiens
tagtatttttacccacacaaaaagggacaaaatgaaaacattacaagttacattaaaatgtatacgctacactgtaaaataaccaggaatacaatttccacccaattaagtagcacagaatacattctaatgactgcatttatggaagataccagcaayacttagtaaacaaactgcatgttaattcaccaggtgactgggaacaccagggtgataaagtttctttaagtgcactgaatatgaaaacaaacaaaaaacaaaagtgggcagcaaacaaagcctgtattctttgtaatgaaccttataattaccaaaaaggctaattgttaatggagtttaaacagtctgctatctaaaatccttatggagtgaaatccagttaagttttgttaagacaataatgctatgtaaatcaagcagaaataaagaagaataacattataacattttctacctcctgggaggaaaacacaatgtgctgacagtgggcaaagaggtggtttaattgagtgggggaagaaagca

SEQ ID NO: 654418 - DNA, 525 bp, Homo sapiens
tagtatttttacccacacaaaaagggacaaaatgaaaacattacaagttacattaaaatgtatacgctacactgtaaaataaccaggaatacaatttccacccaattaagtagcacagaatacattctaatgactgcatttatggaagataccagcaatacttagtaaacaaactgcatgttaattcaccaggtgactgggaacaccagggtgataaagtttctttaagtgcactgaatatgaaaacaaacaaaaaacaaaagtgggcagcaaacaaagcctgtattctttgtaatgaaccttataattaccaaaaaggctaattgttaatggagtttaaacagtctgctatctaaaatccttatggagtgaaatccagttaagttttgttaagacaataatgctatgtaaatcaagcagaaataaaraagaataacattataacattttctacctcctgggaggaaaacacaatgtgctgacagtgggcaaagaggtggtttaattgagtgggggaagaaagca

SEQ ID NO: 654419 - DNA, 595 bp, Homo sapiens
atgtgttttccttgggcatggacataaagtaaacacttgaactggtggtcaactgtaattttcttccagagccagcaattctggcaacactacactttcgatttatagcaaagcacacaagtagcagtgactttgaaaagaaaggataaaagaatcaatgaaaaagttactagttcttaaagatctgtgtctcattcgaggaacttaaggacctctccctcaatctaaaagcagaatgcactcttgctgcttactcccagcatgccctcagctgttcctawttactcctggaggaaggcaatgatatttgagtctgggttatcaacaatcctttaattttttatttttatttttttccctgggatttcgaaccaatatactcctagcctgaacaacatagaacatttcctttccattttggtagaaattattttttaatgtaaattatattgtgttctatttgtttccaatgtcttgaaaagttcaatcacttctccaaattctccgaataaacataagaaaatatctctccccagcactacccggtcccccagtatcaccatcctaaaggcacttccacttcctctatcatcag

SEQ ID NO: 654420 - DNA, 629 bp, Homo sapiens
accactgcaacaacaatctgaaaaaaaaaggaccccgcaaactcaaatctagtttcccttctctcaatctccttccctaaagaagaagagttctcactaagagggtaggaggccagactggtctcattataaagagatcaagaagaaggttatgggactggaggagcaggagagaaatactcctgggggttggggttttcacctgcacggagctctaagactcctcctgtgctcaagaaaattgaggaatggaaggatctaggatgaaaagtgctagtataggttttgacttggctctttcttaattgccagtaagaaatgagatacttttataattatctgttgatctgagtctcttcaaacaaaattccacctagaattgccttgataattcatttggattatttatgtcatggctccattatctgaggccatgatctatagaactaattctaaaaataaraaaaggctatataccttttgaagtatgtgatagactataaagtcaagtagacaagatggcaacatttgaaaaaaatcactaacattaccaaacaggatgaaaaaagcttaaaatgttatgctatcttttaaaaaatgattcaataacacaactgagtgaagaataa

SEQ ID NO: 654421 - DNA, 417 bp, Homo sapiens
acatagatcccagatctgtcattcatttccaaaataaacagttttgcatgatcagataaaatagtgaaatccttaaatatattatatttagtaaacaaattctattattattattggtrtttatacatgtgaggtgaaatctaccccttaaccctttttagtatatgtacattgtggtttgttttattggtattagacatcaaaaggaggcattttatctaagataatgtttctattcatttattcaacatatttattgaacacatatcacatgccagttattggggatgttccaaacacaagcaatgtgttagttaacacaaggtacaaaagtcctttccctcaatgaacttatattcaagtgagaaaagataggtaattagcaagagtttttaaaactataatatttgtaatgac

SEQ ID NO: 654422 - DNA, 598 bp, Homo sapiens
taaagattttgggcagaggagtgacatatattttaaaaggattctggttgtcatgttcagaacaaaccgaaggggagaaagcaaagaacgaggacgactatttaagatgctattgaaataagccaagtgagagaagagagtagtttggactgtggtggtwttgggggttgggggggataaaaggtggttgttttccagatatattttgaaggcagacgtatcaggattgaaaaagaacactcaaggataatatcaagactttcagactgaggaacagaaaggatggagttgcaattaactgagatggaaagactgtgagagcagcaggctttggggaaagggagagaaggaggaaggtaaagcagcccaaactctaatctagacttcctaaatccaaaccttgtgttctttactacagcaagtcagcacactatttttagtttattgaacacctgtactcttgcaaggactatgctttacataatttgccttattaaattcttttaagaagcctatgatgatgaaaaaaacaaaaaggtaaacacttacacaatacttatcatgtgtcctgagtgttatatctctctctctcacacac

SEQ ID NO: 654423 - DNA, 570 bp, Homo sapiens
tcttgttagcaacttagacaattcagtatcagtttagaaaacgtacattctatcttggttcataatggccaaatacgttgccatcagaaatacatagagagtttcagctaagccctcttagagatgtctgatgcttttaaatatctttaatcagaatgaaagttgccattccatggataatgcatataagctcactttgttttactgcattcaggttgatgaggggtgkgagggaaggtttcaggatcacatctgtatgcttccatcttatttttaccataactctcattcttctttcctcctggaaattccatgtatcttaacaaacaacagtaagcctatgagtcatcatcatacttaccttgcttttgctgagtatggagctttgcactaggatttctctcctgccctatttcccaatttaaagaacattccttagtccttccttcagatgtctgagaatcaccttaaacgtggctttgcgtttaaattaggtaacttagtgtcttataagaaagaaacatgaaaatccagaaatcaaattgaatggtttttaaaaaatacttagtc

SEQ ID NO: 654424 - DNA, 438 bp, Homo sapiens
gaaagttagactttcaggaatacagatcagaaaactttgtttcataattttctgagttaatatgtatataccataaagtgaaaaaytatataatgtggctatgataccttttagtaataatgcataatacagttactgaattatgtttaaggatttgaaattgttgaaacttggattttcagtaaaaaattaatagccacttaaactatttgttgtctatataacttatttaggaaacatctgttgatagcttgcaatatgaaagcaatttgtttttcacaaaatgtgtaaggcatagcccttgacttaaacaacatggcatgtggtagagagattcaaataaagtgataagggatttccgaggattggtttgggtttatggtaactggggaagatatcttggaagaggtagcatttaaactgagatatgcagcatgg

SEQ ID NO: 654425 - DNA, 505 bp, Homo sapiens
tctcatgggtattttaaactcttatttgccaaacaactttggttcttccctgtccarctggcttctcatcttttccattatttcagtaaatgtgacttctatcccccaagaggctcacctccgcctccctcacctcttatactggtcaggttttttcacttgtaattggcagaaaccaaactcaaactagctaaatagaaaagagcactgtatgattcatataactgggtaaaattctggggtagttcttgtagtcaaatggaatactgtcaaaaccacagcaaccaggagactctaacactcgggatttgtctcaatttctctccctttctcttctctctgcatggctacctcctcgcctacttcttgtgggccttctccaaacaccctcatacaagatcggcagttctcaagtcgcagccttaaaacattctacagaagaaggaatcttctgctgtagcttcataaggaaaaccccaaaaaaggattctgactgacccagctt

SEQ ID NO: 654426 - DNA, 459 bp, Homo sapiens
catgtcatttataatagtcctctttttctctccttcttcttcttattatctattttagactcagatgcagattcctcttcctcccaacccacactctattcagatctgttcttcccaacrtgaccttgactttcatcttaatgttttaatttgaagcatctgccccgggaaagctattttctaaatttctggttcccagtctgctgacttcctagttcctccgtctcaaggacaccagaacataggatgagtaggcaggtaaaatgttcagttgtaaaaagcagggactggaaattcatgctttgtgttctttaccatggacttgttccttgctgtgaatgtcaggagagtctgtgggaccatatttgtagttttgctcttttataaaatccaatatgtattatgatcataagtatatgaacattcatttatcaccttaaattatatgtataggagaac

SEQ ID NO: 654427 - DNA, 459 bp, Homo sapiens
catgtcatttataatagtcctctttttctctccttcttcttcttattatctattttagactcagatgcagattcctcttcctcccaacccacactctattcagatctgttcttcccaacgtgaccttgactttcatcttaatgytttaatttgaagcatctgccccgggaaagctattttctaaatttctggttcccagtctgctgacttcctagttcctccgtctcaaggacaccagaacataggatgagtaggcaggtaaaatgttcagttgtaaaaagcagggactggaaattcatgctttgtgttctttaccatggacttgttccttgctgtgaatgtcaggagagtctgtgggaccatatttgtagttttgctcttttataaaatccaatatgtattatgatcataagtatatgaacattcatttatcaccttaaattatatgtataggagaac

SEQ ID NO: 654428 - DNA, 459 bp, Homo sapiens
catgtcatttataatagtcctctttttctctccttcttcttcttattatctattttagactcagatgcagattcctcttcctcccaacccacactctattcagatctgttcttcccaacgtgaccttgactttcatcttaatgttttaatttgaagcatctgccccgggaaagctattttctaaatttctsgttcccagtctgctgacttcctagttcctccgtctcaaggacaccagaacataggatgagtaggcaggtaaaatgttcagttgtaaaaagcagggactggaaattcatgctttgtgttctttaccatggacttgttccttgctgtgaatgtcaggagagtctgtgggaccatatttgtagttttgctcttttataaaatccaatatgtattatgatcataagtatatgaacattcatttatcaccttaaattatatgtataggagaac

SEQ ID NO: 654429 - DNA, 540 bp, Homo sapiens
caattggcttccattgggccccacccccaacattgggattacaattcaacatgagatttggatggggacacatatccaaactcattccaggcctggcccctccaaatctcatgtccttctcacattgcaaaacacaatcatgcctttccaatagtccccccaaatcttgactcattccagcattaactcaaaagttcaaagtccaaagtgtcatctgagacaaggcwagtcccttctgtctatgagcctataaaatcaaaaacaagtgagttacttccaagatacaatggggcataggcattgggtaaatactcccattccaaaagaaagaaattggccaaaagaaaggggctacaggccccatgcaagtctgaaactcagcagggaagtcattaaattgtaaagctccaaaataattttccttgattccatgtctcacatccagggcacactggtgtcaggggtgagctcccaaggccttgggcagttccactcctgtagctttgcagggttcagtccctacagctgctctcattggct

SEQ ID NO: 654430 - DNA, 617 bp, Homo sapiens
atcacagagtatacatacacaaacctagatggtatagcctactacatacctgggctacaaacctgcayagtatattactatactgaacactttagtcaatttaatacaatactatttgtgtatctaaacatttctaaacatagaaaaggtacagtaaaaatatgacataaaaaatagaaaacgatacacctctacggggcagttaccgtgaatggagcttgcaggactggaagttattctgagtgagtgaagagtaaatgtgaagacctaggacagtactgtacactactgtagacttcataaacactgtaaatttaggctacactaaatttatacaagaatatttttatttcttcaaaaataaattaaccttagtttactggaacttattttcttttaaaaatctttaattttttacaacttgttgactcttttgtaataacacatcttaaaaccaaacacactgtacagctgtacaaaaatattttctttctttatatctttattagcttttttctaattttctttttcttttttttttaaaaaaacttgtttgttgaaaactaagacacacagacattagcctatacctacacagggtcaggatcatcaatatc

SEQ ID NO: 654431 - DNA, 428 bp, Homo sapiens
atatactatgttttgtcctgtacatatgtatgatcaactttaatttaagagggcagagcaagatggctgaatagaagcctccactgatcgcttcccctgcaggaacrtcaaaatttaacaactaactacacacacacaaaagcactgtcataagaaccaaaaatcaggtgagcaatccagtacctgtttgtaacttcatatcattgaaagaggcactgagaacatgagaatgagtagggagagggagacagagaatgaggatgaatactgtgttcctgagttgctaattcagtgtgacttgttgaatgatagggtatttttttttatgattgggtatttttaatttaaaagaacttaatgggcagaggagttaatttcactcttttgtatttctttcaatcatttattgtctcttcctttgtcatttt

SEQ ID NO: 654432 - DNA, 428 bp, Homo sapiens
atatactatgttttgtcctgtacatatgtatgatcaactttaatttaagagggcagagcaagatggctgaatagaagcctccactgatcgcttcccctgcaggaacgtcaaaatttaacaactaactacacacacacaaaagcactgtcataagaaccaaaaatcaggtgagcaatccagtacctgkttgtaacttcatatcattgaaagaggcactgagaacatgagaatgagtagggagagggagacagagaatgaggatgaatactgtgttcctgagttgctaattcagtgtgacttgttgaatgatagggtatttttttttatgattgggtatttttaatttaaaagaacttaatgggcagaggagttaatttcactcttttgtatttctttcaatcatttattgtctcttcctttgtcatttt

SEQ ID NO: 654433 - DNA, 428 bp, Homo sapiens
atatactatgttttgtcctgtacatatgtatgatcaactttaatttaagagggcagagcaagatggctgaatagaagcctccactgatcgcttcccctgcaggaacgtcaaaatttaacaactaactacacacacacaaaagcactgtcataagaaccaaaaatcaggtgagcaatccagtacctgtttgtaacttcatatcattgaaagaggcactgagaacatgagaatgagtagggagagggagacagagaatgaggatgaatactgtgttcctgarttgctaattcagtgtgacttgttgaatgatagggtatttttttttatgattgggtatttttaatttaaaagaacttaatgggcagaggagttaatttcactcttttgtatttctttcaatcatttattgtctcttcctttgtcatttt

SEQ ID NO: 654434 - DNA, 585 bp, Homo sapiens
caaaatgggcagagaaggaactagaagtggggcaggggtcaatttttatctcattgcagtcagttgatcaccttcattacctggaccttatatcactttttccacatgacatagacttcccttcatctcccttttccatgaaatacaaatgagcaaagaatgtgagtgctctgttgtctttctttttttwaaaaaaatatgggtacgttgcaggtatatttatatatttatggggtatactaaatattttgatacaggcatacagtgcataatcacatcagggtaaatgggatatacatgacctcaagcatttatattaaagttgcaaacattccaattatattcttttagctatttaaaaacatacaataagttattgttgattgtagtcactctgttgtgttatcaaatactagaccttgttcattctctctaactatatttttgtacccattaactatcctcactgtcccccacacctctgctgcccttcccagtctccagtaaccattcttctattctctatctccatgagtttaattgttttaatttttaccttccacaaataagtgagaacatgctaag

SEQ ID NO: 654435 - DNA, 585 bp, Homo sapiens
caaaatgggcagagaaggaactagaagtggggcaggggtcaatttttatctcattgcagtcagttgatcaccttcattacctggaccttatatcactttttccacatgacatagacttcccttcatctcccttttccatgaaatacaaatgagcaaagaatgtgagtgctctgttgtctttctttttttawaaaaaatatgggtacgttgcaggtatatttatatatttatggggtatactaaatattttgatacaggcatacagtgcataatcacatcagggtaaatgggatatacatgacctcaagcatttatattaaagttgcaaacattccaattatattcttttagctatttaaaaacatacaataagttattgttgattgtagtcactctgttgtgttatcaaatactagaccttgttcattctctctaactatatttttgtacccattaactatcctcactgtcccccacacctctgctgcccttcccagtctccagtaaccattcttctattctctatctccatgagtttaattgttttaatttttaccttccacaaataagtgagaacatgctaag

SEQ ID NO: 654436 - DNA, 534 bp, Homo sapiens
accttttcagtctctgtccctaggcagctctcagtctgttagaaaagtaagatatgaaagtgaataattggcattgttaggaaatgattatttggagagactggagtcttcctgaaaaatatggcctctgaacttggctttgtaagtagtcagattgaagaagacaccaggaaatggaaagatattccatgttcatgaattggaaaaatcgacattgttaaaatgttcacactacccaaagcaatctaccgattcaatccaatcgctatctaaataccaatgatattcttcacagaaatagaaaaaaattataaaatttatrtggaaccacaacagaactagactagccaaaactatcttaagtgaaaagaacaaaaccagaggattcacattacctgactttaaattatactacagagtggtagtaaccaaaatagcacggtactggcataaaaacagacacacagaccaatgaaacagaagagagaaccaagaaacaaaagtccacacacctacagtgaacttattttcaac

SEQ ID NO: 654437 - DNA, 519 bp, Homo sapiens
ctgaccaggtgatacagaaatgaccaaccatttcttccataagcttactagtaaatggagaaggcatttttggtaaatactataatcttctcttgcattagattgattagatttttcctttttaaaatttctttaaagtgacaagtgtaaaaatagactagtgaggactaaattatttctactcagaatgattttatttsttcataactattctagaagaaagtgaaaaactttaagtatatatggagtttgatgcaatatgaaatgtatgagtgtggtattttagctatctggtgcaatataaggtcattactttggaagaaaaatttcatatccttataggtccccatgatagtcttttgcaccaatgaaagaatataaaacattagctcagcctcttggtttataatctgtgaagttttgagtatattgttgagttttaaaaacaaggaaacgtgaattataaagaaatcttaagtgttgcggttgaatgcaaaagttagttcatttgggggaagt

SEQ ID NO: 654438 - DNA, 498 bp, Homo sapiens
cagctagggaaaaaacagttctgaggcactaagctgaacctaataccttacatttgcagtactaagaatatttgctttacatatttgcatgctccagtgttgggtgcatatatatttgcatttgttatatcctcttattaaataaatccttatataattatgaagtgactttgcctctttttacagtattttagttaaaattcattttatctgttatggtcactcctgcttagttttggttttcatgtatgacgaatgtcttttttccatctcttcactttcactgtttgtttttaagaaygaggtgagtctcttgtaggcagcatgtagttgggcatttaaaaaatttatttagccactgtttttttttttttttttttttgagatggattctagctctgttgcccaggctggagtgcagtggtgcaatctcagctcactgcaacctccgcctcccgggttcaagcgattctcttgcctcagcctcccaagtagctg

SEQ ID NO: 654439 - DNA, 604 bp, Homo sapiens
tactgttaatgggctttcattattcagatgagtcatagtggcacagctttctcatgccagatatttttgcggagctgctgaaacttttcatgtaccttctaggtacagaaacaaacttggagtctttagcatatcctgtgttccaaagcttggaattgaacagccagctcccgtgtagaaacgtatccagcctattgactcttttgcacttctttctcacattaaacttcccattgcttcagctgttctaccagcccttgagggaggcagagtcatataatgggacagggaatcacttggaactcaggtctcggttgmagttctaacctggtagttaacatatgtgtgaattttggtatattcaccttctctgtgcttcaattttttcatatgtaatgtgctgagaaaatagaatttatgaaacagaaaacttgattcagtgttggctaaaaagaaaagaaaccacatttcacaaataatgctaatgaataaggtttaggaggaaataattttggaaatacaaataatgtgctgatgagataatgatagagacaggaggcagggaaattctgggcacaatagggctggtcccggacaagggccc

SEQ ID NO: 654440 - DNA, 491 bp, Homo sapiens
ttacaatatacatctttaagttatcataatgtaatattaacttttcacatattttagcacttcatagtataagaacagtatgttttcattcttacctcctgtcctttgtgctattattatcaagtgttttatttctacacaagttataaacawaatttatagatttttctttaaacagttatcacttaagtaaattttaaaatgagtaatatatcttatatttactcacatacttaccactttcagcactctttattccttgtgcacatttaaatttctatctggtataattttccaccagccagaagaactttctttaacattaattatggtgcaggtgtggtggcaatgaattctctgtctttatttgtttaaaaatatctttatttgccttaatttccagagtttttattttttaaactggcttaccaactttttttcctttagtgtatgaaaggtgttattctattttcttccaacttatattgttt

SEQ ID NO: 654441 - DNA, 561 bp, Homo sapiens
cttttgttccaaatccctggttgaacttgatgacttagacttgacaaatggatagctcctttggcccctttatagtgacagtaggaagagtaaaatatatttttcttaaagcaagagaagagccagcttaatctgcctgtaccaggatttttatggtggcaacgatactagccagaactctctcagatcctcctacctcaggtgtatgggagaaagacttagaagaaaaagagagaggaatggtgggattctctcagaagggtaatatgcaacctaagcaagcatgtataagaagacagtcagccatttttckggtcttcacttccttatcatgatgaatgccccactcattagaagaattgacaaaaaatctatttttttgtttgtttgaggaacactctcctctctttggaacaaattgatataaaatatttttggacacagatggcaatagtagggtgaaacaaaatttgttttttggcaaatgggcatggtattttgttaaaacgttaaaattaatctagcttaaaattattatgctcttatcatatggcaacgatc

SEQ ID NO: 654442 - DNA, 483 bp, Homo sapiens
aataccatgttctcacttakaaatgggatccaaacatcaggtactcgtggacataaaaatggcaacaatagaaactggagactactagaggtggggcgagaggaaggggcaagggttgaaaaactgtggggtattacgctcagtacctgggtgatgggatcatttgtacttcaaatttcagcattttgcaatatacccatgtaagaaacctgcacacgtatcccttgaatctaaaataaaacttgaaacaaaataaaataaaaaataaaaatagaaaaaaatacattattgctaatttatcttaggtgtgattaaaacaaatgttttcccattttcttgaaattctggtcgaaattatatgatatctgatattttcttcactattcaggtcctctaccttccctcaaaattcttctataacaactaacactttgagtttagcttgtgtttgtcagaagcagggcctgggatgaagtagatgac

SEQ ID NO: 654443 - DNA, 603 bp, Homo sapiens
tatatattgtaactcttttaaacatattatccatagtttgaacaatttaaattcaaattccaaccattttttgtcaatgttcaattttgtttcatttaaaagttctgtgcattaattttagtgattatgggaaccttacaagaaggaaagcagaccaataatacatgctcacaaggtagattaaaatagtaaactgacatttcaaatgagctaaaatgtactaggaaaataatggaaactaactacagcttaaattaaaattagaatactcagagataagattattagaataagaaatgaacatttaaaaattgagtttaaaacttgaaaagaatatgaaataattataaccataataaagcaaaaggagaaagaaactcaagttaataaagagccagattattatttagtgcaacatgaactattaaaaaattgtttaaatcaaaacaaaayaaagaacaaaatgaaaaggccttgagaaaggatacatatacaatataagcaaagaagataacacatttgtatgacagggatcttcagaaaagaagaaacatcaatggatcaaaattcacactaaaacttgaaatttatttatttttgttt

SEQ ID NO: 654444 - DNA, 554 bp, Homo sapiens
gtttaagtgataagtggcaaatccacccagttagatgaagtttcatccctcctggagatatcctataattgaacaatagagatctggatgttgagaggtttgacaaatgataaaacctgggaacagacccacggacacacctcagtggaaaaaaaaaattatcaagacattttatgagctatrggaagacttgaagacatttcaaagtattagagagagacaagttattgagaaaataatcattaattttccccctttttaccttttctgtgtaaccctgttttcttctacctccctgtctttcttttttccctgttctctctttctacttcttaaaacatgcccattttcatcacaggaatgcttgagtttagaggactaaggtgatcttctaagctctgggattccaaattcctcaaaattgaagtccttttttataagacaataagtggtgtctatgctgaacatttgaaacaactatcacatatgattcatttgtccttcagctaaaattcatcttatatgtgtctaaaacaacgtatcctaaaatggaa

SEQ ID NO: 654445 - DNA, 567 bp, Homo sapiens
atttcagtcttcaaatgtctaattcaactaaagatgttcaatgacattgattagaaacatacggaagactttagataacattataaatctagataaatataaataaatggcacaaaatacttttgatttctaacatagatgttttgatttattgcatttcatcatagaattttgacttaaaccttagaatctgtgggatctttgcaaaagtacttcatttctgagctacacacttgaaatctaatgttccttactaccaaaagaatcaatgtagatgggcttctccaaatatatctctcttgtcatttctattctacattaatactcttcattgggcttcaccattatgaagataaattttgaactttttgtgtgacctaccatgccttctctattgtaggacctgggagcttttctaacaatgtctcattttgctgccttcttyaactagatcctccttggtaaagagaggtgtacctagtgtgcattttgaccaaatatgaaaatttgggtattgacatcgatatgcaggcaaaaccaaggggaaagtcaaatatcatcatcatg

SEQ ID NO: 654446 - DNA, 341 bp, Homo sapiens
tgacctaccatgccttctctattgtaggacctgggagcttttctaacaatgtctcattttgctgccttcttcaactagatcctccttggtaaagagaggtgtacctagtgtgcattttgaccaaatatgaaaatttgggtattgacatcgatatgcaggcaaaaccaaggggaaagtcaaatatcatcatcatggatagaattaaatgctgtactaccaaaataatcttaaattgtcacaattaattatagcagttttatcaaaatgttaacagacacatttttaaaattccacattgttattcaaaaacaataakttattagcatgatcaggtactgaat

SEQ ID NO: 654447 - DNA, 385 bp, Homo sapiens
gaattcttctatatctttgatttatagttggaaattgtattttattattttaaagattttacttttcctttctgtttttcattatttctattagaaattcagtcatcataaytctaattccaggaagatggataagatatagttttccctatttctcctgcaatgaacacaaataaccttgacattatatgtaaaataaacataagattctgaaatttgaacagaggacagcaagatggctaggcaccgaagaacccacgaaacaaggaataacaggacgctgagttttctggagtttcatttatcctacatatccttgacttggatcaaaagaatttgacaatatgaacatgccaataggcacagattttttaaaatctcaaaa

SEQ ID NO: 654448 - DNA, 397 bp, Homo sapiens
gaattcttctatatctttgatttatagttggaaattgtattttattattttaaagattttacttttcctttctgtttttcattatttctattagaaattcagtcatcataactctaattccaggaagatggataagatatagttttccctatttctcctgcaatgaayacaaataaccttgacattatatgtaaaataaacataagattctgaaatttgaacagaggacagcaagatggctaggcaccgaagaacccacgaaacaaggaataacaggacgctgagttttctggagtttcatttatcctacatatccttgacttggatcaaaagaatttgacaatatgaacatgccaataggcacagattttttaaaatctcaaaaagcatgctttcc

SEQ ID NO: 654449 - DNA, 385 bp, Homo sapiens
gaattcttctatatctttgatttatagttggaaattgtattttattattttaaagattttacttttcctttctgtttttcattatttctattagaaattcagtcatcataactctaattccaggaagatggataagatatagttttccctatttctcctgcaatgaacacaaataaccttgacattatatgtraaataaacataagattctgaaatttgaacagaggacagcaagatggctaggcaccgaagaacccacgaaacaaggaataacaggacgctgagttttctggagtttcatttatcctacatatccttgacttggatcaaaagaatttgacaatatgaacatgccaataggcacagattttttaaaatctcaaaa

SEQ ID NO: 654450 - DNA, 594 bp, Homo sapiens
agatctcttttctgtgcaggaaagtgcttctcggaaagcactgtttgcttgttgttacaacactttacagtataaagccttctgtttggcaaggctccttataggcattttagcctcccagacatcatattgtgttgttgtcaaagctagacgcagcatctgtgcaaatgggaaagatgaaggctacagcattcccctgcagcatgacagaactgccacaytgagataattacagaaggcgagggagacatgtgatgtaattaccacttgtggcagtaaacgagtaaaatttgtttactgtaaatccaagtttaagaaatctttttttttttttttttttttttttttgacagagtcttgccctgtcgcccaggctggagtgcaatggtgcgatcttggctcactgcaacctctacctcctggcttaaaacagttctcctgcctcagcctcctgagtagctgggattacaggcacccaccaccacgcctggctaatttttgtatttttagtagagatggggtttcaccatgttggccaggctggtctcgaactcctgacctcgtgatccgcttgcctcggcctcccaaagtgct

SEQ ID NO: 654451 - DNA, 597 bp, Homo sapiens
ttggtcagttggttattgcgggacagcattcttctgcatgacagtattgtctccttaccagccacagaggaggctgtgagagagaggatttgggaaattggtgcaaatgagaaatcttggaaatctgtaagtatatagatataaaagttattctttccagtttgattcttttatgatgtagattttaatatcmgtcaatttaggaaactctgtggctctgaattatagttataattctagttttactattacagtgaaagaagagaagaggctgttcattattatattggaagtagtgtagcatgtttattaagagtgcagagccccagcatgaagcctagctctgccatttgccagctgtgtgtgctcttgggcagactacttatcctctctgtgcctcattttcatttgtgaagtaggggacggtgtgtagttcccacctcacagagtggttgcaaggaccaaatgggttaatacatgataaatgcttagtttagtgtaagttcaataaatatcaaaatagtggtatgttaaagatagtgtttacatgataacctaaaattaattgccagtttgttttaatttactggtcaagtc

SEQ ID NO: 654452 - DNA, 469 bp, Homo sapiens
tgttcatcaacaggcattagagtatacaccgtaggattgcattttacgttcaagcatttttttagatgaatttctgaaacattcttattttaaaagccatcagatgcttgttaacacttaagtcttgctcaagacatagaagtttctgaaatcaattaacatgtttaggacacatttcgtagtgttctgagggatgtgaataaatctaatcacagtttacatttcttaatgtatttataattcagaaaaggtagaatttagtagtaaattcaactcataaccatataattaacatttaatagatattgatatgttcacttttaagaataagaaggaaattttctataagtgtatgttgaacacataatrattcaaaattcatgtgataattttaggtgatgctttgagtcgttttatagaatataaatatggataaaatataaaatactgaaggctgaactcaaagtgt

SEQ ID NO: 654453 - DNA, 604 bp, Homo sapiens
ctgattaaaagaaattcatcatccaaatatcttctcagtgttaagcaagcacatgaagttagctatagctcgacccttaacagctaatcaggtaaactcttcaactcagttttgaacgtaacatagtatactacagactttttgtttttgtcctcagagctaaagagaaacaatggctatatggcatactatgaggattaattttatatgtctacttgactgggccatagggtgcccaatatatggtcaaacattattttaggtgtttctgtgagagtgttttggataattttaacatttaaattggtatactgagtaaagcagatgatactccctattgtgagtaggcctcatccactgagttaaaggcctgaatagaacaaaaagattaaccctcccccaggtaagagcgaattcttcctgcctgatggccttcaaaatgggacatcagctctttttcctgcctttggactcaaaccattggctcttcctgggtcttgagcctgctggcctttggactggagctacactatyagctctcttgattttcaggccttcaaacttagactcaaactacattattggctcccctgggtctcccaga

SEQ ID NO: 654454 - DNA, 603 bp, Homo sapiens
aaggttttatcatgcagatgaagcctccaggtagcaggcttcagagagaatagattgtaaatatttcttaggggtcttaaagggtctgttctatcagtgattccaaaaggggagggagggtataatgaaccatgtctgtctcccttgttccatcatggcctaaacttatttttcaggttaactttgtaatgcccttggccaagaggagggacccattcagatggttgaggggccttagaattttattttttggtttataaacttcaagttgtgcacccctgatttcaaggctggtcagctcatctccctgcatgtgtctttgctacactccttctctcgtaccagccctgatttgctgaagtcrctttcttgcttactcttgttttctctatttgccccataacctgtccctcaactgctccctcccaggcaacaccctatgtttccatctgaaagctcccttcctttttctatcaaagccccaatgctttgttctttgccagttaagaaaagcaacgttgagagaattcatagtgtgtaaatggcaaatagcaatttactaaattaactcacccattgataactctaagaggatgttttacc

SEQ ID NO: 654455 - DNA, 575 bp, Homo sapiens
ggattttaaaatggctaatgccaagttgtctgtcaaaattaatagggtattgctgcttcttatagaacaaaaaagaattctcatccattttattcattgctaaaaaaacatgtgtctgctaaaaatttcatttagaaaaaaaggttcaaaggtagtttccttgattttaaagtgttgcgaattaaaagctactttttctcaggtttgttattatcaaaaccacaccttcattaaaatgtaaagcattttattctttgagaatagattaaaactctgtattcaaccttatattaagagaggcattaaaactccaattatggattatagctttatatgagtttggagatttttttaacttcctttatatcaagaatatgttaaacggttaattgactgctgaatagatactctacatcatcataggaattaatcaatgtattggccttttgattctctgacttgctatttcatgtgttaatttaacgakttctccttccttctttgctgtccatgaagccttcatgcatgctattctatacaaactactttttattctaagttctacacacataggg

SEQ ID NO: 654456 - DNA, 508 bp, Homo sapiens
ctcccgccttggcctcccaaagtgctgagattacaggcacatgacgtttcttamaggctggagcttgtctgggccctgggtggagggatgagaaccactgactcaacagtggcaggtccagcaaagcatgcacaatgagtcagccaccagcccaggtggtgacttttgtccccaattaagagacattcgtaggctcctaaataggggataacacaaggataatatgatacttctcactgaagtcttaaaagcaatgtattaatcaaagagccaaggaattttaaaagggggaaatttaatttgtaaagatctattgaatacttctctccatttattcaaaaaaaagtactctatagtcaaaaagctaatttatcctgacttataagctaatctggctgacatcagtccctgttgatatgggtaatatttttgacgggggagaaattgcatgagaatcctctgttttctatagtatctttgtagtaggtggtcataaaaataatactgc

SEQ ID NO: 654457 - DNA, 508 bp, Homo sapiens
ctcccgccttggcctcccaaagtgctgagattacaggcacatgacgtttcttaaaggctgkagcttgtctgggccctgggtggagggatgagaaccactgactcaacagtggcaggtccagcaaagcatgcacaatgagtcagccaccagcccaggtggtgacttttgtccccaattaagagacattcgtaggctcctaaataggggataacacaaggataatatgatacttctcactgaagtcttaaaagcaatgtattaatcaaagagccaaggaattttaaaagggggaaatttaatttgtaaagatctattgaatacttctctccatttattcaaaaaaaagtactctatagtcaaaaagctaatttatcctgacttataagctaatctggctgacatcagtccctgttgatatgggtaatatttttgacgggggagaaattgcatgagaatcctctgttttctatagtatctttgtagtaggtggtcataaaaataatactgc

SEQ ID NO: 654458 - DNA, 508 bp, Homo sapiens
ctcccgccttggcctcccaaagtgctgagattacaggcacatgacgtttcttaaaggctggagcttgtctgggccctgggtggagggatgagaaccactgactcaacagtggcaggtccagcaaagcatgcacaatgagtcagccaccagcccaggtggtgacttttgtccccaattaagagacattcgtaggctcctaaataggggataacacaaggataatatgatacttctcactgaagtcttaaaagcaatgtattaatcaaagagccaaggaattttaaaagggggaaatttaatttgtaaagatctattgaatacttctctccatttattcaaaaaaaagtactctatagtcaaaaagctaatttatcctgacttataagctaatctggctgacatcagtccctgttgatatgggtaatatttttgackggggagaaattgcatgagaatcctctgttttctatagtatctttgtagtaggtggtcataaaaataatactgc

SEQ ID NO: 654459 - DNA, 571 bp, Homo sapiens
taccctccactactacagtcagtgcttccaaggactccatcctttagtgacatttctgcccagaggagaaaaacctcacagtgaagaaaacacaggtaagtgtcacatttttcactaataacagaaactcagggacatctcccccatgcaactttcttttgaaacagggcggcactgtggaaaagcatttgacttggctggaagaaagtcagtttctggagcacctgttggttgaacatgcaggccactttycacagctgtgatcctcaggccccccaatcatgagtaggcatgtggcatgccaaatatatacatggacctctcttgtgggtaggtgtgtcctggacatcatcctcatcgccaccaccctcctcctcatcatccacctcataaatagcagtcaccattcattgtgccaagcactgtattagggacttcactgaattattactagtaataatccttacacaaatctacaaagtagccttacttccgtttttaccatgaggaaattgaggctcagagaggttaagtgattttctcaagggtgcacaagaccataagcagctaa

SEQ ID NO: 654460 - DNA, 514 bp, Homo sapiens
cttcttcaattccccacaatagccctcattttctacacataattttctgctcatagctaataagtggtaaaatcaggatttcaaccacaaactgccagattccaaaggctgtgtaccttagaatggaacaatggagaagtgaaggccctcattttcctggttgtactgtctctggaaggaggaaatccccagactgtgggcccagctggcccttcagagcatcctcccttgcccacagtggctccgcctcactgggctgaggcccgggtaatgggtaagktgacctgggctctgaggcaagggctcaacatggcagcctccactggacccctgctctcaggctccctccacacccctgtgaaaggaaattaaaaataaccctccctccttcaggttaagggtaaaaagaccacccaacaaaaattaccccataggctgaggacagcatgggaattctccctcttcttgctctagactttgctggattctagggaacatggcagctgctataacc

SEQ ID NO: 654461 - DNA, 529 bp, Homo sapiens
gcatgggaaaggggaggtttcccctattggctcttccatcctttggtcaaagttcgctctggagtgttgactctcacatttcctgggttttgtgtgcatgcaccagggctgtggagacagaagcctgggagtgggggcaggagaaaggaaggacagccgaggaagggatgtcaggctccaactgcacaggaggctgctgcagcaacagcaggagctcacggtggcctgagtcaatggacaaaaggtcatcaaaggtgcttggctgaaaggaaatgttatcagaggaaaagttaccattccactaggctagtgccagctaccaagcatgcatattcaattctgatcaagcatttattgggctttccactccagggtctggtttgctccctcagggtcctcccgaggaaagggaccagaggacaggcaaattccgawaagtcagtgggagaagaacctttttggggcagtgagaggtggtggaagttttcgagggaaaacaaggaaagcccatgagactgactcagatcac

SEQ ID NO: 654462 - DNA, 431 bp, Homo sapiens
ctctgtcacccaggctggaatacagtagtggcgcaaacacggctcactgcagcctcgacctcctgggctcaagcagtcctcccgccccaaaagtggctgggcttacaaagtctcaaaatgttgggattacaggtgtgagccaccatgcctggtggcctcaatctcttcatctataacatggagatgataataacaccttctgctagagtagattggatacggtaatttatgtggaacaccaatcctggtgcctggcacgtttgatgcttaatgcrgataatataatgatacttattgttgtactaggactctgcacataccgtgaaggggctaagcgagactcttcactagtgaacaacaaaacacatcctgaagcttcaacctccacttttgctgttaaacctctaagtttgctgtgggtgctgttgtta

SEQ ID NO: 654463 - DNA, 578 bp, Homo sapiens
ccccaactgctccagagaatggaggctcattcatgacccacctactagtcttcaggcagcaggacaactgtgctacctttttctggaatattttgttactgacacattatcaacttattttagatgtcctattaagtcacatgtaccatatcttgagaagcccatcattcttcgttatgtggaattatatttcctcctctatatacatgtgttgctgtgatattagtcttggtggatgtattctgttagttggggacaccttcaaattatccaatttattcctatagcattgcctacgccctgccctgctccctgatgtcacctgaacttaatattctgtatgagctattgagtaggataatataaacagcagaaatatattctttacacctaagaagaacattcttgaaaaactagcactgggggtggtaattcagtaattaccatgaagtaattggcctcatttgtcttgtaaacattgtcacacatckggagactatgtgcaaaggagataccaataatctgtattcactgaaaaaaaacagagctctctgacccaaagggacaataaatccaca

SEQ ID NO: 654464 - DNA, 566 bp, Homo sapiens
ttcactcgggcgcagctagatgtgctggaagcactgtttgccaagacccggtacccagacatcttcatgcgagaggaggtggcactgaaaatcaacttgcccgagtcgagggtgcaggtagggcagatgcaggcagaaccatccttcctgatcatgccacccttcccgagtatgggactgtggagagccccaggtctttcagaggactgaaggaaggcttgaaattctccttcactcactaaggggccaggaaactattctccttctgcccttttttgcctgcccgtcaccacttaatcccgtaagcaagggtcttcaaggcccgggttgctggtggasagagacccatccttgagcaggtttcaagagtagtcacgtggtgttgtaacccttcccttcctctgtatagaaatcctctcctattctcatggacttgtacgtgtgaaagcagcttagctcttggacagtccaagtatttttacagatgaaaaaatagagtaaatgacttgctcaaggtcataactaagtttggtggcagagtcagggtatagacgcagctggtgctt

SEQ ID NO: 654465 - DNA, 603 bp, Homo sapiens
aagatgtatctattcattcagcaaatatttgagggtcttctctgtaccacacaccattcaatgtctagaacacrcaaggtttcagcttccctggaattcacatctgttgttaagggagaacataatgatgggtggtgattacaggagccagaaacttctgagtccaaaggaaacagcagtgggtttaaaggtgtatggaaatggaaataataccagaagcttcatgttggtcagcactctaatgaataataacacttatttttcaagatacatttgaatagaattcagcttctaatggagagaaggaagcacagtgtgtgctactccttacccaagtctctgtttctctctgggtgtcccagatgtgtggaaggaggttggtgcacacaaggtgctccgcactgagaacacatgtgggtcttggtgtctgtggctgctgaagctccatatggtgtcatgtgtcctggccctgttgtgtgacagttgctgctaacaagcttggctttggctaaatgtctttgaaactacccactccttcaccctctccaattgcctcaaatgactcctgattaaaaaagaaagaaagaaagaaagaaagaaaaa

SEQ ID NO: 654466 - DNA, 516 bp, Homo sapiens
tctgtatggtgagttttactaaaagttcaaactagaagctgggcaccaaatgccagcactttgggagactgaggtcaggagttcgagaccagcctggccaatgtggtaaaactctgtctctaataaaagttcaaaaagtagccaggcatggtggtgcatgcctgtaatctcagctacttgggaggcagaggcaggagaatcgcttgaacctgggaggcggaggttgcagtgagctgagatcacgccgctgcactctagccgggcaacagagcaagactccatctcaaaaaaaaaaaaaaaaaaatcaaactaggagaaawcatggtattataagtagtaagggatatgccaggtaaatgccaaagttctaacctgctagttaaacttagaaactatttgattttgagaaaaatagtacagggtttgattttgtttttgtttttctatgatgtagtagtaatcctagtagatcctactagtaataatcccactaggaaaacaaaaaaagtgaaaata

SEQ ID NO: 654467 - DNA, 524 bp, Homo sapiens
ctaacaaactagttcttatattaatggagatggaagtttgcagaatttcttcttcttcttgttcttttttttttctaaaatagcagtgataaaatacaagataatatctagtttaaacattccaggcatggggcaagtaattgcagtatcaaggraaaactgcctcccctccagttaatggctgatatgatgatgctctaagcccccattaactatccaccccatctcttcagattagcagagctcagccatgaaaccaggactggttgccagtttcacctggggaagatggccagtaaaaactttatcatagagtattgtggaaagcatctattatctagccccctgctttctgctttccactttccaatctgttggttggtgctgctattagatttactttctagaaaccagatctataacacacatggaccacagaataaaggcttaacatcttagcctggcatttaaggttttacagcagtgtttttcaaacctcaatatgtatataaaatcacctggag

SEQ ID NO: 654468 - DNA, 524 bp, Homo sapiens
ctaacaaactagttcttatattaatggagatggaagtttgcagaatttcttcttcttcttgttcttttttttttctaaaatagcagtgataaaatacaagataatatctagtttaaacattccaggcatggggcaagtaattgcagtatcaaggaaaaactgcctcccctccagttaatggctgatatgatgatgctctaagcccccattaactatccaccccatctcttcagattagcagagctcagccatgaaaccaggactggttgccagtttcacctggggaagatggccagtaaaaactttatcatagagtattgtggaaagcatctattatctagccccctgctttctgctttccactttccaatctgttggttggtgctgctattagatttactttctagaaaccagatctataacacacatggaccacagaataaaggcttaacatcttagcctrgcatttaaggttttacagcagtgtttttcaaacctcaatatgtatataaaatcacctggag

SEQ ID NO: 654469 - DNA, 515 bp, Homo sapiens
tgatacttaacaaccctcttatctcaggtttggtaattcagttttaaacatctgcactatttccacattcactttatatctgcccataaaccataatgagaaaaaagcctggccttagaaattcacaaatgcactaagctggaacacagtagttgctcaataaataattgttgactgaaaataaaatgtgcttatcaggcaggatttagatcctagggatgatagaaaagaagcatggaaaagcctctcactctcaactatcccaagyggtatttagggatctccattctgcaggacagaaaagaactgccaaacataggctgagctgagacagatgtttctgcaagaacactcagcagacaatgtttgccttcacttcagaatttcccatttttgttctgtcttctcagtaaggcaggtctttctgggaaatatttatgaaatcttttcttgaatcagaggtctccttccgttatttgctttcctaacagaaagtgtacccaagggaacactca

SEQ ID NO: 654470 - DNA, 584 bp, Homo sapiens
gggaagtttccttatactaaatgagagaggaaaatgtattttccttatccttatgttgagagagtgctgagagagtctccagatcacattcttttgagctctggcttcttagataatgttattgagacttcacctgggtccaggctttgcctgttactgcctttaggatgagtcagcctaatatagaaagcttgtttttctctttttaattttatttttctttctttaatttcctgcctcatgacctcctgggctcaagcaaaccttctgtctcagcctctcaagtagctgagaccacaggggtgcatcaaaacacctggctagtttttttaatttttattttttgtagagatggggtctcgcctcaacacagtactggaagttctaactactgtaacaaatsaagaaaaataaataaggcataaagtttgaagtgcagaaaataaaactatttccagatgacataattatctacatacaaaatctctaggaatctttaaaaatttcctagaagtaataaatgaatttagcaaagtcacacacaaaaatcaatcacatttctatctactaacaatggacaggca

SEQ ID NO: 654471 - DNA, 592 bp, Homo sapiens
agatagtgttttgaaagcatatctttttcttcagaacaatgtagacttccaaaatggttaacctaaggggtctttacaaaatgtgttataagttaaacataatttgggaagttttacttttgttttcttctatgaagaaaaaaatgcaggctgggcgcggtggctcacgcctgtaatcctagcactttgggaggccgaggcaggtggatcacctgaggtcagttcaagaccagcctggccaacatggtgaaaccccgtctctactaaaaatacaaaaattagctggkcgtggtggcatgcgcctgtaatcccagctacccaggaggctgaggcaggagaattgctgaaacccgggagtcagaggctgcagagagccgagactgggccactgcactccagcctggatgacagagtgagactccgtctcaaaaaaaaaaaaaaaaaaaaggaaaaaaaaaaaagaaaaaaaaccatatgtgtattagggtgactgagtggtgacttcatttataataatacagagaatagctataagctcattgacagtaaaaacaacaaaccaggattctactgtttgaaaagaagtttcgtt

SEQ ID NO: 654472 - DNA, 476 bp, Homo sapiens
atccaatgtaatcatcatagaattgaaaccaatggattcattaaatggactcgaatggaatcatcgagtggactcgaatggaatcatcatcaaatgaaatagaatgcaatcatcaaatggaatcgaatggaatcatcatcgaatggaatctaatggaataatagaatgaactcgaatggaaacatcgcatggagttgaatggaatcatcatcgaatgagatcgaatggaatcatcgaataacatcgaatggaatcatcgtcgaatggagtctaatggaatcaacaaatggactcgaacggaatcgtcatggaatgtaattgaatagaatcttctaacggactcaagtggaatcatcgaaagcaagcgaatggaatcatcatcgaatttcatcgaatggagtcatcatcatatggaatcgagtggaagcattgartgggctcaaaagaaatcatcggagtatggaattgaatggaat

SEQ ID NO: 654473 - DNA, 538 bp, Homo sapiens
attttattaatttctcatctttttatttcatcccttttattatctttggttttagtattctctttatattttaataccgcttgtctaatatacacaatgaacattataatttccttcttaagtgtagcattagtggtatctctgaagttttgatatgtgatacttttattaataatgagtttaaaatattttctaatttccattgtgataaattttttgacttttaagttacttcaaaagaaaactgctatgtttccaaatatttggggattttcaagttatctttttatagctaatttctatcttaaattttttgtaaccaaagaataaatacttataatttccatcccttgatrcctgagattttctttataatccaggacatggtcagtgtttgcaaatgtttcacatgcaccaaaaaagaatgtgtattctaaagttattgattgcaatgtcatatgtatgctagttctgaatgatgatatctctcttcagagttaatttccttttcttcaggaaggcagatagagggctgatc

SEQ ID NO: 654474 - DNA, 551 bp, Homo sapiens
tggattcatcaagaaaggcatctttaaaaacatttctcatttacaaatcatgccaccagaatatattcacggcctacctttattacagtatttttcaactgaaaaaaaaaaagtgatggcatgtccctattgctacaaaaacagtggaaaaaagggataagatttagagaagaaatatggaaagctaagcagtgtgctacatcagtgtgtgggttgcaaaaggaacaaaaagtacatcttacgattgtggtaaagatgacatataaagctggtaaccaccttttgtctaaacagagattctttggaaaaacagggaaataaggaggctcctaattaaaccaattatgaagtattcaaaatcttcaaggattttgtatctacatatacttgctaaacaaacctaaataataaaactcataatagcamccttcctgcttcacaatctttcctgctactctttaaccataaagtactttactgtctcttgctatggaatcatctgtcacctgacacacacctgggctattccactgccatgtctaatgactgca

SEQ ID NO: 654475 - DNA, 608 bp, Homo sapiens
tgctttacatcactgcaatttctctcttaagttataccaaatagaaggcctcctatctgtacttcacatctagatggctttagaatgtgcaggtaggaacagggactcctgggagctggcttgctctgtataaaaatgggaaaatattttagattgttgggagagagggagggaccctgggcaaggggaggaggaygctggcaggttgggactacatgggtacaagtgagaggctgacagccctcaagggccaagcagtgcaaaagggactttcaaaggaaattatcactaagagacagttttaaatttggggacacggggtgtgctcaccgctccctcctcctcagtcgctctaataaaggccactttgctcactgatgcttctctgtagatgcagatttggggggaaattgtggaagtaaactgggtggctgggttcagctttgtcagaactcagaaatagcccaaggagcttcaacagagtgaaagctgaagcagcacaaaagcagcttaaaaacaacaaggcagctttgctgtgtgtttccttgccctcgccccactctctccctgcttggtgatggtcttgaagaaggtggccaggttcccag

SEQ ID NO: 654476 - DNA, 558 bp, Homo sapiens
tatccacatgggaataatgagcatttggaagcacatgtggtgctagtttcattgtgcaaaacacgaaatacattataccaatgtcatattcatttatggcagggagactagttagatgagggaaggcgtacatctgaastggctgatgttctcaaacatccacgctattggacattcccaagaagctggaaatgtacaatctgaaatgaacgtgctccttccatgagttcaataaagggccaatggatctcacctaaaaggatgttttgctcagaatgaacttgctggacatgctttgcctatcacagggctctaataccacggaattacaataagacctcattgtttatatgaggggccaaagcatcaaattcctacaggggtcagataggtgatctaaaggaactaagtggtgcaggcatgaatgtggccagagagcagggtgggtggcctggccacagggacagctgtttgttactcctctccagccagctccctgcacaggggtgatgccatgctgagccagtgccaagtggtcagctgagttttcaagaggcc

SEQ ID NO: 654477 - DNA, 558 bp, Homo sapiens
tatccacatgggaataatgagcatttggaagcacatgtggtgctagtttcattgtgcaaaacacgaaatacattataccaatgtcatattcatttatggcagggagactagttagatgagggaaggcgtacatctgaactggctgatgttctcaaacatccacgctattggacattcccaagaagctggaaatgyacaatctgaaatgaacgtgctccttccatgagttcaataaagggccaatggatctcacctaaaaggatgttttgctcagaatgaacttgctggacatgctttgcctatcacagggctctaataccacggaattacaataagacctcattgtttatatgaggggccaaagcatcaaattcctacaggggtcagataggtgatctaaaggaactaagtggtgcaggcatgaatgtggccagagagcagggtgggtggcctggccacagggacagctgtttgttactcctctccagccagctccctgcacaggggtgatgccatgctgagccagtgccaagtggtcagctgagttttcaagaggcc

SEQ ID NO: 654478 - DNA, 558 bp, Homo sapiens
tatccacatgggaataatgagcatttggaagcacatgtggtgctagtttcattgtgcaaaacacgaaatacattataccaatgtcatattcatttatggcagggagactagttagatgagggaaggcgtacatctgaactggctgatgttctcaaacatccacgctattggacattcccaagaagctggaaatgtacaatctgaaatgaacgtgctccttccatgagttcaataaagggccaatggatctcacctaaaaggatgttttgctcagaatgaacttgctggacatgctttgcctatcacagggctctaataccacggaattacaataagacctcattgtttatatgaggggccaaagcatcaaattcctacaggggtcagataggtgatctaaaggaactaagtggtgcaggcatgaatgtggccagagagcagggtgggtggcctggccacagggacagctgtttgttrctcctctccagccagctccctgcacaggggtgatgccatgctgagccagtgccaagtggtcagctgagttttcaagaggcc

SEQ ID NO: 654479 - DNA, 616 bp, Homo sapiens
caacatagtagtaataataataatttgatataaaaataatcaataaaatcctgatgttgtattaatgatgatgatgatgatgatgccaagaactccactgttgtcttcacaaacctgttactggcttccagagaaaagatgcatttccttctctagatcaacacggttcaaaagacctttgcacagtggtggacatgttctgtatctgtgctgaacagtacagtagcccctacctacatgtagctactgagcactcagatagtaagactgaggaactgcatttttaatttttgtggactttagttaatttaagactaatttaaatagctacatgtattaggattctccggagaaacagaaccatmagtgtgtgtggagagagagagagtgtgtgtgtgtgtgtgtgtgtgtgtgcgtgtgtgtagaggaggggattgattttaaggaattggcttctgtgattgtggagggtggcaagtccagaatttgctggggtagtcggggcaggggtgggggtgcagggtggagatcggggaggagttgaggcctcatctggactctgaaggccatctgctggcagaattccctctgcaggccttccactgataggatgatc

SEQ ID NO: 654480 - DNA, 616 bp, Homo sapiens
caacatagtagtaataataataatttgatataaaaataatcaataaaatcctgatgttgtattaatgatgatgatgatgatgatgccaagaactccactgttgtcttcacaaacctgttactggcttccagagaaaagatgcatttccttctctagatcaacacggttcaaaagacctttgcacagtggtggacatgttctgtatctgtgctgaacagtacagtagcccctacctacatgtagctactgagcactcagatagtaagactgaggaactgcatttttaatttttgtggactttagttaatttaagactaatttaaatagctacatgtattaggattctccggagaaacagaaccataagtgtgtgtggagagagagagagtgtgtgtgtgtgtgtgtgtgtgygtgcgtgtgtgtagaggaggggattgattttaaggaattggcttctgtgattgtggagggtggcaagtccagaatttgctggggtagtcggggcaggggtgggggtgcagggtggagatcggggaggagttgaggcctcatctggactctgaaggccatctgctggcagaattccctctgcaggccttccactgataggatgatc

SEQ ID NO: 654481 - DNA, 615 bp, Homo sapiens
aagtagtttcaattttaggaatgattctgcttttttaagttacaatctatcttggatttcatccttaccattttatgaaagtcatctcattctttttcactgtgttaatagttactctatcacatggacttactataattcattaagtgtggtaactcatgactgtaatctcagcatttagggaggatcacttgaggctaggagtttgaggtcagcctaggcaacattaagacccccatctctaaaaaaaaataaaaaataaattagccaggagtggtggcacatgcctgtagtcccagctactcaggagactgaggtaggaggatcacctgagcccaggagtttttcagtgacttatgattgtgccactgtgctccaacctgagcaagagtgagaccccacctgtttaaaataaaaggggaataaggctggaagcatcacactatctgactatactacaaacgtaraatgcactacaaagcaatagcaatcaaaacagcatggtacttactcgcagaaaaacagacacacaaaacaacagaacagaatagagagaccaagaataaatctatgctcttacagccaactgatttccaacaaaggcatcaagaacac

SEQ ID NO: 654482 - DNA, 638 bp, Homo sapiens
gtggcaggagtctgtagtcccagctactcgggaggctgcggcaggagaatggtgtgaacccgggaggcagagcttgcagtgagccgagatagcgccactgcactccagcctgggcgaaagagtgagactcctttagaaaaaaaagaaaagagctgtgagtttttcaaggttcattttttgacagcaggtctatgtattttggaaatgaatattaaactctgattttatcttagatgttgtgaaatatgaagacaatatcttaaaatgacaaaatggtatyttgaaatgtgcttatattacataggttcttctataaatataaatcaaaattgacagctgagtttgcttgctttttcgttttgttaaaaatgttatccttatttttcctgatatgcctgaaatgtgctaataacccagttgctgttgatgttctaagaagagagaaattaagaaacagagaagtatagttgagaaaattataacacatgtactctcataatgacaccataaaaagatccacacatttttctagtatctgacattatttttaaatgtacagggattagagctgaggtgggtggacaatctgctcataatcagataacctgtgaaacaaattggttatgtgctaaccctaa

SEQ ID NO: 654483 - DNA, 512 bp, Homo sapiens
cccaccctgaccaatcaattgacattgcaacccccatatcagcactcttgagtcccctggcccttcaccagattcccaaatctcctagcagacgcttcaactgattatgctgatcatttgttttgtttgagaagtcaaataatccagaagtctttagacaaatgatacttacattataaagtgaaaataaggtgtcattctaaccgattctctggtagttccttccattgtgttctctttgaagatgatgaagtgaggcatctcacttcctgggcagggaaaaggaacaygcacacaaacccagaattctgaggcaatttcatctgactggttaatttagcagaagccaatttcaccaacaattttctgcagtgcttctcaaatcaagtggcaaaggatttaatgaagagatcccaggtgcaatgttagttgctgccatctagtggcttttgtgaaggaatagtgtgattccttgggctcttttcaaacgccagggagaaactcaacctgga

SEQ ID NO: 654484 - DNA, 560 bp, Homo sapiens
aagaacccaaaagcaaattcaacaaaamcaaagataaatagatgagacttaattaaactaaaaagcttccacacagcaaaaaaaaaaaaaaaaaaaaaaatgacaataaaataagcagcataagcagacaacccacagagtgggaaaaaatcttcacaaactatgaatgcaacaaaggaccaacattcagtatttacaaggagctcaaacaaatcagcaataaaaaacaaacaatcccatcaaaaagtgggcttaaggacatgaatagataattttcaaaagaagatatacaaatggccaacaagcatatgaaaaaatgctgaacatcattaattatcagggaaatgcaaatcgaagccacaatgcaataccaacttactcctgcaagaatggccataatttaaaaatcaaaaaataatagatgctggcatggatgcagtgaaaagggaacacttttacactgctggtgggaatgtaaactaggataaccatcatggaaaacagtatggaggttccttaaaaaactaaaagtatatttaccatttgattcggcagtccca

SEQ ID NO: 654485 - DNA, 600 bp, Homo sapiens
gttaaaaaaaaaaaaaaaaaaaaaaaagagccaaaggtatatagagaaaaagttgkgctagtttttatttaatacttttgtcagcttgagctggtcacagggtgtatttgggaaaatgcagacacatgcctgagggctatgcaggtagttaggagaactgggttctagtctcagctttgagattacctccctgtgttgattaggtgggtattattccctccaggttcatgtataaaaggaaggggctgaactgaaaagatctatctactctgcttctttgaactttatcttcctcatccgtacagtggaggcagttacatccaccttgcagggtgttctgaagattgaatgagatcgtgtgtgtaaatcacctatagcagtgtccagcagggtatatgtattcagaaagttctagccttcctcctttctcccattttaagtttcctccaatttagaacactttgtaatcaggaacacgtggtgatcttcatgagcagtgtcatcaaataaaactatgattgcaatagatacacctggcatccactccctgtgagtgacttgactcgggattttttgaagtgagggtcaaactgcagctca

SEQ ID NO: 654486 - DNA, 471 bp, Homo sapiens
atgacccttaaatcacctataagcagcccatatgaagtagttttgccagatctctctaatttgtaggttttccaattgttcctaacatttctgtgagtgctgaggctcccacattccttttctgcctcatttgtgtctttgtacwatcagaacataattggtaaaaagaatattcatgtggaggtacaatgtctaaggatgatacagtccttcagtgagctcttggtaagagaaatgatttgtttgctttgttgtttggagcttattttatggtgaaaaatttttaaatgcctttgggcttttaaaatctatttctaattgttctttttaacagtaaatgattataagatagaaaactgtttaataattgtaactagacatatctactctagtaatgattttgttcacgtcaaagtagataatatagaacatgtacatttaagaccttaagaatgtgtatcaatactgctt

SEQ ID NO: 654487 - DNA, 544 bp, Homo sapiens
gaagtagaaatgaacttacatttattgagaatagactaatgtgccaagctcaatgtcagcagtatgagcattaatgacaacagcaagttatacctgtttgagcaactgctatgtgccagaaacaatattaagccctcatacrtggtttctcaatactctcaacaatcctaatgaggtagattctgctatcattccagttttatccagagcaaccaacaccagctagaaagtgagctctcacctccctgatggagaggcgaaggtgtctgctcaggttttatgaagaaaatgaattctagggtatgtctcaaatataagtcttcttattcacacatctcagtaattcagaccaaaataaataaagaaatgcagaaatcaatctctactgggtttcagtaataaacctttacagctagagaagcatcatattttattggatgatttgggatgggcagttgaatgatctacaggatctctgtatgtgacttgacagatttcatatttcagttcctcaggaatgttcacctgtaaaacaagaataatt

SEQ ID NO: 654488 - DNA, 432 bp, Homo sapiens
agggcatcctggaggggacaactatgtgagcaaattctagagmcagagatggacaaggtattttggaagacagtaaattaatgaaatacataaataagaatttgcatagaggcaggaaatgcatttgagccaggggactaggaagtcttaaatgcgaagcaaaggaatattgttttgatggaaatgtaataatcctttaaggctctttttagtaagagaataaaacagagatgctaattggacgaaactggccatgctgtctcaaacctccgtgtttttcaaatattagaatgtatgcctcaaatctcattttgtcacttctcccagcagattactatgttttcttcagtaactcactcagtgctgtgaaaattttgcaaacttacctagggaaagtttgtttctcacccttttgagtcctgcaatgcttca

SEQ ID NO: 654489 - DNA, 577 bp, Homo sapiens
catggaaaaagcatgcatgtctcctaacgttcagttcataactgctgcattgtgccatcttcatacactggactctttccttcctacatcgttaatgtgtttgagtaagtggtatcctaagrgtcaaaagaagccgatagacctccctaagaatacagagctatggctgccacacagcaccaggattattgtaaaaaattaaatctttatgaaatagcacatgttaataggttttgtaaactaccaatggcagcatagagcaagtactattaaaagtagggtggttgttatctggtattaggaacactatgagccaaacagaccattctgtggttgtgagttttgcttttgtttgttgtcattaaacacaaacatctgaatcttggatgacaacatctgaatcttggatgtttcatgagaagagaaaacgtagaggaagaggtgagatgagatgcctacttttgaggggcagttaggggcagtcttagaccgggggagctaaatataaaatgaaaggggagtcttacctccagagcttataatgccctcgggaatgctaactctaacactactgcct

SEQ ID NO: 654490 - DNA, 577 bp, Homo sapiens
catggaaaaagcatgcatgtctcctaacgttcagttcataactgctgcattgtgccatcttcatacactggactctttccttcctacatcgttaatgtgtttgagtaagtggtatcctaagagtcaaaagaagccgatagacctccctaagaatacagagctatggctgccacacagcaccaggattattgtaaaaaattaaatcwttatgaaatagcacatgttaataggttttgtaaactaccaatggcagcatagagcaagtactattaaaagtagggtggttgttatctggtattaggaacactatgagccaaacagaccattctgtggttgtgagttttgcttttgtttgttgtcattaaacacaaacatctgaatcttggatgacaacatctgaatcttggatgtttcatgagaagagaaaacgtagaggaagaggtgagatgagatgcctacttttgaggggcagttaggggcagtcttagaccgggggagctaaatataaaatgaaaggggagtcttacctccagagcttataatgccctcgggaatgctaactctaacactactgcct

SEQ ID NO: 654491 - DNA, 458 bp, Homo sapiens
aggatttccatcatgtgttctctgtgcccttctcacactggacaatttgcaacctcctaaccacagcttgaggcttcccctctcttctcttcattggtgctacattctgctcctatttcagcatggtctcctggtgctccagccccatccttcggtgttcaggggaatgaatgtmcctgcctcagtggcttccactgcaccagccttctcccttttagccatcaggccacactgctcatccttcgcaccctcctccctgaagcgtttcctaaccccctgaggcagaactctcaatttacctctttgtcaaaatctatccaatctacaacttccaattaaatgtatctactttaagatccttctttgacctcaaggctcacaagtctctcttatgaagctcagtactgctttgtttatattttcatgttggcattttccttctcccccctcttataggg

SEQ ID NO: 654492 - DNA, 404 bp, Homo sapiens
cctggctacagactgaccacaggcatatttctgtctttttctaaatgttatcttaattccaaatcatcgtttcttcctttgcaaggcctcccaaaaatgtttcttctcaaggtctattcactcacttctgggttatagaaataatctcttmaatgactttttttgtttgtttgtttctggtcttctctgttcaacccatcctgtacatttttataaaaataaatgagccagtatcaaggccagtgaacataagtttcctatgttatagggaagactactcaaacagagctgcctgggaagggtggcgagcatccctagctgctggtggtctcaggcgcaggggttggacagctgttttagatgggctatttagaggcacactggaggaagggttaagtatgggg

SEQ ID NO: 654493 - DNA, 421 bp, Homo sapiens
ctggctacagactgaccacaggcatatttctgtctttttctaaatgttatcttaattccaaatcatcgtttcttcctttgcaaggcctcccaaaaatgtttcttctcaaggtctattcactcacttctgggttatagaaataatctcttaaatgactttttttgtttgtttgtttctggtcttctctgttcaacccatcctgtacatttttataaaaataaatgagccagtatcaaggccagtgaacataagtttcctatgttatagggaagactactcaaacagagctgcctgggaagggtggcgagcatccctagctgctggtggtctcaggcscaggggttggacagctgttttagatgggctatttagaggcacactggaggaagggttaagtatgggggctctggtgccagcctgc

SEQ ID NO: 654494 - DNA, 539 bp, Homo sapiens
atattactatttgccttcaacataggaagagttttaaagttcctccaggatttcttgagagctgcttttctgtttactaagcatttaaaaggcatggcactgaaatttaagaaaaagatgaggatagtactcataatcccaagatggcagaatcattaagagtaataatgaaaaggcacaagtagatcygcaaaaagaaaaccctccaaatgccattggtcagaggttctgtgctcctcatactgcgggagcctgcaggacagcaaagggcagtctcttccaaaatgttccagtcaacccctaaataggcactctcggactttataacattttaaacaaggccactcatttatcttttgcctgacttaagatttctctgagataatacattgactaaactgttaaaaaatgtgcatacatataaaatatttatttgggtttgctgtacaatcaatggatcttttttttctcctccattatcctgaggctgagtcaggacaagacaatctcagggctgacagttcaaagagacagaattc

SEQ ID NO: 654495 - DNA, 610 bp, Homo sapiens
aaagctttcagtcttaattcagacatttaatttgttcatgtataatgcaatattaaaagatcttaggactttcgttaaacatggagaaaagacggtcttaaattcagcgtggccgggcgcggtggcttacgcctgtaatcccagcactttgggaggctgaggcaggtggatcacctgaggtcaggagttcgagaccagcctggccaacatgctgaaaccctgtctctactaaaaatacaaaaattagctgggcatggtggcacatgcctgtagtcccagctactcgggaggctaaggcaggagaacccaggaggtagaggttgcagtgagccgagatygtgccactgcactctagcctgggagacagagcaagactctgtctcaaaaaaaaaaaaaaaaattcaatgtattgctttttctcagttgccttactaattaaatctgcatcctttgtatttattaatctatttatatatttattctttttcctgcagtccctggatggctttgtatttgcactaaatcaggaaggaaaatttttgtacatttccgaaacagtctccatctacctaggcctctcacaagtaagtaaaacaattttagattcttg

SEQ ID NO: 654496 - DNA, 450 bp, Homo sapiens
ccctctgccctcactggcagagggcagccacccaatgcaatgaggcaaaggacacactgagctgataacacactgatgtctgcagacaatggagctaagacagcattgcaacataccccctggggccttggggtcgtagaaacccctacctggatgctgccacagggcctgaagggagtttactcctgtcatcgctgaagcagctggcagtccctgcactcactcacttgcatgctccctcctgcraggggtggagccaggcagaccaaagtaaatagtaagtttacccaagtaaactgccgggcccctggccagttcctgcagttgggttcctgtactcgtttgcacactctctccctcccacaaggggttaagcggggcaggctgagtaaacgaggcacccctgtcatacaccccacaaaggggtcaagaaaatatcctgcatcagtt

SEQ ID NO: 654497 - DNA, 628 bp, Homo sapiens
ccaatcatggactgttgctgttgcatttgcccccactgtttccttgaatatccagggcaatatcttctcatctcttggcaaaaagaaaggaatatgtggaaatttgagtgtgtgcgtgtgggtggggcaatacaattccattctcaagtgctaactttagtcgcaaaactgaagattcctgcaccttgaactcaaacaaaatgatttaaatgtatttttaaatggctgattactggtatttttcaagggtcagtctgtgacttcacaaaattcttgtgttgaaagattttcatcccgtgtttaaaacaagcagaatagaggatggtgatsgcaaatgaaccacataaccaacagtttctagggcttaaacatatgtgtgactaaatgggttccacatccttgcattctttccttcacctaaaagtagatgctctcagagcattatcaacagcacactcatcgtcatcactcattgatcaaagatttaaatttcacacatataatgagcagcgttggaaggaattgttacttaaatggcatagctgctcactttgttcaatattacaaatgtagggatttgcaaaggatgtgttttggattgaaataaatttagcacttttaattgcac

SEQ ID NO: 654498 - DNA, 382 bp, Homo sapiens
tgaattctggcaaccaccatgagagcctggaagcagatccttcccatgtcaagccttcaaaagagatcccagccctggatgacaaccttgactgcagcctcatgagacatcctagagcagagaagtcactaagctgtgactggattcctgacccacagaaactgtgaagtaaatatgcattgttttgagcaagtttgtggtaatttgttatgcagcaatagataaccaacatgcagcctaatttatatttgacttcctctgcttccttagcttcagcctyacattcctgacttgacaaccctcatacagtgacacctacatcaaacccaaatacgctttcatacattcacactcatcagagcagcaaaaaatagaaatgtca

SEQ ID NO: 654499 - DNA, 474 bp, Homo sapiens
caaagtcaaagtcaggcttaaagatatgaaagtcactggtaatgttgtcaagtgatgggttgaaagtgagttggaaagagaataaaaaagggagaaaatgggaccattgactaagttgaagccgtttgagatattttcttaaaggagaaagacaaaaaggtattttatagagtcaagggagtttgttttcttttgcatttttttttttgtttttgagtgaaatatattaggacattttgagtgaaatatattgaggtaaagggaatctgcaataaagagaaaagctctgatgaaaaagaaagaggagcgctttcagaaaaaaaatgtcctttcttaagttacaagatatgggatacaatatgcaagggaatgacatagctsagacagtttaggcaattaaattagcgtgcagtctggttgggtggccactattacaacactgtagagagatctgtgtagtaaaagcaatggaaa

SEQ ID NO: 654500 - DNA, 592 bp, Homo sapiens
cattatcttcctctctaacactgaaggtgccctctgccccttaaacttactcagaggtattaattgaatagcatatgattaaagaagcttgaaactaaaattgcctaatgaatacttaatatccttttccttgagattgaaaacaatgttctcctatccattcattcatctatcatattcaattatactaacattatctgtactcactgatcctttcttaggcaccaaaccctttgctaagttttttgttaacattatctagtttcatattgaaagtaccccgaggagttggctataataattcccattttacagataagaaagcagaggcttagggaagtcaagaatcctcctgttattgcacactaaataaatgctagtaycagaatttttgtttcagtgattctaaaagtgtgctcttaacagttctgctatactgtcttctaaacatagcacacctctgtcctatgcaagctgaatattaaaatataaaacctcctcttccattgttaggtatattttaagcacagtctcgaatatattttgggttgatttaaacatacagttctcaagactactgaatgttgtcttc

SEQ ID NO: 654501 - DNA, 377 bp, Homo sapiens
cctgcttatcaaactctactcttgccgggaacacaagcacattagtcttctcccaaatcctcaaacatcagtccttttttctgccgtgagacctctgtacacactacatccttatgtggaataagcctgtgcctctgcctggaatgaccctgttcatgcacgtgcatgcacacacgcatacacacamtgtattagtccatttacccatttcatgctgctgatgaagacatatccaagactgggaaatttacaaaagaaagaggtttattggacttacagttccatatggctgaggaggcctcacaatcatggtggaaggcaaggaggagcaagttacatcttacatggatggcagcaggcaaaaagagagcttatgc

SEQ ID NO: 654502 - DNA, 608 bp, Homo sapiens
cggtctagcagttaacaggaaaagcacaacggtggraaatggagggaccctactcatcattaaccacattgggcaaacaatttgcctgaattccatagtgaagaccatcaaccctggcttgatgagtacaaattctgttttgttttataacttttttttttttttacaatgtcgtgatgcacctggctcttttctcctcttcctaacattctggctttagcccctaatcttctctgactgaatttatagcaagtcacctttttttctgaaacaatgggagataatatttggaaaatattaaaacaaaaaagaaaatgaaaataagagtcacccatattctcagcatacagaattggtattctaatctatttgcttctagtgttctaatatttccatgtataaactttttcaatacacaatatatgagtgaattctttaaaaaattgaagattgcaaataaaacaaaaagtttttttgtaatacaaagataaaactgaagtctcctttgaccatcattccaatatcagttccaaacctaatttccaaagcgtaagtttgatacatatcccttctagtccatctttatacttttatattaaatacattga

SEQ ID NO: 654503 - DNA, 580 bp, Homo sapiens
gaaattcataaggtttctaaggctggtgatctaacagtttgaaaatttctaaatggtgccggattaaaatattaagtcctgaagctgcaaattttatttccagtaaaaaaaaaaaaaaaaactaaagtaaaaataaatgattaagacaaaaattaaggaagtgggtgcctctgtgtggttagtaattactactcttcctaggttgtagcctggcccagaaagtcaccataatacattttatacaatgcaacatgtatccttccattgctagacatagataaatcacaacagacagaaactgacatgcttgaagctgtacagagttcacttcccaggaactatgtcacattatagcatcctttttatcataaatatgtatgactattatgtatccataaaaattaaaaacacactttttaagaattcaaactaataacaaactatcattcacaaaaagaacaatttccatggatcatggytgaaagaaggtaaacacagatttccaagaagtatgttttaggaaattctaaatatcatgcttaggaagataaataatacataatagcattcttccctgctt

SEQ ID NO: 654504 - DNA, 580 bp, Homo sapiens
gaaattcataaggtttctaaggctggtgatctaacagtttgaaaatttctaaatggtgccggattaaaatattaagtcctgaagctgcaaattttatttccagtaaaaaaaaaaaaaaaaactaaagtaaaaataaatgattaagacaaaaattaaggaagtgggtgcctctgtgtggttagtaattactactcttcctaggttgtagcctggcccagaaagtcaccataatacattttatacaatgcaacatgtatccttccattgctagacatagataaatcacaacagacagaaactgacatgcttgaagctgtacagagttcacttcccaggaactatgtcacattatagcatcctttttatcataaatatgtatgactattatgtatccataaaaattaaaaacacactttttaagaattcaaactaataacaaactatcattcacaaaaagaacaatttccatggatcatggttgaaagaaggtaaacacagatttccaagaastatgttttaggaaattctaaatatcatgcttaggaagataaataatacataatagcattcttccctgctt

SEQ ID NO: 654505 - DNA, 531 bp, Homo sapiens
aaaaaaatattaaatttttatgtaccaagatggactcagaaagaacacatgtaatcattttagtttctaaacttggccaggttggtggataggaaggaaaggcatggcagttggaattgcagaactcyggagtcaggttgacacgagttgtaaaatactccattactcattagcaatcatcttgcacaaactattcactcacctattcaattttctccttactaaaatgggaatcatatagctgaaagtttggatttaagatcagagaataatgtgtatgatttagcatagtgtctggcacacagtagatgccatataaattatagttactattggtaatgaaacagaataaaaataaggccttctgtaactcttcagaaattaaggatgcacactatcaccttttaccaaaattaaaatggtatcagtgagcagtcaatgcagaatacagttttaagtcctttcttttcacagctattttcagttttgtctagttctcactcctattttgccaattcctaattttgcctt

SEQ ID NO: 654506 - DNA, 600 bp, Homo sapiens
gcaccaccacgcctggctaatttttgtgtttttagtagagatggggtttcaccatgttggccaggctggtcttgaactcctgacctcaagtgatccrcccgcctcggcctcccaaagtgctgggattacaggcgtgaaccaccgcacctggccagtaattatgttcttgaagcatcaaaacacataggcaaatttctgactatgctggggattagtgcccctaacccccatgttgtttaagggtcggctgtagttgcatcccccaaaggtgccacccttgctcatgctttactatctctggccatgtatcccttgtctagaataccttcatttttcctattatgccatccacctgcggaacatctcctttttccagtgtcaggtcaagctccatttcctttgggaaaaatttctcagcccctccctccagacagaattgactttttccctttgaatctgttttgcaccctatatggaattctgctctatattgatgcatttttattgccgttattttatatcatattcatctaatgcttaaaggtagagactacattgtaactttgcatgctcggagcctaacataatacccagcaccta

SEQ ID NO: 654507 - DNA, 567 bp, Homo sapiens
actagctgacccactctgcaggagtcggcagccacagaagtcaccaaatggaggatgaacaaagctatcaccctctttccccaaatataaagcagctactcagaaagccattctctcagcagagcatgaggtggaaccagaaggaaacgagcagcccagttatctagcaggctcttcttccacgacttctgtctctccctagagcttaggcctagtctctctaagggattaggccttgaaaaagaagaggaagtgaggatctagagaccatattgtcctactgtcaccaaagtccaagcagccaaggccatagtctactactgggagaaaagaagagaacttcaaatctgacmtgacactggagtataatataagcaggaatgaccagagggtacagtatcttgccaaaatggactagaaggaaattcaacatggaaattttaaagctgtgactgaagaaataaaaatataatgtttttgtctccatgtatttcatggccatgtagtctttaaacaacgttagaaaggaagaataaaaggactaatggactgttaatgtagaagctc

SEQ ID NO: 654508 - DNA, 567 bp, Homo sapiens
actagctgacccactctgcaggagtcggcagccacagaagtcaccaaatggaggatgaacaaagctatcaccctctttccccaaatataaagcagctactcagaaagccattctctcagcagagcatgaggtggaaccagaaggaaacgagcagcccagttatctagcaggctcttcttccacgacttctgtctctccctagagcttaggcctagtctctctaagggattaggccttgaaaaagaagaggaagtgaggatctagagaccatattgtcctactgtcaccaaagtccaagcagccaaggccatagtctactactgggagaaaagaagagaacttcaaatctgacctgacrctggagtataatataagcaggaatgaccagagggtacagtatcttgccaaaatggactagaaggaaattcaacatggaaattttaaagctgtgactgaagaaataaaaatataatgtttttgtctccatgtatttcatggccatgtagtctttaaacaacgttagaaaggaagaataaaaggactaatggactgttaatgtagaagctc

SEQ ID NO: 654509 - DNA, 567 bp, Homo sapiens
actagctgacccactctgcaggagtcggcagccacagaagtcaccaaatggaggatgaacaaagctatcaccctctttccccaaatataaagcagctactcagaaagccattctctcagcagagcatgaggtggaaccagaaggaaacgagcagcccagttatctagcaggctcttcttccacgacttctgtctctccctagagcttaggcctagtctctctaagggattaggccttgaaaaagaagaggaagtgaggatctagagaccatattgtcctactgtcaccaaagtccaagcagccaaggccatagtctactactgggagaaaagaagagaacttcaaatctgacctgacactggagtataatataagcaggaatgaccagagggtacagtatcttgccaaaatggactagaaggaaattcaacatggaaattttaaagctgtgactgaagaaataaaaatataatgtttttgtctccatgtatttcatggccatgtagtctttaaacaaygttagaaaggaagaataaaaggactaatggactgttaatgtagaagctc

SEQ ID NO: 654510 - DNA, 553 bp, Homo sapiens
cagcgtaatacacttcaataacttctttgcatcctgaagcagtatagcaaagttattcagcgtcaggcccaggaactatgctacctgaatttgcatcatggctccaccatgtatcagctgtgtgactttggccagagcacataaacttcctgtactttattttttttttctstatctctaaagtgagaataagaattttccctacctcttagggatgctgtgagaaataaatgaagtaaggctaacagtgccagttgaaaggagatgctcaaaaattggaaattatcattttgcctgttgcccaaagctattctacttttatgaaacaatatatgccttgttgagtactataagtatttgtttagtactataagcagacggagaattttgttattactactgaatcagaaaaataactttctgtcaggtagggttaggtgaaaaatctaaaggaaggtcgagaatcacagttcagagccctcactggaatgaagcaaaatgtgtaagtttgcctaacatcctttcttgtagttttcctctctcattctaattt

SEQ ID NO: 654511 - DNA, 549 bp, Homo sapiens
aacaactcagcattgtttctttcttttcaaccatattgcatatacctttgaatatacaatgagttttagggatcagtttattagtgctctgtgtgttttggctgctttttcatattttgaaacttagccttaaaatttcaaattgtatatcaacctattaaagggtagtaagcttgaaaatataagtaactcaattctgtcaaagttccaattcctatgtgactaatttaccaaattaatttggaaagtcagaaaaagttaaagcaaccttaaaaggagaacacaaggattagccctcatatattccaacttacttaaatggaaaaaagtttaaagttatgcatattatgcataatatgttakttataaaagcaaaacaaatagagtgaatcgatttacttagagttgggcagagcttaatttcttccattgagtgagtgacttcatgaggcattctttttctagcaagccaacacttgataacggaatacctagaaagagaaaaagaaaactaaattcccaaatgaattttggtaagggtatatttac

SEQ ID NO: 654512 - DNA, 599 bp, Homo sapiens
aaaatatttcaaatattcccttatataacagttatttcctagatcactatgctataaatgtttaaagtataattgataattgccaaataacaaaaagtaggtacttctttttttttttgagacrgagtttcactctcgttgcccgggctagagtgcaatggcatgatctcggctcaccgcaacttctgcctcccaggttcaagtgattctcctgcctcaggctcccgagtaggtgggattactggcatgtgccactacgcccagctaattctgtattttagtagagacagggtttctccatgttggtcaggctggtctcgaactccggacctcagatgatccacccacctgagcctcccaaagtgttgggattacaggcgtgagccactgcacctaacaaaagtagatacttcttactttgtaatggcctgttgaaaagtcttagaattgttctgtacagagattcatctttaaccagtattctggctgcttccaaattcactggattctctagcactggattagaaagcataacctataggaaaacacagacaacatataatttcagaagtaaactttttttagagcaaaacgacaaa

SEQ ID NO: 654513 - DNA, 599 bp, Homo sapiens
aaaatatttcaaatattcccttatataacagttatttcctagatcactatgctataaatgtttaaagtataattgataattgccaaataacaaaaagtaggtacttctttttttttttgagacagagtttcactctcgttgcccgggctagagtgcaatggcatgatctcggctcaccgcaacttctgcctcccaggttcaagtgattctcctgcctcaggctcccgartaggtgggattactggcatgtgccactacgcccagctaattctgtattttagtagagacagggtttctccatgttggtcaggctggtctcgaactccggacctcagatgatccacccacctgagcctcccaaagtgttgggattacaggcgtgagccactgcacctaacaaaagtagatacttcttactttgtaatggcctgttgaaaagtcttagaattgttctgtacagagattcatctttaaccagtattctggctgcttccaaattcactggattctctagcactggattagaaagcataacctataggaaaacacagacaacatataatttcagaagtaaactttttttagagcaaaacgacaaa

SEQ ID NO: 654514 - DNA, 599 bp, Homo sapiens
aaaatatttcaaatattcccttatataacagttatttcctagatcactatgctataaatgtttaaagtataattgataattgccaaataacaaaaagtaggtacttctttttttttttgagacagagtttcactctcgttgcccgggctagagtgcaatggcatgatctcggctcaccgcaacttctgcctcccaggttcaagtgattctcctgcctcaggctcccgagtaggtgggattactggcatgtgccactacgcccagctaattctgtattytagtagagacagggtttctccatgttggtcaggctggtctcgaactccggacctcagatgatccacccacctgagcctcccaaagtgttgggattacaggcgtgagccactgcacctaacaaaagtagatacttcttactttgtaatggcctgttgaaaagtcttagaattgttctgtacagagattcatctttaaccagtattctggctgcttccaaattcactggattctctagcactggattagaaagcataacctataggaaaacacagacaacatataatttcagaagtaaactttttttagagcaaaacgacaaa

SEQ ID NO: 654515 - DNA, 599 bp, Homo sapiens
aaaatatttcaaatattcccttatataacagttatttcctagatcactatgctataaatgtttaaagtataattgataattgccaaataacaaaaagtaggtacttctttttttttttgagacagagtttcactctcgttgcccgggctagagtgcaatggcatgatctcggctcaccgcaacttctgcctcccaggttcaagtgattctcctgcctcaggctcccgagtaggtgggattactggcatgtgccactacgcccagctaattctgtattttagtagagacagggtttctccatgttggtcaggctggtctcgaactccggacctcagatgatccacccacctsagcctcccaaagtgttgggattacaggcgtgagccactgcacctaacaaaagtagatacttcttactttgtaatggcctgttgaaaagtcttagaattgttctgtacagagattcatctttaaccagtattctggctgcttccaaattcactggattctctagcactggattagaaagcataacctataggaaaacacagacaacatataatttcagaagtaaactttttttagagcaaaacgacaaa

SEQ ID NO: 654516 - DNA, 465 bp, Homo sapiens
cattcaaacaacacacagcagtgtccaccaagaaacttaaactaatgttgcaggcagataatttatccacccactcactcagttctttaacacttactgagctcctgctgtatgccagccacagtcaagggaacatgaaagatacagatgtatctaagaggagtgatcagcctcatcagatccaacactgctatcttattacaaataaatctaatgactcctttaraaatgaagttcatgtataataatatagcctactattacacataatttttaaagtcaataaaagtccatataattctctaagtgtagcataaaggataattacactaagagatgtgatagtggtaggtacttacccttacttataataaaaatgtaaagattttttaaaagcaaggcaatttttaaccaactgttgctgaccctgtttctttctgtttgatatttgtaaataagagctat

SEQ ID NO: 654517 - DNA, 377 bp, Homo sapiens
taacatatatatgtgtatatatacattctaggattttaatctatacttcacaggagaaacagagagaagtgcacctacttcacctattccaccttagtctagagacctaatcttttcagaaaagraagtttgaggagaaattttacttaagaaaaatcttagcagtcctctgcccaactatagtttcaggatagtttgtattgctgctttggaaccattccccagcatttccactcaatgtctaggcatcttttggagaagacctggggaagtgcagaacatgactgaaaaatgcagaaggaggtgggatcatgtggggtacccaggccaccatgtctatccttagtgacatggccaaccctttacagaaatggcct

SEQ ID NO: 654518 - DNA, 377 bp, Homo sapiens
taacatatatatgtgtatatatacattctaggattttaatctatacttcacaggagaaacagagagaagtgcacctacttcacctattccaccttagtctagagacctaatcttttcagaaaaggaagtttgaggagaaattttacttaagaaaaatcttagcagtcctctgcccaactatagtttcaggatagtttgtattgctgctttggaaccattccccagcatttccactcaatgtctaggcatcttttggagaagacctggggaagtgcagaacatgactgaaaaatgcagaaggaggtgggatcatgtggggtacccaggccacmatgtctatccttagtgacatggccaaccctttacagaaatggcct

SEQ ID NO: 654519 - DNA, 571 bp, Homo sapiens
agatcttgcctgctcccagccccgctaagagcacgggaaggcttggatccacagctgcagtttgggcagctgcagccctgtccagtagggcagggttcctgcctgctctgtggagctggaggcctgggttggcagctgagatttgggcagctgcagcggcccctggggagcaccagatccatggagtgtgcagctcccgctgcgcttccctgccacaggtgcctccctgctgcagcccatgtgatggcagcagccaatgacaatacctgtcagccagggtaggagtatggtgccatagaaraaaaccgtaagcgttagatagaggttcagttaaaatctttccatcggagtgcaatattcatacagaagagtgcatgaatcccacgtggctgtggatatgttttcacaaagtgaacagactcgcataaccagcacccagatcaaacaacagaacaagagcagcactggaaaccccctctccacccacgaagggtaaccgccatcctaacatcaaacaccagctttgctttgcctttttattttcgttaaatattatgtcaacagaatttca

SEQ ID NO: 654520 - DNA, 547 bp, Homo sapiens
aaaaggcaggttaaacagaagactagacacatagaagcaaaaatattgaactctaacacagacattgggaaatcacacaggatacaggaaaaagagagataaataactggaaaatatgagagaataatttgagttctgcatggcaaaaagagaagcmccaatatattaagtgaaactatctttataggtcaaaatggttgactttcagcaatgtcatacagctctacctactatgtataatatgagttgcagagaagaaaacaagaaagaacgtgggagagataattgaagagctgagaactgacaatttttcagaattggtaaaaaaaaaaacaaaccatgatgcctcatattgacttgagtaatataaaatatagtaaaactatcaaatgtcaagaacaaagagaaaagctttaaagtcaccagagagaaaagacaggaaggactgaaaaacagcagacctcttgtcagcacccttcaagaataaaggcagtggtacaatctgtgaaaggcttacagaaggtactagcagcccactattccagag

SEQ ID NO: 654521 - DNA, 605 bp, Homo sapiens
tccagaccacaacaataaagtgaatatcagaataaagtgagtcaccatattttttggtttcccagtgtgtataaaagttatgtttacaccatactgtatttttagtccattttaaaactgctgataaagacatacccgagactgggtaatttatttttttaaaacaaaaacaggtttaatgractaacagttccatgtggctggggaggcctaacaattatggcagaaggcgaaagtcatggcttacacggtggcagacaagagagaatgagaaccaagcaaaaggggtttccccttataaaactatcagatctcctgagatttatttactaccatgagaacgtatgggggaaataacccccatgattcaattatctcccaccaggtccctcccccaatacatgggaattatcggaattataattcaagatgagatttgggtggggaaacagccaaaccatatcaactctagtctattaagtgtgcagtagtagtctgtctgaaaaacaatgtacataccttaatttaaaaatactttattgctaaaaaatgctaccaatcatctgagccttcaacaagtcctaatctttctgctgttggagggt

SEQ ID NO: 654522 - DNA, 605 bp, Homo sapiens
tccagaccacaacaataaagtgaatatcagaataaagtgagtcaccatattttttggtttcccagtgtgtataaaagttatgtttacaccatactgtatttttagtccattttaaaactgctgataaagacatacccgagactgggtaatttatttttttaaaacaaaaacaggtttaatgaactmacagttccatgtggctggggaggcctaacaattatggcagaaggcgaaagtcatggcttacacggtggcagacaagagagaatgagaaccaagcaaaaggggtttccccttataaaactatcagatctcctgagatttatttactaccatgagaacgtatgggggaaataacccccatgattcaattatctcccaccaggtccctcccccaatacatgggaattatcggaattataattcaagatgagatttgggtggggaaacagccaaaccatatcaactctagtctattaagtgtgcagtagtagtctgtctgaaaaacaatgtacataccttaatttaaaaatactttattgctaaaaaatgctaccaatcatctgagccttcaacaagtcctaatctttctgctgttggagggt

SEQ ID NO: 654523 - DNA, 605 bp, Homo sapiens
tccagaccacaacaataaagtgaatatcagaataaagtgagtcaccatattttttggtttcccagtgtgtataaaagttatgtttacaccatactgtatttttagtccattttaaaactgctgataaagacatacccgagactgggtaatttatttttttaaaacaaaaacaggtttaatgaactaacagttccatgtggctggggaggcctmacaattatggcagaaggcgaaagtcatggcttacacggtggcagacaagagagaatgagaaccaagcaaaaggggtttccccttataaaactatcagatctcctgagatttatttactaccatgagaacgtatgggggaaataacccccatgattcaattatctcccaccaggtccctcccccaatacatgggaattatcggaattataattcaagatgagatttgggtggggaaacagccaaaccatatcaactctagtctattaagtgtgcagtagtagtctgtctgaaaaacaatgtacataccttaatttaaaaatactttattgctaaaaaatgctaccaatcatctgagccttcaacaagtcctaatctttctgctgttggagggt

SEQ ID NO: 654524 - DNA, 605 bp, Homo sapiens
tccagaccacaacaataaagtgaatatcagaataaagtgagtcaccatattttttggtttcccagtgtgtataaaagttatgtttacaccatactgtatttttagtccattttaaaactgctgataaagacatacccgagactgggtaatttatttttttaaaacaaaaacaggtttaatgaactaacagttccatgtggctggggaggcctaacaattatggcagaaggcgaaagtcatggcttacacggtggcagacaagagagaatgagaaccaagcaaaaggggtttccccttataaaactatcagatctcctgagatttatttactaccatgagaacgtatgggggaaatmacccccatgattcaattatctcccaccaggtccctcccccaatacatgggaattatcggaattataattcaagatgagatttgggtggggaaacagccaaaccatatcaactctagtctattaagtgtgcagtagtagtctgtctgaaaaacaatgtacataccttaatttaaaaatactttattgctaaaaaatgctaccaatcatctgagccttcaacaagtcctaatctttctgctgttggagggt

SEQ ID NO: 654525 - DNA, 564 bp, Homo sapiens
taactcctccccccgctatttggcatggaataggtgctcaagaaaccactgctgaataataaagagtgagcccctattccctcttgcttctcagcctctgtttccttaactgaaacatgcccactgttctttaaagtcctgtctggctctgacacccaaccctgagagagccctggcccagcctcggcacccagcaccaggcaaaggtggtgggaaggcacactgtgctcttaaataacggaggccctaggtgctgcctccccagtgctcgacaggcagggtccagccatggcagccaccctcagaagcagcagcattaaggaatgattatctcacccctgttasgtggctgcaggagaagctgggtttggagagcagcaggcaggctttgcttcaggagcacatggtaaaatttggtgcaattagcagcgagggaacacacattactactagtattatgttctcttggcgtttctgccctattgcgggctgccttctttctttaaatttttttttaaagaggaaaaaaagctctttgggaactaaagcaacataaaaatgcca

SEQ ID NO: 654526 - DNA, 612 bp, Homo sapiens
aaaataaattcctatggcttataaattacccactccaaagcagcccaaatgaactaagacagggtatagatccaaaagaattaaaaacactttcttgaagagatatttgtacagctatgttcagtatttttgtacagcagcattattcatgatagctaaagcatggaagcagcacaagtgtccactaatagacgaatggataaacaaaatgaggtctatccatacaatgtgatattattcgcattacagaggagagaaattctgacatatgttacaacatggatgaaccgtgtatacattatgctgagtgaaataatccagtcacaaaaggacaaatgctgtccagacttggtggcttacatctgtaatcccagcactttgggaggccaaggtagacagatcacctgaggtcaggagttcaagaccagcctggccaacatgatgaaaccccrtctctactaaaaatacaaaaattagccaggcttggtggtgtatgcctataatcccagttacttgggaggctgaggcacgagaattgcttgaacctgggagccagagattgcagtgagctgagattgtgccactgcactcaagcctggaggacagagcaag

SEQ ID NO: 654527 - DNA, 575 bp, Homo sapiens
ttcaaatccggtaagtggcctctttttactctcttctccaacctccctcactatccctcaacctctttctcctttcaatcttggcgccacacttcaatctctcccttctcttaatttcaattcctttcattttctggtagagacaaaagagacatattttayccatgaacccaaaactccggcgccggtcacggactgggaaggcagccttcccttggtgtttaatcattgcagggatgcctctctgattatacactcacgtttcaagggtgtcagaccacgcagggacgcctgccttggtccttcacccttagcggcaagtcccgctttcctggggcaggggcaagtacccctcaaccccttctccttcacccttagcggcaagtcccgctttcctagggggcaagaaccacccaatcgcttatttccacgccccaacctcttatctctgtgccccaatcccttatttccgtgccctgacctcttatttctgtgccccatcccttatttccacgccccaacctcttatctctgtgccccaaccccttttcccacttttctggaaggtaagaacc

SEQ ID NO: 654528 - DNA, 575 bp, Homo sapiens
ttcaaatccggtaagtggcctctttttactctcttctccaacctccctcactatccctcaacctctttctcctttcaatcttggcgccacacttcaatctctcccttctcttaatttcaattcctttcattttctggtagagacaaaagagacatattttatccatgaacccaaaactccggcgccggtcacggactgggaaggcagccttcccttggtgtttaatcattgcagggatgcctctctgattatacactcacgtttcaagggtgtcagaccacgcagggacrcctgccttggtccttcacccttagcggcaagtcccgctttcctggggcaggggcaagtacccctcaaccccttctccttcacccttagcggcaagtcccgctttcctagggggcaagaaccacccaatcgcttatttccacgccccaacctcttatctctgtgccccaatcccttatttccgtgccctgacctcttatttctgtgccccatcccttatttccacgccccaacctcttatctctgtgccccaaccccttttcccacttttctggaaggtaagaacc

SEQ ID NO: 654529 - DNA, 578 bp, Homo sapiens
cagcctcactcttctctctcccgccaccatgtgaaaaaggtctttgcttcccccttgccttccaccatgattgcaagtttcctgaggcctccccagccatgtggaactgcgagtcaattaaacctctttcctttataaattatccattctcgggtatttctttatagcagtgtgaggataggctagtacaggtactcacatcacagttgagggagaaagagagcattcgttccaccctagctctggcaggcattgtgagagcagaagcctgtttcattctcccaacagcccagtgaggtctatgatcttagctctattttatggatgaagaactggggctcaaagaagcaaagacgcctgagctggagaaggtttatgcaaaaggccatgaggagtgaaaggatgctgtgttcgtctgtccttgtgcagtttcactttgttcaatccagggtttacctcccttgactgactacagggcatcagcctagtagcayctgaggaacgcgcttgctgaagcctcattctgtggcatacaccctggagccgactgtgtatttttatatgtaaccacagtcatg

SEQ ID NO: 654530 - DNA, 578 bp, Homo sapiens
cagcctcactcttctctctcccgccaccatgtgaaaaaggtctttgcttcccccttgccttccaccatgattgcaagtttcctgaggcctccccagccatgtggaactgcgagtcaattaaacctctttcctttataaattatccattctcgggtatttctttatagcagtgtgaggataggctagtacaggtactcacatcacagttgagggagaaagagagcattcgttccaccctagctctggcaggcattgtgagagcagaagcctgtttcattctcccaacagcccagtgaggtctatgatcttagctctattttatggatgaagaactggggctcaaagaagcaaagacgcctgagctggagaaggtttatgcaaaaggccatgaggagtgaaaggatgctgtgttcgtctgtccttgtgcagtttcactttgttcaatccagggtttacctcccttgactgactacagggcatcagcctagtagcatctgaggaacgcgcttgctgaagcctcattctgtggcrtacaccctggagccgactgtgtatttttatatgtaaccacagtcatg

SEQ ID NO: 654531 - DNA, 598 bp, Homo sapiens
aagctgtttgagtgcagggtctaagggtgctttgggttttttattttgcgtgtttgtttgtctgtttttatctctggtttccttccactacctggcatgtggtaggtactcagtgagtggggattctcatattaataaattaatctggggttyctcagccttgacactgttgacgtttggggccggatgctcccttgttgtggggactgtcctgtacatggtagaatgtttagcaaaatcccctgttttacccactagatgttagcagtgcacccatgcacacacacactcacacacaccagcgtgacagccaaaaatgtctctggatattaccaggtgtcccctgagaaggaaaaatgcttgcagttgtgaaccactggatcagtccaacccaagctttggcttttccaggcaaggaaacttaggaacagagatgctctgatggccaggcgttttctcctttctccctagaggacttgaagagacaagtaaacggttgggagagaagtgaaagtaaagcaagaaggagaggaaatgggcctctaagaacatggagacattcttgtcttaactcttttgccaacatcaactatttaac

SEQ ID NO: 654532 - DNA, 598 bp, Homo sapiens
aagctgtttgagtgcagggtctaagggtgctttgggttttttattttgcgtgtttgtttgtctgtttttatctctggtttccttccactacctggcatgtggtaggtactcagtgagtggggattctcatattaataaattaatctggggttcctcagccttgacactgttgaygtttggggccggatgctcccttgttgtggggactgtcctgtacatggtagaatgtttagcaaaatcccctgttttacccactagatgttagcagtgcacccatgcacacacacactcacacacaccagcgtgacagccaaaaatgtctctggatattaccaggtgtcccctgagaaggaaaaatgcttgcagttgtgaaccactggatcagtccaacccaagctttggcttttccaggcaaggaaacttaggaacagagatgctctgatggccaggcgttttctcctttctccctagaggacttgaagagacaagtaaacggttgggagagaagtgaaagtaaagcaagaaggagaggaaatgggcctctaagaacatggagacattcttgtcttaactcttttgccaacatcaactatttaac

SEQ ID NO: 654533 - DNA, 576 bp, Homo sapiens
gcaacattggctaaattaaacagcctctctgagcctcagtttccttaccagtaaaaagggcataattatggtacctcccatgagttaatcgtgtacagtccttagcacagtgagggccaagcacagagtaagcacatgtatgtcacctgctgttactgttgcctatacacaccagctcaagaaagtggctcttccctgaaagatctaaaatgttttaagaatggtaagaaggctgcatgacatgctggacttggggagacaggaggggaggagaagcccaggtctgccacataatctgccttctaatttcagtttcctcattgatggaaaggaggtaatgaaaccttctgcaatggactgaatgtttatgtccccccaaaattcatatgttgaaatcccrttcccctaaggtgatagtattagtaagtggagagtttcagagatgattaggtcatgagggcagagttcttatgaatgggattaatgcttttataaaacacacccgagagagctctctcaccacttccaccatgtgaggacacaatgagaaggtgacttctatgaaccaggaagcag

SEQ ID NO: 654534 - DNA, 576 bp, Homo sapiens
gcaacattggctaaattaaacagcctctctgagcctcagtttccttaccagtaaaaagggcataattatggtacctcccatgagttaatcgtgtacagtccttagcacagtgagggccaagcacagagtaagcacatgtatgtcacctgctgttactgttgcctatacacaccagctcaagaaagtggctcttccctgaaagatctaaaatgttttaagaatggtaagaaggctgcatgacatgctggacttggggagacaggaggggaggagaagcccaggtctgccacataatctgccttctaatttcagtttcctcattgatggaaaggaggtaatgaaaccttctgcaatggactgaatgtttatgtccccccaaaattcatatgttgaaatcccattcccctaaggtgatagtattagkaagtggagagtttcagagatgattaggtcatgagggcagagttcttatgaatgggattaatgcttttataaaacacacccgagagagctctctcaccacttccaccatgtgaggacacaatgagaaggtgacttctatgaaccaggaagcag

SEQ ID NO: 654535 - DNA, 562 bp, Homo sapiens
cccatttggcccaaaccagacaggcacacaataaatatttgcagccggcagggtaacttgttctccatcrgtcttgcacaagctacacaggaaagaagcaaaacccactaggattttatgaagcatcattttgtcaggcttaggaaaggtggaaaagaaatgccgcagcaacaaccacaaaaagaacatatctgtcagacttcaagataattccaaatataaaccaaaacgactgcttttcagagtgaatcatatttctcggccactgaatcaagaagctataggcacttaaagtatttgaatctgttctccttctccttggatacaatcgctaatctttcttccttgccttctttctttttttcctggggatgcaacctgcttacctggcacataaaatactcatatgatgacacccaggctttagagatttccatgagaatcagcaaaccttattttagcccaatatagagaatgtgcaatgcatggagggaactctggactgattccccagataagtcatttatttctttcctcaaagaaaaatccaatattctgagat

SEQ ID NO: 654536 - DNA, 582 bp, Homo sapiens
ggacaatggccaacagacagcaaaacatctgtgccgatgttttgtcgttacacaaacaaacaccctgaataaaacatttccacattgttaggaagataactcaatgggtgcactggaggaaacttctcccctctttttaggaattaattgagtaaatcttcggatcgagcagatgtcttttgccaaggcaaggaccctaacgaggctgtgcccactggatgaggagtccccgtggcctcgcctttcccatttgagaatcagcgtcttggcgctcccccgaagtgtgccttcatggcccaagcctagcagcgggaggacaggtgcccccacaagagtccggccccccagaaaaaacccatcacagggccctctctctgctggggcagtttcctttcccttcactttgcagtgtatccatttcattctagacaaagtggtgggtttgatgagacaagaacaaagcgaagaacaaagcggcaraaaaaatcagctcaggcctgagtctgatcacttacctctctggtcttctatctactcaccttgaaaatagtgatcctattccaggctgtgcctaccacacag

SEQ ID NO: 654537 - DNA, 483 bp, Homo sapiens
aattcagggcaaggtccaggctggagatataaaaatgtgagagtcacagtgcagagatgatatatcaagccttgaatttggatgaaacaaagggccatccaactgtgagagattgcagcaatgagtaaaaaccaagaaggatgtaaggcagagaagaaggcttgtgaatggtactgccagagacagacatttaaaagacaaaattttaatatttttaatagacaaccagtaggagtgtaagcataccaacctgctcccccaagaaattcctctacaactgcaaggccaattgcagctccttgtctgcttcawtgaaagctaaacctgcctgcagaaaagctcagcccacagcacaattctaggtaagcctctgcactacctttccttaaactaggaaccactatctgcagatgtttttgaaaaaaattccataatcgaaagagcaagaaaaaaagcataaaatctgactctgactccattaat

SEQ ID NO: 654538 - DNA, 608 bp, Homo sapiens
tagttcagccctgcatgctatctttccaccacacacattgtcaattctaaatacatattattgaatgaatttatttctggggccttctttactggatccctttcaagccacacaatttggtcataattgcaaaccaatytgaatattaataataattggaaacataaattaaaatttgataactcagttttccaagtaagttgagttggctagataagagttaatgcctaatatgatagagttttctgccaatgttcattttattaatgcaaaacaattttaaagcattgtaaaaatagcggcactattagtagtagtaagagttgtatgaaagatttgcttaattaaattgagtatcagatttttattagaatacatgtttaaagttgatcatcaaataatacctaaatttgaagtcgtttttacattatatttatttaatgacatattactgaaaagttgtattttttaaagttatgcacacccagaataaaaatgcttaatagaataattctgtcacagaaactatggtttaacctcctttaacagaagcagctggaaaccctgaccctaaactgtgagccccctaccaaatcttaggcataaat

SEQ ID NO: 654539 - DNA, 582 bp, Homo sapiens
actggctagacttaaagtgaattttttacatattaagtatgtaaagtcacctcaaacttttgtgattttttaatgattataaatgtagtagaaggttaatatagaaatattttttaatctttttactttatattttcaaaatctgaaaagtataaagaagaaaaataatacccaaagttaatattattgttgtcattttaatttttttttttttgagacatagtcttgtactgttgcccgggctggagtgcaatggcacaatctccactcactgcagcctctgcctcccaagtttaagcaattctcctgcctcagcctcctgagtgtctgggattacaggcgcccaccaccacgcctggctaattttttgtatttttagtagagatggggtttcactacgttggccaggctggtcttgaactcctgagcttragcaatctgccagcctcaacctcccaaagtgctgggattacaggtgtgagccactacacccagcccattttaatattcttctctctagtttttttctgtacattttcacaaccttaaaagatactggatttttaatttttataaatattt

SEQ ID NO: 654540 - DNA, 426 bp, Homo sapiens
agcagctgggactttgtggaaataggggttctcaggcctcaccctagacctactgatgccaaactctgcatttaaataagatctccaagtaattcatattcacactaaaatttgagaagcactgatccaggagaaggtagaacaacaagctagaaggagcttgggtatctagacgacccaccctactasaccacctaccagctcagacttttataagataagtagaccttctatatttgtttaagcacctttatttttacgtctgtttgatccaaaatgccaactatattaatatgtacaaacaaaacatgatataaattcccacctttacagctttttcaatatagtgtatttgttttgtaccttgcctttcttcaataccacaaccattattaaatcacatatattatagtggttttattgagt

SEQ ID NO: 654541 - DNA, 561 bp, Homo sapiens
ctctagaggtttccattggttacttggtgttaagccttatgtaaatgaagagactaaagtgaagttacaaagttattttcttggtatacactctatgtaaatgaagaggatgaaataaagttacaaagtcatttacttggtgtacgccctatgtaaatgaagatgatatttcctgtggtagctgaagtgtttccacttgatttagttctaggaagtcctgaggttccctgcctccagaccctattctcctgcctcacttctaggccaacctgaccaagagcccagaaggattcttctggyggtttttcccaacaacctttcctatcatgaacaccaatgggaagttgtcccagattactccaaatccggtatttaaaataaaagtggccctagtaatctgggctcccatcaatagacactatgttaccatcatataatcaaagtggaattgtttctaagctactttaaggcgtttcagtcatttactcattggctcaataagtatgtatatgccaggctctgaagagacaccagagagtgggcagacctctgcccccaact

SEQ ID NO: 654542 - DNA, 531 bp, Homo sapiens
agaaaagaaaccaaagaatggctactccatacacacagcagcagcatgggctgcttgactgagtatacttatggttatttcttgattatatgctaaacaaggggtgaattattcatgagttttctggtcctcacccttttaccagaaactgagggtttctcccctttttagaccaataggataacttctggacattgccatggcatttgtaaactgtcatggtaaattcgtcatggtgctgacgaattataattagtgtataatgagcagtgaggtccctttcatcatcatcttgactttggtgggttttggccagcttctttaccacatcctgttttatcagtggggtctttgtgacctgtgtyttgggaaaccagtcctgctaacgtcctgtcttatcatgtgactacaaatgcctaacctcctgggaatgcagcctggcaggcctcaccctcattttaccccggccctgttcaagatggagttactctggctccaacacctctgacaacagttgtaaggaaggaacac

SEQ ID NO: 654543 - DNA, 649 bp, Homo sapiens
tgtcatttttttgtccccctaaccgatgtgaactttactttgttttaaaactgatcagttttgccatggggccagaattattccttgttagaattgctcaattcaagtctgctgctttcctacaatttttcaaattttataatggattaaatacaataaactctgcttaacaaataaggtctgtgtgaaacacaaaaaaaataaataaataaaggaaagaggtttaattgactcacagttcagcatggctagggaggcctcaggaaacttacaatcatggcagatggcaaaggtcaagcaaggcaccttcttaatagtttacctagaatattcatgaaaactgtgatagtcaccatttaaagttattgccctgttaaccatttttatagtctatgaatttaggtgtttacctgagtaggaaacataaggttaaatcataggtattttaccagtaacttaggatttagctgttttcattaagtgaacawtattgaatgtcttatttatcaaaaattacacaagcaaagatgattctgttttgggctgggtttatgattttatatcccttatggtaaattctgacaccttatagtattctgcagggataaatatgaagctgcttgctcaataaaagaaaaatactgataat

SEQ ID NO: 654544 - DNA, 612 bp, Homo sapiens
caatccttaaggaatagaactttgagaaaaatgacttctcaggtggctatctgaacatcagtgtctgaataactaacattcatccttgctttatgtcaccctcattaatcagttcatattaaagataacgccatacatgtaattataggcatagcattacgttaagcatttaagactatcatattgcaccatatcttggccgtggtgatgtatggccccaatttgagaacacgtgtcaattttccatagattttcatctgtattcatgactcaagggcctttagcaaattaataatcaaaagaatttacagtaggctgctttgtaagtccacacttcattacttagcatacttctcacttgttttagctcttaaaaacttgttcagcttcctaaaaatatgcttaacctattttccaattgccyttgttcccgtgctagatgtttgtttgtttgtctgtctgtctgtctgtctttagagatttggtaagggggcgggggtctctctatgttacccatgctggacttgaactcctggactcaaagaattctcctgcctcagcctcccaagtaggtgggactacaggtgaacaccactatgcctggcttgttag

SEQ ID NO: 654545 - DNA, 300 bp, Homo sapiens
gcaataatcatggttttggtggggattaaatgagatcgtgcctgtggggcactcagccctctgtaagccttcaataaatgttagctgttggtggtgctggagatggagagamacagacagattagagagatataatagtctaccagcaagcaatcaccctacctaactcctacctaaactcctaaaatgtgagggggcacatttttttcataggagaaaggtcagggaggaattaatgaggaagggcgattggtaccaatatgagaaatttcccaaatttgcaatttttttttttttttt

SEQ ID NO: 654546 - DNA, 561 bp, Homo sapiens
aaccaggatagaaaatataagaggagcagcaaatttggatttggaagctgaagaaaatgagtcttgttctgaacatgttgaagtgtccattggacatccaagtggagctgtccatccagtgggctattgtatacataattctgcaactcagaagaatcatcagggataaatacttgagccaggtgcagtggctcctacctgccatcccaacaactcaggaggctggggtgggaggatcacttgaggccaggagtttgagaccagcctgtacaacacagggagagcccatcactacaaaaataaaaataaactagctgggtgtgatggtgtgagcctgtaatcccaacaactcaggaggctgaggcaggaggatcacttgagcccaggagtttgaggctgcagtgagctatgattgtgccattgcactccagcctcagtgacagagtgagattccatctctaaaaaaaaataaataaataaatatttgaacatcgtgatcaaagagataatagttaaaaccatgagagtaarctatcacaaggacaaaaaaccaaacaccgc

SEQ ID NO: 654547 - DNA, 594 bp, Homo sapiens
atagaaagatggatggatcaatggaagggaagaaaagaaataagctaattaaaatgagattattctatattagctagctttaatttttggaaagttagaaaactttgttttacttaaaaaaggataaagaaactgaagaaagtgaaggagaataaacttcaaataaacgtttcyttgccagtaaagttattatttcttaaaagagccttctacgttaagaaaaaaaatattaaaaaaaataaagtggctagtcattcaaaaaacaaaaaaactttctgctaagaaagatgaggaaattggtactctcacactcccacccatattccctgataaggattataacattaattctctattctgttaccattttctacttttgtttagacttagttcttacatttacatgaattgaatgcccactaccagtcttttactgtgactgtttcattcctgagtccttcactttgtcctttatttttacctcttgtgtggcttcatcttgtcactaactttttttccaagaagtgtttgtacaccctgtaattcttgggtcaatacataagaatgtttacctgttatctttatatttgacca

SEQ ID NO: 654548 - DNA, 594 bp, Homo sapiens
atagaaagatggatggatcaatggaagggaagaaaagaaataagctaattaaaatgagattattctatattagctagctttaatttttggaaagttagaaaactttgttttacttaaaaaaggataaagaaactgaagaaagtgaaggagaataaacttcaaataaacgtttccttgccagtaaagttattatttcttaaaagagccttctacgttaagaaaaaaaatattaaaaaaaataaagtggctagtcattcaaaaaacaaaaaaactttctgctaagaaagatgaggaaattggtactctcacactcccacccatattccctgataaggattataacattaattctctattctgttaccattttctacttttgtttagacttagttcttacatttacatgaattgaatgcccactaccagtcttttactgtgactgtttcattcctgagtccttcaytttgtcctttatttttacctcttgtgtggcttcatcttgtcactaactttttttccaagaagtgtttgtacaccctgtaattcttgggtcaatacataagaatgtttacctgttatctttatatttgacca

SEQ ID NO: 654549 - DNA, 550 bp, Homo sapiens
acgtacagcactgagacccaggcaacactgggcgtaggcctggagagtggcccaggacacatggggcttatggcaccaagccctgtggcgtcttctacattccaagaattcaactccttcccacatgcctcccccaccccttgctaacctcacttccagcccccagtctgtagtataataggaattgggttttccctcttgttatttcttttttttttttctgagactccctcttgttatttctgtaactcataagataaaaacaaaccatagtcccaaagagagaaatgtatctgcactaaacagaatggmagtaaggaagaaggaagactgcttggtaacgacatacaaaaacaggacggactttaaccaaaaaaggcaataacaaacatatgaacactgatagagtagaacaaaaagtttatcaataaaaatcagtgcatatacaaacatatttttaatccaagcttccaagagtaaagtggaaataaggagtattgcagcatgaagaagtatctccaacccatagaactttacaagtcgccctgga

SEQ ID NO: 654550 - DNA, 600 bp, Homo sapiens
acatatgacagctgccctcttccacatctggacattaccccagacccttctctaggccctgcctgatgtgacatcccctccaatgtgctaccatcctgtccaaggcaccagtggctgacccaggacaataaatggcccagaccaaacttgtgccccagcacacaggtcactaggaaagccttctaaatcaggccctggatgagcctgtctccagtgcatgatkgattggtaacaacttgttcccatcaataggccaaaaatagtccagaagaaaaatatggttacatttgtccatcacaccagccacattttcttacccacacacaaaaaataatggcacagtggaatctcctgacctccaaccaaaggctgaaactagtgcatgatgatggctgctgtaaactacataaaactctacccagaaaactatcaggattccttgtactccactaagcccgaaacaatcaacttgaccaaggtagcatcaaaagccccagagggtcagcacctggaaggtctgtgatttctatttacactttttatttgaattctctctcacccatagcccaattactgtccagccctttccctgagcctgcc

SEQ ID NO: 654551 - DNA, 543 bp, Homo sapiens
caaacctatctctagctaataatgactgcctctctcagcatagtttgatatttgttcatactataagattctctgcatctagggtgaaggtcagaagggacaaagaaggtaaagaagacagagaggtttattctgccatattagtatttattattattccatcataattaataagtatgataatatatatccagaaacatacatttagaccaaacatccccctgtgcttcagactagaatatacaatagccaattttacagccactaaaatgtcttactataccttaaactcaatatatctaataccaaattgattatcttttttcctgaaactatttcttctattatatctaccacctacccagatgagcaagccaagaactcaggaactttcccagcctccttctcatcccttattcccctcatgcacttcttcctcctactcttcattacccttgcaactactcacaactcagatctcacytcaagtcttgccttgcaccaatttagttctgaactagatgacctgagtggctacagcaa

SEQ ID NO: 654552 - DNA, 605 bp, Homo sapiens
taccatttcaatgcacacatttttctgctttagacggtatgtaaatacttcctgagttcccatggattcccttttgttccttgtgattacagaatggtgatccaatttggatctgtccttatccttacacatacaacatacacacatacatatgatgcttgtattgtccacagaaaatgagatattttcttacttagaggttcactgtcaacatgatcttgggaacggataacttatcaatggtttcagttattcttgaaggtattaacttgcctaaatgtaagctggatgagcataccaaattccatcactcttctgaagccacttcctcagggattaccagtcactatatggctgccaattttaacagcctcttctctgtgctcaccttaatcaacctccatacagcagttgacaactaactctgtcttgatgcccccttgatccatggytttggtgacaccactcagagtcagtcctgttcctacgctgagcagaaatcaagagaatgtatatggaactgggtttggagtttcttgagcctacaaattacccatataggaataagagacacatatctttttgtctaacagatgtatagatgg

SEQ ID NO: 654553 - DNA, 540 bp, Homo sapiens
tttttcccttctcattattccaagactcactgaaagatgttcattcagatttccacagcttgcataaaagctttctaaaaattttactccttttcactccacaattatttttaaagataccagcaatttgcattctcttttttgtttaacatagaagaggcctctccggccaacataaacgccatggaagtagactatagagctgataaccattccctggaggccactgaagyccacagtacatggacatggcagtttgaggtttttttgtgacaggatccggtttattctgcctcagcagggttgtcccgggtaaagggaagtcctgagggccagttaaggccgatggtggaagaagaagcgggcatgcaacccctaaaattcagtgaagccaggcctaggcctaaagacagctgggataggtcaggacagggtggaaggaactggactggaaccatgcctatagggctgtggacccaggctacacaggtgtccagggaagcagggcacagggtcatgtgacatgcaacactggcgcag

SEQ ID NO: 654554 - DNA, 540 bp, Homo sapiens
tttttcccttctcattattccaagactcactgaaagatgttcattcagatttccacagcttgcataaaagctttctaaaaattttactccttttcactccacaattatttttaaagataccagcaatttgcattctcttttttgtttaacatagaagaggcctctccggccaacataaacgccatggaagtagactatagagctgataaccattccctggaggccactgaagtccacagtacatggacatggcagtttgaggtttttttgtgacaggatccrgtttattctgcctcagcagggttgtcccgggtaaagggaagtcctgagggccagttaaggccgatggtggaagaagaagcgggcatgcaacccctaaaattcagtgaagccaggcctaggcctaaagacagctgggataggtcaggacagggtggaaggaactggactggaaccatgcctatagggctgtggacccaggctacacaggtgtccagggaagcagggcacagggtcatgtgacatgcaacactggcgcag

SEQ ID NO: 654555 - DNA, 402 bp, Homo sapiens
tctcctagtcaactacctcatgttttaatatctattatcagcgtatcatccaatagattaaaattgacatgtctttgactaccaatgaagttgaacactttttcataaatgtattaggtacttatatttcttcttctgtggctggctactcaggaacatacacttgtttttctagcaatgatagtccattagtttgcatcttccaccctctctcactcagtcctctgcaaccaaccatacagatttgtgagatgttcagatggagttagaggtggcatttctgagaatgaattcaakttttcctctggaaaaataggccaggcaaacctgttcctttgctttttctaacactatgcttgcgaaattatttaaccagtctgacacaactataataataaaaca

SEQ ID NO: 654556 - DNA, 601 bp, Homo sapiens
aaaatgagaattactgatggccgggcgcagtggctcatgcctgtaatcccagcactttgggaggccgaggcaggtggatcacgaggtcaggagatcgagaccatcctggctaacacagtgatatcccgtctctactaaaaataaaaaaacttagccaggcatggttgcaggcacctgtagtcccagctattcaggaagctgaggcaggagaatggcctgaacccgggaggcgaagcttgcagtgagtcgagatygtgccactgcactccagcctgggcgacagagagagactccatctcaaaaaaaaagaaaagaattactgatgagggtctatgttcagctgtgcacgtattgtcttgataaacatcttaaacaacagaaaatagggttggagagcagagaactggtctgacctcaaatttaccagggcaggattttttccccaccctaataagcctgaggacactgcaggagagagaccagggtgtatttcagtccttatctcaaccacataagaccagggcatatttcagtccttgtctcaactgcgtaagacagacactcccagagcgcccatttataggcttccccccaggaatgc

SEQ ID NO: 654557 - DNA, 601 bp, Homo sapiens
aaaatgagaattactgatggccgggcgcagtggctcatgcctgtaatcccagcactttgggaggccgaggcaggtggatcacgaggtcaggagatcgagaccatcctggctaacacagtgatatcccgtctctactaaaaataaaaaaacttagccaggcatggttgcaggcacctgtagtcccagctattcaggaagctgaggcaggagaatggcctgaacccgggaggcgaagcttgcagtgagtcgagatcgtgccactgcactccagcctgggcgacagagagagrctccatctcaaaaaaaaagaaaagaattactgatgagggtctatgttcagctgtgcacgtattgtcttgataaacatcttaaacaacagaaaatagggttggagagcagagaactggtctgacctcaaatttaccagggcaggattttttccccaccctaataagcctgaggacactgcaggagagagaccagggtgtatttcagtccttatctcaaccacataagaccagggcatatttcagtccttgtctcaactgcgtaagacagacactcccagagcgcccatttataggcttccccccaggaatgc

SEQ ID NO: 654558 - DNA, 649 bp, Homo sapiens
cctttctttgtcatgggaatgagcagcctcaggtaatgaacattcacctgtgcttctccatgtccacgatttagatactccatccttctattaatacttctcaggtgaaatggtctactctgatttagcattgcctagtgggcaaggtaagcctgtcaaatactgattcagatagcrcatctatttagctgcacaactaagctatatcctctgccttcattaataataatgtaataatggtgatattttgattttttttatcattgactttatttcttttttttcagatgggaatgattaaacagatttatctcagagaattaaaaattgggttttctattttagaaattccatttagctttatgtttgaatgtgttttatcagtattttctctaattgcgttgatccatttgttttatcacgtgtccatgactttttccaggatgttctttaatgttaggaataatatttttaggattcctattgtgtttttctttctaatctttaaaagttatttaatagtgtcattttagtcctaaatttttaaaaaattatttaatagtgtcattttagtcctaaattactttttctgcagacttctcttttatactgttttgctgatatttgagtcatagtccagatgtagatg

SEQ ID NO: 654559 - DNA, 583 bp, Homo sapiens
taaaaacatccttccaacaagcaaatgctcaagcaaaacctcatttatatcaataaataatacaaatcattttattctgaaacarctatatttaacacatactccaatgtcctgatgtcagtccttcatgaagcttagttccaaggtttcttgaagagctacaaatcattagggaaagatatttatctgataacattcaaccctagcactgatggtatagtctctgagatcctatttttcttggggctactttattaacaatcagtattttccatgtatatatgtgtatatgtgtgtgtgtgtgtgtgtgtgtgtgtgtgtgtgtgtgtgtgtgtctgtaggaggcagcagacagagatgaggtttcacttagcttttattgggtgataacataataatttattttatctaaagataacattaaaacatgatagcaattaaggtacttatgttattagataaaatatcaacacataaagtatcagataaaatataaaaataaaagtgaatagtatcaaacaacaggtgaattaatactggaagcttcttaatttcgcatttatctaatattctttctaaacaa

SEQ ID NO: 654560 - DNA, 591 bp, Homo sapiens
aaagataaagaaatttcatccatttatatagccaggcagatacaacccattacatacatgttctaaagataaaggacaacttgtcctcaagtaagaggacttgacagcgccktttgctacacagcccatcttacattcacctggtgattggggaggcacactcctttatgcaaaggaaaactaaactccatgtctctttgacaagtgggtagttgcaacttggagccaggcacctacgttaaaatcccacggagacaaggagataggagcactgcctttcttggtgtttacatttcaaagaaatgtctccaaggtcctcaagaaaaacactcctggaaacaagaaagaggctaaataagattttgtttgtttgtttgtttgtttgaagattttaaagatgtacaattacaagttttctgaaagaaatgctctaaggaaaaaaagtgaatgacagtgtgtatcccttttagcactaagaaagcttttgtttgttttggtttgtgtttacccttacaccagtaaggcctgtttaaagaagtaccacacatttatagtcagaaaagagatgccgactagctaaacttttcaata

SEQ ID NO: 654561 - DNA, 591 bp, Homo sapiens
aaagataaagaaatttcatccatttatatagccaggcagatacaacccattacatacatgttctaaagataaaggacaacttgtcctcaagtaagaggacttgacagcgccttttgctacacagcccatcttacattcacctggtgattggggaggcacactcctttatgcaaaggaaaactaaactccatgtctctttgacaagtgggtagttgcaacttggagccaggcacctacgttaaamtcccacggagacaaggagataggagcactgcctttcttggtgtttacatttcaaagaaatgtctccaaggtcctcaagaaaaacactcctggaaacaagaaagaggctaaataagattttgtttgtttgtttgtttgtttgaagattttaaagatgtacaattacaagttttctgaaagaaatgctctaaggaaaaaaagtgaatgacagtgtgtatcccttttagcactaagaaagcttttgtttgttttggtttgtgtttacccttacaccagtaaggcctgtttaaagaagtaccacacatttatagtcagaaaagagatgccgactagctaaacttttcaata

SEQ ID NO: 654562 - DNA, 591 bp, Homo sapiens
aaagataaagaaatttcatccatttatatagccaggcagatacaacccattacatacatgttctaaagataaaggacaacttgtcctcaagtaagaggacttgacagcgccttttgctacacagcccatcttacattcacctggtgattggggaggcacactcctttatgcaaaggaaaactaaactccatgtctctttgacaagtgggtagttgcaacttggagccaggcacctacgttaaaatcccacggagacaaggagataggagcactgcctttcttggtgtttacatttcaaagaaatgtctccaaggtcctcaagaaaaacactcctggaaacaagaaagaggctaaataagattttgtttgtttgtttgtttgtttgaagattttaaagatgtacaattacaagttttctgaaagaaatgctctaaggaaaaaaagtgaatgamagtgtgtatcccttttagcactaagaaagcttttgtttgttttggtttgtgtttacccttacaccagtaaggcctgtttaaagaagtaccacacatttatagtcagaaaagagatgccgactagctaaacttttcaata

SEQ ID NO: 654563 - DNA, 608 bp, Homo sapiens
gtctttgctattgtgaatactgccatgatgaacacacaagtgyatgtgtctttttggtagaatgattagatttcttttggatatctacccagtaatgggattgctaggttgaatggtagttctcttttaagttctttgagaaatctccaaatttttttccacagttgctgaactaatttacattcccaccaacagtatgtaagtgttcccttttctccacagcctcaccagcatttgttgttttttgactttttagtaatagccattctgactggtatgagatggtatcttattgtgggtttaatttgcactgatctgatgataagtgatgtggaacactttctcatatgtttattggccatgtttacgccttcttttgagaaatgtttgttcatatattttgtacatttttaagtggggttgtttgctttttgcttgcctaattgcttaagttcctcataaattttgaatattaaacctttgttggatgcatagtttgcaaatattttctccctttctgtacgttgtctgtttactttgttgatagtttcttttgctgtgcagaagctctttagtctagccggatcccacttgtcaatttttgtttt

SEQ ID NO: 654564 - DNA, 608 bp, Homo sapiens
gtctttgctattgtgaatactgccatgatgaacacacaagtgtatgtgtctttttggtagaatgattagatttcttttggatatctacccagtaatgggattgctaggttgaatggtagttctcttttaagttctttgagaaatctccaaatttttttccacagttgctgaactaatttacattcccaccaacagtatgtaagtgttcccttttctccacagcctcaccagcatttgttgttttttgactttttagtaatagccattctgactggtatgagatggtatcttattgtgggtttaatttgcactgatctgatgataagtgatgtggaacactttctcatatgtttattggccatgtttacrccttcttttgagaaatgtttgttcatatattttgtacatttttaagtggggttgtttgctttttgcttgcctaattgcttaagttcctcataaattttgaatattaaacctttgttggatgcatagtttgcaaatattttctccctttctgtacgttgtctgtttactttgttgatagtttcttttgctgtgcagaagctctttagtctagccggatcccacttgtcaatttttgtttt

SEQ ID NO: 654565 - DNA, 607 bp, Homo sapiens
tttgaattcattttaatgaaaaagcctttcaaagttgtctttccaaagggaagattaatacactatttcttagagataccatctaaaaaagttagtatctttctttcttttttcttttttggaaactcgcggtggtggtaatgtgagtgagtttgtcaatctttgcccctactgtgaatttgagaagcagaggaagagaaaaagagaaagacccccccgccccctgcctcccgcctcccgcctcygcccctctctctagcacacagcaggcgcgcaaggagtgcagtgttagctgctgctggactgagctcctcatcctacacttgcaggggttgctcttttggacagaaagctggaataaaacataaattttagacttccaccaaggccaggactagggtgaagggactaacgcactagtctcaggagcaactgttaagtaacgctaatcctgaatgaatgaaatagttttaaaattgaatgtaatcgcaaagaaaaaaaacccatgatagacaaaatattaaaactttaaataaaggcttgcactcgcacaacccaggctcaccggcctctccctgctcctggcccggtttcccagcttggttct

SEQ ID NO: 654566 - DNA, 529 bp, Homo sapiens
atttacacatctccctcccatgttagattctggacttcttgaacctagaactatgtctctctttatgccccataatgctttgcacatggtaggtgctcaatacacttttattaaataagtgcaagaattaacataaatgaaacgctgttttgaaaagtatatcatctctgtcttaggtaagggcaattcctcaaattgattttttaatcatttcatattcatgtggtaaaaattgtcataaactagcacatctgtgaatgcaatgttgatttgtatacaggaagcccttaggctaattttaatcttctgctgtctttcatgaacataatactaagaaatggtttctgtcccaaaccgttcataggcaccatgctgggaatcacaaagcatgctgggaatacttgtcaaggagaagtggraagctaagagtgatgccaggcaggggtcaggggacaaaccaagaccatagagtggggagagaggaacctaggcagagctaatcgccgagactaaatcaacaagcctaggg

SEQ ID NO: 654567 - DNA, 529 bp, Homo sapiens
atttacacatctccctcccatgttagattctggacttcttgaacctagaactatgtctctctttatgccccataatgctttgcacatggtaggtgctcaatacacttttattaaataagtgcaagaattaacataaatgaaacgctgttttgaaaagtatatcatctctgtcttaggtaagggcaattcctcaaattgattttttaatcatttcatattcatgtggtaaaaattgtcataaactagcacatctgtgaatgcaatgttgatttgtatacaggaagcccttaggctaattttaatcttctgctgtctttcatgaacataatactaagaaatggtttctgtcccaaaccgttcataggcaccatgctgggaatcacaaagcatgctgggaatacttgtcaaggagaagtggaaagctaagagtgatgccaggcaggggtcaggggacaaaycaagaccatagagtggggagagaggaacctaggcagagctaatcgccgagactaaatcaacaagcctaggg

SEQ ID NO: 654568 - DNA, 617 bp, Homo sapiens
aagttttcttctttttatgattattatacctttaattgcgaacattcattggattggctcagtagcattttatgtgagacaactttccattttaataagtacatattctccttcgttaatgtgaaatagaagtgcaggagtagggatgaaatggataattttgctagaagcaaattgaaactggctaggcaaaagcgtatatgtattttgccctctttttctgtttttagaaagtgcttgygttaactctcattctcagccagaagcgttaatgattcaaacgggctgtatatattgaaaaccatgaactctcacgtgcagagtacaatcagggagcaagcccgtgggtttgaatggaaattaacgttggtgtatgggaatgaatttcatagacaaggataatttagaaacctatgtgataaactgcaaacacagagcaaatggaaacatattggatcttttccctccactcctcatatttctccactattcagatgtccttccatgtgatcatgctttcttggcacactgaataggttcagtgattaagaggcagagaaaataattactgaatatttttaatacaaaatgaatagctcaggatatttgtaagggct

SEQ ID NO: 654569 - DNA, 520 bp, Homo sapiens
caggttatctatagcaaaatgtgtttcggttgaagaaatatgtagattttaaagaaattaatcttacttacgcaaagagtatgcttcagcagcatatgtaactttaaaattcatctaaaataggttgttagtactatgacaggaagtggcattcaaacaaacaaaatattcataaggatgttaatayagattagacatgagaacaagaaatatttggctggtctgattctcttgggtcactttaaaaattatttttaaaatttttgaaattgaggcataacttaaaatacaattaaatgcataaagtgtgccatttggttaatatttacagatgtatacgcctgtattaccagagcccagatcaagttacagatcagttcatcacccccttaccatttgttaatactttttattgattatctaggcacctcccacctatcactgttctactttctgtcatattatttaggttggcttgtgcttttgaacttacaaaaagtcatacagtaccagaatcata

SEQ ID NO: 654570 - DNA, 520 bp, Homo sapiens
caggttatctatagcaaaatgtgtttcggttgaagaaatatgtagattttaaagaaattaatcttacttacgcaaagagtatgcttcagcagcatatgtaactttaaaattcatctaaaataggttgttagtactatgacaggaagtggcattcaaacaaacaaaatattcataaggatgttaatacagattagacatgagaacaagaaatatttggctggtctgattctcttgggtcactttaaaaattatttttaaaatttttgaaattgaggcataacttaaaatacaattaaatgcataaagtgtgccatttggttaatatttacagatgtataygcctgtattaccagagcccagatcaagttacagatcagttcatcacccccttaccatttgttaatactttttattgattatctaggcacctcccacctatcactgttctactttctgtcatattatttaggttggcttgtgcttttgaacttacaaaaagtcatacagtaccagaatcata

SEQ ID NO: 654571 - DNA, 520 bp, Homo sapiens
caggttatctatagcaaaatgtgtttcggttgaagaaatatgtagattttaaagaaattaatcttacttacgcaaagagtatgcttcagcagcatatgtaactttaaaattcatctaaaataggttgttagtactatgacaggaagtggcattcaaacaaacaaaatattcataaggatgttaatacagattagacatgagaacaagaaatatttggctggtctgattctcttgggtcactttaaaaattatttttaaaatttttgaaattgaggcataacttaaaatacaattaaatgcataaagtgtgccatttggttaatatttacagatgtatacgcctgtattaccagagcccagatcaagttacagatcakttcatcacccccttaccatttgttaatactttttattgattatctaggcacctcccacctatcactgttctactttctgtcatattatttaggttggcttgtgcttttgaacttacaaaaagtcatacagtaccagaatcata

SEQ ID NO: 654572 - DNA, 539 bp, Homo sapiens
aagtacatgtctttaatatattcttcctgataagtacattttaaaaggmactttatatataaaataaacataagaatgaaaaaatgtagggaagacagaccatctaggaacctgaggaattgaggaaattatagagatagaaaacaaattagtggttgctatgtataactgtaaagggtaccaatgaggaggattgtcgtggtagtgaagtcattctctttcttgattgtggtgggggttacggaccctaaacgtgtcatacaactggatagatacatcgtttcctggttttgatattgtactgtaattttataagatgtaaccactggtagaaactaggtgaagagtacacatcacttctctgtactgtctttgccaattcatgtgaagctgtatttcaaaataatttttttcttaaataacatttaaattctgactggcagtttaatttgtgcttcaaaactgattcaaaaggactatgaccaatgatgaaaatggtaaattacaacaattggtcctataaccaactctcctacatt

SEQ ID NO: 654573 - DNA, 539 bp, Homo sapiens
aagtacatgtctttaatatattcttcctgataagtacattttaaaaggcactttatatataaaataaacataagaatgaaaaaatgtagggaagacagaccatctaggaacctgaggaattgaggaaattatagagatagaaaacaaattagtggttgctatgtataactgtaaagggtaccaatgaggaggattgtcgtggtagtgaagtcattctctttcttgattgtggtgggggttacggaccctaaacgtgtcatacaactggatagatacatcgtttcctggttttgatattgtactgtaattttataagatgtaaccaytggtagaaactaggtgaagagtacacatcacttctctgtactgtctttgccaattcatgtgaagctgtatttcaaaataatttttttcttaaataacatttaaattctgactggcagtttaatttgtgcttcaaaactgattcaaaaggactatgaccaatgatgaaaatggtaaattacaacaattggtcctataaccaactctcctacatt

SEQ ID NO: 654574 - DNA, 542 bp, Homo sapiens
caggtcagtcacgctgtgtttcccaccatttccactcagcgtttaattaaattgtgtgcacagcagcttacccttaaaacgcatctgggattgcagattgtaaccatgagkctacaacatcctgatgaaattctttggtaatgccagaatttcattactttatcagtaatggctgaaaatatagcttatttgcatttgagtactacttcatcaaaggtaaaatgaaatcactgaaatgtgtcatctgttagcaggagtgcaaccatgaacaccaacaaactaacaaactgtgagggatgccgagaagagggatggccagtggctccctcttcatctaatgaaaacacaccatcccagggtagcacaccagaaccgtgtcaactcattttcctccttgtgcttctccacatgtgttctcatagtaattacttttctaaacctggaatgagagggagtgaaaacaccaaagaaaggttatgaaatacaagctgaagaggatgcccttcatgctgactaaccaagatgaggggaagaaccaaaaa

SEQ ID NO: 654575 - DNA, 542 bp, Homo sapiens
caggtcagtcacgctgtgtttcccaccatttccactcagcgtttaattaaattgtgtgcacagcagcttacccttaaaacgcatctgggattgcagattgtaaccatgaggctacaacatcctgatgaaattctttggtaatgccagaatttcattactttatcagtaatggctgaaaatatagcttatttgcatttgagtactacttcatcaaaggtaaaatgaartcactgaaatgtgtcatctgttagcaggagtgcaaccatgaacaccaacaaactaacaaactgtgagggatgccgagaagagggatggccagtggctccctcttcatctaatgaaaacacaccatcccagggtagcacaccagaaccgtgtcaactcattttcctccttgtgcttctccacatgtgttctcatagtaattacttttctaaacctggaatgagagggagtgaaaacaccaaagaaaggttatgaaatacaagctgaagaggatgcccttcatgctgactaaccaagatgaggggaagaaccaaaaa

SEQ ID NO: 654576 - DNA, 542 bp, Homo sapiens
caggtcagtcacgctgtgtttcccaccatttccactcagcgtttaattaaattgtgtgcacagcagcttacccttaaaacgcatctgggattgcagattgtaaccatgaggctacaacatcctgatgaaattctttggtaatgccagaatttcattactttatcagtaatggctgaaaatatagcttatttgcatttgagtactacttcatcaaaggtaaaatgaaatcactgaaatgtgtcatctgttagcaggagtgcaaccatgaacaccaacaaactaacaaactgtgagggatrccgagaagagggatggccagtggctccctcttcatctaatgaaaacacaccatcccagggtagcacaccagaaccgtgtcaactcattttcctccttgtgcttctccacatgtgttctcatagtaattacttttctaaacctggaatgagagggagtgaaaacaccaaagaaaggttatgaaatacaagctgaagaggatgcccttcatgctgactaaccaagatgaggggaagaaccaaaaa

SEQ ID NO: 654577 - DNA, 542 bp, Homo sapiens
caggtcagtcacgctgtgtttcccaccatttccactcagcgtttaattaaattgtgtgcacagcagcttacccttaaaacgcatctgggattgcagattgtaaccatgaggctacaacatcctgatgaaattctttggtaatgccagaatttcattactttatcagtaatggctgaaaatatagcttatttgcatttgagtactacttcatcaaaggtaaaatgaaatcactgaaatgtgtcatctgttagcaggagtgcaaccatgaacaccaacaaactaacaaactgtgagggatgccgagaagagggatggcyagtggctccctcttcatctaatgaaaacacaccatcccagggtagcacaccagaaccgtgtcaactcattttcctccttgtgcttctccacatgtgttctcatagtaattacttttctaaacctggaatgagagggagtgaaaacaccaaagaaaggttatgaaatacaagctgaagaggatgcccttcatgctgactaaccaagatgaggggaagaaccaaaaa

SEQ ID NO: 654578 - DNA, 582 bp, Homo sapiens
gctttttttttttttttccctgagacggaggctcactctgtcgcccgggctggagtgccgtgccgtggagccatctgggctcgctgcaagctccgcctcccrgcttcatgtcattctcctgcctcggcctcctgagtagctgggactgcaggcgcctgccaccatgccctgctaatttttatgtacttttagtagagacagggtttcaccgtgttagccaggatggtctcgatcgtgatctgcccgcctctgcctcccaaagtgctgggattgcaggcatgagccaccgtgcccggccgagaaagactcttttgaggtagacaaattagtgtatgcacggagattttaaggaaaaaaaatcccaaataaacggataatttatattcctgagatgaagtagtcagtaataaaacaaaaaccaaaaagagtgaattaagaaattggaagaatagagtaagaatctgaaagctctttttcttcctccagcttctcatttcttctctgctgtcattccttttgtttcctcagcttctcttcacccttctttgctcaatctgggatctcagaggagggaggtaatgg

SEQ ID NO: 654579 - DNA, 608 bp, Homo sapiens
tatcttttaccactaacttcttactctgatccaaaatatttggcttttaaaattctccttatttcattatttgtcttcatatttaaaatatcttctgtgatatttcacttctaattttttaatatttttacatgaaaagagatgaatactgatacccctgatttttaagagakgatttttattgccctgttaatttggaaataaacatgcgataatatgattttaaaatgctaaagtggagctctagtaattcaactgaaaatagcattatgaataaactatactgtggcaattctttaacataataaaggaggacatcaacagagcagaaaattgatgaattttggaatatatgaagcatgttgtatcaaattgccagagaaagtaatgattttctgttactgaacttaggtcacaaagcctactgcctgctacatcggcaagtggacctgtttctctaacaatggcccgaaacttcacaacatcaaaggagaaatcattgccagcaaaagcatttccgggtagtaggaaagaatacaagtgaataacattagtccagaagttttaataatattctttgctggttgaaattcatgtttaatatgatg

SEQ ID NO: 654580 - DNA, 567 bp, Homo sapiens
tttagcaaccaacagattctattcttatacctgttggtcatgtccaggcagttatgtgtaaaataattacacaatgtttcaaaatttcaagatgtttgcctacctatatagtgtccttcactctcctccccagctctccaaataatatccataattcaaagaccagttaaatcctacagrcatattcacagaataactgccctgaaaacattgcttaaattaatgaagaccatctatggacaatgcatcttcaagagctcaagatctggtgaaaaaacggaaacaaagaagaaatttcaatacaatgtgatgaaaattttaaattatttctctcttgcaaatttccattgcttgtttgaacattcaggagaatagtactgctttcccattgaatgtataaataaatgtaagaatgaaggttggccctccctccaaattcattaaacattaaattttttaagtaaaagataagagggctgtatgaaaattaaaattcatgattacttccaatatagaaaataattgaaatagataaaaacacaaccaaatagaaatggatattgctaa

SEQ ID NO: 654581 - DNA, 623 bp, Homo sapiens
atgttggtggtaggtctggaaggaggtgattggatcatgggggtggatttctcagaaatggtctagcatcctgtccctggtgctgtccttgtgagagtgagtgaattcttgcaagatctatttgtttaaaagtgtgtggtgcttcccctgccttgccaggtgatgtgcctgcctgctccttcttcatcttctgccatgaataaagcctcctgaggcctcaccagaagctaggcagatgccagaatcatgtttgtacagcctgcagstatacaaacctcttttcaaagctcttttctttataaattacccagtctcaggtatttcttcacagcaatgtaagaatggcctaatacagcaaattggtactgagacatggggcattgctataaagatacttgaaagtgtggaagtgactttggaactaggtaatgggcaggagttggaagagtttggactgctcctaatacaggaagatgaaggaaagttctgaatttcttagagactagttaaatggttgtgaccaaaatgctgatagtgatatggacagtgaaggataggctgatgcggtctcagatgaaaatgaggaacttactgagacttggaataaaggtcatgcctgttat

SEQ ID NO: 654582 - DNA, 623 bp, Homo sapiens
atgttggtggtaggtctggaaggaggtgattggatcatgggggtggatttctcagaaatggtctagcatcctgtccctggtgctgtccttgtgagagtgagtgaattcttgcaagatctatttgtttaaaagtgtgtggtgcttcccctgccttgccaggtgatgtgcctgcctgctccttcttcatcttctgccatgaataaagcctcctgaggcctcaccagaagctaggcagatgccagaatcatgtttgtacagcctgcagctatacaaacctcttttcaaagctcttttctttataaattacccagtctcaggtatttcttcacagcaatgtaagaatggcctaatacagcaaattggtactgagacatggggcattgctataaagatacttgaaagtgtggaagtgactttggaactaggtaatgggcaggagttggaagagtttggactgctcctaatacaggaagatgaaggaaagttctgaatttcttagagactagttaaatggttgtraccaaaatgctgatagtgatatggacagtgaaggataggctgatgcggtctcagatgaaaatgaggaacttactgagacttggaataaaggtcatgcctgttat

SEQ ID NO: 654583 - DNA, 409 bp, Homo sapiens
ctgctgctctggccatgtgacataccttcttttgcttcaycttctgccatgtgtaaaagctccctgaggacccttcttgaagtcaagcaactgccaatgcaaagcttcctgtacagcctgcagaactgtgagccaagtcaatcttttttttcagtataaattatgtagtgcttaggtattcctttatagtaacgcaagaatgccataatacaaggcataatggtttgcattttaaaaatgaaaattaaatttttgtaatttatcatgaaaagatgaaatgtgttaataatgagcaatatctacatgttgtcttagaggtgctgacaatctgtcaaggaattacatgcattgatcaagcagtttaccttcaagttgaataacaagatattcctatctaacataacaaaat

SEQ ID NO: 654584 - DNA, 391 bp, Homo sapiens
aaaacggtatgtatttctctttgagaaagttcactggcaccagtaaggtttttgagagctggcaggctctgataggtgagggacagtggtgggtaaagctagtcttagtgttcaagaggttgtttcagtaaccatttgataaaactggtttcagcttaaagcaggtaatttcagcagccaggcatgcagagaattatgcttttggagtggtgtttttgccctgaatgcctcctccccctggctygttgatggttttatttggtgtgataagaatgacccaattcatatgatcaatttttacatttaaccctttccatcaagatctttctcttaaagcatcaaccatgtttatagttgtacaaagactacaagttaggtttaatcatccctt

SEQ ID NO: 654585 - DNA, 615 bp, Homo sapiens
agcttgccaaagccaccccttgggtcaaaggaaacatgatcacgatatcagctgctgaaaggggcacaccaaagcctgggaacagatttagagaggtggtcatctcttgccctctgtccccttcctagtgcactgctgcagatccagcagtggtcatcctgttggggcccaaggaacgtgggctgaaagaggctgcttcttaggtttctccagcagctctgcccctgctgaagactagtacacactgggacagggtgcttttggcacttcgtcacttctgcacctgtcgaggacaagtacacagaggagaagaccctgcagccagctgttactcttaagcaccktctactggactgaagcctgaattacaccaccaaacaaaaatacatcaccacaccaagccactacaggagcctatctgcaaccaaggaacttgtacagagccttggtcctctgaaagtacccagaaatgaagcaaaatgatcctatacaacatacaccacagtcatacccttaagagaaagaaagaatgaaaaattaaaaaaaaaaaactctttccaaatgatagcaaattcaacaaaggaagcatcaagtctctcagatgagaagaaacca

SEQ ID NO: 654586 - DNA, 376 bp, Homo sapiens
gtgtttgtgtgcgtgtgaagcagggaaagagagcaagagtgagagtgagcaagagagagaggagagagagggagagaatcagacagrtacaggaagagagtgacagagctacagagacagaattaaaaggggacaccaagaatattgagctgagaaactataaaatgggagttgccattaaacagaatggggaagagcaaattttgggagtttcagtggctccatacagacatattaattttgagattcttaactgacatccacgtggaaaagtcagggagtgttgggtgtagtgtccagtgtttaggtgtaatatgaaatatcaggaaattaatgacacaaaaattagtaagaaagcaaagataagaaagaataa

SEQ ID NO: 654587 - DNA, 376 bp, Homo sapiens
gtgtttgtgtgcgtgtgaagcagggaaagagagcaagagtgagagtgagcaagagagagaggagagagagggagagaatcagacagatacaggaagagagtgacagagctacagagacagaattaaaaggggacaccaagaatattgagctgagaaactataaaatgggagttgccattaaacagaatggggaagagcaaatttkgggagtttcagtggctccatacagacatattaattttgagattcttaactgacatccacgtggaaaagtcagggagtgttgggtgtagtgtccagtgtttaggtgtaatatgaaatatcaggaaattaatgacacaaaaattagtaagaaagcaaagataagaaagaataa

SEQ ID NO: 654588 - DNA, 538 bp, Homo sapiens
attgactagtagatgctatgaatgcatcatgctctttggcccatttcgaacactcaggtatgtctgtactcttagttcatctattcatcattgcttctacagttccctcatgctttaaaagatatgtggcttttataatttatccagctttttcttgtcattttaataagagtatgtgtcttatacaactactacattcatcccagaagtagaagcaaactattataatcccattatttttattcctactattctcttttcagaatttcttttagatattccttggatagttttattcaatcctccatgtctttcagcttatcttatgttctatcttttggttcatattctgcawtctggataattctttatcttcacttgctagtttgttgatattccttttggtgactataagctgctctttaaaatggtcaataatgtgtaagatgtttattatcttgccctttgcagaaaaaaattttcagcttttgctctggaatgattttgcatctcttccaccaaacttccagtgtatcaa

SEQ ID NO: 654589 - DNA, 470 bp, Homo sapiens
cagaaccactgtaaataacctttatacccaacagtgaggaattaatttcatttagttacccaatctaatcgaatgcagcaatgaaaacattttttagaaggttatttaattcatagaaaagcatccacagtaaatttttttcaagtattaaaaaaagaggtagaacaatggtacttttactccttgtgttataagacaaacccagactgaactttgacataggccaaggtcaatgtgtctaagaaatgttttattatactatttttattcttaggctcctccattcctcttttaggactcctttgggttctcagaatggacagagcaaataaattccgttcagggatcctggacctgcttagcgcaggaagagacttacttagatgctgcagctgggataacttacacaagtcatgttactagcaagcagctgrcggtggacttggacccgtgtccagacctccagccta

SEQ ID NO: 654590 - DNA, 621 bp, Homo sapiens
tgtatcacagatttttatttttatctgggaaattattgaggctgacactgccttgatttggcaggagcatggagttctctttggccccaataaaattgcaataggggttgggcccagctcagatgttccttctttcaaatcacttttgaggtcacatagtagaatagagcaattttggtgactgtaagtttgggtgacttcccaaagttcccgaagttgggtgacttcccaactttggtgactgtgacctctaggaaaatatagacattatgtggcaatacagtttacwggtactgcatatatatagtctgtgtatgacacacacatgtacaacaagtttcatgaaaaaatacttagatctactatctgcaatgccctctgatattttcatttaatgttttatttttctaaaaatggtcaagacccagggcataaactttatgatctgctagttcatcatgactcttgaggtctgcaaaaaacaaaacaaaaaaaaacaactggcttcagagccatctaccactaactagctgagttaacttgggcaaataatttaccaagtagccaggattaaatcatatcctcctagatggcctggatgatctatgaataattttttaa

SEQ ID NO: 654591 - DNA, 569 bp, Homo sapiens
gcttgctttcctctactgaacgacacggttccagttggttactctctcgtacagccacagctaccgctctcgctctcgcctggttttagtaactgcttccttcccccaccccctcagccctatagttactaacagctccccgctgttactggttactactggttacggaaggcgaactatgtgcccgacactgtgctmaatgcccacatatattatcttttagtcctcacaatccaataaattagatggctttagtcctgttgcagaggtgataaattcagagtgacagtgacagagctagaaattgaaggtaggtgtgtttatgctagagtctgtgcactcaaacacgattccttacttcttgcatcagttgttaacctcccttcaagagtgtcaaacctcctggtaacccgcccattcccttaactggaaatgagggtgctgttgcaattttctcatccagccattccacaaatggtatctggaatgtgggacccacagtccagaatcctgagggctgctgttgagagcatcaagacgcgcccaggaagtcagggcggtgtgcactc

SEQ ID NO: 654592 - DNA, 422 bp, Homo sapiens
agataattaggaatagagaacttcctcaactcgatttttttgaaactacaaaagaaagttacagctaacatacttaacagcaaaaaaaaaaaacagatgttttcccctaagattccaaaaaaggcaaggctgtcccctctcaccacttccatttaacactgaatggaagtcctagctaatgcaacaagataaggaaaggaaataaaatgtatataaattaggaagaaagaaataaagctacctttttttgcagatgattgtcyatgtaaaaaattccaaagaatcagccaaaaaaaaaaaaaaccctagaattagtaaatgattatggcaaagtcgcaggatataagaataatatacaaaatcattagcatatatatgtatagatatatagagagagaataattgaactttgaaatttaaag

SEQ ID NO: 654593 - DNA, 486 bp, Homo sapiens
gatttaaatccagtaaaacacaagagacacatctgaaataaaattaattagaaatgttgaaatgaagacatggaaaatatacaccatgaaattactaacaacaacaacaaaactagtgtagtaatattaatatcagacaaactaaaacttgaggtataatagatagtacgtaacaatatattacatacatatttaatatatatacttacagaaagaaaaaatccaccaaggaaatataacaataatgaatttatatgcacctaaaaaaattacctgaaaacatacaatacagacacagacaggattagaaaaaaaaatgaccaatataaaaaataatgggagatttcaacaaacatctattagaaatcatataccaagtggccakgtgcagtggctcatgcctgtaatcccagcactttaggaggctgaggtgggtggatcacttgaggtcatcagttccagaccagccatgccaacatggcgaaa

SEQ ID NO: 654594 - DNA, 473 bp, Homo sapiens
gactttcagcttaaaaaatttttcaaaagcaaataattaataaaatcaccacaacatactaatattcatttaatctgaagccaactattgaagtttagtactgtaaacaaaattaaaacccaagggcagtgtagaaggctgtcaaagtggcaaaataaatattttaaaataatatcagaggttgctccaatattgaacaaacattgcacacctcttaaatagagaaatttaaatattttctttttaaaattctgacattccaaaagagtcagttcagaaggtagatactttaaaaaatgtgggcttatacttggagccacatggttattgactagaatttagttaagcatgtgcctggaacgctagacctgctgcctttcacaacattgcttttggaactcagcatctctccactrttgcttccagagacagctttttaaaatggaaaattgattgatgaaatcttaggcatg

SEQ ID NO: 654595 - DNA, 645 bp, Homo sapiens
aggagaactcttacccaaaatgaggctgmgtataagtttgaatttctacaattagtttgtggcacactgctaataataataataataataataataatataaagttctagccaactgattattatagaaatactaaggcctacttagagaccacatgaggttttggaaacatgcaaactgtaagttaaaaataattttgttttgcattataaaaggactacaaccatagggccacccaccacattgaaaaccagaagagaagaaaaacacagtctctctcattcttgaggaagtgtagtgtggcagttaagagaaaagatcctggggccagactggttggttcaaatcccaatttgtaagctttcctatgccccagtttcttcatatgttaaaatagtaataaaggaactacctaccccatcaggtactaatgtgaattaaatgagtaaattcttataaaatgctttagaacagtgtctggcatcaggtaaaatgctgtggattagttctcattctgactaccactgccccaatacactgatgttaacatgctgatatatttattcgaagtcttattttcctatgcctatttttcacacagtggtaacccaataaacttttaaattatagtaaactttagagagc

SEQ ID NO: 654596 - DNA, 647 bp, Homo sapiens
cagactctcaatggcatccagaaatataaactacatagaaaagacgtgaaagccagccaggcttggcttcaaatcccagcactttggaaggctgtggcaggagggttgcttgatctcagaagcttgaaactagcctaggcaacatagtgagccctcatctctactgaaaaatcagaaaaattatgcgggtttagtggtgtgagcctgtagtcccaggaatcagtggatgaggccctaggatgtcataggcctgagaattccatgctgcagtgagctgtgattgtgccactgtactccagcctgggtgaaagagtgagatcctgtgcagaaacaaaagaagaamaaaagagatgtgaaagcctatatattgaagactaccaagtactgcttagagcagttaaagacctttggaatagaaaatgtttcttcttgcatttcaagattgcttttgttttggggggacacactattttttaggaatatgaagttcttgttaggcattcctgtaaaaaaggccactttttgataggattgtattgaatctgtgggttgctttgagttgtatttttatcttaaccatgttacaacttccaacccatggacacaagatgtctgtccattgatttaggtcttcctgaatctcctcg

SEQ ID NO: 654597 - DNA, 584 bp, Homo sapiens
gtttattgttgctcattaatgtccttttctttcagactgaagaacgccctttggcatttcttttagcataagtctggtgtttgtgaaatgcttcagcttttctttacctgggaaagtctttattttttattcatgtttgaaggatatttatgctggatacaccattctagggtaaaatgtttcttccttaagcaatttaagtatgtcatgccactttcttctgacctgtaaggttttatctgaaaataccagatgtatyggagctacattgtatgttacttgtttcttctgtcttgctggttttaggatcctttctttatccttgatctttgagtgtttggttattaaatgccttgaggtagtcttctttgggttaaacctccttgtataatctcttgtactttaatattaatactttctctagatttgggacattctattatccctttcaataaattttctaccccaatctctttctttacttcttctataaggccaataactcttaatttgcccttttgaaaccattttctagatcttgtaggcatgcttcattcttttttattattgtttcactttgtttc

SEQ ID NO: 654598 - DNA, 586 bp, Homo sapiens
gtgtcattagtaataaggtcctgatagcttaatgtcatcatcataggattagcctattattggtagcccaggaatctgtgtgcctatctcaktgcactgtatggacaggaacaccatttgatatttggatcattgtacatagtatccaattctatggttcaatggtaatttgaagtaattatgatgaatggctgtggtagtcttttggattgatccaatctgaagacaggctgttttcaatagtaatccttattgtctttggaagtatgaggtcttttaggcaaggccctctgtaagccagaaatttgcttggagtagtaggcaaggttatttctatgtctaataagtgagcagttatctgtttgtaaatgtggctaaggtgttgagggtcatttgagcccttaattaaagatttcattgtgggatgagaagattgattggaaagtcataatttgtttttccatttctattaagagcaagttgcaaaatatttatagtcactgatctgtagtgggatgatatcttcaaatataaaagcctagaagatgctgagtactgatggaatattttggcacacttcccaatt

SEQ ID NO: 654599 - DNA, 586 bp, Homo sapiens
gtgtcattagtaataaggtcctgatagcttaatgtcatcatcataggattagcctattattggtagcccaggaatctgtgtgcctatctcattgcactgtatggacaggaacaccatttgatatttggatcattgtacatagtatccrattctatggttcaatggtaatttgaagtaattatgatgaatggctgtggtagtcttttggattgatccaatctgaagacaggctgttttcaatagtaatccttattgtctttggaagtatgaggtcttttaggcaaggccctctgtaagccagaaatttgcttggagtagtaggcaaggttatttctatgtctaataagtgagcagttatctgtttgtaaatgtggctaaggtgttgagggtcatttgagcccttaattaaagatttcattgtgggatgagaagattgattggaaagtcataatttgtttttccatttctattaagagcaagttgcaaaatatttatagtcactgatctgtagtgggatgatatcttcaaatataaaagcctagaagatgctgagtactgatggaatattttggcacacttcccaatt

SEQ ID NO: 654600 - DNA, 586 bp, Homo sapiens
gtgtcattagtaataaggtcctgatagcttaatgtcatcatcataggattagcctattattggtagcccaggaatctgtgtgcctatctcattgcactgtatggacaggaacaccatttgatatttggatcattgtacatagtatccaattctatggttcaatggtaatttgaagtaattatgatgaatggctgtggtagtcttttggattgatccaatctgaagacaggctgttttcaatagtaatccttattgtctttggaagtatgaggtcttttaggcaaggccctctgtragccagaaatttgcttggagtagtaggcaaggttatttctatgtctaataagtgagcagttatctgtttgtaaatgtggctaaggtgttgagggtcatttgagcccttaattaaagatttcattgtgggatgagaagattgattggaaagtcataatttgtttttccatttctattaagagcaagttgcaaaatatttatagtcactgatctgtagtgggatgatatcttcaaatataaaagcctagaagatgctgagtactgatggaatattttggcacacttcccaatt

SEQ ID NO: 654601 - DNA, 586 bp, Homo sapiens
gtgtcattagtaataaggtcctgatagcttaatgtcatcatcataggattagcctattattggtagcccaggaatctgtgtgcctatctcattgcactgtatggacaggaacaccatttgatatttggatcattgtacatagtatccaattctatggttcaatggtaatttgaagtaattatgatgaatggctgtggtagtcttttggattgatccaatctgaagacaggctgttttcaatagtaatccttattgtctttggaagtatgaggtcttttaggcaaggccctctgtaagccagaaatttgcttggagtagtaggcaaggttatttctatgtctaataagtgagcagttatctgtttgtaaatgtggctaaggtgttgagggtcatttgagcccttaattaaagatttcattgtgggatgagaagattgattggaaagtcataatttgkttttccatttctattaagagcaagttgcaaaatatttatagtcactgatctgtagtgggatgatatcttcaaatataaaagcctagaagatgctgagtactgatggaatattttggcacacttcccaatt

SEQ ID NO: 654602 - DNA, 488 bp, Homo sapiens
ttgtcaagctcagattttgtttgcagtgtgcggttatctggataacctacaaacagggttgcactttgggaggtcaggctggtttaaatcctccctccatgggcgtcagctgagtttggcctggtttttctttctggcctacgagaacagcacaaaggtgagaaggaatcaacacaaaaaatgctaaaaagtcaaacagccagagtgcctcttttcctccaaatgacygaaacacctctccagcaagggctcagaaatgggctgagactgagatggctaaaatgacagaagtagaccagaatgggggtaataatgaacttcactgagctagaggagcatgttataacccaacgcaaagaagctaagaatcacgataaaacaatataggaattaagtataagatatcacagtctatggtaatttgggctttttcaaaataaatattgtttagctgatacagggtcatttaaacaattgcaggcatataa

SEQ ID NO: 654603 - DNA, 453 bp, Homo sapiens
ttgagaatggccattttaaaagttttttttaaattcaatttttttcctctacaattaatagctattttatggtttgactaatggagatacatttcaagcgtacattcatgtgcttaggattttatgaagcttccttacacttgcaattccctggctgttaccaggaaacagccctcagctcgctgctttcacagaaccatatattgttatggcatccacagctaaattcaaatcgaagagcaaacctctcaggtttgtgtgctattaggtgatacatgcttcagttcccactatgagggaggtcaaccccagagagctttttgttatttccccaaaatggaagctgggaaacaaagttgcttccytaagaataaagtaaaacttacttccctgggaaggtggaagtgagtagaaatggatttgagaaagaaagaacattttaaacaagaattc

SEQ ID NO: 654604 - DNA, 220 bp, Homo sapiens
ggtacaacttgtggctttggttttttcacttagcaaaattattttgggattcatctgtcttgttgcatgtatcatttctttttatttctaagtagtattccactgcctgcatataacagaatttctttgtctattcgcctgttgatggatgctgggttgtttccaggttttgggctatcacaartaaagttgctgagaacattcctatacgagtctgtgt

SEQ ID NO: 654605 - DNA, 268 bp, Homo sapiens
aaatgggccacgttaacctctactgatcctctgtttaacactaccaccagccttggagaggataagagactcactttgtaatactccaggttttctttccaaatattcagaaacagcccttattaatggctataccttaacttggctttcaagtctatcaataatttggccactgtcttcttatacctacccaacactagcaaaatttgattatttgatgacaaactttatattctcctaacttcacwactttgtgcttttttgtgcc

SEQ ID NO: 654606 - DNA, 580 bp, Homo sapiens
ctgccatcagcctgggtgatggagtgactctagttagcacaggttctttgttgaagtctattggatatttaggtgaggtagaaatagaatatcattgaggttaggggactgtttgttattatagcataacctggtccattctgactaaatacatataggcatcatcaaaatcacttcctggtccactatggctgctagagatktagccatcaccttcatgtcccatcaagaaggaaaactagagaagggcaaaagggccaaacttcctagtgaagtcatctcccttacggagtcttcctggaagtcccacacaatgttttaacttaaattgctcagaatttagttacacagccaatgtattgataactggctgcaaagggttctgggtaatgtagtcttttagcagcacattgttgcactgaatgtaattaaggctgagtttctaagaaggagaaaaaagatattagataatcaaccaacaccatctgccgtaaaatatgaccctcactttcttcttttatttatattttcttaatttcttaaataaaaacttttataatttcatataagaaaaaagtta

SEQ ID NO: 654607 - DNA, 446 bp, Homo sapiens
tgtcccatcaagaaggaaaactagagaagggcaaaagggccaaacttcctagtgaagtcatctcccttacggagtcttcctggaagtcccacacaatgttttaacttaaattgctcagaatttagttacacagccaatgtattgataactggctgcaaagggttctgggtaatgtagtcttttagcagcacattgttgcactgaatgtaattaaggctgagtttctaagaaggagaaaaaagatattagataatcaaccaacaccatctgccgtaaaatatgaccctcactttcttcttttatttatatttwcttaatttcttaaataaaaacttttataatttcatataagaaaaaagttattgggaccttcttatttattcatcgggacagctcaaagtctctcttaatcacccccatagaagcccagtctttcccctctaagt

SEQ ID NO: 654608 - DNA, 486 bp, Homo sapiens
gggctcgtactaaaggctgagacaatgaactactcaaatagccaactaatcagcaaggccaayagaaatctggtcgagggcacaatagtttcacagaaagaaaaaaaatgaaagccatataccctcttcttgctggtttaagattaaaaaaaaaaaaaaaaaactctacctaccatgttcaaatactgccagccattaggaaaagtcagctgtttgagtaattcatttgttttccttggccccttcacagcttctgaagaaagtcaatgtacaatttgcttgtttctgttagattaggttctatctttgagctcttagtaaacatgcacatactcacactcaaacacacacacatgccttaacctacttcccctagaaacaaactggaggaaggagagaatcctcaggaacaaattcagtgataccccaggtgctgtttccccaagtcttgcccctgacacaggagaacctggtgtgattcaagga

SEQ ID NO: 654609 - DNA, 408 bp, Homo sapiens
tgtgagactcaagcagtgaaatccagggagagaaagagaaggaagagaaagagaaagayctttaccctagcactgatagaaggatttactcacccacaaaagtgtgtgaaataaggattgatctgaggaaattatcttagacagcatgaagtgtgtgtgagtgtgtatgtgtgtatatatttgtgtgtgtgtgaggaaagaggggaaaatctagtttaaaaaatcaagcattttgaagaaaatgttggtctttgctcttcatggagttttatgtgacttagattattttcatattaattttctttcattcagcaaatacatactgagcacaaagtatgttccagcctctggatttaactagaattaacatataaatctccttcttgcttactcagttcctcaaaaagc

SEQ ID NO: 654610 - DNA, 408 bp, Homo sapiens
tgtgagactcaagcagtgaaatccagggagagaaagagaaggaagagaaagagaaagatctttaccctagcactgatagaaggatttactcasccacaaaagtgtgtgaaataaggattgatctgaggaaattatcttagacagcatgaagtgtgtgtgagtgtgtatgtgtgtatatatttgtgtgtgtgtgaggaaagaggggaaaatctagtttaaaaaatcaagcattttgaagaaaatgttggtctttgctcttcatggagttttatgtgacttagattattttcatattaattttctttcattcagcaaatacatactgagcacaaagtatgttccagcctctggatttaactagaattaacatataaatctccttcttgcttactcagttcctcaaaaagc

SEQ ID NO: 654611 - DNA, 408 bp, Homo sapiens
tgtgagactcaagcagtgaaatccagggagagaaagagaaggaagagaaagagaaagatctttaccctagcactgatagaaggatttactcacccacaaaagtgygtgaaataaggattgatctgaggaaattatcttagacagcatgaagtgtgtgtgagtgtgtatgtgtgtatatatttgtgtgtgtgtgaggaaagaggggaaaatctagtttaaaaaatcaagcattttgaagaaaatgttggtctttgctcttcatggagttttatgtgacttagattattttcatattaattttctttcattcagcaaatacatactgagcacaaagtatgttccagcctctggatttaactagaattaacatataaatctccttcttgcttactcagttcctcaaaaagc

SEQ ID NO: 654612 - DNA, 408 bp, Homo sapiens
tgtgagactcaagcagtgaaatccagggagagaaagagaaggaagagaaagagaaagatctttaccctagcactgatagaaggatttactcacccacaaaagtgtgtgaaataaggattgatctgaggaaattatcttagacagcatgaagtgtgtgtgagtgtgtatgtgtgtatatatttgtgtgtgtgtgaggaaagaggggaaaatctagtttaaaaaatcaagcattttgaagaaaatgttggtctttgctcttcatggagttttatgtgacttagattattttcatattaattttctttcattcagcaaatacatactgagcacaaagtatgttccagcctctggatttaactagaattaacatataaatctycttcttgcttactcagttcctcaaaaagc

SEQ ID NO: 654613 - DNA, 535 bp, Homo sapiens
aatcttcacttcaatgttattattataaccactattttataatagcagtatatcatagaactcagatttatctattctaactatatgctaagcaatttgctaaatgctttgtacatattcgtgttttccatctttcctcaaactttatgaaatatatactagtttctatcctcatttaaaaacaagaaaacaaaaccagagaggttgagtgaattgtccaatgtcacccaactattagagagtagagtcgtaatttaaatccaaggcttccagggcctagtgtctgaattgttaaaaattattgctcttctgcttcccctgccagataggcaaacaccaaagtcttttgggtccccagagtgcagaaaaactagwttaaatacaatcctggatgaattctcgacttgagggtctgtgtctttccccagcatcttctcattcacgaataagattcccctatcaagttgttctaatcacagcttgcttctctcctcccaaagccagggcaactatctctcccccgaatccctatctg

SEQ ID NO: 654614 - DNA, 573 bp, Homo sapiens
gagatcagaaaccccatggaaggaagtgaagaggcaacacatggggaacgttgacaaggcccatcagtggaaattcaaagaaagtgccaacaaaaatatggtatccgattgtaagggtctcactcaaagagcaaacaagtgtttgcaacagtgcatgtgagaatttaggcaagcagagctggatcagtttgggagaagaaagagctgggcagatagtcatagaaataggccatctctgcaggaaacagcttgtctttatggcagaagaaggctacactgaacatctgccacaccccaacagtgtgcctcgtgcaaatatctgtccaaagaaaatccaaataatgtaatgatgagtaatttttttaaaaaaacaaaaatactatgggaaggaatatggagaagagcaacaaarctcaccagtagataaaaaacactcactaggaaagtgttaccatggagtagacagaaaatatgaccagacatcatattatgaattttaaaccatgaggaatataattatgcctctgaaggaatacttgaaagcagagatgcagagtctcaggaattgaatgg

SEQ ID NO: 654615 - DNA, 554 bp, Homo sapiens
gctggagcctgagcttggactagcttgagatattaaaaatctctggtgctcagccttagggggaccccacactttcatgagttttacctccaaaagccccaacaggttaccagggtgaagatggggtaggggatatacccctgatctgtcagtttagggaggggaaaagtaaccatttcgaaatacacccagagcattgtattctgagtagtgaagatctatcctcaatggaaactattttacggaagcccaactaacttcagaggtgagaaacaccttgtagcctctgctagccttcctgactcacctaaccagaaaaaaaagccaagatgcatttttgaatgttacagaagaagggcataggtccactaaaagactaaaacctaatcataggtatatagaatgcttccccacatcccaaaccttatcatcacatcagcagggttcatgtataataatgagagagtatagctgaaagaactgcaaagctcagactctgtttcagraggagtatctcagcaaactcacagatatgcagggagacaaaaacaagg

SEQ ID NO: 654616 - DNA, 528 bp, Homo sapiens
aaaacttcacaccaatatccatgatgaacatagatgcaaaaatcctcaacaaaatgctagcaaactgaatccagctacacatcaaaaaacttatacaccatgatcaggtaggatttattcctggaatgcaaggttgattcaatgtatgcaacataaacaacatatgcaaatcaatgtgatttatcatgtaaacacataaacactaaaatcaaaaaacatatgatcatctcaatagatgcacaaaaagcttttaacaaaattcaacatcccttcataataaaaactcaataagttaagccaaccaragaaagatacctcaaaataataagagccatctgtgacaaacctacagccaacatcatactgaatgagcaaaagctggacacgttcttcttgagaaccagaacaagaaaatgatgcctactcaaaccactcctattcaatatagtcctgaaatccctagccagagtaaccaggcaagagaaagaaataaaaggcatccaaatagggaaagaggatgtttaactg

SEQ ID NO: 654617 - DNA, 528 bp, Homo sapiens
aaaacttcacaccaatatccatgatgaacatagatgcaaaaatcctcaacaaaatgctagcaaactgaatccagctacacatcaaaaaacttatacaccatgatcaggtaggatttattcctggaatgcaaggttgattcaatgtatgcaacataaacaacatatgcaaatcaatgtgatttatcatgtaaacacataaacactaaaatcaaaaaacatatgatcatctcaatagatgcacaaaaagcttttaacaaaattcaacatcccttcataataaaaactcaataagttaagccaaccaaagaaagatacctcaaaataataagagccatctgtgacaaacctacagccaacatcatactgaatgagcaaaagctggacacgttcttcttgagaaccagaacaagaaaatgatgccyactcaaaccactcctattcaatatagtcctgaaatccctagccagagtaaccaggcaagagaaagaaataaaaggcatccaaatagggaaagaggatgtttaactg

SEQ ID NO: 654618 - DNA, 567 bp, Homo sapiens
acagacaatctacacaatgagagaaaatatttgcaaagcatgtatmcaacaaagatctaatattcaaaatctatgtggaacttacacaagtcaacaagtggaaaacaaccccactaaaaagtaggcaaaggacatgaacagacacttctgaaaagaagacatacatgtgaccaacaagtatatgaaaaaatgttcaacatcaccaatcattagagaaatccaaatctaaaccacaatgagataccatctcacaccagtcagaatggctattattaaaaagtcaaaaactaacatggtgaggttgcagaggaaagagaaagcttacacactgttagtgggaatgtaaattagttcagccaccgtggaaagcaggttagagatttctcaaagaacttaaaacagaactaccattcaacccagcaatgtatgcttatgtttactgcagtaccattcaaaccagcaatgtacacttatgtttactgtagtactattcacaacagcaaagacatgtactcaacctagatgcccatcaatggtggactggataaagaaaacatgatacatata

SEQ ID NO: 654619 - DNA, 567 bp, Homo sapiens
acagacaatctacacaatgagagaaaatatttgcaaagcatgtatccaacaaagatctaatattcaaaatctatgtggaacttacacaagtcaacaagtggaaaacaaccccactaaaaagtaggcaaaggacatgaacagacacttctgaaaagaagacatacatgtgaccaacaagtatatgaaaaaatgttcaacatcaccaatcattagagaaatccaaatctaaaccacaatgagataccatctcacaccagtcagaatggctattattaaaaagtcaaaaactaacatggtgaggttgcagaggaaagagaaagcttacacactgttagtgggaatgtaaattagttcagccaccgtggaaagcaggttagagatttctcaaagaacttaaaacagaactaccattcaacccagcaatgtaygcttatgtttactgcagtaccattcaaaccagcaatgtacacttatgtttactgtagtactattcacaacagcaaagacatgtactcaacctagatgcccatcaatggtggactggataaagaaaacatgatacatata

SEQ ID NO: 654620 - DNA, 604 bp, Homo sapiens
ttctgtaaatgcttttaaaaaataggcattaggctaaacttctcagttgtaawcttcattcatctcaggatatagtcactgagagccaacaaatccatgtttttatccccagtgcagagcatcaatcccttacattgaggaagtcctcaatgaatagttgttgaatttcacagtttcaaaccctgacgctgaagtgtgtaaattcacccctattccaactcaattccctctgttttcctttctcttcactgcttctgttgacatgctctttgatcagcattaactgacttcctaaatgaagaataagtttcaggaatcatatatgtgttctgtgttggacaacactctttgggaaagcaaactgacattttattagaatattcattatcccaatatggggagcaagtgaaatcatgtgccaattcattctttaacaacaacagcaaagaactcaagttatagaagtattttaagggattttttttattgatataactctttggaggtcactactcaaggtcttttcctccaggttataaaggaaccatttagctgagcttgtgttttctttttcggttttatgccaaataaatacatagtccta

SEQ ID NO: 654621 - DNA, 604 bp, Homo sapiens
ttctgtaaatgcttttaaaaaataggcattaggctaaacttctcagttgtaatcttcattcatctcaggatatagtcactgagagccaacaaatccatgtttttatccccagtgyagagcatcaatcccttacattgaggaagtcctcaatgaatagttgttgaatttcacagtttcaaaccctgacgctgaagtgtgtaaattcacccctattccaactcaattccctctgttttcctttctcttcactgcttctgttgacatgctctttgatcagcattaactgacttcctaaatgaagaataagtttcaggaatcatatatgtgttctgtgttggacaacactctttgggaaagcaaactgacattttattagaatattcattatcccaatatggggagcaagtgaaatcatgtgccaattcattctttaacaacaacagcaaagaactcaagttatagaagtattttaagggattttttttattgatataactctttggaggtcactactcaaggtcttttcctccaggttataaaggaaccatttagctgagcttgtgttttctttttcggttttatgccaaataaatacatagtccta

SEQ ID NO: 654622 - DNA, 535 bp, Homo sapiens
tgcagagccagaatttaaaacaagggctaagcaatcccaaggcagtgtactttattatgacaatacactgaactttagctgggatcctaagacagcatacaaataaaagtaaaccaaaggacccttcttatgtttttcctaaataatagatgaaattgttaaacatcagcttgaggttggaagattgtcggcagtctctgccttagtacagggattgagcctctaaagctacagcctgcaaactttttggattacatactccattagttttttaaaaattgtgtcatccaagccagtatataaatatcttaatgtatttatttttaaatttcatacatatatcacaacactatagatacatattaaaacatatcgaaaaaygaaaacttttaatgagaactatatataaatacaaattctaatatatctccccaaactccagcgggattgttgtgttcaatctctgagatacagccactttcaataaccccaagtgagaacaatgtgttttgcttattttctttccttctgtttc

SEQ ID NO: 654623 - DNA, 615 bp, Homo sapiens
taatgatgcaattcagttttccaggttacatatcaacaccaatcacaaagttaggaaatgcaagatgtggagtggatttggatggagaaattcaaacattcagttatttatttttaattgacacataataattgtatatattcatggagtacagtgtgatattttggtacatatatacaatgtgtaatgatcaactcagggtaatttaattagcatatctattacccaaaacattgatcacttcttcattcaaaatcttctcttctggctatctgaaaatacacaaggaattgttaactactgtcaccctccagttccacagaacactagaacttatttctcctttctagatgtaattttgtgttatatattcagtttttggcatgtttggtttgagatatatgtagaacatccagagtccagaaactcttggatatagaagttcagtatccaggaatgagatagagtcctctaagagtktatagcctactgaaaggcagaactaggggtttgagagagaaaatgggttaatagcagagagcctcttattcaaaccagtctaccttggtcttttctgaatttcactcttcggtgtgcacccttcaacagcttcct

SEQ ID NO: 654624 - DNA, 613 bp, Homo sapiens
aatgggtcattttatccacttgactgctatatcttctactgttggggtcacccctattgaatattcacatagaacacaaatgtcttcatgttctttgcccattcagaagtctatccagatatctcttccccagaacaccttgtcaccaattttttaatcatgttccttcaaattcccttatcatagagctaaaccattggtcayagctcatacatcaatatatactcatatctctggccatctttctttccagccaaaataagcaaccgaatacattgctcaaaactctgcccactggaaagatttccctttggcattcccctttagggatatcctaggaaggggctgtagtgctcaagtttttcacttctgggtgatgctagtttagtgttcagaactctctataaagcagatctgagttttctctttcttggtctaataattgtaagaaattgcccatgaggctataaatatagtctggggaagcaaaggtaatgtagcaggcatagggaccattggtattgaggttatattttcatgtattgttccatcaaggtctgctcaaacctgatcttgtatataccacttccatttgataacagagtgctgtagt

SEQ ID NO: 654625 - DNA, 570 bp, Homo sapiens
caattatgtattatgtgtctgctatgcttgcactggtcaaagatataaggagggataagacagaacccgtgtccatgaaaagtttaggaactccagaatattattgattaccacgaatctttcacaaataagctgaagatttcatgtcttcaacctttttttttttttacttgttccaatgtctaatccaactgttattctgatggcaggttattttacatccttaatttagaatttagaacatctgcattttgtttatggtagtagataatcctgcataacatgaatatatgaattattcactacaaatgacattccaagatgctactaatgacaataaatttatagtgaacacaaagaccatartcatttaacctgatagacttaaggttttggaattaagaaattataaattatagagggaaaaatgaacgtgtgtggttaaagaaaaaagcaatcatgaaaaaattactctgttttcatatctttgaagttgttactgtggtactctgtagaaccagatgggtataattattatttaattaagaaaaatagacagaataggtatta

SEQ ID NO: 654626 - DNA, 541 bp, Homo sapiens
ctcacacttacaaaggtgcaaaagtaagtgggctacagatccaaaatcagcagtgccaggcaaaacaatgtttctagtactcctctttttaggattgccaaacaccggagcagaagctcaaggaatcagaatgaagaagaaaatcttgtttttatcttcagcttttcaaggtgtcaatcgatgtatgttaattttctggaataataacctaaaacttaaaatcggtttgagaagaatttcccagaaaratgttaacattggcctatgtatttagtggctgtttggtaaaggccacactgcatcctggctcctctagcagaaggggcatctgagacactctttcagcaaaacgtagatgtgtctccctagtctctgtgtttatttcaggttgacagtctccttagtagactcctgaactgtggcttctgctgatgcttctgaagcttctgtccctgagacctattgaggagaaacactctttccatgtgcttcacggtgctatctttcgtttgctttgggatatggcaggccaagtgtatag

SEQ ID NO: 654627 - DNA, 608 bp, Homo sapiens
tggaaagtggggtggtttgacttttaaggtaatctttttctgtacctttatatctccctgttattgtctctacttgtcctggggatattggttgagttaaaaacaccatttctaaaaacggagacctagaacttagagcgtyagtaacactgtaataatattcactggggagcagaaaccggagctatgagatgtggaacatactctctgaacaatctatctcatcgttcaagatataagaagaccatgagagctgctaagaatcattccatatttggatttcttttttcctagaaattaactttgtcacaataggtccatgcgtctcttctgggaagcagctggcatagaagggagagtatgtcctttgaatatcagtttatatcctggttttgccacatactgatttcaagagcttgggaaaactatttcacttctgggctcagagttctaagctgcaatatggtagcactcatctactattttcaaaaataactgctttcgaatgctttttatatgtgagatcacgtatatgaattagcttaaagcatggtctctttgtttccttcctaagtgagtagttgtcagatataattttattgctgatc

SEQ ID NO: 654628 - DNA, 608 bp, Homo sapiens
tggaaagtggggtggtttgacttttaaggtaatctttttctgtacctttatatctccctgttattgtctctacttgtcctggggatattggttgagttaaaaacaccatttctaaaaacggagacctagaacttagagcgttagtaacactgtaataatattcactggggagcagaaaccggagctatgagatgtggaacatactctctgaacaatctatctcatcgttcaagatataagaagaccatgagarctgctaagaatcattccatatttggatttcttttttcctagaaattaactttgtcacaataggtccatgcgtctcttctgggaagcagctggcatagaagggagagtatgtcctttgaatatcagtttatatcctggttttgccacatactgatttcaagagcttgggaaaactatttcacttctgggctcagagttctaagctgcaatatggtagcactcatctactattttcaaaaataactgctttcgaatgctttttatatgtgagatcacgtatatgaattagcttaaagcatggtctctttgtttccttcctaagtgagtagttgtcagatataattttattgctgatc

SEQ ID NO: 654629 - DNA, 603 bp, Homo sapiens
atcatgatgtttcaatgactcattactattgagcatttcatgtggcctatttggatgtatttcttattaaaaatgtttttcatttatttcayatataatattggtgtaagacacttataatttcaatctctagtaaaggtaagaaggctactgctcattattgcctgctccatatatttttaatatttaatgaatctctctttgaactttcttgggggtgtcttctaacacaacacctttatttatttatttatttttaattatactttaagttttagggtacaggtgcacaacgtgcaggtttgttacatatgtatacatgtgccatgttggtgtgctgcaaccattaactcgtcatttacattaggtatatctcctaatgctatccctcccccccaccatcccacaacaggccccggtgtgtgatgttccctttcctgtgtccatgtgttctcattgttcaattcccacctatgagtgagaacatgtggaacacaacacctttataattagtagagatgttgttaaatttgaaaatgatgcatcttcacagagtattagttttgtttaattattattcagttgcatttaagtaatttaatt

SEQ ID NO: 654630 - DNA, 603 bp, Homo sapiens
atcatgatgtttcaatgactcattactattgagcatttcatgtggcctatttggatgtatttcttattaaaaatgtttttcatttatttcacatataatattggtgtaagacacttataatttcaatctctagtaaaggtaagaaggctactgctcattattgcctgctccatatatttttaatatttaatgaatctctctttgaactttcttgggggtgtcttctaacacaacacctttatttatttatttatttttaattatactttaagttttagggtacaggtgcacaacgtgcaggtttgttacatatgtatacatgtgccatgttggtgtgctgcaaccattaactcgtcatttacattaggtatatctcctaatgctatccctcccccccaccatcccacaacaggccccggtgtgtgatgttccctttcctgtgtccatgtgttctcattgttcaattcccacctatgagtgagaacatgtggaacacaacacctttataattagyagagatgttgttaaatttgaaaatgatgcatcttcacagagtattagttttgtttaattattattcagttgcatttaagtaatttaatt

SEQ ID NO: 654631 - DNA, 619 bp, Homo sapiens
tagcagcaatagaaaactagtatgcctgggttgaaattccagagtttactaaaatgactataaatcaaagaaattggaacttaagatttgtaaagctcctttccagtgacaaaattgctatcctaggctaagctgtcttgttcctacagagaccaagatactgcttaattaatgtaacaaatgaatgggtactaatgtactaaccagtcttatcccacaaaaacaaaatttttatgggggtagggggatgaagagaagttagtaaaggggtacaaatatgcaattagaaatgtcaggcatggtgggacagatgcagtatagattatggaagttatagtccctgcttttctggcgcttgctattatactgcttgtcaaggagaacagacatttaggaaataattataaattaaatgagcactaaaaggacaagtgtgcaaatagrgccttaattaaaaatcagagaagagttttggaagatatgctgtttatgatgaaagccaaagcatgaagcaaaaaaaaaaaaaagagttttctttagtgaacattcttctccaagaatatttcccctaaaatatttcttcctctctgagggctgatttctttaatgaattagcatg

SEQ ID NO: 654632 - DNA, 580 bp, Homo sapiens
agaggttcagcattctgtatcttcacttcatatctgctctgttatttggttgtatggccttgggcaagtcatgcctcccctgagtttaatttccctcatctatcaaatgagagggctgagctagatgttccatacgttcctgaaccagttcagaatttagtcaggaatctctgacattataaccacaaactataataagaggcctaatgattctgaaatgggccctaaaattcaaaaggcccttttttttatttttttttttcagaagatggggtcctgctacactgcccaggctgaacacaaaaaatgtatttyatttactatctaaagcaaatgggaatcattattatactaaattccctaaaacatagggtgcatcacaatccaaaggagactgtgaaaatttctgggaaaagtttgctcttttatcagaatcaggctgtgctagggaagagaggtagaggtcgggagaggttgagaaatggcaaccttactggtgagaatagtagcttccaactgataaattttattctaaaaatgcaaaaccactgcttcatgagctcaaatctgttttttctag

SEQ ID NO: 654633 - DNA, 591 bp, Homo sapiens
tgtaaatacagttccaattaaaatgctgattgaggccaggagtggtggctcatgcctctaatcccagcactttgggaggccttggtgggcaaatcacttgaagtcaggagttggagatcagcctgaccaacatagtgaaaccycatctctactaaaaaaaatacaaaaattagccgggcatggtggtaagtgcctgtaatcccagctactcgggaggccggggcaggagaattgcttgaatctgggagacagaggttgcagtgagccgagatcacgccaatgcatccagccttggggacagagtgagactccgtctcaaaaaaattaataaaataaaataaaatgctgattgaacaggtaggcctaatttcggaagctccctttacatacgggtaaaattaaagatgaaatgcacataatagtagtcccttaactcttaaatagaatagaaacagagtcaaaatacaaaattctgggactacatacttaggatatgtacagataatgatacatagatacacatggttaaaattccaagggctcatggttaaatggctaaatttggtatatgtttttaactttgtcattttt

SEQ ID NO: 654634 - DNA, 666 bp, Homo sapiens
tacacactatcaaatgttctcaggtcatttgaaggctaacaggtcagccacaatttagtcattaatatgtcctgtcccatgtaatagtcgaagcttcaatctttgtttaaagttaaaactcccccttctcttccatttggaagagggatttataattggcctttttctcttatcttcagaaaatatacaaggaaagggaaaaagaggagtaaaggtattagttaaaaattttctcaatgatggataacatggaaatttggcttcaattttctctagaaatagaatacatttaaaactgtcttttcctctaacagattacttcacttgctttggagggtcaccagtaccacggttccttttcctattccatctgctggctggacgcctagtcatttgacagttacccttctactaaggatgaagtctcctcttgccagaaaaacttctgtgaccctctagagttggaaaaaaaacaaagggcaatagacagcaatgacaacaaaaaccccaaacacgtatttttgcctacactttctaggtcaatggaaaaaagagtaaaaaaamtttagctacattctatttgattaaatgttttgaagagaaaggaagtggaagaaaaaaaatagtatggggacctggacagaaagataagacaatagacacaca

SEQ ID NO: 654635 - DNA, 541 bp, Homo sapiens
atctttgtccagttttcttgtgtatataaagtgtggtttataatggtacctaccacataggtaataatgcatgaaagctctttttgtttttagtaagaaaatctaaagaactattcacaatgtcattttgagggcttttagccacggcatagtgcattaggcaaaattctagatcaaattattaatttgtacatatttcaatttatgaaactgtgaagacaagcatttgaaaataactttgcattatgaatggcatatttattaatatttaggcatgtttagtctttcatccttatgtgctaatgtccttgaaaagcacctcttgtaaatatatgctatgcagcttggtttctaaagtaatttacacaatgatacatcttacttaatatgtattgtgtgctgcttactgaaaatctatacaattattaaagtgatgaaatgctttagccatactgtagttaccttagcaacttgttgcaatgtgggttgtaaataaacacctcttttatattctaawccattttttttaaaaaaaagccat

SEQ ID NO: 654636 - DNA, 578 bp, Homo sapiens
gcacaattcacaattgcaaaatcatggaaccaacccaaatgcccatcaatcaacgagtggataaagaaactctgataatgttaattcattcctttttatggctgtatactattccatcatatatatatatatatggctgtatagtattccatcatatatatatggaaaaaggaatgaattaacagcatttgcagtgacctggatgagattgaagactattattctaaatcagcaactcaggaatggaaaactaaacattgtatgttctcactgatatgtgggatctaagctatgagaacccaaaggcataagaatgatacaatgaactttgaggacttgggagcaggagttggagggaggtgagggataaaagkctgcaaatatggttcagtgtatactgctcacattatgggtgcaccaaaatctcacaaatcaccactaaagaacttactcatgtaccccaataccacctgtaccccaataacttatggaaaaaataaacgataataaattaaactaaattaataagaataaataaataaaacttttaggttcggagtacatgtgcagatttgttt

SEQ ID NO: 654637 - DNA, 489 bp, Homo sapiens
cctaggagagctcacctgcattaacaggcttgttgcctagccctggatatgtgatgggagctcaaagctgtgtttataacctcctgcctagtgtcttgtcctccatgcctcccaagcaccttaaactctacctgtctccatctgagcccactacttcctcctaacaacttgattcttgactaggattctcattgrggggcctcactgtccacccacatgcacaagcaggaaactaggcatcctccctggatccccagctttctcactatcccttcacccaacccaccagctaggcctgtcaatttgatctcctaatggcattttttccatcgtcttgtccccatctccaccaaccacaaatgtagtccaataaacctttgtttcctgccggtactgctgcaatactctcctaaccagtttccctgaatccattcttaaccacctgtaatcagagttctaccctgctaccagagttaaaggccatttaaa

SEQ ID NO: 654638 - DNA, 554 bp, Homo sapiens
atagtttctaaagtttaatcccatactaaaattcagtgataataactcagaaggaagaaatgacagtggagatagagaactgcaaatcctgaatgaaaatagatgggcttgggagaatggatcttggtaagaataccatgagagaactggatgctgcagctcagaacaggatgccccagtaaccctgtggatcccactctctttgggatacattgagattctctaataaatgccaagggcagtgtgaaacagggaaatagtcacaaaagggaaaccagaaaagtgtctggataaggggacagatgtgaggaatccttttccttgcttcctaactcagagaaaagcaaggtagaagcaacatactctaagaggagagttactgcttacctggttttgctccaggaagcccaagcacaagacattttactctgatattcaattagagctcacccasgattcaaaacagtagtcaaagtactcttttttttttcagacagagtttcacagttgttgcccaggctggagtgcaatggtgcaccatctcggctcaccgc

SEQ ID NO: 654639 - DNA, 583 bp, Homo sapiens
aatcctgggtgcacatttgaaacacctaggatatgtaaacaaaaccttgttggtatggtctgaatattggcgttcccccacccccaaattcatatgttggagcccaatacccattgtgrtagtattaagaggcgagggctttgagaagcaattaagttatgagagctctacccttataaatgggattagtgctcttacagaaaggattccagggggagctcccttgttccttccaccatgtgaggacacagctaggagataccatcttggaagcgtagagcatctgctggtacctagatcttggactttacagcctccaggactgtgagcaacaaatctctatcatttataaattacccagtagtataagttaccaaaggtattttgttatagtagctaagcagactatggccccaaaccagttaaatcagtctctatgggagtgaatactaggcatcagtatctattaaagttctttctgtgattccaatatactggcaaggttgagaaccactgatcttgagaagtaaagaaataaaaatatggcatcatgaggattaaatgatcaatttaaagacaagtg

SEQ ID NO: 654640 - DNA, 583 bp, Homo sapiens
aatcctgggtgcacatttgaaacacctaggatatgtaaacaaaaccttgttggtatggtctgaatattggcgttcccccacccccaaattcatatgttggagcccaatacccattgtggtagtattaagaggcgagggctttgagaagcrattaagttatgagagctctacccttataaatgggattagtgctcttacagaaaggattccagggggagctcccttgttccttccaccatgtgaggacacagctaggagataccatcttggaagcgtagagcatctgctggtacctagatcttggactttacagcctccaggactgtgagcaacaaatctctatcatttataaattacccagtagtataagttaccaaaggtattttgttatagtagctaagcagactatggccccaaaccagttaaatcagtctctatgggagtgaatactaggcatcagtatctattaaagttctttctgtgattccaatatactggcaaggttgagaaccactgatcttgagaagtaaagaaataaaaatatggcatcatgaggattaaatgatcaatttaaagacaagtg

SEQ ID NO: 654641 - DNA, 595 bp, Homo sapiens
gggcaacccacagccctcggggctgctctgcctatggagtagccattcttttattcctttactttcctaataaacttgctttcactttatggacttgtcctgaattctttcttgtacaagatccaagaaccctctcttggggtgtggatcgggacctctttccggtaacagtgaaattaataatcactgggacagttctattattcttaatatggatgaaactaacattcttctttagtgttatttcccatctattgatgttctgaagacagcagggaatgattcacttaacattgtgtaacacatagaaattaattcttaaatgcaaataatcttcatagtttctttatgtgtgttggtattatatcatttataaaacaatttccattaggttgaaaatmttttgtccttagaattaatagataggaatacctaccttcattcatatgctattttcttgtgctctattctcaggagtggcatgtgtaggttaaagggcattacaaattgtccagctcttgcaattttacagctaaagtccatagtaaatggcttctaagtttctagaagtgagttcattaaacttgtgaataac

SEQ ID NO: 654642 - DNA, 645 bp, Homo sapiens
ctttgttccttccttttcattcttttttctctaatcttgtcctcacaatttatttcattaagttgatcttcaatctctgatatcctttcttctgcctgatcatttcaggtattgatagttgtatatgcttcccgaagttctcacgctgtgtttttcatctctatcaggtaatttatgttcttctctaaactggttattctagttagcagttcctgtaaccttrtatccaggttcttagctttcttgcattgggttagaacatgctttattagctcagaagagtgtgttattacccaccttctgaagcccacttctgtcatttcatcaaactcattctcggtccagttttgttcctttgctggcaagaagttgtgattctttgaaggagaagaggcattctggtttttggaattttgagcctttttgtgctggattttcctcatcttcatggatttatctacctttggtctttgatgttgctgacttttggatggggtttttgtgtgggcatcctttttgttgatgttggtgctattgctttctgtttgttagttttccttctaacaggtccctcttctgcaggtctgctggagtttgctggaggtccactccagaccctgtttcacttggtatcaccagcagagg

SEQ ID NO: 654643 - DNA, 574 bp, Homo sapiens
ttatataatatatatatagtccataaattagtaaatgtgtgcggtgtttttcttgaaaccgttagcatcctagttggtattggtggtactggttgatattaacacgaatgacaagtgggtgattttcaagaagcgcccggtccctctagagaatgcgtccgaatatcagcggagccgactgcgtatgcctccggatgcccatctataaactctcttgcttgtagctattcctcgctccccaaccatattgaccattcacccggataaggcaatttcctcgaaagggcgatctgaggacgctgaccccctaaatgactgaggacgctggatctttagggggaacatcgtktcttgggggtgccaaaagtccccagcccttacccacacctttgtcacgacgggcaattgggtatgtgtaggggaaaaacagcaacgttaaaacgcaactgtgtaaatgaggatagagagtgcgaaaggagggagaggcgaggagctgctctatttctagggaggttttggggagactgatcagctccaaggagagttctctgggaagggaaaaccagcccacatc

SEQ ID NO: 654644 - DNA, 560 bp, Homo sapiens
acaacagcgatgatccaggggtacagcactaatcccttttccaggatagacagtgatagctgaaggacatgcatcttaaacacagtccaccataatgtttgtagtgtaatattgactgaaataccatttctatcaatttctactactgattgaaagttctggataagggaaagtcaaatctggcccctcctatgtattggaaatagcaggggcattwaagtgagacagattgggattcacaaattaactacatgatatattagctgtgtgttccttgacttccctgaacttcaattttcttacctttaaaatgagcaccacatcaaggaagttttaagataagatacagaaagtgcttggtaatattaaaacaaaacaaaacttgacactcaataaaagctaattgtttcttccaccctaaaaacaaaacaacaatttttgcagtgaacaattttgttgcaaatcattctaatgtccggttttcagctgtctttgataattggtggtcttgctatgccatagctattatattagatcacgagagagtcgtgtaattgtag

SEQ ID NO: 654645 - DNA, 575 bp, Homo sapiens
ataatgacatagttttccctcgctgaaggatgacaaatgctgggctgcgcccccagcagaagcagtttcaattttattgtaaatataaaaggtattgatcggtcagatgtacaaaccccattgcttacaaaagccattcagggggactgggaaaactattaagcactgggtcagaaatcaataaacaacactgaaatgtagcagaggtcgccctaggcattgtggcatctttgaaagccaagtggcaggaatagtgacagaaatgtctcttgtggaacaatgttggggatgaagagggtcagatgtttaatctcttctgtggtttgacaggtcctgggaacagaactaatgtagtctttcactgctgtctttgatttaaatacatgctgattcatccccttgctgacaactgtatttattggctttggggtgcctaaatrtattggcagggaagaaatcagggcacatttccgaagacagggcagttgtgtttatgcaaatgggccacaccttgagtccccttctctcttttcaggaaaaaataaatagacaccaaaacttcttttcatcacgcc

SEQ ID NO: 654646 - DNA, 584 bp, Homo sapiens
aaataaacaatattgtattaatattatttttatgtcagcaaaggaaaaaaatgggtagcataacaaaagacatgtgmtgggattggggaacaacatataaaccaataccagcagtgcactgggaaaggcacacatacaaaaggctttcagagtatgaacatccgtgtaccttcactcctgactgcaggcgcagactgtgtgtggggagatgctcatatagaaacccaggtacccaggaatgacatacaccaacacacatacctcctagaagtattttctcagactacaaactattaaggatgtaaatttctgacagtgaaaattttatttttttagtgtttctgtaactgtatagatacacgaattatttagtagttcagttattctacaaatactaaactgttttacagcatgattcttattgaaataagcaattaacacatcttgcctcttcttgcaagctctctctgaccacccacctacaccctccgtgagtcttctgtgattctcttctatattccattattccttatgcatgcctttaccatcacaattttcacacttttataatcactgatttgttt

SEQ ID NO: 654647 - DNA, 591 bp, Homo sapiens
gtgaaattttgactttaggtgcctggagaagaggctgtagaaggacatttgctagcactatccagcaacgcagggtggggttcaaaggcgtgtgttataagacgatgtttctgtgggtatgtgttgttgtgataggctgattattcctactgactgaataatatggagtcaaatcctgtcataaatgtgatgtgtctcattccaggccttgctttaatgcactggcattttgagaagaaaatgatagacagctgcagctcgctgctgtgckataacagtgccatgttctacgtcagtcgacgggccgtcagaagggcataatttaaatggagaagccagttgctacttcccttcacctgggcaatttcagttagaactctttcaggcactcaaaagacacaggtttttgccccttgaaaaagacctgggagtcctaggactctttaggtttactcttgtctagtgtcaactgcttaaaataccaatgctttatcatccacaccccatcccaatatatacgaaacacatctctcatcacctatcaatctttttacattgttcattcagtttgggagccggtatatgaagagc

SEQ ID NO: 654648 - DNA, 511 bp, Homo sapiens
attaaattttaaggtggtattttatatcctttctcccaaattatgtcttcctttctcctagtagcaggaaagttgaccctcatttatttgacacaaagacaatcagttggtcttttaggctaaaagagtaaagtattttgtcatttacttgaatgtggtcagtaggcctgaaatatgtgtgggggtatatacatatatgtgtgtgtgtgtgtgtgtgtgtgtgtgtgtgtatatgtatgtgactgtatatctggaaagtcatcttattggacatatggttaggctttgtgtccccacccagatctcatcttgaattgtagtcaccatagtccccacgtgtcaagggagagagcaggtggaggtaaktgaattatagggacagtttctcgtgtgctgtcctcgtggtagcgagttctcacgagatccgatggttttataaggggcccttcccccttcgttcaacgctttcccttcttgccaccttgtgagggaggtgcctggcttccccttc

SEQ ID NO: 654649 - DNA, 636 bp, Homo sapiens
gctgccctcagctttctctgtaagttaattttaataaccacaaccatcaccaccaacatctttaccaggaaaacaaccaaatgcttttaaaatccatattgctcattacagttgagtatctataaatgcaatgcccacaactgcttcaaagagttaataatagctaacrtttattgagtatttaatatgtgccaggcactgtgggagtgttacatgcattaactcacgtaaacttgactgttaactatatgagacaggtgtaattattattctcattttacaaatgagaaaactgaggcttggtgagttaagtaatttcccatgaacacttaggtagcaagttatatagctcctagatttaaatgtaggtaacctgacttcagaattcatgctctggaaccaataagtaaccttgcctctcacatgtcatgtttctttctccagccagtctgaatcctaagtaagagtactatgttgtaaattaaccacacctgtgaatccatgtttctggactctttggaaacttggttaaggcgagttttcccagatgtaaatccttaattggatttaaagtgccagagaggatcagctctttcctgtaaaaaaaaaaaaaaaaaaaaaaaaaaattaaacatt

SEQ ID NO: 654650 - DNA, 579 bp, Homo sapiens
tttgggagcttattgaggcctatggggagaaaccaattacccccagataaaaattggatttttatgtgtggattcatctcatagatggatgtgtggattcttctcatagatgtgtggattcatctcatagagttaaaatgttcttttgattcagcaggttggaaacactgtttttgttaaatctgcaaaagtacatttgggagctcattgaggcctatggtgaaaaagaaaatgccttcaaatggaaacctaaagaaactatatgagaatctgttttgtgaagtgtggattcatgtcacagaattaaacctttcttttgattcagcactttggaaacactgtttttgtagaatctgtgaaacgacatttggaagaacattgagacctgtggtgaaaaagcatataattccatttaaaaactggaaagaatgctaactgtgaaactcctttgtgatgtgtgtgtgyatttatctcacagagttaaaccttccttttgactcagcagactggaaaatctttttgtagaatctatgaacggatatttgggagctctcagaggccgactgtaaaaaactgaat

SEQ ID NO: 654651 - DNA, 578 bp, Homo sapiens
gcattctcaaatatcccttccagattcaacaaaaacagtgtttccaaacttctgaatgaaaggagaggattaaatatgcgagatgaatgcacacataacaaagtggtttctcagatagcttccatctagtttttatctagggatattcaacttttcatctttgacctcaatgagttcccaaacttccctttgtagattctacaaaaactgtttccaaattgctgaatccaaagaaaggtttaactctgtgagacaaatgcacacatcacaaagcagtttctcaaaaagcttccttctagtttttatctgaagatatttcrtttttaacgataggccccattgtgctcacaaatatgtctttgcagaatctacaaaaacagtgttttcaggctgctgaatgaaaggaaagatttaactctccgagatgaatgcacacatcacaaagcagtttctcagatagcttccatccagtgttcatccttggatatttgccttttcacatttggcctcaatgagctcaggaatctccattcacagaatggaaaaaaacagtatttccaaactgctgaatccagaga

SEQ ID NO: 654652 - DNA, 507 bp, Homo sapiens
gagttatacagccacaagatatcatttaaattcactttcttagatggctcatagaagtgcaagataaaggaccacagtgggtcctttatcaatttttaagataacaataacaatttttaagaacagttgtagcctaatagttgttggagattaggaatgagtgctaatggccgggctcagtggctcatgcctgtaatctcagcattttgggaggtcaaggtgggtggatcatctgaggttgggagttcgagaccaacctgarcaacaatggagaaaccctgtctctactaaaaatacaatattagcccagtatggtggcacatgcctataatcccaagtactcaggaggctgaggcaggacaatcactggaaccaggagggagaggttgtggtaagccaagccatgttgctcaggctggtctcaaattcctggcctcaaatgatccacctgccttggctatatttttaaattttacttactttgtggaaatgcatattttatgttgt

SEQ ID NO: 654653 - DNA, 507 bp, Homo sapiens
gagttatacagccacaagatatcatttaaattcactttcttagatggctcatagaagtgcaagataaaggaccacagtgggtcctttatcaatttttaagataacaataacaatttttaagaacagttgtagcctaatagttgttggagattaggaatgagtgctaatggccgggctcagtggctcatgcctgtaatctcagcattttgggaggtcaaggtgggtggatcatctgaggttgggagttcgagaccaacctgaacaacaatggagaaaccctgtctctactaaaaatacaatattagcccagtrtggtggcacatgcctataatcccaagtactcaggaggctgaggcaggacaatcactggaaccaggagggagaggttgtggtaagccaagccatgttgctcaggctggtctcaaattcctggcctcaaatgatccacctgccttggctatatttttaaattttacttactttgtggaaatgcatattttatgttgt

SEQ ID NO: 654654 - DNA, 507 bp, Homo sapiens
gagttatacagccacaagatatcatttaaattcactttcttagatggctcatagaagtgcaagataaaggaccacagtgggtcctttatcaatttttaagataacaataacaatttttaagaacagttgtagcctaatagttgttggagattaggaatgagtgctaatggccgggctcagtggctcatgcctgtaatctcagcattttgggaggtcaaggtgggtggatcatctgaggttgggagttcgagaccaacctgaacaacaatggagaaaccctgtctctactaaaaatacaatattagcccagtatggtggcacatgcctataatcccaagtactcaggaggctgaggcaggacaatcactggaaccaggagggagaggttgtggtaagccragccatgttgctcaggctggtctcaaattcctggcctcaaatgatccacctgccttggctatatttttaaattttacttactttgtggaaatgcatattttatgttgt

SEQ ID NO: 654655 - DNA, 590 bp, Homo sapiens
tattaaccttttatccagccatactgttaagttctattatttgtagtattggtctataagtacacttgggttttctatgtaaggtgacagaacaaggtaagatttatcttgaaagagaacatgaaaagtttctkcaggctgggcaaggtggctcacacctgtaaatcccagcacattgggaggccaaggcaggcagataacctgaggtcaggagtttgagtccagcctggacaacatggcaaaatagtgtcgctacaaataatacaaaaattagccaggtgtggtggcaggcacctacaatcccagctactcataggctgaggcaggagaatcccttgaattctgcagcagagggtacagtgagctgagatgcagcaacttcactctagcctgggctgaagagtgaaacttcaataaaaaagaagacaaacctgggctgaagtggacaagacaggatcaggcctgaaaagcccagacaggaccataccaaaccagaccagacccaacaaaactggactacactgaaatgcactggaccagactggaccaaagcggacaagaccgggccagactgcataagactgggtcag

SEQ ID NO: 654656 - DNA, 590 bp, Homo sapiens
tattaaccttttatccagccatactgttaagttctattatttgtagtattggtctataagtacacttgggttttctatgtaaggtgacagaacaaggtaagatttatcttgaaagagaacatgaaaagtttcttcaggctgggcaaggtggctcacacctgtaaatcccagcacattgggaggccaaggcaggcagataacctgaggtcaggagttygagtccagcctggacaacatggcaaaatagtgtcgctacaaataatacaaaaattagccaggtgtggtggcaggcacctacaatcccagctactcataggctgaggcaggagaatcccttgaattctgcagcagagggtacagtgagctgagatgcagcaacttcactctagcctgggctgaagagtgaaacttcaataaaaaagaagacaaacctgggctgaagtggacaagacaggatcaggcctgaaaagcccagacaggaccataccaaaccagaccagacccaacaaaactggactacactgaaatgcactggaccagactggaccaaagcggacaagaccgggccagactgcataagactgggtcag

SEQ ID NO: 654657 - DNA, 590 bp, Homo sapiens
tattaaccttttatccagccatactgttaagttctattatttgtagtattggtctataagtacacttgggttttctatgtaaggtgacagaacaaggtaagatttatcttgaaagagaacatgaaaagtttcttcaggctgggcaaggtggctcacacctgtaaatcccagcacattgggaggccaaggcaggcagataacctgaggtcaggagtttgagtccagcctggacaacatggcaaaatagtgtcgctacaaataatacaaaaattagccaggtgtggtggcaggcacctacaatcccagctactcataggctgaggcaggagaatcccttgaattctgcagcagagggtacagtgagctgagatgcagcaacttcactctagcctgggctgaagagtgaaacttcaataaaaaagaagacaaacctgggctgaagtggacaagacaggaycaggcctgaaaagcccagacaggaccataccaaaccagaccagacccaacaaaactggactacactgaaatgcactggaccagactggaccaaagcggacaagaccgggccagactgcataagactgggtcag

SEQ ID NO: 654658 - DNA, 363 bp, Homo sapiens
acttgggcgtaactccccttgagtgggaagatctgyggcttggtctctctgcctggtttgtttcaaaattggctcctggaatttctaagcaagcacatagttagatgagcaagcactgtacacagatatgcctgtagggaaagggcataacaaagagtcttacactataaggctacattctgagattaggaaggaaaggaaaaaaatagtttaaaaatgtatttcgaggctgaggtactcagttatatatagaaatgctattgatttttgtacattatttttgtaccctgaaacattactgaagtcatttagcagtttgacgggccttttggcagagtctttagggttttctagatatagaat

SEQ ID NO: 654659 - DNA, 363 bp, Homo sapiens
acttgggcgtaactccccttgagtgggaagatctgtggcttggtctctctgcctggtttgtttcaaaattggctcctggaatttctaagcaagcacatagttagatgagcaagcactgtacacagatatgcctgtagggaaagggcataacaaagagtcttacactataaggctacattctgagattaggaaggaaaggaaaaaaatagtttaaaaatgtatttcgaggctgaggtactcagwtatatatagaaatgctattgatttttgtacattatttttgtaccctgaaacattactgaagtcatttagcagtttgacgggccttttggcagagtctttagggttttctagatatagaat

SEQ ID NO: 654660 - DNA, 566 bp, Homo sapiens
gcaagggctgggggtaatactgcttttaatgaaaatctgcttttatgagttttcagatgccataaccaaactgacattgtgtaccgttgttctctggggagcttcatgcgcagaatgaactcatatgttacatgaccttgggycaaacaatatcttaaagaagtaatcagtataacatttcagaaattgaggtggccaaagtcggtccaggaaagtctctcaggatttgatatgctgagtgcaggagaattcattttccattcagagaaaaggtcgtacaaagtattcatgtgcctcaagtgctgaaagcaatatagaagaagaaaaattgggcttaaacaaaattttaaaaaatctgtcttcattttctcccccatgatcctttatatctaggaaggctattactgtggagaggacttaatatggactatttagaccagtcatttgaataaacgtcctaacaacagcagaaaaacatgatcagtgttctgcagaatctggacttgtaatcaagtagtcagtgtttaagagacaagtttaggtcatggaaatatactggagccaaa

SEQ ID NO: 654661 - DNA, 566 bp, Homo sapiens
gcaagggctgggggtaatactgcttttaatgaaaatctgcttttatgagttttcagatgccataaccaaactgacattgtgtaccgttgttctctggggagcttcatgcgcagaatgaactcatatgttacatgaccttgggtcaaacaatatcttaaagaagtaatcagtataacatttcagaaattgaggtggccaaagtcggtccaggaaagtctctcaggatttgatatgctgagtgcaggagaattcattttccattcagagaaaaggtcgtacaaagtattcatgtgcctcaagtgctgaaagcaatatagaagaagaaaaattgggcttaaacaaaattttaaaaaatctgtcttcattttctcccccatgatcctttatatctaggaaggctattactgtggagaggacttaatatggactatttagaccagtcatttgaataaaygtcctaacaacagcagaaaaacatgatcagtgttctgcagaatctggacttgtaatcaagtagtcagtgtttaagagacaagtttaggtcatggaaatatactggagccaaa

SEQ ID NO: 654662 - DNA, 555 bp, Homo sapiens
tctaattgggtcccacatgtcagtktttggttttgttgcaattgcttttggggacttagccaaaaattctttgccaaggctgatgtccagaatactgtttttcctaggttttcttccaggattcttatagtttgaggtcatacatttaaatcttgaattcattttgagttaatttttgtatacgataaaaggtaggggtccagtttcattgttctgcatatggctagctagttatttcagcactatttattgaataggggacccttttcccatttttttgtgggctttgtcaaagagcagatggctataggtgtgcagaactgcttctggattatctattctgttccattcatctgtctttttttgtaccaggaccaagctgttttgcttactgtagccttatagtatagtttgaagttgggtagtgtgatgcctccagctttgttctttttgcttaggattgctttagctattcgggctgttttttggttctatatgaattttagaatagttttttctagttctgtgaaaaatgacattggtagttatagcatt

SEQ ID NO: 654663 - DNA, 555 bp, Homo sapiens
tctaattgggtcccacatgtcagtttttggttttgttgcaattgcttttggggacttagccaaaaattctttgccaaggctgatgtccagaatactgtttttcctaggttttcttccaggattcttatagtttgaggtcatacatttaaatcttgaattcattttgagttaatktttgtatacgataaaaggtaggggtccagtttcattgttctgcatatggctagctagttatttcagcactatttattgaataggggacccttttcccatttttttgtgggctttgtcaaagagcagatggctataggtgtgcagaactgcttctggattatctattctgttccattcatctgtctttttttgtaccaggaccaagctgttttgcttactgtagccttatagtatagtttgaagttgggtagtgtgatgcctccagctttgttctttttgcttaggattgctttagctattcgggctgttttttggttctatatgaattttagaatagttttttctagttctgtgaaaaatgacattggtagttatagcatt

SEQ ID NO: 654664 - DNA, 555 bp, Homo sapiens
tctaattgggtcccacatgtcagtttttggttttgttgcaattgcttttggggacttagccaaaaattctttgccaaggctgatgtccagaatactgtttttcctaggttttcttccaggattcttatagtttgaggtcatacatttaaatcttgaattcattttgagttaatttttgtatacgataaaaggtaggggtccagtttcattgttctgcatatggctagctagttatttcagcactatttattgaataggggacccttttcccatttttttgtgggctttgtcraagagcagatggctataggtgtgcagaactgcttctggattatctattctgttccattcatctgtctttttttgtaccaggaccaagctgttttgcttactgtagccttatagtatagtttgaagttgggtagtgtgatgcctccagctttgttctttttgcttaggattgctttagctattcgggctgttttttggttctatatgaattttagaatagttttttctagttctgtgaaaaatgacattggtagttatagcatt

SEQ ID NO: 654665 - DNA, 555 bp, Homo sapiens
tctaattgggtcccacatgtcagtttttggttttgttgcaattgcttttggggacttagccaaaaattctttgccaaggctgatgtccagaatactgtttttcctaggttttcttccaggattcttatagtttgaggtcatacatttaaatcttgaattcattttgagttaatttttgtatacgataaaaggtaggggtccagtttcattgttctgcatatggctagctagttatttcagcactatttattgaataggggacccttttcccatttttttgtgggctttgtcaaagagcagatggctataggtgtgcagaactgcttctggattatctattctgttccattcatctgtctttttttgtaccaggaccaarctgttttgcttactgtagccttatagtatagtttgaagttgggtagtgtgatgcctccagctttgttctttttgcttaggattgctttagctattcgggctgttttttggttctatatgaattttagaatagttttttctagttctgtgaaaaatgacattggtagttatagcatt

SEQ ID NO: 654666 - DNA, 583 bp, Homo sapiens
tgatgtataaatgaataatagttgatgatagaatattatacagccattaaaattgatattttacaaatacttccaatgatatgaacacaatgtgctttttatgttaactgtaaaatatcagttacaaaatagcatatttgatatcatctcaattttataaaaccaaagatggaaaggagaaaactggtaaggatatttacaaaatgacaagtaagattatctatataatattattatgactttcaatttttaataattttgtataggctgggcgtggtggctcatgcctgtaatctcaacactttgggaggccgaggggggcggatcacgagctcaggatatcgagaccagcctggccaacatgaggaaaccccatctctactaaaaatacaaaaattatctggacgtggtggcgtgcrcctgtagtcccagctactcgggaggctgaggcagaagaattgctgggacccaggaggcagaggtttcagtcagccgagattgtgccactgcactccagcctggtgacagagcaagactctgtctcaaaaaaataataataatgataataataataataattttg

SEQ ID NO: 654667 - DNA, 573 bp, Homo sapiens
tatattcttatttaatcaaagccctgagtaaagcagctgatagttaatggtctttgaaaacgactttcattgccaggcatcatccatccctagcttgctttstgcagttttctccattttttactcccttccttacagttagtatgtttggatgatcttgtcttactaaaaaaggattaaattgactaaacttgtggtcttaatgctaaaataaatatttatattaagaggcatgcagttttagcctgttgaattactaggctacgacctccaatttaggcccctcttaatttgagtggtaatatgttttatttttaacaatagacatatattcaaatataattctcagtatattgtctgataatgtaacactaaagtaggaatatttgggtatttgtatttgttaagatacaaattgtagcatagagacaggtgcttggtttgtcctaaactttgaaggtctatggataacatgcagacttcacataagagataccgtctcatttgtaatgcagtgggaaagtaacagtttatatatatggtattctatgtacatgtaaacgttaacgcaag

SEQ ID NO: 654668 - DNA, 614 bp, Homo sapiens
atttttagaatttgttcatttctatagaaaatgtcatcggtattttgtyagggattgcattgcattgaatctgtagtttgctttcagtggtagtctcattttaacaatattaattcttccaagctgcgagtacgagatgtctttctacttgtttatatcctcttaaatttctttcattagtgttttgaaatttagcttctggagctctttaacttcctggtttagacatattactgggcgttttattacttttttatggctactgaaatcaggaagccttcttgattttttttccagctagtttttcatgtgcagagacaccactgatttttgtatgttaattttgtatcttgcaaagttactgaattcatttatcagttctaagggttattttggtagcatctttaggtttttctagatataagattatgtcacctgcaaacagagacaacttgacttcttcctttccaacctggacgccctgcacccaaatctttaggttttactataagtaaaattatgtcatctgcaaacagagacaatttgacttcctctttctaacttggatgccctgcacccaggtcttgggtctgcaaaacagccccttgggctac

SEQ ID NO: 654669 - DNA, 614 bp, Homo sapiens
atttttagaatttgttcatttctatagaaaatgtcatcggtattttgttagggattgcattgcattgaatctgtagtttgctttcagtggtagtctcattttaacaatattaattcttccaagctgcgagtacgagatgtctttctacttgtttatatcctcttaaatttctttcattagtgttttgaaatttagcttctggagctctttaacttcctggtttagacatattactgggcgttttattacttttttatggctactgaaatcaggaagccttcttgattttttttccagctagtttttcatgtgcagagacaccactgatttttgtatgttaattttgtatcttgcaaagttactgaattcatttatcagttctaagggttattttggtagcatctttaggtttttctagatataagattatgtcacctgcaaacagagacaayttgacttcttcctttccaacctggacgccctgcacccaaatctttaggttttactataagtaaaattatgtcatctgcaaacagagacaatttgacttcctctttctaacttggatgccctgcacccaggtcttgggtctgcaaaacagccccttgggctac

SEQ ID NO: 654670 - DNA, 581 bp, Homo sapiens
ctttaaaagcagcgtaatagaatgtaaaatagaatttattcagtcccggattaagaatgagcaaatgaaaattctaaggtaaaagttaataattaaatttacaatttatggatatttaacttcatagttcaatttgtttaagtaacaatgtgatttatttacttatataaattgtagtgtgtcagattaaataagtaaattaacaaattatgaaaatatataatattgcctagtataatgaaatatttaaaaattcaaaatagctaaagactattaaaattgaaattatttgtaacatttatttttagggtactttcaattttgcttcatagggaaatttaaaaaattcactagcttctagatattgatctagatattgtcaaaaamctttttctcttcagtgcttgacataattattgatgtgttgaacaactttagtagaattaaatagtaaaagataaagtatttttattgaaacctcaaaactcaaaacacagtcataaatgctcaggatcaaatataagcaacatacacaagacagcaaatgacagctcatatgtatacagaggccacctcacatg

SEQ ID NO: 654671 - DNA, 517 bp, Homo sapiens
gatggatgtttcaaggatttgtatgacatctaaagtcacatagtgtcccctctgcttcagtctactggtaaaacaagtgtagccccattcaacgtggaagacactacacaaaggtgtgaatttcagaaagaatagttcactggaggctacctatcacactatatctttagatattcgacamttatcagcacctcggcaaactttacattctttgaaacactctgtccccttactcccataacaagccagttttctttttacttaatattttacattgacatataatatttgtgcatatttatgagatacacagtgaagttgcattatcgacaatgtacagtgatcagatcaagataattagcacatttatcatctcaaacatttagcattgctttgtgttggaaaaattaaatgtcttccttctaactatttgaagctaaaatatattatcgctaactctagtcatcctacagtgctgtggaataccgccagtaagtcatatcataatcacgtatca

SEQ ID NO: 654672 - DNA, 517 bp, Homo sapiens
gatggatgtttcaaggatttgtatgacatctaaagtcacatagtgtcccctctgcttcagtctactggtaaaacaagtgtagccccattcaacgtggaagacactacacaaaggtgtgaatttcagaaagaatagttcactggaggctacctatcacactatatctttagatattcgacaattatcagcacctcggcaaactttacattctttgaaacactctgtccccttactcccataacaagccagttttctttttacttaatattttacattgacatataatatttgtgcatatttatgagatacacagtgaagttgcattatcgacaatgtacagtgatcagatcaagataattagcacatttatcatctcaaacatttagcattgctttgtgttggaaaaattaaatgtcttccttctaactatttgaagctaaaatatattatcgctaactctagtcatcctacagtgctrtggaataccgccagtaagtcatatcataatcacgtatca

SEQ ID NO: 654673 - DNA, 531 bp, Homo sapiens
gccaaaggagattaacatttgagtcagtgggctgggaaaggcagacccgccctcaatctgggtgggcaccatctaattacctgccagtgcagccagaataaaaagcaggcagaagaacatgaaaggactagactggcttagcctcccagtctacatcttcctcccgtgctgccttcagacattggactccaagttcttyggctttgggactcggactggctttcttgctcctcagcttgcagatggcctattgtgggaccttgtgatcgtgtgagttaatgctccttaataaactctcctttatatatacatctatcccattagttctatccctctatataaccctgacaatacaccatgctacttaagaaataaatgctttagcttttgtatccaatgttcatttggttttaactattttaaaatttagtattttaaatattaatatacatatttcagtaagtcatgaaattttatcttctctacttatttttactcctagtggtacatttcaagaaagaaagcaaggtt

SEQ ID NO: 654674 - DNA, 531 bp, Homo sapiens
gccaaaggagattaacatttgagtcagtgggctgggaaaggcagacccgccctcaatctgggtgggcaccatctaattacctgccagtgcagccagaataaaaagcaggcagaagaacatgaaaggactagactggcttagcctcccagtctacatcttcctcccgtgctgccttcagacattggactccaagttcttcggctttgggactcggactggctttcttgctcctcagcttgcagatggcctattgtgggaccttgtgatcgtgtgagttaatgctccttaataaactctcctttatatatacatctatcccattagttctatccctctatataaccctgacaatacaccatgctacttaagaaataaatgctttagcttttgtatccaatgttcatttggttttaactattttaaaatttagtattttaaatattaatatacatatttcagtaagtcatgaaattttatcttctctacttatttttactcctartggtacatttcaagaaagaaagcaaggtt

SEQ ID NO: 654675 - DNA, 575 bp, Homo sapiens
gtattatttaataaaaggaactagaaagcaaagatttaagaaaatgttaaaaatcaaaaatgaacgggggtcacattccaatctgggaaaccattctcccacgattccttggaagtcagctatggtcctatcactccccttgaattagaccaaatgacttttctacaaccctgggccctgtacctgaaatgaaacaattggtcctagcaagtcacaacttaaccacagatcaccacattctccatcctaaaggcttggctcagacacaaattctaggcactgagttttcctaaataaggaattcaggaagaaccattgatgaacaagacagttaactgtttctgggcttctcttgtgctttcttcttgacagccatgggctccccaaaggaagtcattttctcagacatcactgaaaattcggctactgtcagctggagggcacccacrgcccaagtggagagcttccggattacctatgtgcccattacaggaggtaggagactcggaaaggggagagagaggaggagtgttgtgggtttggatggattcatgaaaaagaccctgataattttc

SEQ ID NO: 654676 - DNA, 375 bp, Homo sapiens
agggctatgttagtcaatatggactgggataggctgcagtaacaaattaactctggaatcttaatagctgaatacataaaaaatatttttttctcttgctacatcattttcaacatgcattattggagtygtggaggggaggctatattccacacaggcattcagggatccaggatgatagaggctttgccagctggaacatcactagtcaccaggcaagcaaatagagcagccaaagttttgtctactagctcttaaaaacttcagccccaaaggacatctattacatctgcttagaattcattgtccagaactacaagaattctgggcaatatgaagggagcacatatatatttgttcactagaaaatgtttc

SEQ ID NO: 654677 - DNA, 602 bp, Homo sapiens
aaacatattcaggtagcaagcagacatcttatatttttgaagaagcttagctccttctctggccctacttgccactccatttcctctgccagtgatcagaagtgggaatgtaacccagacctggctaatgaaacataagagaaagtgtgctagggagttgagtggaagcagcttctggaaactatttcctttctttaaaaaaaggaaaaaaaaaaaagatcctcaaaagaaaaaaaactttttccctctgtcccyaaatgtaataatgtaattaggtgagatgtgatcctaggagctatgacagatctcttagcataatgaggtacaagtctaaggaacaaaagccaacatacttaaagggtcctccaaagaatggaggacctggatgacatcaacaagccactgggactgccttggaagaatccatctccagacttctttttgtaaagtgtaaagctatggtaatttggtctttgttacttgatagctgattctaacaaatacaaatgtgcattttccaaggactgctgagtcctttgtaatagcacatgcattcatccttgagcatctgctgtgagttttaataaatacatttaataaat

SEQ ID NO: 654678 - DNA, 546 bp, Homo sapiens
tcatggacacagcgaatcaaaactttattgattccctttccttgccatatatatatatatatatataaaattaccattttaatgtcattgaagagaagtgagcccctgagagccctgagagcactaataagtatgtggatttataatgcatttcatgaattctggtggaagtatggaacactgcttcttcataatttcctttttttgattcaacatgaatactatagtgacagtccccaaaacggtgaactaggcccttatgacaaggctaaatcagtaagagaaatacccacaatgcattgtgaataaggacactaaaaataataatgtttacaagaggggaaatcaggtgataaaaatctacagaatgagattattatagtccaaagtactaaacatctaatcatgcttgcatttcatcccttggggtgtgtgtgtgtgtgwgagagagagagagagcgagagagagagagagatgatacacttttactctctataatttctgtccatacatcttccttgctccctaatatggaattcctatat

SEQ ID NO: 654679 - DNA, 612 bp, Homo sapiens
ttgcattggttttggcagtaaagggccattctgctgtgggaagatatgcagaaaggaacctgcagtgaggctagtttaaggtaactcttatttggttggctagcttcttttggacttcgctgttctatctgtgaggtaaagtccctggatgtgtcagttcacattgcagctgtggcaataaatggtaagcaaagtagttgctgctactctttgagttaatctgcttttttgttagtcatctagcagatgcttctgctatataaatggaacagactctctatttgtgaaaaatgtaaagtggataagtgatgacacatcttaacattcctccagttcatttcaagtwtttatgaaaattgaaatataactccccataaaactgattaagttttgcaaatatgtaatccacccctaatacttgttttttttttcccaaaagtctgaattgtaagttgaggaataaaatatgtagttaagagaaatggtgtttataaatcaggtagacaagtagactcttctccatctcctacttctaaactattactttgctttgtaaaccaaaaagtatctgagacaagtctcaatcaattggttaaggacatgcctgcaaaa

SEQ ID NO: 654680 - DNA, 719 bp, Homo sapiens
gcactgtgtttctaccatgcagcagataaacataaatatatgcaaatsctgcctggtcagatcatacatcaaggttagcctcttaaatttgtctatgaattttcccggaacctctgaaaactgttttagtttttccttgcatatggctaattcagacgtagaaaagggtacatatacctatatagtgtggggaaaagaaagagagatcagactgttactttttctatgtagaaagaagtagacataagacactccattttgttctgtactaagaaaaattcttctgccttgagatactgtcaatctgtaagcctacccccaaccctgtgctcacagaaacatgtgctgtgtcgactcaaggtttaatggatttagggatatgcaggatgtgctttgttaaacaaatgcttgaagacagcatgattgttaaaagtcatcaccactccttactctctagtacccagggacacaaaacagtgcggaaggccacagggacctctgcctaggaaagccaggtattgtccaaggtttctccccatgtgatattctgaaatacggcctcgtgggaagggaaggacctgaccatccgccagcccgacacctgtaaacggtctgcgctgaggaggattagtaaaaaaggaaggcctctttgcagttgatataagacaaagccatctgtctcctgctcgtccctgggcagtggaatgtctcagtgtaaa

SEQ ID NO: 654681 - DNA, 719 bp, Homo sapiens
gcactgtgtttctaccatgcagcagataaacataaatatatgcaaatcctgcctggtcagatcatacatcaaggttagcctcttaaatttgtctatgaattttcccggaacctctgaaaactgttttagtttttccttgcatatggctaattcagacgtagaaaagggtacatatacctatatagtgtggggaaaagaaagagagatcagactgttactttttctatgtagaaagaagtagacataagacactccattttgttctgtactaagaaaaattcttctgccttgagatactgtcaatctgtaascctacccccaaccctgtgctcacagaaacatgtgctgtgtcgactcaaggtttaatggatttagggatatgcaggatgtgctttgttaaacaaatgcttgaagacagcatgattgttaaaagtcatcaccactccttactctctagtacccagggacacaaaacagtgcggaaggccacagggacctctgcctaggaaagccaggtattgtccaaggtttctccccatgtgatattctgaaatacggcctcgtgggaagggaaggacctgaccatccgccagcccgacacctgtaaacggtctgcgctgaggaggattagtaaaaaaggaaggcctctttgcagttgatataagacaaagccatctgtctcctgctcgtccctgggcagtggaatgtctcagtgtaaa

SEQ ID NO: 654682 - DNA, 719 bp, Homo sapiens
gcactgtgtttctaccatgcagcagataaacataaatatatgcaaatcctgcctggtcagatcatacatcaaggttagcctcttaaatttgtctatgaattttcccggaacctctgaaaactgttttagtttttccttgcatatggctaattcagacgtagaaaagggtacatatacctatatagtgtggggaaaagaaagagagatcagactgttactttttctatgtagaaagaagtagacataagacactccattttgttctgtactaagaaaaattcttctgccttgagatactgtcaatctgtaagcctacccccaaccctgtgctcacagaaacatgtgctgtgtcgactcaaggtttaatggatttagggatatgcaggatgtgctttgttaaacaaatgcttgaagacagcatgattgttaaaagtcatcaccactccttactctcwagtacccagggacacaaaacagtgcggaaggccacagggacctctgcctaggaaagccaggtattgtccaaggtttctccccatgtgatattctgaaatacggcctcgtgggaagggaaggacctgaccatccgccagcccgacacctgtaaacggtctgcgctgaggaggattagtaaaaaaggaaggcctctttgcagttgatataagacaaagccatctgtctcctgctcgtccctgggcagtggaatgtctcagtgtaaa

SEQ ID NO: 654683 - DNA, 630 bp, Homo sapiens
taagctgattatccacaaatacgtaagtggtaattctctgtttaattctctttcttttccttttgggtggagccctttgaggaatccccttggcctgcatctcatcatttatgaaatttctaagtgtgygtcgaatgtaaatatgagccaagtcctgtagattcctgacagtgattccttacagatttgtagtggtgagggttagatttaattttatataaggtttgaataattgttaagcttatgtaacctgatctgaatttgcacttcctctatgaaaacttcacttatctaataaggaaatcaaatgctttgtagacctatttaccttacttttgttgcaatcactgttgctgggttgctgtatatatattccgggcaatatatgagtgcaataacaatacaaaatattgagtaatttagctttttaaaatcccacaaattttatgaaattttacagccctgctacttttgcttttgaatctcttgccaaaagacacgagtaaaatatctgcttctctcatagagattttaagagcacagcaagtgaattattaaaataggaagtatgtacttaatacaactctttatatggaccctttacattttcagtattttaaaaaatgaggt

SEQ ID NO: 654684 - DNA, 609 bp, Homo sapiens
ttgggttgtctctagttgttggctgtaaataacattactttcaaaaaggcatataggcacttgcttttcagaagaatgctacagtgaatcatcccaccacttacctgyttttcaaaacttgcagagtccaccactctttggttttggacacatcaggccattgattctggcttcaaggactccgcctctgctcatcggtacccttaagctttgactcatgccctctatttctgcatggcacttaaccaattttggtctatgacttttggtttgattcaaatcatgtgacctcagagaatcccacccatctaaattgacctaaaataatatctcaatccagtcaccaggagttgaaggtattatggtaacagtaagcagaggacaggacaattttccaaaattatccatcagttcttcttttgccttaaatttctaaaattaatggactcctgcctttgaattagctctctttcccataggcaatgaaaacatgttgaattagttaaaaagaaagttgcagggcatgagaatcaatatctttattatcatgtgccttgatgagagaaggtaaatatatgaaagacagtgcagtcttgcaaagctggctgc

SEQ ID NO: 654685 - DNA, 609 bp, Homo sapiens
ttgggttgtctctagttgttggctgtaaataacattactttcaaaaaggcatataggcacttgcttttcagaagaatgctacagtgaatcatcccaccacttacctgcttttcaaaacttgcagagtccaccactctttggttttggacacatcaggccattgattctggcttcaaggactccgcctctgctcatcggtacccttaagctttgactcatgccctctatttctgcatggcacttarccaattttggtctatgacttttggtttgattcaaatcatgtgacctcagagaatcccacccatctaaattgacctaaaataatatctcaatccagtcaccaggagttgaaggtattatggtaacagtaagcagaggacaggacaattttccaaaattatccatcagttcttcttttgccttaaatttctaaaattaatggactcctgcctttgaattagctctctttcccataggcaatgaaaacatgttgaattagttaaaaagaaagttgcagggcatgagaatcaatatctttattatcatgtgccttgatgagagaaggtaaatatatgaaagacagtgcagtcttgcaaagctggctgc

SEQ ID NO: 654686 - DNA, 577 bp, Homo sapiens
gagtcttttgaggcaatcaattcaaatcacctctcaggggaaggaacagagtagaaatgggtagagagtgaccaggtgcggtggctcacatctgtaatcccagcaccttgggagggagaggtgggtggatcacttgagttcgggagttcaagaccagcctggccaacatggtaaaaccccatctctactaaactaaaaaaattagccaggtgtggtgggtgtctgtagtcccagctactcaggcagatgaagcatgagaatcgtttgagcccatgaggtggaggttgcagtgaggtgagatttcaccactccactccaacctggggaacatagtgagaccctcttaagcaaataaacaaaacaaagaaaggggtagagagtggatctggaagagctgatgaaagatatttggcacacgtggtacagaaaggagtaagtgrtggtcactaggtttgcatcatagtacaccaagacttggcatcagtctatcaaagtcagtgtgatgagggagcaggaagaacgaggaccaggaggaaccatctttaaagaggactcatagagaggcagagtcacagta

SEQ ID NO: 654687 - DNA, 560 bp, Homo sapiens
agttattttctaaaggtaattaggttttaaaatgcaaagttaacatttgcgtaaaagctgctagctaaagtcagcattttacaaaattaaatgacttggactgtcttgtagtgtttttgcaacccagcaaagcacctgcctataaaactgccaaacatatgagttggttttattaaatgtttgttaattagtgaagcatagttttcttgttcaagttctatggacaagttgggcctgctactaggtcggattaattcatgcatctcttctgttgccagtattctaagtgatttttaattatttttaacatgtaatttgatgataatgaaaccacacccttccactggatctcttttgagtatgcgttcatgacataatggaatgtttattattaaaggcatttagttaagagaaagagaaagaggaagagatcatgaaagagagagaaasagaagctacagagctcattagtttatactggccttgacgatattcctcaggcattcagtacgcacttaaacacttggaaataagtaagccccatggaatagatgaatata

SEQ ID NO: 654688 - DNA, 624 bp, Homo sapiens
gaattcctaatgagggccagttgatatacagcaaatggaatggaaggttttttcctctcctaagtagttgctcatgctctgttattgaggctattagctgttggagttgttatttcagaatccagaatccacagagcagatatttcattattcttatytttagggacatgtacaaaattggatttaagtcagctggttgcgatttccatgcttgaattaggtgagggccctgtggatataagtctactttaaaatattaaatttttttcacacaaaccacatactggattgactctccacattagtagagttgcctacttcctgatcatccagatagagatagcattatactgaataaaatggagacatggtcaccattttcaaatgcttcctatggccacagattcccatgggaaatgcctagccctgctacagacatatcaatatccttagtgtttctgaggaaaacaaaataagagagaaaccatttcgtcccttcaccttcaaatcttaagaacaccaactatagaggtgactcttagaagtgagaataagtgataaagaataggttcaggttatcgctctgttgaaacagttaaaggtttattgaaagcatgcagattt

SEQ ID NO: 654689 - DNA, 462 bp, Homo sapiens
ggaacaagagccctaacttacaacaggaacaataaagtaaagcacaaggaataggcagggtaaagaacccaaagtatagaaaacaactcargtacgggagaaatgagagtacttgttataaacctctttagaaacaaactccagagcaaatacaaaacaaaaagataagaccctagtactggaaacttccacatttggagggctaagagttcagggatgcatgatcatatgcaaaaagaagaaaaaagaacttacctttcaaaaatgggacacatgtttattgagctctaattatatgcagggcactatgcttctgtgaagatccgggtagcctgaactacccagaatgatcaaccttgttccatcaccgagtagcgatagtaaactgtagagtaatacaacctcaatatacaaccccacctcttgcttcaaatgcagactcctgcctgccagaatgaattc

SEQ ID NO: 654690 - DNA, 528 bp, Homo sapiens
acacagcgacttaaagcagctttatatcctccttcaagtaatgtaygaaagctctgagactagtatatgttcagtcaagcaaatcttggtgattctgaggcagcactacaaagctctggcaactcaagactcaatctaatcattgccccatcctttataattagctctgtatttctgataagttcatggttttcagtcagtcgattttcatcctgtttgttccttagctctcttatgtgaaaaattcttgggcattggtttgctcaaggcaaataactaggaaacaactaggtcagattaagcttagcttcaaatgagaaacatgttgattgctggtgccttcagaaatatggtattcttcagaaagtattgctgtagaaaatatgtggttgcatttggggggcatttgaactgtgtttagtttcacgatttgttttctgtaaccactgatgctgccccaggtatcatcttacaatcagaccacttggtgattataatattttctagttaaatgacatttaaggcctc

SEQ ID NO: 654691 - DNA, 518 bp, Homo sapiens
cctccccacagcccctgataacctccattctatgttcagtctccatgagtttgactactctaggtatctcatgtaagtggaatcatacaatatttgttcttttgtgactgactggtttatttcacttaacataatgtaccttcaaggttcatctgtattgtagcatgcatcatcatttccttcctttttaagactgaataatatcccattatatgtatgtaccacattttgtttatccattcatatccaggtgtcagtggacccttgggctgcctccaccttttggctcttgggagtaatgctgctatgaacactggtggacaaatatctgttgaagtctctgctttcagttctttggtgtatatacccagaagtgagattgctagagcatatgataattctatgtttaacagagaatgacttttttaaaaaagctatragaattatgttcaaaaaactagaagatggaaaatttcaccagagacttgagatctgcaaaaacaaaatttaaaaaaaag

SEQ ID NO: 654692 - DNA, 602 bp, Homo sapiens
ttttatccttctagtgttcgctggtaggtactcaatattgtacttagttaatcaagttatttgaggaataataatactacatatatttttggtttgagaaataacatttttaaaaatttattttaagcaactaaaacaataacttaccaggtgctgagtgctttgctaagtgctctcatttagtcctcagaacaatcctatagggaaagaactacaatttttcctattttattgatgagtcagacaaggtcaaaatgtttgtgtaacttgtccaatttctcataggttgtaggaattttaacccaggtaacatgggtccagatattaacctctattttaaaagataaacttaaaaaaacataaattcttcttttttcactaagtggctactttayagctttagaaaataaatggaaaactgagaaaccaaattggttggtgacatcagttagggcactaaactattcttataatatgacctttacattttttcaaatgtttcttcaggatgccggggcactacttgatatattttggcatgggctctgtcatgcatgtttgacatatgagaaacaccaccatggtgaatagaatgttccatc

SEQ ID NO: 654693 - DNA, 581 bp, Homo sapiens
ttttcatcctattcaggcttttcaaataaggtttgggatcaactacataaaaactttttgtgttgatttctttaatgctcttcccttaatttgtcccactactcactcccttccactctgctaccgcaaattaggtttcacagcaagggttttaaagtaagtaaaaccttgaaaaggaagaygctactgttcagagattcattgctatagaatttacatgggccatatgaactttctagataagagcaaagcaaaatctaaagcatactgcttataatataaactttttctgctgtttcatgtagcttacatgtaagaagagctcttgaatttttttgtttgttttgctgctttttaaaaaattcattattagagatgagaagcagaacttattttaaactcttctgaaactggttttaaggagtcttaaggagcctttttttcttctcttttgccttcagccacatatcaacagcattagattgttgtctttattttgaatgtcatgtttgaaaggtcttaaaaaatctgatctttctatgaatggaaaattacttgtttgaaaagagttaatccaacta

SEQ ID NO: 654694 - DNA, 643 bp, Homo sapiens
atattaaacaagctggccatcaatggtttacctacctcctttatttatttttatttaaaatgccttgtctctactattctttgcagtttgaaatcaactttcagtttctttccttcagggaaaagacaatcatttagtcctttaaagtacttgctttgkgtaatagccaaattttagggaaatataaattaaaaccactagctatgattaaatctgaaactaacaaatacttccatgcctgcaacataactacttttttttactgacatgactatttggtgcaagataccctatttgcaaatgtttgcacttggcttatcataaaaggtgtttcctttttttctctgaaaaataccaattagccctgattatgtgttgtcactcgctttatgttctttttccaatgcaaagaaaaaataaacaaaacacagaagttggtcttaaatatcaaagatcaaacaagatgaaggaaaaaaatttattaccctatggactcttggaaattaaaatacaaaagtctcctgaaacagcactgctttatgtaatgttgctgtgcagcaggggcaaaagcctgtttatattaatcatccttttctgtagcttccattggcaatcaactgctgcatttcagctgtcagagttt

SEQ ID NO: 654695 - DNA, 572 bp, Homo sapiens
acaacatatcatttgtcataggcttggaaatcctttcactcaaacttaacccttgttttactccaattaacagtggaaaagattgtaaacatctattcaaacaactcgttcttayccttccaaacatgcctggtgtggtggctcacacctgtaatcctagcactctgggaggctgaggcaggaagatcacttgagctcaggaattcgaggccagcctggacaacataatgagaccctgtctttacaaaaaagtcaaaaatcagctgggtgtgttggcctgagcctgtggtcccaactactcgggaggatggcttgagcccaagaggcggaggttgcagtgacccatgatcattcactgcactccagcctgggcaacacaaaaatcctgtctcaaacaaacaaaaaatctcagttcacacatgactacttctacctctactttaaggaatttttttcctccccaggtagattttggattttaattatctaagtaatatataggcttatactttagcctttgtattaggaattttctttttacatcattttctgaatcttaaacccatactgta

SEQ ID NO: 654696 - DNA, 570 bp, Homo sapiens
gtaattactgttattatacttattaattttattatgctataaaagtgattaaaattatattgtacataagtaccactggaattaattcaaaagtttttagacttttattaaaatattttaaattgtcgttatttctaaaatagaaacattagctttttgctttaatttgtatcagtttgtgtaaataaaatgacaagagaattgacacaacacaatatatattactaaggtaagaaatccgagtccttattttacctctttgtttttcatttaaaaagagtctctacagcctgagcaacatagcaagaccttgttctctacaaaaaataacaaattagctgggtgtggtggcacatgcctgtcrtcccagctactcaggaggctgagggggaggatccttgagcccaggagattaaggctgcagtgagccttgatcacaccactgccctccagcctgggcaacagagaccctgtcttaaaaaaaaaaagtctctaaaataaactcaacctgtgttaataagatggatataaagccttctgttcatcttagaatttggagtccagaatata

SEQ ID NO: 654697 - DNA, 571 bp, Homo sapiens
ctgactttcagtaattgttgcaaatcatttttaaatgctctatagcagtctctgcaactcaatcaagtcaactttaaaataagccaactctatagagagagaggagcaaatattttcctggttcgcatcttctgagagagaggagcgcagtcacagccccttcraggaagtggcctgaagtgaatgctctcgtgaaggacacatgtggcacagagcaggccactaatctgataagtcctcaagaggagagcaaaaggcagacggggagagtagtagagtcgcaccccacaggccggccgtgccaaccaaagccaggagaaaatgctccaaggcttctgtttggatgcacaaactgaatggtgatgtggcacggataacctttcacgagagaatgggcaggagctgagctccttagaggccccagatgaaagggaagaggaatatctctgtggctgtaattaaagagatgcttttaagcctggtcatgacatccagttggttttcaaggaacatgctctgcagcctctaagaatctgccaagcaactttggcaagaatgaaaattaataatg

SEQ ID NO: 654698 - DNA, 616 bp, Homo sapiens
gttacaatcagatagtggctggggcttcagtggccaagactcccttgcagagctggcagttggtgccagctattggctgggactagagagcctcagttctccccaatgaggcctctgcatgtgacttgtgctgggtccctaaaagaaatggactaggcaaacaccagtgtgaaagtggcttttcaagtctctgcttatataacacatactaacgtcctgttgtccatagcaagtcacgtggccaagcctggagtcastgcaggagggcaccccatcagggcaggaatacaattgttggctggggacctccaaaataacagtctgccccaggatgggatccgaacgctgccctttaatggctctgtgaccttgggcagttactcttcttccttgtggtctaataaaatatgatactcattggtactctcttcagagtgcttttgtgattactgttgccagcagtgagttaatgaattaatacatgtaaaatacatgtaacagtttctgattcatgaaagcacgtaataaagtaagccagtttcagtagtggtagtggtggcagtagtagttatagtagtagtaatagaattagtagttgtatcagcagtagtaggag

SEQ ID NO: 654699 - DNA, 616 bp, Homo sapiens
gttacaatcagatagtggctggggcttcagtggccaagactcccttgcagagctggcagttggtgccagctattggctgggactagagagcctcagttctccccaatgaggcctctgcatgtgacttgtgctgggtccctaaaagaaatggactaggcaaacaccagtgtgaaagtggcttttcaagtctctgcttatataacacatactaacgtcctgttgtccatagcaagtcacgtggccaagcctggagtcagtgcaggagggcaccccatcagggcaggaatacrattgttggctggggacctccaaaataacagtctgccccaggatgggatccgaacgctgccctttaatggctctgtgaccttgggcagttactcttcttccttgtggtctaataaaatatgatactcattggtactctcttcagagtgcttttgtgattactgttgccagcagtgagttaatgaattaatacatgtaaaatacatgtaacagtttctgattcatgaaagcacgtaataaagtaagccagtttcagtagtggtagtggtggcagtagtagttatagtagtagtaatagaattagtagttgtatcagcagtagtaggag

SEQ ID NO: 654700 - DNA, 622 bp, Homo sapiens
gagtataatatatttgatttccctttatgagtctcacattgcttataattgagtagggctactacattttctgggcaggctatcaaataggatgttgtwatgatttgcttgactactagagcagatgaaaatatatcagttctgtctgtagttgttctgtttttgaatttgaaatctgcacagtttgaaaccattcattcctctatggttccctttaaaatataaaagtatttttttatgttttaaagacttaagaatattacacaaaatcagttaagtaaatggttaaaacagtgtgaacttcagagaacataagaggggtcttggatttaattcgaaaacatcaaggaagtggcagtagtacaatgcaaagatttgggcctgataaaaagaaaacaggtttcacttgtaactggcatctcagggaatcctgaatgctccaattgttggtctgcactgctttgcagtttactgagatgttaagatattttgtgctccataaaatactacttaccaaaattattttagacacataattcctctgttttgcttacaggatacatacagactcaaaacttatcagtacacttacttcctctttaaaacagtatcatgaagacaa

SEQ ID NO: 654701 - DNA, 622 bp, Homo sapiens
gagtataatatatttgatttccctttatgagtctcacattgcttataattgagtagggctactacattttctgggcaggctatcaaataggatgttgtaatgatttgcttgactastagagcagatgaaaatatatcagttctgtctgtagttgttctgtttttgaatttgaaatctgcacagtttgaaaccattcattcctctatggttccctttaaaatataaaagtatttttttatgttttaaagacttaagaatattacacaaaatcagttaagtaaatggttaaaacagtgtgaacttcagagaacataagaggggtcttggatttaattcgaaaacatcaaggaagtggcagtagtacaatgcaaagatttgggcctgataaaaagaaaacaggtttcacttgtaactggcatctcagggaatcctgaatgctccaattgttggtctgcactgctttgcagtttactgagatgttaagatattttgtgctccataaaatactacttaccaaaattattttagacacataattcctctgttttgcttacaggatacatacagactcaaaacttatcagtacacttacttcctctttaaaacagtatcatgaagacaa

SEQ ID NO: 654702 - DNA, 622 bp, Homo sapiens
gagtataatatatttgatttccctttatgagtctcacattgcttataattgagtagggctactacattttctgggcaggctatcaaataggatgttgtaatgatttgcttgactactagagcagatgaaaatatatcagttctgtctgtagttgttctgtttttgaatttgaaatctgcacagtttgaaaccattcattcctctatggttccctttaaaatataaaagtatttttttatgktttaaagacttaagaatattacacaaaatcagttaagtaaatggttaaaacagtgtgaacttcagagaacataagaggggtcttggatttaattcgaaaacatcaaggaagtggcagtagtacaatgcaaagatttgggcctgataaaaagaaaacaggtttcacttgtaactggcatctcagggaatcctgaatgctccaattgttggtctgcactgctttgcagtttactgagatgttaagatattttgtgctccataaaatactacttaccaaaattattttagacacataattcctctgttttgcttacaggatacatacagactcaaaacttatcagtacacttacttcctctttaaaacagtatcatgaagacaa

SEQ ID NO: 654703 - DNA, 655 bp, Homo sapiens
atcactgaaatggaatcccataattgtagcagttttattctcttatataattcagtttctttttcaacaaacatttattgagcactactaggtgccaggcatgttctgggtacttagtgcatatcgatggataatatgaaggtctctgctctcttgaagtttatttccatcagaagagacagayaggaaacaataaacacaatgaatagataaatgatatagtatgttagaagttggtacacactagagagaaatgaaaaagcagagcagcgtgaagacatttatcagtgctgggctaaggaggggcaggtctatgttagagtggtcgggactactcttggtccacgtgaaggatgttgaccaagtggaatgtgggggaagagcattctaggcagagggaacagctagaccaaaggcctattactgaaggcctggcaaggttgggaaacagcagagagccagtgtggctggagtagagccagtggaggggagagttgtaagacagcaggtgagaggagtaatgaagctggggttacaggtagctttcgtctgaatataatggggagccattgttgaccagaagaatgacatgaaatgacttctaatttaaaaggatcactcaggctgtggggtgagaacagatgggagaggtcaa

SEQ ID NO: 654704 - DNA, 655 bp, Homo sapiens
atcactgaaatggaatcccataattgtagcagttttattctcttatataattcagtttctttttcaacaaacatttattgagcactactaggtgccaggcatgttctgggtacttagtgcatatcgatggataatatgaaggtctctgctctcttgaagtttatttccatcagaagagacagacaggaaacaataaacacaatgaatagataaatgatatagtatgttagaagttggtacacactagagagaaatgaaaaagcagagcagcgtgaagacatttatcagtgctgggctaaggaggggcaggtctatgttagagtggtcgggactactcttggtccacrtgaaggatgttgaccaagtggaatgtgggggaagagcattctaggcagagggaacagctagaccaaaggcctattactgaaggcctggcaaggttgggaaacagcagagagccagtgtggctggagtagagccagtggaggggagagttgtaagacagcaggtgagaggagtaatgaagctggggttacaggtagctttcgtctgaatataatggggagccattgttgaccagaagaatgacatgaaatgacttctaatttaaaaggatcactcaggctgtggggtgagaacagatgggagaggtcaa

SEQ ID NO: 654705 - DNA, 469 bp, Homo sapiens
cggaagcatccagaatgattctaaggttgagcatgttgtttccgaaggggatggaggtgtgcagggtcaggaatccagttttagactgaatatctaggctactagatatccaggcagagatgtcaaacaggcaatcagatatttaarcctgactttgaaagggaagtctggactggaaatgtaaattggtgaattgttttttggcatagttgaaaccatggatttggatgagatcaccaagagagtgagtgtaggtagagaacttcttcagtgggtttcaggtatttgatgtaatttattcagtgagtaaagataaatgctccctcttctcaaagatttcatcatttgttttggctacacagattgttcacaacctagagataccattcacatagactacagtgtctggtgttgaatactgcaatggctgcaatggctggggaatcggggagcagtgtggagagacaga

SEQ ID NO: 654706 - DNA, 582 bp, Homo sapiens
tcacaacctagagataccattcacatagactacagtgtctggtgttgaatactgcaatggctgcaatggctggggaatcggggagcagtgtggagrgacagagtattgtatgataaatgttattttttattttttgagacagggtctccctctgtcgcccaggctagagtgcagtgacatggtctcaactaactgcaaccactgcctcccaggttcaagcaattctcctgcctcagcctcccaagtagctgggactacaggtgcacatcaccacgcctgactaatttttgtattttttgtagagatggggttttaccatgttggccaaactggtctcaaattcctggcctcaagtgctccacctgccttggcctcccaaagtgctgggattacaggtgtgagccaccatgcccagccagatatatgctattcttgatatatgtgatacaatgtaaaataattagtgcatgcaatggaactgtagagaaaggagcagtcaactgacttagtaataataaagcagagtaaatttagaatactctgttctcaaataatgtatcagaacagaacagtgtataataa

SEQ ID NO: 654707 - DNA, 582 bp, Homo sapiens
tcacaacctagagataccattcacatagactacagtgtctggtgttgaatactgcaatggctgcaatggctggggaatcggggagcagtgtggagagacagagtattgtatgataaatgttattttttattttttgagacagggtctccctctgtcgcccaggctagagtgcagtgacatggtctcaactaactgcaaccactgcctcccaggttcaagcaattctcctgcctcagcctcccaagtagctgggactacaggtgcacatcaccacgcctgactaatttttgtattttttgtagagatggggttttaccatgttggccaaactggtctcaaattcctggcctcaagtgctccacctgccttggcctcccaaagtgctgggattacaggtgtgagccaccatgcccagccagatawatgctattcttgatatatgtgatacaatgtaaaataattagtgcatgcaatggaactgtagagaaaggagcagtcaactgacttagtaataataaagcagagtaaatttagaatactctgttctcaaataatgtatcagaacagaacagtgtataataa

SEQ ID NO: 654708 - DNA, 579 bp, Homo sapiens
attattgggagagcacattagcagaggtcaataccactcctctgcttacaactcctcgaaatgtcttcaataaacatggagtacattggtaataagaaaaaacaaccaagagctattaaaaaaagaaaatccttcactggctcctcgtggcctatgggataaagtggaagtgactaaacatgaacttgagcctcacctgcacacttccagcctcatctcttgccataccctgccttcaaccctaggctgctgtaatgytcaagtgcttcttgcctcttttcttcttttttctgtgcaatatctttcctccatgcctcatgctcatgctgtcctctgtctgccttgaatcccttccctacccctcacctgctcccatgctaggtcaggggcctctctctgaggtgctcccataaactctgagcattgcacctcctcccatgcattactatttgttcttatatgtctgtttgttcccctcactagactctatcctcaataccagacacatagagggcaaccagtgcaagtttgtcaagtgaataaatgagtgttttggtgcatactaggggaccatcatag

SEQ ID NO: 654709 - DNA, 579 bp, Homo sapiens
attattgggagagcacattagcagaggtcaataccactcctctgcttacaactcctcgaaatgtcttcaataaacatggagtacattggtaataagaaaaaacaaccaagagctattaaaaaaagaaaatccttcactggctcctcgtggcctatgggataaagtggaagtgactaaacatgaacttgagcctcacctgcacacttccagcctcatctcttgccataccctgccttcaaccctaggctgctgtaatgctcaagtgcttcttgcctcttttcttcttttttctgtgcaatatctttcctccatgcctcatgctcatgctgtcctctgtctgccttgaatcccttccctacccctcacctgctcccatgctaggtcaggggcctctctctgaggtgctcccataaactctgagcatygcacctcctcccatgcattactatttgttcttatatgtctgtttgttcccctcactagactctatcctcaataccagacacatagagggcaaccagtgcaagtttgtcaagtgaataaatgagtgttttggtgcatactaggggaccatcatag

SEQ ID NO: 654710 - DNA, 574 bp, Homo sapiens
aaatgaggtaatctaagtactgcttagaacaatgcctagcacacagtgatcccacaagaaatattctctattaagctattaatgtattgatatgtattgtattttcataactaccttgggagagaagaggcatcattwtctttgtttcatggatactgaaactgaggtttctgatttgctatgtttactaacataccaaagctgggagagattcaaagagcctcctgctcttccttcttttctttcctcccttccttccacatatccttattattgggttggaatgggaagccataactcccacccagttgatttgaattagcacgtctgattattttttaaattttctttcccctccagccctacctccctgccagagcacttgtaagaaagtactcgctcacatatcttacttccattgaaataaaatcatattatgcttctgtcttttgccactagcctattactattagctgtcatatccgaagtcccaagttctttatctgaaccctcacactcgagaaatcgacgggatcaaggaaataagaaccagtgtttacataagtgtttattg

SEQ ID NO: 654711 - DNA, 507 bp, Homo sapiens
tgaaggtcatctgaagtatgtaatattttactgcctttatatgacaaccgtaagatatgatttgtagctatattggtaaatgaggtaaatttatcaaaatgatgtaaaaactaaactttatccagtggattatgacagcacattttcatttggcattgcctaacaratctctatttaatagtcagcattttggtatgagacttcaaaatttcaagtaagctttttacatagtgcttaaagaatttattcctattactgtttgccaatgcaaaatgccatattttcaggaaactgcaggggcataatatggtcagtgcaagccagggcaatgtattaaatctattaccaagagggaaaaaaagaaaaataacaaaactttgtggggtataatatgatctagagcatttttaaaaagttaaacctgtggctgaattactgaactttctattttttcaaattggaagctcttggagtctagtgaaaatttccatttatttgcactatatg

SEQ ID NO: 654712 - DNA, 600 bp, Homo sapiens
tgaagtatgtaatattttactgcctttatatgacaaccgtaagatatgatttgtagctatattggtaaatgaggtaaatttatcaaaatgatgtaaaaactaaactttatccagtggattatgacagcacattttcatttggcattgcctaacagatctctatttaatagtcagcattttggtatgagacttcaaaatttcaagtaagctttttayatagtgcttaaagaatttattcctattactgtttgccaatgcaaaatgccatattttcaggaaactgcaggggcataatatggtcagtgcaagccagggcaatgtattaaatctattaccaagagggaaaaaaagaaaaataacaaaactttgtggggtataatatgatctagagcatttttaaaaagttaaacctgtggctgaattactgaactttctattttttcaaattggaagctcttggagtctagtgaaaatttccatttatttgcactatatgaaacccaaaagcaccatgcctaggttggagcctaacagccaacaatgctgtgcaataatggtggttaaagaaaccattactgcctcaattaggaaatatttgat

SEQ ID NO: 654713 - DNA, 523 bp, Homo sapiens
actggaggctgagatgtctaagctcaaggtgctggcaggtttgatgtctggtaacggcctgtttcctggttcataaagggtgccttcttgctgtgtcctcacatggtgaaagagcaaggcatcactccagggtctctcatataagggcactaatcccattcctgagggctctaccctcatgacctcctaaaggccccactcctgatgccatcaccttgsggggttggatttcaccatatggatttgggggggcaggggcacaaacattcagaccatagccaggggacactctgctcagactgaaagaagctctgtttgaacacgtgctttccccatccctgtggcaggaagaatagagctgaacggtctcaccctggtggttagagctctgaccacacgtgtccttttcacccaacctatcattaggaactagccacttgaccacacctaaacaaccagaaggagaagaaatatgatactcctgctggcctgaaggaagggacatggtgtcagtgtgccatag

SEQ ID NO: 654714 - DNA, 621 bp, Homo sapiens
agcatccttctgggcagaagagccttggtttagtgtctgtgttcctgctggcctcgtgccacacgtcgttttggggctgtgtgctgacattattcggtatcctccagagctagcaccatgcctggccttcaggaggtgcccagtgaatgttgttgaagaartgagtatttggtaataatcaaaataattacctcaatagttctatagccaaactgaaatgtctataaagtgaataataggtagtcttcattgtgtcgtcttcattgaaaaagggaagatttcatgaaaaaggtgggaatttagaatctgttaagataaaaagggagacattacttgacaggatggtgggcgaaagattacaagcctctggtggagtttcagtgactggattgggaaagaagtaggtaatgtaagaaggttcccattagctgtacctcgagcagaggtgggtggactaagtggggagagggatcgagggtgctgagggagtgtgtggaacaagctttgagatgggaagtgaaaccccagactccatctagagcagcgctggctcattgaaacaaaatgcaccacacacatgtaatcttaaggtttctaaggaccacatttaaggaagtaaaa

SEQ ID NO: 654715 - DNA, 494 bp, Homo sapiens
cagctaaatgctttttggcaggttgtggaatgcacactccacattaaktggggtgttgaacaagataatgatactaaccttgtaacaacttgaaatttccattaagaggctggtagatgtactggcatcatgtacttaaccaactaaaattcttattaagggagaaaggtgtgtttctactggcgactactaagaaataattaagactttccactccataactgtaaagggaagcatcatttcacgttaccatgaacagaaatattggcgaatgtgccaagtagtagctctgtgatactgtagcctagacttcaggcaaagcaatgtcataatcaacatttcccccactccctgcctccacaaaattcactttttcctgtctctaacgttgattttctgtagcccaggccatctttctggcatcctgttctgcataccccaggcatattagctcaagtaggctatggcttggcaggaacagaccatgaagtcac

SEQ ID NO: 654716 - DNA, 653 bp, Homo sapiens
tgatttccagagttaaaattagcaatcaaaggaaaagtttggagaattgacaaaatatcttcaggacacatctatatacaaaacgagagctttcatgatagtgtaatttcacttacagagaatgaaatttattgscaagatctttactttcattcatcaccattatttgtctttttgtctttaagtaagtgatataataatgtggtctgtggtctttagtaaggaaacattttgattgcaaatcaagtgagtgtataactttgattcaatcaaaattcctactgtctgttcttcagcctcttgagtaattacccaaaacttcagcctgtggctatttcaggtctttgggtagataaatagagatagatagatagatagatagatagatagatagatagataatcttgaatttttcaagtctttagattgatgtatgtatatctatatctatgtttatgtactatagaatatcaagaagaaaattaaacatttcaggagatagagaaattgctttaaatgtaggaagtgccattatggaattctgaccctggagcaatattttatccaaatgtcaatttgctgtacttcttatttagcaggtgttcacacaaaggttaaaatggcttagaattcactcattgctcctaaagata

SEQ ID NO: 654717 - DNA, 494 bp, Homo sapiens
cagctaaatgctttttggcaggttgtggaatgcacactccacattaattggggtgttgaacaagataatgatactaaccttgtaacaacttgaaatttccattaagaggctggtagatgtactggcatcatgtacttaaccaactaaaattcttattaagggagaaaggtgtgtttctactggcgactactaagaaataattaagactttccactccataactgtaaagggaagcatcatttcacgttaccatgaacagaaatattggcgaatgtgccaagtagtagctctgtgatactgtagcctagacttcaggcaaagcaatgtmataatcaacatttcccccactccctgcctccacaaaattcactttttcctgtctctaacgttgattttctgtagcccaggccatctttctggcatcctgttctgcataccccaggcatattagctcaagtaggctatggcttggcaggaacagaccatgaagtcac

SEQ ID NO: 654718 - DNA, 592 bp, Homo sapiens
tgctgtctacctgacacaagtttaagtaatttttcaataggggaagttggacttttagaagaagcacagctgtacccgcatatatccttaccttgtcaaatcccttatcaaatttgcattccagattttggtgttctcatggctgacctattgtaacattctttttactattgcttcctgttggtgggacataacctgtcccygtactaggagaggaaattaaattggtctggcacaattttctcctcacagagccaagttcagtagaagccagtgccctttcctaagtagatacacatcaactatttgataatttactcttattttggcctgttatttaggtacttacttctgtttgagtctacaggtacattttttctaaacttctacaacattattcctaagcgtttaaagatcacaagtttagttcttagaaaaaggttatcagccctgactgaggtatacatctctccttttaaagctctctaacaaggcccttttctgtgctggttgaacttcccctctacccagggagcaccttgctcactgccccagaagctgccttcctggcatcacaagggaactgcttcaa

SEQ ID NO: 654719 - DNA, 632 bp, Homo sapiens
tatactctggtggtgattttcaagtcactgtctctttccacaaacagctccagcttctctctggtactgtcctgagaaaccggccatttctgttttccactgaaggatttggttttctttaagactacactgacagtcccttatgtttggaagattctatttcacttttatcaaactaacaaagacacatgcatggaaatgacttgagcatatctatgtattgatctttctaaaattttatacttggaacagactacactgatcttttctgctgtgactaaaatagctcgaaggaaaagaatgttgtatattttagagtcttttccatgttcctaatttggtttgaaatttaattcagtagactccattttcgatttcttagaacagtttgctagatttgtaggcatgacatcttcattctgagrttcgatgcatcttataaaagaatgtttgaagaaaacagcaaaggaagcattttgatcttttcagttccaagctgtcataataaaattatcttgctgtggagccttttttattttaaacttatattaataactgaagtaacgtgggactgtacagtcagtcaccaagtttatatgaggagaactgaatttgtaaattcaggattcttc

SEQ ID NO: 654720 - DNA, 636 bp, Homo sapiens
gaagtcctagtaaatctaagcttttctctatcccaagccatgaaattggtaatatgggatattgaggaggggatgatgtgggtttctatgtgtggtgaagggcagcagtactaggccttaggaatatattaattttgaaaaataaatatcttgatactcaaacttaatgacagtttacatacaacatgcaacttaaaactaagtggrgtgaaaatagatattttcttccactttgtctttttccagagagaggaatatgattgatgtctagtacccctttccctgaaaaaagaaaaaggatacatgtgttatcaccaaagacttagtagtgtagtaggaaacaataattagagaaaaaaaaaagctcttaaaatggaatgtttggattctgtccctggatattcacacaatctttgttacaccttaggttagacaatttactgaaccctcctcacttccgcgaatgaggcacttttcacactgaataacagtgatgggatgtgtggagtaataatttctcatccagatgggtgcttaggtagcatcttttgctgtgaactaatgccagtaaaacaaatatgaacgatcttcaaaaaatgtgaaagagtaaattgtgattagttctttggatgcaat

SEQ ID NO: 654721 - DNA, 618 bp, Homo sapiens
aggttgcagtgagctgagattgtgccactgaacttcagcctgggcaacagagttagactcagtctcaaagagaaaaaaaaaaaaaaaagaaaaagaaacttaggaggaaagggcatatgcaggattctaggatctctaaggggatccccaataagtaacacctctttttctctctttctcttctgggttttgaacaaattgaagaaagacagatgggagatgttatggacctaattttttcctcccaaaattcatgtattgaagccctaagacccaatatgactatatttgaagggagggtcttttgggagataattaaggttaaatgaagtcaaaagggtggagcctaatccaacaggatgggcgtcctaataagaagaggaagagacactggagtgcactctctstctctctgcacgcaaagagaaaaggccaggtgaaggcagcaagaaggtggcagcctgcaagtgaggaagacagtcctcactagaaaccaccctgataccttgaccttaaactgctaacctccagaactgtgaggaagtaaatttctgttgtttaagctgcctagtgtgtggtattttttttttaaatattattatactttaagttttaggg

SEQ ID NO: 654722 - DNA, 418 bp, Homo sapiens
gcatggatcattctgaaagacaagaygatatgttaggccacaaaacacatcttacatttttttaatttaaattatatcaaatgtctcatctgaccacaatggaataaaactagaaatcagtaacagcaggaactttggaaactatgcaaacacatggaaattaaacaatatgttcccaaatgaccagtgggttaatgaagaaattaagaaggaaattaaaaatttcttgaaacaaatgataatagaaacacaacataccaaaaccaatgggatgcaatgaaagcagtactaagaggaaagtttttagcaataagcacctatatccaaaaagtagaaaaacttcaaataaacaacctaacaatgcatcttaaagaattagaaaatcaagaggaaaccaaactcaatcttagtagaagaa

SEQ ID NO: 654723 - DNA, 510 bp, Homo sapiens
ctaaatcttgagcaaagtaaatcaaattgaaatttcagtgatatgcttgtatagaagaaaagaaaaacccttagattttggattgtgttctggatagaggttgtatattttagtagaaagggtttgggctttggagtcacctggtcctgggtttgaccccaagctctgccacttatttagtgggtaaaccagggaataatgtaaagatagtaagtaaaacagtacctacctctcagggctgtagtaattaaggcactaatgtaatgaattaaggggctagtgtatgtaaagacctgccacataggaagtactcatgggtgaaataaatatcttaatttttaatgttagtaatttagtgattaaaaaatgaaatagtcacagataattggtggacaagagtaactttaaaggaaatttggtccattttaaagaaaaggaaactgaaactcagtgagrtgtagcaccctacccaactgcccaccctaagaaaaccagacccaagattctaga

SEQ ID NO: 654724 - DNA, 237 bp, Homo sapiens
tcccacattatcctccttaagctcctgagaataagactatgattgccttagctcatcctgtttgagcagccatcgccagcctgtggattgaccatcctggggtcagtgctgcaaagactatgtgtatttggggtgggaggggtgtataaaataggactgcttttttagcaaagkctatatgcaggacagcttccttagaagggactcaaagtatgataagaattataaattgcagta

SEQ ID NO: 654725 - DNA, 574 bp, Homo sapiens
gtgcggtaggagtctaattttattcttttgcacgtagatatctaatcgtcaccgtaccatttgttgaaaagattattctttcccccattgaattatctcgggacactcactgaaaatcaattgattataaataygagggtttatttctggattctcaattccattccaggatatgggtttatccttctgtcagtttcacactgtcttgtttacaatagcattgtaatagtaagctttgaaattgtgaagtgtgagccttccagttttgttattctttttcaagattgtttctgggcctcttacatttccatgtggattttagaatcagcttgtcaacttttgcaagaaagccagctgggaatttgatagggatttcattaaatctgtagttcaatttatagaatattgccatcttaatgatattaaatcttccagtcagtgaacacaagctgtctttccatttgtttaggcgttcattcattgcattcaacatttttttgtagttttcagagtacaagttttatacttttttttgtgaaatttgttcctaagtgttttattcattgtgctgcta

SEQ ID NO: 654726 - DNA, 574 bp, Homo sapiens
gtgcggtaggagtctaattttattcttttgcacgtagatatctaatcgtcaccgtaccatttgttgaaaagattattctttcccccattgaattatctcgggacactcactgaaaatcaattgattataaatacgagggtttatttctggattctcaattccattccaggatatgggtttatccttctgtcagtttcacactgtcttgtttacaatagcattgtaatagtaagcyttgaaattgtgaagtgtgagccttccagttttgttattctttttcaagattgtttctgggcctcttacatttccatgtggattttagaatcagcttgtcaacttttgcaagaaagccagctgggaatttgatagggatttcattaaatctgtagttcaatttatagaatattgccatcttaatgatattaaatcttccagtcagtgaacacaagctgtctttccatttgtttaggcgttcattcattgcattcaacatttttttgtagttttcagagtacaagttttatacttttttttgtgaaatttgttcctaagtgttttattcattgtgctgcta

SEQ ID NO: 654727 - DNA, 625 bp, Homo sapiens
ttgttgaaaaactgttttcttgcttgtatttggctatttatgtgcatttcttatctctcccacaaccatgccttaaaaataggtttcaccactagctcatctttacaattttagtagtacttagtactccatgtatgtagtaaatgcttgacaaatatgtgttgaataatagcagcatgaatatgcttacacagaactttctaaagaaatatatgaacaagattcttgaattatgcaaaacccatgtgaaaaggtattttgatttttgagcttgattattttcggggaaaatccaattatgtcttaaacttaatggagtgaaaatatccaataagaaaaaaatgtatttgawatctttcattttatattcagaacccagactatgtcctatcgatatctttttttacatcagagtaatttccttctttcaaagcatttgtgccatacaaattgtttattcacaaactaatgtcatgtccagctacccgaaatggtttgtaatttaattaaggaaaatataattaaagacacaaataacataggatttatatcaagcagtaaatgtagatttgctgtcacttgggttttacactttttcatagtttatgtcttggcattaatgaat

SEQ ID NO: 654728 - DNA, 565 bp, Homo sapiens
tattattctaagtgaagtaactcaagaatggaaaaccaaacatcatatgttytcactcataagtgggagctaagctatgaggatgaagaggcataagaatgacacaatggactctggggactcagaaggaaagggtgggaagggagtgaggaataaaagactacaaattgggctcagtgtatactgctcaagagatgggtgcaccaaaatctcacaaatcaccactaaagaacttactcatgtaagctaataccacctgttccccccaaaacctatgaaatttaaagatttaaaaatttaaaaagtgtaaatttcagttctggaaaaatatatcatatgcatgagattagtattcttttgaaaaacaatcaaaattagaaagcagaagaaaagaaaataaacaatgatccaagatatattgaaaaaaaaagtctagcattcttgagctgaagaattttgagttggcacaattgtaaaagcttaccaagtactgcagaaaaaaatagcaacatgactaaacatattttgtcaaaaattttgaattttaaagatgagggaaaaattc

SEQ ID NO: 654729 - DNA, 598 bp, Homo sapiens
gaagaggaaattgcttcatccttgaccctgtctcccccagtaaaggtggttcattaggtgtctggcrccagatagggtggggccagattgaggatgctcaccctatcacttttccccactcatctctaactccttgaccagtgactatgacctctccatgcactcatgtgtatatggaggttttccattggaaaatgaggcatatattacagaaacacccatcacatatctgtatccctttggtgagaggtgcaggggcacgtggagtactccttcctgctgctaagttcatttttgtgtggctttcaccgtttgttccctgttgaagccttctccaagcttcgggtgttcacaagtctccaagggctctgtgagattagaacttccttcctctttcagctgataattacagctctgtggttctcccttgtaggtctttccttgagctccaaaacagagttttcctgcagtggagcttctattcggataattagggcactcagttgtattggaggagggttgaattaactacctctgtctcctgtgctacttggttctgggcttctacacatcacagctacctggaggataatcatca

SEQ ID NO: 654730 - DNA, 613 bp, Homo sapiens
tttaactgtggcatccctactgggatacattctaaggacaaaaagaactgcaacagaatcttaaacagtgtctttaagtgatcatattgttggtggtagtgtaggtactacatctccgaggttctctgtgtgtgtgtgtgaatgagtgttttacttttagagatgcgtaccataacgttgatggatgaaacaatactgtgtgagattttattaaaataacacaggaggctttggagcagaattaggtaggagtagagtcgaaggaggcggctataagatggtaattatgacgctgggtgatgagtatgcgtgaatttttttgtacttttctctctacttttggtcacgcctgctttttctgtaataaacattaaagacacttgttgagggtcatcctgtccgagtgctggtctgggatgcaaggcttttatttcaaccagcgtttctgactctagactctcacacggcgtaaatrtctctgcctcacacccatgcccaggcgtgctgtctgcgtggtgcctctgtgtacactgggggtccctgcactcaaccccacaggctcacgcccaccactgcccacctcaggcgcccaagaacctgcccagatcaccca

SEQ ID NO: 654731 - DNA, 544 bp, Homo sapiens
acctgattccatcgtgaaggaatggtccacacttatgtgactccatcctgaaggaatggtccatgcttacctgggcccatcctgaagaaacagtccatgcttacctggctgtattctgarggaatggtccacaattacctgactccatcctgaaggaatgttccatgcttacctgggcccatcctgaagaaacactccatgcttacctggctgtattccgaaggaatggtccacacttacctggctcccttctgaaggaatggtccatgcttacctgggcccatcctgaagaaacactccatgcttacctggcagtattccgaaggaatggtccacacttacctggctccatcctgaaggaatggtccatgcttacctgggcccatcctgaagaaacagtccatgcttaccttgctccatcctgaaggaatggtccacacttacctgactccactctgaaggaatggtccatgcttacctgggcccatcctgaagaaacactccatgcttacctgactgtattctgaaggaatggtccacactt

SEQ ID NO: 654732 - DNA, 544 bp, Homo sapiens
acctgattccatcgtgaaggaatggtccacacttatgtgactccatcctgaaggaatggtccatgcttacctgggcccatcctgaagaaacagtccatgcttacctggctgtattctgagggaatggtccacaattacctgactccatcstgaaggaatgttccatgcttacctgggcccatcctgaagaaacactccatgcttacctggctgtattccgaaggaatggtccacacttacctggctcccttctgaaggaatggtccatgcttacctgggcccatcctgaagaaacactccatgcttacctggcagtattccgaaggaatggtccacacttacctggctccatcctgaaggaatggtccatgcttacctgggcccatcctgaagaaacagtccatgcttaccttgctccatcctgaaggaatggtccacacttacctgactccactctgaaggaatggtccatgcttacctgggcccatcctgaagaaacactccatgcttacctgactgtattctgaaggaatggtccacactt

SEQ ID NO: 654733 - DNA, 544 bp, Homo sapiens
acctgattccatcgtgaaggaatggtccacacttatgtgactccatcctgaaggaatggtccatgcttacctgggcccatcctgaagaaacagtccatgcttacctggctgtattctgagggaatggtccacaattacctgactccatcctgaaggaatgttccatgcttacctgsgcccatcctgaagaaacactccatgcttacctggctgtattccgaaggaatggtccacacttacctggctcccttctgaaggaatggtccatgcttacctgggcccatcctgaagaaacactccatgcttacctggcagtattccgaaggaatggtccacacttacctggctccatcctgaaggaatggtccatgcttacctgggcccatcctgaagaaacagtccatgcttaccttgctccatcctgaaggaatggtccacacttacctgactccactctgaaggaatggtccatgcttacctgggcccatcctgaagaaacactccatgcttacctgactgtattctgaaggaatggtccacactt

SEQ ID NO: 654734 - DNA, 544 bp, Homo sapiens
acctgattccatcgtgaaggaatggtccacacttatgtgactccatcctgaaggaatggtccatgcttacctgggcccatcctgaagaaacagtccatgcttacctggctgtattctgagggaatggtccacaattacctgactccatcctgaaggaatgttccatgcttacctgggcccatcctgaagaaacactccatgcttacctggctgtattccgaaggaatggtccacacttacctggctccctyctgaaggaatggtccatgcttacctgggcccatcctgaagaaacactccatgcttacctggcagtattccgaaggaatggtccacacttacctggctccatcctgaaggaatggtccatgcttacctgggcccatcctgaagaaacagtccatgcttaccttgctccatcctgaaggaatggtccacacttacctgactccactctgaaggaatggtccatgcttacctgggcccatcctgaagaaacactccatgcttacctgactgtattctgaaggaatggtccacactt

SEQ ID NO: 654735 - DNA, 501 bp, Homo sapiens
ctgaaggaatggtccatgcttaactgggcccatcctgaagaaacagtgcatgcttacctggctgtattctgaaggaatggtccctgcttacctgattccatcctgaaggaatggtccacacttacgtgactccatcttgaaggattggtccatgcttacctgggcccatcttgaggaaactgtccatgcttacctggctgtattctgaaggaatggtccacccttacctggctccatcctgaaggactggttcatgcttacctgggcccatcctgaagaaacagtccatgcttacctggctgtattctgaaggaatggtcaacacttacctgrctccatcctgaaggaatggtccatgcttacctgggcccatcctgaagaaacagtccatgcttaactggctgtattctgaaggaatggtcagtgattacctggctccatcctcaaggaatagtccatgcttacctgggcccatcctgaagaaacagtccatgcttacct

SEQ ID NO: 654736 - DNA, 610 bp, Homo sapiens
gtagcaaatttttcactggttgtacttatacaattgccttatttggttgatcctgctggaaagtctctagttatataagttaattggcttctgattggttagccttaagtttgactttttttatttttaaagacatttacaagaaatagctcaagttttgcttatattggtaaatcaagcaaagttaacgccacttaaaaggctttgtctggtcagagatacctcaggccattttaattttctttaacaatttaaatacacctgtgtgccagaggacagctcagtgaagtctttgaatgtctgtggctgtatatttggaaaagtatatattctttgcgaaataccacaaatactgatgaggtaaaatgcaatgtacaggactgcatgtatataacaagtctctattactagatctatacttctgtttacatacaatttttattactaagaaaggctgaatatatttacctttccagtaagaattacaagtaattaagttacctcagtaacacttcagtgtttaggtacagtgcaagtggctctctgtatctgtgtccagcatggaatttcatacstagttgaaaactttcttactcgagagtgagttttc

SEQ ID NO: 654737 - DNA, 557 bp, Homo sapiens
tttctgcaaaaccaagatttctaaaatatgatggggcatttgatacaagaaaaggcaaataaagaaaaagtagagctccatttgtcattcttcttaagtgtctccttaagaaaactatgtgatccaaagttatttagacaaaagcttaagaaataaaacacttagtaactcatgctagtacttgattattcttttgcttatcaagttttcttctttttatgattattatacctttaattgcgaacattcattggattggctcagtagcattttatgtgagacaactttccattttaataagtacatattctccttcgttaatgtgaaatagaagtgcaggagtagggatgaaatggataattttgctagaagcaaattgaaactggctaggcaaaagcgtatatgtattttgccctctttttctgtttttagaaagtgcttgcgttaactctcattctcagccagaagcgttaatgattcaaacgggctktatatattgaaaaccatgaactctcacgtgcagagtacaatcagggagcaagcccgtgggtttgaat

SEQ ID NO: 654738 - DNA, 610 bp, Homo sapiens
gtgcatgtaccaccaatcaggcatcctggagccaaggctgtggagccaacctccttagctcaactcctcatcttcccacaaactagctgggggccaagttacttaacctctttctgtcctcaactctgcaatgaagataataagagtactttcttcctggagcttctttagggttaaatgagttaatatatgcaaagcaatagcagagggctgacataagtactcaatacattaatacttttacamttattcactttacaatcatcatcaccaccaccaaagaaaatcacagtcattgtaagagatcttaaaggtcctctagtttctagctgatatcccattacctcttcaaaaatcttaccatgtacaatcccatgattgcatcatcccagtgattgttaaaaaatctttaaataccttaaatgtagcattgacagcctggcaaggggttgtttttccacctttctttgactgagaagattctcagaattaaaagtatggtccaactcaagtaatggaacaagctgttacatcatgcatttttaatttaatttagtttctaccttttactatatctgattctcctagacttatttccccattgcttgcc

SEQ ID NO: 654739 - DNA, 610 bp, Homo sapiens
gtgcatgtaccaccaatcaggcatcctggagccaaggctgtggagccaacctccttagctcaactcctcatcttcccacaaactagctgggggccaagttacttaacctctttctgtcctcaactctgcaatgaagataataagagtactttcttcctggagcttctttagggttaaatgagttaatatatgcaaagcaatagcagagggctgacataagtactcaatacattaatacttttacacttattcactttacaatcatcatcaccaccaccaaagaaaatcacagtcattgtaagagatcttaaaggtcctctagtttctagctgatatcccattacctcttcaaaaatcttaccatgtacaatcccatgattgcatcatcccagtgattgttaaaaaatctttaaataccttaaatgtagcattgacagcctggcaaggggttgtttttccacctttctttgactgagaagattctcagaattaaaaktatggtccaactcaagtaatggaacaagctgttacatcatgcatttttaatttaatttagtttctaccttttactatatctgattctcctagacttatttccccattgcttgcc

SEQ ID NO: 654740 - DNA, 472 bp, Homo sapiens
tgtggctagcaaaaccaattacatacataaaactatgaaatatggcatgctccgttactatattgtggtcatttttaaaagaaagaaggggaaacagggaggaagatacagaggggagaagaaakaaacaggaacagcttcagtcacatagtgacagaggttcagaaattttgaagaacatttaatttaggtcatcttgtcaccttttagatttgcaataagcagtcggttattgctttttaagcaatcttaacactggtaatatgtcaatatgacccaaaccaatccacctattcaatactctgcttataaaatcccaatgctttttttgcagaaaacaaaaatccatctaaaattcatagggaacctcaagggaccctgaactagccaaaacaatcttgaaaaagaacagttggaggtctcacactttcagaattcttggaatctgctgccgcccactataatattgggg

SEQ ID NO: 654741 - DNA, 647 bp, Homo sapiens
caatagcaccttctctgagaaatccaggactattacgaaactaataacacacactccataatcaatgtatcatagatgaaactaaaagggaaattagccagtatttcaagctgaatgaaaatgaaaatacaacttatcaaaatctatgggctggaacttctggcttctgacccatgaagtataaagctataaggagcctcatttccactcttacaacmaacttcaagttcatgatcttttacaaatgcattggagagttgagcttgcagaaccaccacctagcctataatctaaagagatatgaacctcacagggagagatgtgagcaggatctcaccttacatagatgaaaccagaggtcagtaagaaaagttcagctggaatagttaacaaaatggtgaaacctactgtgcaggctggtgggacagtgagaaatcctttatcaccccagaagttgggggagtgttccctcttgcaggcacttgctccactggccattggcagaaactcacatgcactccactgagaactctacttggccctcacagaaaatatcagaaagagccctaaaggttaaatgactcagcctataacctccgttatctccaccacatcttgatttttgggtaggtgtagttccattcatc

SEQ ID NO: 654742 - DNA, 647 bp, Homo sapiens
caatagcaccttctctgagaaatccaggactattacgaaactaataacacacactccataatcaatgtatcatagatgaaactaaaagggaaattagccagtatttcaagctgaatgaaaatgaaaatacaacttatcaaaatctatgggctggaacttctggcttctgacccatgaagtataaagctataaggagcctcatttccactcttacaaccaacttcaagttcatgatcttttacaaatgcattggagagttgagcttgcagaaccaccacctagcctataatctaaagagatatgaacctcacagggagagatgtgagcaggatctcaccttasatagatgaaaccagaggtcagtaagaaaagttcagctggaatagttaacaaaatggtgaaacctactgtgcaggctggtgggacagtgagaaatcctttatcaccccagaagttgggggagtgttccctcttgcaggcacttgctccactggccattggcagaaactcacatgcactccactgagaactctacttggccctcacagaaaatatcagaaagagccctaaaggttaaatgactcagcctataacctccgttatctccaccacatcttgatttttgggtaggtgtagttccattcatc

SEQ ID NO: 654743 - DNA, 626 bp, Homo sapiens
ctgtgcaggctggtgggacagtgagaaatcctttatcaccccagaagttgggggagtgttccctcttgcaggcacttgctccactggccattggcagaaactcacatgcactccactgagaactctayttggccctcacagaaaatatcagaaagagccctaaaggttaaatgactcagcctataacctccgttatctccaccacatcttgatttttgggtaggtgtagttccattcatcttggtaactaactgcataattcaataaaaccatcattgtgcattttttcatacatccaataaattatctgatgagacatataatctcaaattatcacttgagcaggcaaagaagccattatcttcacttggtgagtagaaacaattaggcaaaagtgatgggtgatgtgcaaacggggcatatgaggagagggctggaatggagtcagggcaccctgaggctgactgcacgcctctcattgtgttccatttcccacagatagtgtgtttaccttcttcagggagtgattaaacacgtgtatttgtctttcttattaaatgacaattgatatcatgcaaggaaacacgagagtgaaatgcttagaagtgaaccttttagtgaaaaaa

SEQ ID NO: 654744 - DNA, 417 bp, Homo sapiens
ctgcttgaaacaaaactgcttagaccagcacacttctctgatttgtcaatgtcactgatttaaaaatgaaagttaataccttttaagatatctgtacaattctagggcagctgtttcagaaggtcaaatgactcacagccaatggggaactagagagatatctgaggatttggctggtaaaccagactttcactgacagggtcccctttggggctgtggtagaggttctcttaaaagacagagcagcttaaagaaatcactgaggattttcactattacaacaacaaaatgatactgaagtgctatattgattttaaatttgacaaaacracagaatccctgacaaaacagaaccattactgtggaataaatcagttagattctggatcagccccattattattcatatcatcacaa

SEQ ID NO: 654745 - DNA, 381 bp, Homo sapiens
gaacacttacacactgttggtgggaatgtaaattaattcagctgccgtggaaagcagtttacagatttctcaaagaactcaagacagaactaccatttgacccagcaatccccttcctgggtaaatacccaaaagaaaataaattgttctaccaaagagacacatgccctcatgtgttcattgtagcactattcacaatagcaaagacatggaatcaacctaggtgctcattgatggtggatttgataaagaaaatgtggtacatccacaccatgraatgctacacaaccgtaaaaagaagaaaatcatgtcctttgcagcaacatggatgtggctgagtgccattatcctaagtgacctaacatgaacagaaaaccaaat

SEQ ID NO: 654746 - DNA, 455 bp, Homo sapiens
atgagaaacaaagttgggatgtgagaacccttaggggcacagacatgcatgtccacaaccattgcaagcttcctggttgtaggatgagccctgggcaggtgaaaatgtaggtctgacccagtctaatacttttacattctttgatttataagttgattaaagtttttgccaattcaggaggaaaaaatcacaagagtagaatgttattcaaattgtttggtattaggtgacttggtatgttagcgctactgaagcaaatatatagacaagactttggytgattggcaggattttgactagattaatcagacatttgagcattatgaaaaacaatcatttttctttaacaattattgccttttaaatgaataagctaatatgaaagtgacaagtgagacctcactaggggctgagatagctaacataaatatgtaagttatggcacagacagaaag

SEQ ID NO: 654747 - DNA, 587 bp, Homo sapiens
gaagaaaatgtgtctgtgattttttgtcttttcattttgaaataattttgaacctacagaaaagttgaaagaattgtacaaaactgctcctgtttaccttcactcaaattcatcagttgttaagatttgctcacattctctctctccacactcacacacaaaatttttgttttgaaacatttacgagttgtagacgttgtgcccctttactcccaagtacttcagaatgcatttcctaagtacaatgatgttttcttacatcaccatgatgtattcatcaaattcaggagagtaaatactgattcaataytattatctgatagcccatatttaaattgtgccagttgtcccaatattttccatatcaatttttcccctgctccaagactcgttccaagattacacattgcatttaatagttgtcatgcctgtttagtgtcctttgtcctgcacaactttgagatttttgaaaattacagggcaatttttttgtagaaagtctattaatttgagtttgcctgatgtttcctcataagattccagttatacctttttatcaggaatatgacactaattgagatcacatt

SEQ ID NO: 654748 - DNA, 511 bp, Homo sapiens
cacgttcactggataatctcagaaaagttattaacttctctagcctcaatgtcatctgtaaaacaagaatagtartaccaacttcataagtatgctgtgtaacttaaatgagattgtgcgtgtaaagcccagcacgtaagtgctcagttaatgtgaagtattttcttcactatgcttcttacaccgaggaacctctctgaggctgtttgctttcacctaaaatatctgcttcctactctggccagtgttgccccataggcagtcagagtttttcctctgacctaaggtgacacttgtcataaggggtctacaggaacaaagatggagaattgttcttacactcaggatcatatttatgaccttacataatattaaacagtggaaaataatggtactaatctataaaaggggcataattttctgtaatgaacaaagagacattgcaaaatgtttgaggacagttacgtttctcttcctttctcctaaatccattgccccaagacttttgctt

SEQ ID NO: 654749 - DNA, 511 bp, Homo sapiens
cacgttcactggataatctcagaaaagttattaacttctctagcctcaatgtcatctgtaaaacaagaatagtaataccaacttcataagtatgctgtgtaacttaaatgagattgtgcgtgtaaagcccagcacgtaagtgctcagttaatgtgaagtattttcttcactatgcttcttacaccgaggaacctctctgaggctgtttgctttcacctaaaatatctgcttcctactctggccagtgttgccccataggcagtcagagtttttcctctgacctaaggtgacacttgtcataargggtctacaggaacaaagatggagaattgttcttacactcaggatcatatttatgaccttacataatattaaacagtggaaaataatggtactaatctataaaaggggcataattttctgtaatgaacaaagagacattgcaaaatgtttgaggacagttacgtttctcttcctttctcctaaatccattgccccaagacttttgctt

SEQ ID NO: 654750 - DNA, 657 bp, Homo sapiens
taattttattcttcaggcttacataacaccgtgtacttctttatagcatttattacaatttcagtttaaaaaatagttaaatgactagatgcttatagtattagattattagattattatatacaacagattaagaaaaaaaagatatatatatatatatcttccccacttgtcagtcctatggagaggctgttttgtttggcatagcaccaggcctgaaacattgtggaagctcaaaactgttttttaaataaayagaagagccatggaagctatattttgttactctgtctaccctcacccagagatcagacacatctcacttctgggctacttacttaatggattgcttcccacctccactgccagaatactggccacaatgggccagtggaagttaggcaaaaaacaaaaacaagacgctaaccttgactccattatcatgcaaacaggcaaatcatggtttttcaaggtcctaaccacaataagcattccaaattgacaatagatgttagagggagtcagggatagagttgtaacctagaaccaccaataaaagttacagcgacttatttatttttaccttgttttctgggattgcagattagcttatgttcaagggatctatgctaaagcattgacagataagttgatatg

SEQ ID NO: 654751 - DNA, 624 bp, Homo sapiens
caagatatgcaaaaacaagcaattaaaccacacacaagaactacaacagccttatatatcagtaatgtacacatgaaaacataactgattacaatgattagastagggtagtgtggttaatttgtattttatgtagtgattccatggaagaatgcacccggacagacacattacacacaagaggaacttcgtttcattcatacatacttaaaacacattaccaaaactccccaaaaaatcccaccttgaaatttgagtcatttcctggacatccatgtgggaccaaaattctgcccagtttaataaaacatcttcctttctcttgcccctgtttttgcctgccgcctgcttttataaactggcaaaatgtggaattaggagagtattttgtgagaggcaggtgttacattggtttctcattatttgctcaaatcctgctttagggttccagtgacaaagtgcttcctgccctcacggggtcagtgatttactggctcttcctccacatacacaagtatggatcattaagcatgcagcaggcctaactggatagtatgattctctgacttttaatgcctgtatacagtatcttgttaactgtacccacaaaggggctggtttcaa

SEQ ID NO: 654752 - DNA, 567 bp, Homo sapiens
taaaatgtaatataacaatggcttgttgaattttacttgaattttactacttctcctttccttcctaaattttccagaggcaatgagaagaagcaagaaatggcaaaaatgtacataaaatcaggaagaagctgatgagacataagaggcctagataatttacattagaaatgaaccccttatccctcaaaggttgaagtgacattgtagtaataaagctgaattcgcccttggcaaaattgtggagcagtccttgttgtcgcttctcctggttttggagacatttccatctttttctccaccctttctctctcctgttagtccccacctaccccctgcttttccaccctgggacccaagtaccccggaacyccacctagtcagccagaatattcaccaaactaaattggaaagaaactgatgttggctatttgctcatttactttataatttcagcttctcattttggcacaccccttctgtcagacagacctccattgtgattagagaagctcttacttagcaagtctttgtcacttgagaatttcaagggccttcatactgtga

SEQ ID NO: 654753 - DNA, 510 bp, Homo sapiens
agatcagagggtggaaggagagtgagactgggatatttctttctctgctccactctcctcagtggtcaccttggctgattgtagtccttgactgaaggtcatttcttctcccaaggtagctctttctaaatgaccctctcattcttggttccagcagccacgctatcccttcatcccccagctctaaaaatagtagcagttccatctcttgtagtttacccaaccccaagcacgcctttatcactagtcctttgcaaatatactatctttaaattatcctaatttgagtgtrccatctgttttccttttggatcctgtactggaaactgttggcaccccacccagatcccttctaccaggccagtgtacctgtcttcctgctactgtgactgttggctgcttatggcttacagttgcactcttctccagagaattgcctttggcccctgggagccaccttgctcagaaatgcttgggaagttaggccctcctaccctgggggcagcctgc

SEQ ID NO: 654754 - DNA, 598 bp, Homo sapiens
ttaagggtatttattacataaccattatattctatatacaataattctaatatctacagtatttgagagttttactcttctttcagtggtttctgctcactcttagtatcttatttactttcgtattttatttttgtgagcatatatatttttatacattttgcagggattttgttgaagcctgggatttagggtaggttccttaatagatggtttacatttacttctgttgggaacatggtgacactcccattccagcattagtttaaagaaatttctcagcttcaaattaattggatcatagaggtagagaaaattctggctccaaacatatgtgaagaacagattgttatgtattctagaagaacatttttttcttcaatttggggtcaagtcttagacatgcattgtttttcctgttttactttgggaggaaagattttctttctagctcrgatgttccttgtaggtgtagtgtttttttctttagggggatctgtgtacctgaaataggaggaggtctccaatctaactttctctttcaatgggctctaggttttgtttaaaaattgagatcagagcatccaattcaactttc

SEQ ID NO: 654755 - DNA, 583 bp, Homo sapiens
ggaaagattttctttctagctcggatgttccttgtaggtgtagtgtttttttctttagggggatctgtgtacctgaaataggaggaggtctccaatctaactttctctttcaatgggctctaggttttgtttaaaaattgagatcagagcatccaattcaactttctatatgatggaaacgttctgtatttgtgttgtccaacatggtatccatcagccactgtgattattgaacacttgaagtgtggcttatgtaattgagaaattaaatttataattttttaaaaaatttaaatagtcgcaggtggcaagtggctactgtatcgaacagtgcagctctggactatcagcgatcagccattgtcccaggacaggcatcgttttcagtattctcttaccttttgagattaatgtttttgctttaactttttggtttctacgattttttwaaaaacttctcaattaaacaattaaagtatctaaaaatgcatttttaaagcaattttagctgttctccactgggaaagtttttttttcaaggtatgtagtttgctgtgttgctgggaatagaagttgtagatga

SEQ ID NO: 654756 - DNA, 630 bp, Homo sapiens
ttataattaataaaccaatattgatagattattattaactaaagtccatagtttacattagggttctctttgtgctgtatagttctgtgggttttgacaaatgcataatatcaggtatccaccattacaataccatacagaataatttcactgtcctaaaagtcccctgtgcttcacctatccatcccttccatcaccctccaagaatccatgcaaccatggacctttttattscctctattgttttacgttttctaagatgtcatgtagttggaatgacagagtatgtaaacttttcagactggaatctttcactttgcaatatgcatttgtttcctctgtatcttttaatggcttggtagcacatttctttttagtgctaaataatgttccattgtatggatgtatcacagtttgaattattcatttatctattgagggacatcttagttgctttccatttggggcaattatgaataaagctgttatcaacattgtgtgcaggtttttgtgtggccataataccaaaacacattctaattcatctgggttaaatacttaagagcatattggtatttgtattaagtccgtgtttaccttcgtcagaaactgccagattgtgttctaaag

SEQ ID NO: 654757 - DNA, 537 bp, Homo sapiens
atttgtattatatttacaggttgaacatccctaatctgaaaatctctccagtgagcatttcctttgatcatcatgtcagtgctcaaaagatgttggattttggcacacttttgattttggattttcaaattagggatgctcaacctgtgtctaaagtakgattattgttgggtcttgttttcaatccactctgatagcctttgtcttttaactggtatatttaggtcatttagatctactatggtctgcatgtttatgtcccctcaaaattcatgttttgaaatgctaccctccaagatgatagtattaggaggtgggacttttggaaggttgttgagttatgagggtagagccctcatgaatggtattattgcctttataaagaggcccaaggcactttgttcacaactttcaccacatgaggaccctgaaacaaggtaccctgaaacaaggtaccatctataaaccaaaaagtgtgctcgcaccagatattgaatctgttggtgacttgattgtggacttcccagactccagaac

SEQ ID NO: 654758 - DNA, 589 bp, Homo sapiens
tactgtactatataccatattttttcacatgttctttatattactgtaagcatgccagagctcaaaattaatatttttagtattctattcagcattgtggtgcctggcatgttgtgtgtgcccagcatattttgaaaataacctagagtttaattaattcaccggaaagtgccatttgaatcagcaacctgtaccatacttgaagtgagaaggagaacttcctctgggatcctggactcaaaaatttttttaacaccaagttgccctttcccaggttgccaatgtctagtgtggtctaggaaataaaggggcaagtgacctatttgttggacttttagacagttccttctgaggatcctgtggttttgagtgtcccagaccctgggcggttggcacagcatcagyattgccagtgtgtgaagtactgacttgaggctatgtagatacatttgcctactaggttagtttgaaaaaagcgatttaaccttgtatgtagttaaaataccatatatttctaacttaatagctttctgctactgtaatttttgtagtacttgtattttcaactacataaataaattggctgtga

SEQ ID NO: 654759 - DNA, 586 bp, Homo sapiens
ggatcttgattactcgtgattgaggagaacaggaagaactagcaaaagatatacagaagcattagttatcaaatataattatctgctagaaagtattattgctttcttttgctataaagtactatcagaacatctgaagttattttggaataaagaaggytatttacacaaaatttatatacagtccatattcctctcatctattattcctgagaacaaagttttatatagacattataaattattcacagagaaatcggaacttttactatacatacataacagcaataaaagtatcagaaacacatgaatgttcttaaatgttatataaatgagactaactccaatgatggcaaaactacaaagtcagtttcctttatctgaaaatactgatttgttcaagttataattgttatatgtgttgaaatagaattaaactttgattcacaagtaacaagcttataaagatgatattaaaatttcattaaagtttcaggattatataattatttgctgagttaaaacaagtactgtaaaacatcagcaaaccaggcaagtggatattgcataaaaaattagtacctta

SEQ ID NO: 654760 - DNA, 657 bp, Homo sapiens
tcagagatatgcaaatcaaaaactcaatgagaatctcaccaccagtcagaatggctatcataaacaacttgaaaaacaatagatgctggcaaggctgacaaggctggcaaggagaaaaaggaatccttatacgctgtttgtgacaatataaattagttcagtcactgtggaaagtagtttttagatttctcaaagaattttaaacagaactcttatttgacccagcaaccccattactgggtatatatccaaaagtaaatacatcgttctacccaaaagacacatgcacttgtatgttcattgcagcactattcataatggcaaagacaaggartcaacctaggtgtgaaccaatggtggaaaaagaaaatgtggtacatatacaccatggaataatacatagccataaaaaaagaatggaattatattctttgaggcaacatggatgtagctgaaagccattatcctaagcacaggatgaacacagaattaacgcaggaacagaaaaccaaatgctgcatattcttacttataagtgagaactaaacatcgagtgttcatggatgtaaagatggcaacaatagacattggggactgctagagagggaagggaacttgggggctctgcattgaataactattgggtactatggtcac

SEQ ID NO: 654761 - DNA, 558 bp, Homo sapiens
aaaccctcttgtcagcgaaccaattctcaattaccattgaactttctcccaccatctgcatatcttcaaatatctgttaactccttccatttgtcttcttaccttctacagttaagwtatttatctatgatcaagaaaaagcatgtaaccaggttgctggcagtaaaggatctatggaatcctatttccccactgccctaaacatttatcagcaaacctcttacatatccccagttggttttacctcctatcacacttagctcttatttcaataattgtagtttcttaaaatccccaactgctccagcacttttcttttcgtctaataaatggtaccaacatctaagtcacagaaaaatataaaatccatgtactcttacatggtcttttttttcctcactgagaaactctcgtgtgtcacgtcaggcagtcattgttggcagacacattcaatatttaatcccagccaatatcttctcaggcagtcgtgacaaactcatgtctctctagggattttaactacatttaagagaagtttaattttctccttgtggttta

SEQ ID NO: 654762 - DNA, 609 bp, Homo sapiens
tttaataacccccagttttttccacataatcagcctttccaagcctacataattagtatttgtccacattttgacaagtgaaagatcacaggactgtctctgccacttggtaaggaagccacattcacagtcttaatttggttaacattatgaaatcatgtactacttgagacctcttgtgagtgcaagcatcagtaaccatgtaaccaaattcttaaggttagtagatggacattatatggttagtagatggacgttaaaattggagataatgtcctcccatggarcaagaggtaggttttttttcttctacagtataataaagaaaatatttcttgtggggaaaaagttaggtttatttttcactcatgtaaaaagtttggagtttcctaagctcaggatttttctttaactcaacccactgtgtgtgcatttgtcatctttccctctgtatgtcgccttatacaaattacagtttgaacaactggcccaagacaatgctgatattctggctactgcttataacatgagaaataaactgtactataccctagactcaggaatctcatctcttatgcctgcatccatataactgtagcaggctaattt

SEQ ID NO: 654763 - DNA, 633 bp, Homo sapiens
tatcatagtttaccccgtgtcttcctcattcacaggatatcctcacttttctgtggtaatttgcttgtcaaatcttagtgcgtgactgagacccttgggaatcactttgtctttagtctcttagggaggtaacatggaatactattccaagaaaaccagtaacaccatgcagacattttaaaaaataaatgaattatttgagggaaaaaaatcaaatcacactgttgaatttctcatatgtgtatattagagtcaaaaggaataatggaaggtgttaaattttatgagtatggaggtggtataatgtttaccacctgctcttgaagccaaccttttctattgcacaggmtattcagtaaatcattatccatgtgcagctatacatggcacataagtttgagggaggaaagagtttgctctgatacagtaaatcctaaataacaattttgaatattgaaaatgaaacatttctgtaaaaacaaaagagttacatacattgtcagcaatctcattctttctgaggaaaataaagggatatttctagctatgaatgtaaatgtacattaaatgcatactgagtgataaatagttgaaataaaattaaataattgccagggtaaaaagagtgaaatg

SEQ ID NO: 654764 - DNA, 399 bp, Homo sapiens
tgctctgtctgtggagtagccattcttttattcctttttttcttaataaacttgctttcactttgcactgtggacttgccctgaattctttcttgcgtgagatccaagaaccctctcttggagtctggatcaggacccctgtcctgtaacatcttcctggagatcatgaagggactatagtgagaaaaccctractcaatggctacctttgggtaaatgttggggtcctgtaacatctttctggcaatgacagaagtgactatacttcggaaacccctgatccaacaaaagctaactttgggtaagtggtggggtctggtaacatctttctctcgaaccacaaaagggacaatactgaggagaccctccgacgcaaaggaaatagactggagcactgat

SEQ ID NO: 654765 - DNA, 623 bp, Homo sapiens
gaaagcctgaagcttctgggaggagagaaaggagtcctggggcagaacatggctttggaaactttcacgcggagcctccagtgcccccacagggattattctcctcttcgagtcgctggaggtgatttgtctgtggacactgggcttgggagtgttccctgcacaaggagatggtgatttctcttagaactttacttctgctccttgggacttgctctgtgaccacaggccctggagcatggaggcttggggcagtgattagaactgagaaccggacccgggagccgctctggggagaaagtgggcggtccatcccctaaggtccaacggattggaaaggcaaacacaggagaaactaggttagtggtgccaaatatatttggtgttgctaagtgaatttctgatgctcttccatttttctacccaattttttcactctcacgtatacaatctctttccctccctttaccaaatcagtacctccgcagctgtmagcggtcttcttatcagcgttcctaaagttaagtgagcctggaaccctttttgctattgtagaatctactctgattgtgggtagggagaatttcccctactagattttctgatgactaaatccccacaat

SEQ ID NO: 654766 - DNA, 559 bp, Homo sapiens
gaaatagccgcccttccgtgtggtggagtttagtttcagcttcagctccctgaaaattaggggtyttggggtctgtgacgtcagatgacaaatatttgtggatcctctccagacctgaggaggttctctgataatcggcacttgttgtttaaaaggcagatggtgatgaactgggctgggaaatgatcggagttgcccagaggtagggagggtcccctgacctttttcaggggaccccacctatggaggcatatactcaggcactcgatccatgtccccactgctgcttctgaccccttctgtccacctgacccttagaacacacctaattttctcttttgactcctgtgatgtgcttctttctccaaaaacagggcatagcaaggcaacaatgaccactgtttaagaagtctgggtcctggggttcaaaggaactgagggtttactttttctatctcagggtctttgccttgtgtcttaaatgtatcccccaaatctcttcctctaggtctcagtgcaaatatcacctctgcaagagaccttccctgggctgccccgc

SEQ ID NO: 654767 - DNA, 605 bp, Homo sapiens
ctttctccctgggtccctgccgctctgtctccggcaagtgatgagcaattttgcggagtggcagaacagagacaaaggtagctgtgggcttcacggtaatttcaaaggaagtgccctacttcgttgcccatttcgaagtcctctctacctctgcgttggacgatttctccacttcctggtgtgcacctgcgtgtgtgcgtgcctgtgtgtgtgtgtgtgtgtgtgtgcgcgcscgcgcgtgctggggtgtgtgcacactatgccgagagtcgggcaaatttcgagtgaagggagaccgagtcccgcaggttctcttgctcctgcagtctgcggaggaaaaactcctttctggcacggcggcaggaatccatctaccgacgttaggaaaggacagggtgtgctttcgtcccagcttagttttctatggagaaacaggcagcagaggagagtgggccagagggccacattttgcccacgaccagccaggtttgagttggttcctcctaggcctcacggtctgattttctcctcctctttgtgtacccgacgggtgttgctgtgagctcaggaccatcccggcgggctgcggatgggatcatcgtgtg

SEQ ID NO: 654768 - DNA, 575 bp, Homo sapiens
tctccttccctgtttctattttatggtcctcattctttatctcagctctaacactcagtgatcattattagatttcgagaaagttgtacagctaaggaatttattaattttgccctttggctacagaaaaccaataatcgttatcagagaatttaaaaagacagtgaaagaaggagaggggagtttaagttgggggtgggggaataaacatgcatacccttgttccaggatgcttttgatgtccacagaatcttccacaggatgtctctgcattttttcacactaggctccataagaattagtggggagcctcagggacagtagaaactctgatagaagggagagatcactggggactgggatgttcataaaaggctttctaaaggaagaggtgttgatatggtttggctctgtgtcctcacccaaatctcatctcaaattgtaatccccaagtgtcagggagggacctggtggaaggtgactgaatcatgagtgtgtacttctgtcttactgttctcatgatagtaagtgagttctcaagagatctgattrtttgtaagtgtggcacttcctcc

SEQ ID NO: 654769 - DNA, 577 bp, Homo sapiens
gttgtaagcctggagaggtcagtgagagtgtgcctgaaaaagaaaaacagaaaaacagagtgcaccagagaaacacagagatgagggacgaaaagaaacaggaatagtgagtcccaacatttgggagcatataaaccttactatgccaaaagccattggcactctggagttttcaagccctgatatcttttgttttctacttaagactaagtaggtgatccattccttgttttgctacctagtgcatttgtactcaaactttartgagcattagaatcacctgaggacttcttaaaccagaattctgggcccacctccaaaatacctaatttagtaggtatattattacatagtttctgtggctgctgcaacaaatcaccacaaactggggcagcttcaaacaaccagaaatctgaaatcggtatccctgggccaaaatcaaggtgtcagcaaggtggtcctccctctggagcctctggggaacaatcttttctttgcctctttcagcttctggcggcagctggcattctgtggcttgtgattgcctcactccagtctctaattccatcttcaaatt

SEQ ID NO: 654770 - DNA, 445 bp, Homo sapiens
tcactgatctgaggcattcttgatgtggttaggacttcccagcattattttttttagatcctgtttatttaaaatgaaaaggattagcatgagggatggtaacattcctttttgatatctgtagcagcaagttttcttatgattcattattcttcttcttacagctttaaatcatctaggaacttcatataaaatttaattccagtttcaactagttgtggagcatttgatccaaaataaaatgaaagtcctytctgaagctgtagaggagactcaagaatcagaacaacctgaagttctttaagctgtcagttgaaggactaggtaaaaaacaaatatcatttagtgtgatcattaatgcacatgagtcattattccatgtggttgctgtcgactggtcaggggcacttcaagccctaatctgtactttgtcctgtctctctac

SEQ ID NO: 654771 - DNA, 490 bp, Homo sapiens
atgtctgattctctttgggtttgaaaagaaataaagactccacttctaaattagcatagaaaaaaggagaatttctcttgatttatttctcagtttgggtttgtgcttttgaaaaaggaaaataatgaycctgaaatcagtaggctttgtctttgccaaaaaatgtggacatgttgatcttaggggggctgattatataaaacagtagaaatgtagtcttagatgaaaatctgtaaagatgtaagaatgctgaactaacatgaaaatcaggggctgagaaaatgctggattgagaataatgtgataatgaaggttttatatatattcatatatataaaatgtattcatatattctcttcaacatacataatgtcataaaaaggataaaacgcctaagtctagtcttgacagagcaccagcttaaatcacatgagcctatcagagaacttatgacaatatttagggctaaactgatgttactggtgaacca

SEQ ID NO: 654772 - DNA, 490 bp, Homo sapiens
atgtctgattctctttgggtttgaaaagaaataaagactccacttctaaattagcatagaaaaaaggagaatttctcttgatttatttctcagtttgggtttgtgcttttgaaaaaggaaaataatgatcctgaaatcagtaggctttgtctttgccaaaaaatgtggacatgttgatcttaggggggctgattatataaaacartagaaatgtagtcttagatgaaaatctgtaaagatgtaagaatgctgaactaacatgaaaatcaggggctgagaaaatgctggattgagaataatgtgataatgaaggttttatatatattcatatatataaaatgtattcatatattctcttcaacatacataatgtcataaaaaggataaaacgcctaagtctagtcttgacagagcaccagcttaaatcacatgagcctatcagagaacttatgacaatatttagggctaaactgatgttactggtgaacca

SEQ ID NO: 654773 - DNA, 490 bp, Homo sapiens
atgtctgattctctttgggtttgaaaagaaataaagactccacttctaaattagcatagaaaaaaggagaatttctcttgatttatttctcagtttgggtttgtgcttttgaaaaaggaaaataatgatcctgaaatcagtaggctttgtctttgccaaaaaatgtggacatgttgatcttaggggggctgattatataaaacagtagaaatgtagtcttagatgaaaatctgtaaagatgtaagaatgctgaactaacatgaaaatcaggggctgagaaaatgctggattgagaataatgtgataatgaaggttttatatatattcatatatataaaatgyattcatatattctcttcaacatacataatgtcataaaaaggataaaacgcctaagtctagtcttgacagagcaccagcttaaatcacatgagcctatcagagaacttatgacaatatttagggctaaactgatgttactggtgaacca

SEQ ID NO: 654774 - DNA, 486 bp, Homo sapiens
actgtttcttttccctctccaaaatcttgattaatgggagaaaaggatttgtgtgactagtcttgggtgtagtgactctggtgtgcttttttggtactttgtggtaccaattcatattgtttaatccctttcttcccagaaaatgtctgttcctttgtctttgtctctacgtgttattctgtcataaaagggggtactggttgaggttccttcttatcttattttatgtccttgagagcttgacttgtgacaaagtgggagcactttctcttggtttccgctatcgggtaagaggtggtaattttgaggtcatattaggtggcctgtctgaaaatggctggaaacccgagtacactttttsttctaactatgtcaagctcttggggtttgtcttaagaagtcccatcccttcgaggcttttgccgtctcaactcttgttgcctgattagtcctagaaaagctcagtcccaagagggcctacctcgt

SEQ ID NO: 654775 - DNA, 550 bp, Homo sapiens
acagtatctacttagagggttatgaagattaaatgcacaattgcaagtagttagaaccatctctaacacatataaaactctgaacaactattttctgtaattattatatttgttcccatttatagatgtggtgattgtcattaatattttctataagagatattttcaaactttccaaagtgcctttcatgataacaatgtttctcctccaaactttttaaaaaagtattatactaggtggagtattaactggtagggctattgggtagatagatgattgagcagctgttgtgtggaaaatgaattattaattcgctcaggaccagcactgactatccttagagggtttcagacataaggtagattgtagcattcgaaacttcttttaatcctttgttgaaatgaaatcatagaagctcaaatttgtaaaactcaccaaagcagagatatttgattgaaggygggataggtctggagcccctgtttctccccagtatgtgtctttacttcccctgacactttctagtaactctaaggaatagagtttgaa

SEQ ID NO: 654776 - DNA, 530 bp, Homo sapiens
cagggatccctggtttctgtatctttaaaacctatagggttacaaaccaaagtgagatgcctatctggtttctgcacagttgtcctgaattatgttggcagatattttatagccagaaattwaccttgaaaaataaattgaaaccataccaagtatttagagctaggggtctaaaatctgcaaaagccctgggaggttgtgttgtctcaagagccagtattcagtggaccactccacatcatattaaataaaatttaaacacagcattttgaagccgacagtatgggtcactgtgtgtcctgtgtgccctgagcgtattgtagagtagttgttgagtctgctgccttatctgtgtgttatgaggtcaatgcactgatcacttgcttttttcacttctatactaactctaggcacactttactcccagtcaaaagtggactgtatacttcctctttgatgtgatggtccctttggttttggtgcctcttccatgagcttcagatcagaactagctatgtggttccaggctg

SEQ ID NO: 654777 - DNA, 530 bp, Homo sapiens
cagggatccctggtttctgtatctttaaaacctatagggttacaaaccaaagtgagatgcctatctggtttctgcacagttgtcctgaattatgttggcagatattttatagccagaaattaaccttgaaaaataaattgaaaccataccaagtatttagagctaggggtctaaaatctgcaaaagccstgggaggttgtgttgtctcaagagccagtattcagtggaccactccacatcatattaaataaaatttaaacacagcattttgaagccgacagtatgggtcactgtgtgtcctgtgtgccctgagcgtattgtagagtagttgttgagtctgctgccttatctgtgtgttatgaggtcaatgcactgatcacttgcttttttcacttctatactaactctaggcacactttactcccagtcaaaagtggactgtatacttcctctttgatgtgatggtccctttggttttggtgcctcttccatgagcttcagatcagaactagctatgtggttccaggctg

SEQ ID NO: 654778 - DNA, 530 bp, Homo sapiens
cagggatccctggtttctgtatctttaaaacctatagggttacaaaccaaagtgagatgcctatctggtttctgcacagttgtcctgaattatgttggcagatattttatagccagaaattaaccttgaaaaataaattgaaaccataccaagtatttagagctaggggtctaaaatctgcaaaagccctgggaggttgtgttgtctcaagagccagtattcagtggaccactccacatcatattaaataaaatttaaacacagcattttgaagccgacagtatgggtcactgtgtgtcctgtgtgccstgagcgtattgtagagtagttgttgagtctgctgccttatctgtgtgttatgaggtcaatgcactgatcacttgcttttttcacttctatactaactctaggcacactttactcccagtcaaaagtggactgtatacttcctctttgatgtgatggtccctttggttttggtgcctcttccatgagcttcagatcagaactagctatgtggttccaggctg

SEQ ID NO: 654779 - DNA, 588 bp, Homo sapiens
gaaaaaccatggggtcccctctggtttcttgtgttgaatgaggcaagagtaatcatctgattctgagctgaagacctctcatactctcaaggagggagagtgcatttttagagcttttagcaaaaatgtgaaaagttcatgtttgcackttgctttgtgaatttggcttccttttacttatacattaactcatgtaatgtcttaaatcttacaagtattgatccatttcaacaaaaaggtaaatttaaaatgcagactttgttacttgccaaagaagattcatgaaaaatttatatccaattattttccaaatagttaatttaatttggctttttaccacattccttcctttctttcccgacttctttaatgtaatttaaatcctggaaaacattctttagaaaccaagaggaaaagaagaacacataccaaaaaagacatataacttaaaatggtacatttcacatctaaaatgggtttgaagaaacgcaactttatatcattaaaaaataagatcatctgatttcctttatttcttttttaaattatgtaatcagatgattttatattttttggggggggcggaat

SEQ ID NO: 654780 - DNA, 630 bp, Homo sapiens
tgaactgtaacctaactggatgtgtaaacaacctgtaacctactcttgagccaatgactgagttttagccaatcaaaggtggccaactgttcaaactgggttcaaataagacaaactcagagctgtagccaatccgattatttttgtacctcacttctgttttctgtaagtcactttcccttttccatccataaatcttcttctaccacatggtagcactggaacctctctgaacctattctggttctggaaatttctgattcaggaattcttctttgcttaattaaactctgtgtgtgtgtgtgtgtgtgtgtattatatattatatacacatgtaatatatatatgtatgtgtatatataatatttatttragagagagagagaagtgacttgtggtactgatgttgcttccctaggttccaagtaaagttcctcaattgcactttacttacctagagctgtccctccatttctttgtccttgttgctaagtttttgaagtggataggctagttatcttgttcaacatcctgcattctgatcaaactaaacatttttggaaagaacagaatataggaatttgtgcttcttaccactcaacctgtcagaaagcaagtgatgcaagaaca

SEQ ID NO: 654781 - DNA, 599 bp, Homo sapiens
ctctcatatcctcaatacctccctccacaatccattattctgttctagaactcaaacatgctttctttactattcctttgcacccttcatcccagcctctctttgctttcacttggactgaccctgacacccatcaggctcagcaaattacctaggctgtactgctgcaaagcttcacagacagcccccattacttcagtcaagcccaaatttcttcctcatctgttacctatctcagcataattctcgtaaaaacacatgtgctctccctgctgatygtgtccgaataatctcccaaacctcaatcccttccacaaaacaacaacttctttccttcctaggcatggttactgcggtcagaattcttacacaagagccaggaccgcaccctgcagcgtttctgtccaaacaacttgaccttactgttttagcctagccctcatgtctgcatgcagtggctgccactgctttaatacttttagaggccctaaaaatcacaaactatgctcaactcactctctacagttcttataacttccaatatctattttcttcctcatacctgacgcatatactttctgcttcccggctccttcagc

SEQ ID NO: 654782 - DNA, 590 bp, Homo sapiens
caatagaaattcattctctcatagttctggagactagaagtacaaaatcagtgttggtagggacactctctctgcaaactcaagaagattcatccttgactcttccagcttatagtgctaatggcagtccttggcagtcctttgcttataatagatagaggttcttttcacctccattctcccacagctttctcactctctgtgtgtctctgcttacttatcttataaggacaccagccattggattctaacccattttaatccagtaagacctcatcttaattaattatctcggcaaagaccctatttccaaataaggtcacattctgaggttccaggtggatatgaattttttkgggggggaacacaattcaacccagtacactaagtcaaggatataagcaagaagacctgttaggaaatgatagcaataattcattagtaaaaattaattgtgcttcaaaatggtttgttagcagtagaggtagtaaggaatgttagatttttattacatcttaaaggtaaactaacaagatttgtgagtagactaaaagtaaaacatggaagacagaagtcaaagatcagttcaa

SEQ ID NO: 654783 - DNA, 550 bp, Homo sapiens
aaatggtattattgtcagcccagaagatactgcaggagtatcacattttatcaggactaccctgtcttcatgtaacctgtaccctatcttcgtgtaacctgaaaatccacctaggcaattaaccttaaaacattcttctgcatctccttagcatatttctaattctttgagaatttctttttatccattgctaaggaatctcccttaaagctttccttatttgaacatgatcatggatttaggaaaaataaaagcatcaactaatttatgggaaagattttaggytttacttttccctgaagaaactttattagacataaaacatgatcaaaagctttaaaagaatctaaatccacctaataataaagattttttattggcacattctgagagccttgtttatcccacaaataaagctattcattttgtgcttttgtttcccagtatctcattagcttaccttgcacaagcacatctaaaataatctcttctgctctttctttacaattcaaaattatccttgataatggcttttaaatgccaatatcag

SEQ ID NO: 654784 - DNA, 482 bp, Homo sapiens
tgtatatatatgcaatggaatactattcaaccataaaaaagaatgaaaacatgtcatttgcagcaatatggatggaacgggaggtcattgtcttaagtgaaataagccaggcacaaaaacataagtattgcaagttctcacctatatgtaagagctaaaaaatttgaatccatggaggtagagagtggataaatagataacagagactggggaaggtgcatgggggaaaggaagaaggatgcagagaaatgggttagagggtacaaacatacagtaaaatagaaggaataaattcaatgtttgatagtagagcargatgactatacttaaatgtgtcatactcaggtgatggacacccacagctatcaaagatggaaaacaaaaggtaaatacatatagcttaggacagtgtagcattacggatcaagagcccccaaaaatatgcattccttttacccactaattataccattagaaattaa

SEQ ID NO: 654785 - DNA, 482 bp, Homo sapiens
tgtatatatatgcaatggaatactattcaaccataaaaaagaatgaaaacatgtcatttgcagcaatatggatggaacgggaggtcattgtcttaagtgaaataagccaggcacaaaaacataagtattgcaagttctcacctatatgtaagagctaaaaaatttgaatccatggaggtagagagtggataaatagataacagagactggggaaggtgcatgggggaaaggaagaaggatgcagagaaatgggttagagggtacaaacatacagtaaaatagaaggaataaattcaatgtttgatagtagagcaggatgactatacttaaatgtgtcatactcargtgatggacacccacagctatcaaagatggaaaacaaaaggtaaatacatatagcttaggacagtgtagcattacggatcaagagcccccaaaaatatgcattccttttacccactaattataccattagaaattaa

SEQ ID NO: 654786 - DNA, 482 bp, Homo sapiens
tgtatatatatgcaatggaatactattcaaccataaaaaagaatgaaaacatgtcatttgcagcaatatggatggaacgggaggtcattgtcttaagtgaaataagccaggcacaaaaacataagtattgcaagttctcacctatatgtaagagctaaaaaatttgaatccatggaggtagagagtggataaatagataacagagactggggaaggtgcatgggggaaaggaagaaggatgcagagaaatgggttagagggtacaaacatacagtaaaatagaaggaataaattcaatgtttgatagtagagcaggatgactatacttaaatgtgtcatactcaggtgatggacacccacagctatcaaagatggaaaacaaaaggtaaatacatatagcttargacagtgtagcattacggatcaagagcccccaaaaatatgcattccttttacccactaattataccattagaaattaa

SEQ ID NO: 654787 - DNA, 507 bp, Homo sapiens
cctcctggcaatgttccctttaaccataatatgggttaagagaagtgaaccaatgttctgtttctgactgattatgaggcaatgtatgtaccattaaagtttctcacctacattgggtcttcatctttatcaaagtataaggttatccatrtattaaggctggctgcaaaataattcataaataaaagtaaatacatgcacataacagactcccttttcacttctattgttcataaaggcataagcaaggaaaaaaatatccaaagataagagtctcgtaatagtaaaagtcttgacccatgatcttggaaaaagctgttcacatcaaggatgccatcctcttctgggcagaaatttctgtggttagctttaccttaagggttccaatgagtgtactgttccaagagtatgcagggacccccttttcagttgtgagattatgaacccatggttcaaggcccaaagttttgctgtagtatagacatcaagggcagtctttctctgatg

SEQ ID NO: 654788 - DNA, 507 bp, Homo sapiens
cctcctggcaatgttccctttaaccataatatgggttaagagaagtgaaccaatgttctgtttctgactgattatgaggcaatgtatgtaccattaaagtttctcacctacattgggtcttcatctttatcaaagtataaggttatccatgtattaaggctggctgcaaaatmattcataaataaaagtaaatacatgcacataacagactcccttttcacttctattgttcataaaggcataagcaaggaaaaaaatatccaaagataagagtctcgtaatagtaaaagtcttgacccatgatcttggaaaaagctgttcacatcaaggatgccatcctcttctgggcagaaatttctgtggttagctttaccttaagggttccaatgagtgtactgttccaagagtatgcagggacccccttttcagttgtgagattatgaacccatggttcaaggcccaaagttttgctgtagtatagacatcaagggcagtctttctctgatg

SEQ ID NO: 654789 - DNA, 507 bp, Homo sapiens
cctcctggcaatgttccctttaaccataatatgggttaagagaagtgaaccaatgttctgtttctgactgattatgaggcaatgtatgtaccattaaagtttctcacctacattgggtcttcatctttatcaaagtataaggttatccatgtattaaggctggctgcaaaataattcataaataaaagtaaatacatgcacrtaacagactcccttttcacttctattgttcataaaggcataagcaaggaaaaaaatatccaaagataagagtctcgtaatagtaaaagtcttgacccatgatcttggaaaaagctgttcacatcaaggatgccatcctcttctgggcagaaatttctgtggttagctttaccttaagggttccaatgagtgtactgttccaagagtatgcagggacccccttttcagttgtgagattatgaacccatggttcaaggcccaaagttttgctgtagtatagacatcaagggcagtctttctctgatg

SEQ ID NO: 654790 - DNA, 605 bp, Homo sapiens
gaatcagcaaatggtaaaggtcacacagatatcaaccagagtactcattccctaagccagaattgaacctgggccaccattgtaaaatggcagagaccaaaagaaagtactgccacatggtaacaaagtcaagctcccaagcacgtaaaacaaaatggagacctatccagttttggggggtgtgtgggtgtgggtgtgttttcagagacgtgtagcaaagtttgtaactgatcagtttgccaggctggcttgaacagcggggttatggggtcctaagcccatgttctagcttaagrtattcctccttatgacagaaccatacagaaagacataaaaagcacaccagattggctacagcttgagactagcctcacaaatgctttttttcaattaatcaaaattttacagaggatataaacaggaatctttattattcattcaacaggtttgcacagagacagagaggccagaagtctaactggtaagcaattcttacctttttgccaacatgtcaggttttggagttcctcttccctgagtggccctagcaaccactgagaggcaagctgcatcacaatggaaaatcacagaaccacaagcaaaat

SEQ ID NO: 654791 - DNA, 510 bp, Homo sapiens
cttaaaaaaaagaaaaaaaaaggggagaaattgggaatacaaaatggtgaaggcactttggaaaacagtttggcagttcctcaaatggttaaacctagagttaccatataaccccacaactctactcctaggtatatgtatatacccaggaaaaataaaaacatatattcacacaaaaatktgtagataaatgttcagagcaccattacctataataaccaaaaatttgaaacaacttaagtgtccatcaactgctgaatggataaatgttaaaatatgttatatccacacaatggaatattatttagtcataaaaaagaatgaagtactgatttatactatagcataaatgaaccatgaagacatgcactaagtgaatgaaaccaattagaaagatacatattgtataattttatttatgtgaaatgaccaggataggcaaatccatggagacagaaagtaaattagtggttgcctagggctaaggtagatttggagagaggtggagag

SEQ ID NO: 654792 - DNA, 510 bp, Homo sapiens
cttaaaaaaaagaaaaaaaaaggggagaaattgggaatacaaaatggtgaaggcactttggaaaacagtttggcagttcctcaaatggttaaacctagagttaccatataaccccacaactctactcctaggtatatgtatatacccaggaaaaataaaaacatatattcacacaaaaatttgtagataaatgttcagagcaccattacctataataaccaaaaatttgaaacaacttaagtgtccatcaactgctgaatggataaatgttaaaatatgttatatccacacaatggaatattatttagtcataaaaaagaatgaagtactgatttatactatagcataaatgaaccatgaagacatgcactaagtgaatgaaaccaattagaaagatacatattgtataattttatttatgtgaaatgaccaggataggcaaatccmtggagacagaaagtaaattagtggttgcctagggctaaggtagatttggagagaggtggagag

SEQ ID NO: 654793 - DNA, 628 bp, Homo sapiens
tttacatttactaacattcaccagttttaagtgtacaatttgaggagttttgacaaatgaagagtcatgtaaccaccacttcagtcaagacatagaactgtcccgtcaccccaaacagttccttcatgactgtgcagccaatccctgaaactgcctgcctctcccaggaaccattgatagggtttctgtcactatagctgtcttttctggaatttcatacaaatgtaaacttaatatgtagtcttacatactcagtgtctttaccaaaaccctttgagatttatctatgtcattatgtgtcttggtagtttgttcctttttctctattagtagttaytccattctatggacatttaaaggatatttatactatttccagtttttagctttcacaaatatagctggggtttataacccagaaatgtatatatctggggatatatacatttctcctgggtaaatacctagagggggattgctgggtcatacagcaaatatgcatttaaattttttgtcacaaaacaggcaatctggaatttttattggaatagtgctgaatgtatatcaatttttgaaaaattggtatctaaataatatcaagtgaatatggtatgtcaataatatccag

SEQ ID NO: 654794 - DNA, 558 bp, Homo sapiens
acaatttacactgtagcatataattgcctgcatgatacttaaatatatgtagttgttatttccaatttgaaatcayagaaaactaaagtactaaaaattttatgttctgaaagttcaataaaaaagtgaccaatcctgttaaaggttatgattcctgaggaactaagtagatgaaataagtaaggacctaaaaatgggcatcataataatatgataaaagagaattagcaatagcaagcgataaagagttacagctataaaagccttttttgcttttgtcattattccctgtgagatctactgctagtctgctattgcatccacattacattctcaaaaagcaaaatagaaaaatcactatccacccactattaaagtcattaaaatagaaccaatgatacaccagacaataaagacaataaccaatgtacttttttccaagcacaaatcacctttcctgtcccttgtcttgacaatacacggcatcaaatcctctcatatccccactctatattttaatttactaaaaatgagtatcgagcatttttttacctgacc

SEQ ID NO: 654795 - DNA, 558 bp, Homo sapiens
acaatttacactgtagcatataattgcctgcatgatacttaaatatatgtagttgttatttccaatttgaaatcacagaaaactaaagtactaaaaattttatgttctgaaagttcaataaaaaagtgaccaatcctgttaaaggttatgattcctgaggaactaagtagatgaaataagtaaggacctaaaaatgggcatcataataatatgataaaagagaattagcaatagcaagcgataaagagttacagctataaaagccttttttgcttttgtcattattcmctgtgagatctactgctagtctgctattgcatccacattacattctcaaaaagcaaaatagaaaaatcactatccacccactattaaagtcattaaaatagaaccaatgatacaccagacaataaagacaataaccaatgtacttttttccaagcacaaatcacctttcctgtcccttgtcttgacaatacacggcatcaaatcctctcatatccccactctatattttaatttactaaaaatgagtatcgagcatttttttacctgacc

SEQ ID NO: 654796 - DNA, 645 bp, Homo sapiens
aaattatcctctttattgaaaatacactcccattccctctttgggtaattagattttatctttttctaacactttaacaattcccttcttagcatatatattttccttattgtggcagacactgtttgtcgcttgcctgtcattctcatttcttcaccaacrgattcctgatttttcttagatgtaaaagtggtcccagagtaagaatttatgtagttgcaacaatctgtttccattttttcctctgacaggcatagtagaacttgggctactccattctactcaactagagagaaaagatgtcatctgcaatgtcatggaacaatatttagtttcttgacaataacagagagaagtgagaggaaatctccttggctttcttcttcccttcttaataaatgtgggaagatataatcactgcagttatggcagctatcttgtgattataaaggaagaagtaccatgatgagaatgcagatggaaaaatgaaaagagccaaggattgggtctgtgtgataattttgactcataaaaccacctacagtaccacctccctcaataagacactcagttgatatttccttacttgagccaaacgtatcctgataccctcctagaaatagacttagtgtcaatggccatgcc

SEQ ID NO: 654797 - DNA, 591 bp, Homo sapiens
taactctggtaataggttttagaggaaattcaactaaaaaggaaaatgaacttaaagagtctggatttttttcctaatccatagttatctaattcaccctttctcaaaagaaggctctctctttcttcctctttatcggctcttgcctgtctttccctttctccagttctctctcacacacagcttgtatctaaagctatgcaagaaatacattttatactagtgatttggtcagtgttaccctgcttcttcttgctatgaatgcagtatatatgagataagtacaaaagaaagagtatctaactctcttattttcatcatgacccactgggacaaggggagagagagggcacagctgcctccacggaataccctgttattgggcatgacaaagccaaggtaaagttctctggcatacctggaattcagacatgattacatggatatatgtctcactttccttgattattaagttgtaactctagagtatttgaccagcaggaaaggataagctttttctgatgrgtatttaaaaagaagggtagaatcattttacttttaaatcctgcttttaagaggaaaccaaatagg

SEQ ID NO: 654798 - DNA, 559 bp, Homo sapiens
acctataatggctaaaaattgtcccctatgtgtaaaatatcttttccagtatcccaattactttcccagctgagcccccaaaaaccagaaagcagacacagaaggaaccaaaatatatcaaatagcaaagaaaatggcacaaccactttggaaaacaatttggcagttcctgaaaaggttaaacgtagagttaccacatggcccagtatatctcttagctatgtatccaagagaactgaaaacatatttccatacaagtacctgtacatgaatgttcataacaacatcagtcataatagctaaacagtgggaagaacccacatgtccatcaactgatgaatagataaacaaaatctggtattaatatatctataccatgaaatattattctggcatcaaaaggaatgaaataccaacacatgttgcaacatagatgaackttgaagacattatgctgagtgaaagaagctagtcacaaaaggctacatattatataatttcattcatatgaaatgtctagaatagccaaattcatagaaacagaaagtagagtagtagt

SEQ ID NO: 654799 - DNA, 636 bp, Homo sapiens
taaattctggcagctgctgccatggcctttagtacattaaactattgcatattttctatagtagaaaatagcgttggggaagcttttgttaacttaaaataatttcttgttatgaattctcagtattgtttataccagatgtgttaatatggttgttttggatctaaaattagcctttttaaaactttgacttctttaaaatgaaagtatcaataagcaaatgcataatgttaatggcaataatattagtagccaaaggtattttaaaaaccactcaaagttgttaatatttttcaaatggttctatacatttatttagaggtgggggcagtagggaaaagtggggtagaggggagaatagagaggagttgcctaattatctcttttacttagccatttaatgtaagatctaatttataagctccctmtccatcctgcctggccctttctgtctacccgcggccccaacagcaaccatacatggacttcagcaccatctttatccatcccagttttcctcatagaaagccaactgacagcaggaaccccatgcctaaaacaaactttctggaacaacattgtaaggatggcctagttctgttgtctgccagccaaatagagaagaacatggattcc

SEQ ID NO: 654800 - DNA, 482 bp, Homo sapiens
aaagttaatgactttgacccatatgtcatcccagcctggtatataaacaagtaaagattccactatagttaaaatagagggacgtgaagactgaattaagccataacacagtgcccgttactattagcatgggcaaatgaaagccaaaaaaactgcaccaaagcatgttcatttcagagcagcaacttaatcaaaaagaaaaatagcrttctttcaactttgaattctcattgttgtatgattctatttgtttttaatttataagtttgttttggttatgtaagagctttctatgtaaagagtttgtactttgttttatatatgttttatacatatgtaagaaagaatatgatataaataattgaagtgaacaatggaagtcataagcgttattttccttaaaaggcatccatatgttacccacgtctgagaaatgatggcatgctagctcaagtccaaatgcctcagtatgttgttgacaa

SEQ ID NO: 654801 - DNA, 579 bp, Homo sapiens
gccattcttctgagaaggaccccagaatctcacctctccagatggcctaaggtaacaggcagaaatactgtaaatttaaaatttcacataggcacaaattcctattcttttagtatttttacttgggctttgagtggaggccttaatattctatgtttagagattggatctagtggtaagtccaatgtctgttttggaggaggccaggaatgtgggaaatggtggttgcttggcacatttgcaggaaatccctccacctgcgggacacacccgcacctcctgtcctggaaatatacaggaaatcaataggccacaaaatggaaacaattttgaactcaagaaaagggttctccttttctaatttaatgatgcagtgaactgtctgcagactttggatgaaaatgaggccctgagaagatcctggggagtgcaggagcatgagggctgaacatcaagagcaagaaagatttctttttcattaaaacaarttggtacacttggatttatagtacccagtaaagtataagcaggaagatgaaaattccaccatgaaataagacaatttaggaaagacaagag

SEQ ID NO: 654802 - DNA, 594 bp, Homo sapiens
aatgatcttcctttatgtatttagtgcttcctccaggagcccttgtaaggcaggtctggtggtaacaaattccttcagcatttgcttgtttttctccttcacttataaagtttagtttggccagatatgaaacttttggttggaatttcttttcctcaagaatactgaatattggactccaacctcttttgtcttgtagggtttcttctgagaggtgcactgttggtctgatgggcttccctttgtgggtgacttgacatttctagctgcttttaactttttttttttttcattttgaccttggagaattgatgattatktgtcttggggataatcttcttgtgaagtatcttactggagttctctgtgtttcctgaatttgaatgttggcctctctagctaagttggagaagttctcatagatgatatcctgaaatacattttccaagttgcttccattctctccatctctttcaggacaccaatgagtcatagatttgatctctttacataattccatatttctcagaggtcttgtttattccttttcattattttttctctattcttgtctgactgtcttatttcagaaag

SEQ ID NO: 654803 - DNA, 594 bp, Homo sapiens
tttaatatttgcctcagtctttgagaggaatatgtcattcatttgctgagacaataattaagaagtgcaaagattaagaaatacgaatttaaatatatatatatatatatatatatatatatatwttttttttttttttttttttttttttttgagagagagggtcttgttcttttgcccagactggagttcagtggtgtgatcactgctcactgcaacctcagccccccaggctcaagcaatccttcccacctcagcctcccaagtagctgggactacaggcgtgcaccaccatgcccaactgattttagtattttttgtagagacagggttttgccgtgttgcccaggctggtctcgaactcctggcctcaagcaatccaccctgccttaaccttccaaagtgctgggattacaggcatgagccaccatgcccatggtcattaattttttaaaaatagaatttgtttttaatttaaagataaattatctcatttgacttttagtagtaaatgtatcagagctctaaataataattaagaatagctctctaaacagaagacctgtatgaagagattggtaaagtgctgagaga

SEQ ID NO: 654804 - DNA, 532 bp, Homo sapiens
ctgtccccatcatatacagtgggagatggagagagctgcttgttgtaaatgttcaacatttcattgaactttaagattattttccccttcaatgaaagccttctgagagcaaattttcatagtcaccagcaactctggccctgtaaaatatgttctttcatgatgaaaaktaccctttatcacttagacctgcccttcccacatatactaaatgcaatccaatgtaatgagaatatggctagtcaatcacaggtcataaattaataagtttttactctgggtccatttgatataatagaaattattctcagaggagggttatcaatttagaacatacaatttagggagagataccactgacactgattctactgctgagctcttctttccaacacggttgaatgcaccttttcaaagagcagagcttcgtgttgcagtcagagagcatggatatatgaggtcctagaataatcagaaagccatccagttgtgcattgcttcattctttcatttggtcattgtcttccccttt

SEQ ID NO: 654805 - DNA, 583 bp, Homo sapiens
acaacctgggggaaactgcccccatgattcaattacctccacctggtctctcccttaacaagcggggattacagagactacaattcaagatgagatttcagtggggacacaaagcctaaccatattaatagttatatctaatttatgtttatatgattattaatgaagttgaacatctttttatatatttactgacatatcaatctataattttctgtatgtatttcttcttctgataattacctcttttatcatttgcccatttttaataggttgttgtctttttcttattaatttgtaagcacagttaataccttatggatactaacccttggtctgttatataggttgcaaatatttgctcctagcatatcatgcattttttatctytgtttatggcttagttaaccaaatagagttttaaatttaaagggcagccaatttgtcaatcttttctttgtggcttctgcaatttgttatgttttgaaaggacttcctcatcccaaaattatgaaaatatttctgtatatggaattttattttatcccttgaatgtatatttttaatccatatgaaatttatt

SEQ ID NO: 654806 - DNA, 574 bp, Homo sapiens
agaagctagagattcaaagagagaaatctctgatatctacagatgttctcctttcagtgcttagcagaatactgattagtgtatacatgtgagtaatctgctcactgccagggaaacaagcatcttcaaagattaaaaacaaacaaacaataacaacaacaaaaaccagtgcctgacattcacatatgacctggattatacctgtatttgccagycaaatgaaagaaaaaagctcaattcacagtgcatttggtaaagcaatttaaaaggtcttgcctcaggggtagaaattaattagatttaaactgagtactgagttgaacgcatcaaaaaatcataaaagaagtatctaaaaggatcaagcggttttgaacaaattaactgtgtcctagagaaaaagctcatattttgtacagaaatacaaaatatccagcactcacaaagataacattaacaaaaacttccattatattaaactgtagttaggttaaaatttctttaatagattcacagagactggcagcacaaagttttgtaaggatttagagctactggaactctcataccttgatgg

SEQ ID NO: 654807 - DNA, 574 bp, Homo sapiens
agaagctagagattcaaagagagaaatctctgatatctacagatgttctcctttcagtgcttagcagaatactgattagtgtatacatgtgagtaatctgctcactgccagggaaacaagcatcttcaaagattaaaaacaaacaaacaataacaacaacaaaaaccagtgcctgacattcacatatgacctggattatacctgtatttgccagccaaatgaaagaaaaaagctcaattcacagtgcatttggtaaagcaatttaaaaggtcttgcctcaggggtagaaattaattagatttaaactgagtactgagttgaacgcatcaaaaaatcataaaagaagtatctaaaaggatcaagcggttttgaacaaattaactgtgtcctagagaaaaagctcatattttgtacagaaatacaaaatatccagcamtcacaaagataacattaacaaaaacttccattatattaaactgtagttaggttaaaatttctttaatagattcacagagactggcagcacaaagttttgtaaggatttagagctactggaactctcataccttgatgg

SEQ ID NO: 654808 - DNA, 627 bp, Homo sapiens
aactgtagtatatgctgagaatgcaatatcctgagacagggaagaactgcctgaaacagcctaggccttgttactctctcccttgacagagaatgttcttcaaaactttaggccatagtttcccattggtcctgargtgtgtaacctagggcaagctgtcttgtggggtccctcaactgtggtacaagtgggccatgcacaatcactccatccacttcaggcacttcacatgcattccatccacttcaggcaactttgttgagccttgggctactggctcgtaatggatcggctcacataggtacctgttgtctcttgctgtttgtctgtaaatgatacatctgctttatgtaatttgttgcatatgagtgtgttctgtttaactgaactcagacaagctagtaaatagtacacagtgtacctgccccacacccaggatgtacatgctaaagctaaacagtgtgactgcctgccaaaaggaacagtttaaatagagctcagaattgtctgccatgatagacaaaatgtccagaatataattacaaatcaccgatcatacaaagaaccaagaaaataacaatttgagtgaaaaaagacagttaactgacaccaacaccaaaacgcatc

SEQ ID NO: 654809 - DNA, 627 bp, Homo sapiens
aactgtagtatatgctgagaatgcaatatcctgagacagggaagaactgcctgaaacagcctaggccttgttactctctcccttgacagagaatgttcttcaaaactttaggccatagtttcccattggtcctgaagtgtgtaacctagggcaagctgtcttgtggggtccctcaactgtggtacaagtgggccatgcacaatcactccatccacttcaggcacttcacatgcattccatccacttcaggcaactttgttgagccttgggctactggctcgtaatggatcggctcacataggtacctgttgtctcttgctgtttgtctgtaaatgatacatctgctttatgtaatttgttgcatatgagtgtgttctgtttaactgaactcagacaagctagtaaatagtacacagtgtacctgccccacacccaggatgtacatgctaaagctaaacagtgtgactgcctgccaaaaggaacagtttaaatagagctcagaattgtctgccatgatagacaaaatgtccagaatataattacaaatcaccratcatacaaagaaccaagaaaataacaatttgagtgaaaaaagacagttaactgacaccaacaccaaaacgcatc

SEQ ID NO: 654810 - DNA, 579 bp, Homo sapiens
cttgcataagttaatccttaatttgtcaactgttgattcattttgctctgaaatcaatgacaataaaaaagaattgtacttctattttgtacttttttactcagagtaaatatttattgagatttaatttgtgccctgtaaactgctaaactcctaaatccattasgtctatttctcccatgaggtaaatatttgctcttcattgaggatatagccagcaaggcagaaactagtctaggacttacaaacaatctgattttattatgtggagcaggtaacatcagggtgaaaataactaagaaacaaagcaaggaatagtgatgaaagtattagcactagcagagaactaatcctttcctcatgatagtaaggtcaatgggagaaactaaagttccagagatccagtaatgagccatttcacagtagaattactgctggtgagaaatgggaccagggagaaatatgacccctgatgtaggtgtcattagaagcagagaaaacaaacaaacgaaaacagaagtggcccttctccttgccttttcctgtccttcaatctttggcttttgccttcccttgcct

SEQ ID NO: 654811 - DNA, 597 bp, Homo sapiens
tgcatggggcatgtagccctgttgttttggccaatttctcccatttggaatggctgtatttacccaatgcctgtacccccattgtatctaggaagtaactaacttacttttgattttacaggctcataagtgraagggacttgacttgtctcagatgagactttggactgtggacttttgagttaatgctgaaattagttaaggctttttgggactgttgggaaggcatgattggttttgaaatgtgaagatatgagatttgggaggggccaggggtataataatatggtttgactctgtgtccccagccaagtctcatcttgtagttcccataacttctacatgttgtgggagggacccagtgggaaatgattgaatcatgagagtgagtcttccccatgctgttctcatgatagtgaatgggtctcatgaaatctgatggctttaaaaatgggaatttccccaaacgaggtctctatttggctgcagtcatccatgtaagatgtgacttgctcctcttcttgacttctgccatgagtttgaggcctcctcagccatgtagaactacaaattgattaaacctctttattttgtaaa

SEQ ID NO: 654812 - DNA, 597 bp, Homo sapiens
tgcatggggcatgtagccctgttgttttggccaatttctcccatttggaatggctgtatttacccaatgcctgtacccccattgtatctaggaagtaactaacttacttttgattttacaggctcataagtgaaagggacttgacttgtctcagatgagactttggactgtggacttttgagttaatgctgaaattagttaaggctttttgggactgttgggaaggcatgattggttttgaaatgtgaagatatgagatttgggaggggccaggggtataataatatggtttgactctgtgtccccagccaagtctcatcttgtagttcccataacttctacatgttgtgggagggacccagtgggaaatgattgaatcatgagagtgagtcttccccatgctgttctcatgatagtgaatgggtctcatgaaatctgatggctttaaaaatgggaatttccccaaaygaggtctctatttggctgcagtcatccatgtaagatgtgacttgctcctcttcttgacttctgccatgagtttgaggcctcctcagccatgtagaactacaaattgattaaacctctttattttgtaaa

SEQ ID NO: 654813 - DNA, 449 bp, Homo sapiens
acacttaccatctcctgtctctgaaactcgcttcctgggacttcagctacatagtaagaaccatggtctccataccccttatcctagacactcctttctactgattccaggtctttagataataacttaactcgttcaaccaattgccagtcagaaaatctttgaatccacctatgaccaggaagccactccttgccctcacttcaagttgtcccatctttccacaccaaactaacatattccttacacatgcattgatggaggtctgcctgtaattttttttttttttttttttgagactaagtctcactctgtygcctgggctagagtgcagtggagggatctcagcttactgcaacctctgcctcccaggttcaagcaattctcctgcctcagcctcctgagtagctgggactacaggcatgccccaccatgcccggctaattttt

SEQ ID NO: 654814 - DNA, 543 bp, Homo sapiens
gaaaccagtccctggggccaaaaaggttggggaccactgctacaacacagaaattccacttctaactcctcactgaagggagaaaggataatctctgccacagctgtaaaacargaatctatacagcagtgaaaatgaatgaattagatttgtacacaaaaatgtaattaatctcttaagtataaagttgagcaaagagggattcatagcatagagcattattccatcaacataaatttcaaaagtatggaaaactaaacattgtatttctagagatacatacagatgtggtaaaactatttaaagaaagaaaacaaataatagataaaaaattcagtccagtggctgtctctggggcagggagagggatgaaattgaagaggagcacctggaatttttcaggagattattaatgctctatttattaagcaggatggcattttaatgagttttatttttgatatatttaatattttacctaaatttttattttttattttgatttttaaatttctatatattcatagtgtgcaagtgcaattt

SEQ ID NO: 654815 - DNA, 543 bp, Homo sapiens
gaaaccagtccctggggccaaaaaggttggggaccactgctacaacacagaaattccacttctaactcctcactgaagggagaaaggataatctctgccacagctgtaaaacaggaatctatacagcagtgaaaatgaatgaattagatttgtacacaaaaatgtaattaatctcttaagtataaagttgagcaaagagggattcatagcatagagcattattccatcaacataaatttcaaaagtatggaaaactaaacattgtatttctagagatacatacagatgtggtaaaactatttaaagaaagraaacaaataatagataaaaaattcagtccagtggctgtctctggggcagggagagggatgaaattgaagaggagcacctggaatttttcaggagattattaatgctctatttattaagcaggatggcattttaatgagttttatttttgatatatttaatattttacctaaatttttattttttattttgatttttaaatttctatatattcatagtgtgcaagtgcaattt

SEQ ID NO: 654816 - DNA, 644 bp, Homo sapiens
aaagtgtgaggggaaaaatctgcctctgaacacacatccccactggggactctgaaaagcccggtcacagaagaaggatttaaccttatctagagctgaaacagttttagggagccaacgaaacataaaagtagaagcaccagtgggaagagccttgtaggcactcccagtccccagctcgagcccagggaagccatccctgactatatctaacaggggccctcagggaaggcagcaagtggaattagggaggggtcatggggtgaaagaagcttccagctgaattttgtaataatttcaactgggaacaaattttcttgagcagaatccagggaacgaacaggaactgctgcagatacaagcacaggagctgccaccaacattgggcagacagggaggggcaaggcctgaaaacagtgcttgctttctcggtggggaagctttaggcctggggcaaggtctgagttccatgtgcagactgactggatctaaacttggtgctattagtaggtcactgtggraataagactggccttgccaactgcgtgggaactgggtgaggcctttcactaccagctatccccctcttccctggcaaactatatggcacagcagaggcagccataatcctttctggaacataa

SEQ ID NO: 654817 - DNA, 625 bp, Homo sapiens
caaaatacacattcttttcaagtgcacgtgggacatttaccaagataaatcataagctgtgccataaaacaaatcttgataaatttacaagacatgaaattatacaatatgttctctgatgatcataaagtaattatattagaaatcaataataaaaatctagaaaattcccccaaatatttagatattaaacaacacacttctaaataactcatggagcaaagaaaaattacaagagaatttgggaaatattttgaactgaatagaaaggaaaacatgatatctcaaaatttatgggatgaacctaaagtatgcttagagggaaatttataactttaaatgcttatgttagaaaagaaaaaaaaatctataattaatcatctaaagtttcatttcraaaagatggaaaatgaaaagcaaattaaacaatagtaaatataataaataatataataaagataaatgtggatatcaatgtaatagaaaaccaaaaattaggaaaatcagcaaagtcaaattgttctctgacaaaaattaatgaaattgataaaatgctgagaagactgattaagacaaaaaagagataaaacaaaattaccaatagctgaaaggtaaataaatggag

SEQ ID NO: 654818 - DNA, 625 bp, Homo sapiens
caaaatacacattcttttcaagtgcacgtgggacatttaccaagataaatcataagctgtgccataaaacaaatcttgataaatttacaagacatgaaattatacaatatgttctctgatgatcataaagtaattatattagaaatcaataataaaaatctagaaaattcccccaaatatttagatattaaacaacacacttctaaataactcatggagcaaagaaaaattacaagagaatttgggaaatattttgaactgaatagaaaggaaaacatgatatctcaaaatttatgggatgaacctaaagtatgcttagagggaaatttataactttaaatgcttatgttagaaaagaaaaaaaaatctataattaatcatctaaagtttcatttcaaaaagatggaaaatgaaaagcaaattaaacaatagtaaatataataaataatataataaagataaatgtggatatcaatgtaatagaaaaccaaaaattaggaaaatcagcaaagtcaaattgttctctgacaaaaattaatgaaattgataaaatgctgagaagmctgattaagacaaaaaagagataaaacaaaattaccaatagctgaaaggtaaataaatggag

SEQ ID NO: 654819 - DNA, 616 bp, Homo sapiens
tcagcgtcatttgaagcttgttaaaaatgcagaatcctagacctacctcagacttagtgttttagtttgttttgtgctgttataatggaatacctgagactgggtaattgttaaagaactaagatttatttcttacaagtctggaggctgagaagaccaagattgaggagccaacatctcacaagggcctttatgctgcagcattccatgacagaaggcagaagggcaacagagggtgagagagaaagcaagagatcatacttgcagcctcaagcccttttataaccagcattagtcaatccrtgaaggtagactcttcatgacctaagcacctcccattagtcctgtcctcccaacactgttgagttggggaataagtttccaacacaggctttttgggggacacattcaagccataacacctagtaaatcagaatctgaattttagtcagatccccaggtgagttctatgcatattatagtttgagcagtgttctctaggatattctcagaccaagtcaattttcttggcatatactgcttaatttgttccatcagtgagattcctctagactgctactgtccaaaagggaagccagtagccacttattgctat

SEQ ID NO: 654820 - DNA, 559 bp, Homo sapiens
ccaacctaaccctgttatctgaaaagtgagaggtttgaactagataatctttatgattctagaaattcctaacacaagcaatcgtttattctcagttataatttatgctcatttactatcactccaattagattgtaaacttcttgaaggcaggcattttatcttataattctacctctaactacttctgctacgactgaccttcagggttytcaacaattgtctttgatgatgacttttgtgctgaaaaacaaagcacttattcagctaatctaagctttagaaaaaacttgaggtcctataaacagacataatccacaagcagttgcattttgaggtaaatcatgcctgcctccttgtgtgtgcacatttgtttttgaaaatttgaccatctgactgtaacctgaggaatcttggttaaacatttctttatgcaaaacaaagaatgttgagtagttaaatattttacctctgaggctaaaattgggttattttttgtttcctcccctctgaatatttaaggtggaaaaccaagtgttaatgttcaaatgatttccag

SEQ ID NO: 654821 - DNA, 552 bp, Homo sapiens
ccatcacatcagaacctttgagggtgagctccaaaaatctgcactttgaatacactgyaggtgattcttatgcacacagaagttcccaaaccacacatttaatgagaacaagggtatcagattgattctgacccaagcttgaggcctgtcttttttccttcttctttttttcttttgagacagggtcttactctatcactcaggctagagtgcagcagtgccatcagctcactgcagtgtcaacctcctgggctcaagtgatcatcctgcctcagcctcccaaaatgctgggattacaggcatgcaccaccatgcctggccaaaaccaggcctgtcttcacaaacttaatgatcaattgtccccctccttctgtacaacctctctaagctgcagtgtccctatccatcaaatggaaaaaataaatactacttacctatagtctcgttgtgaggatcaaatgatgaacaacctaagatgcttagatgtagtgtgcactcaataagtgcaataaaaactataataagctcaaaaagaattcattaaacaggtga

SEQ ID NO: 654822 - DNA, 618 bp, Homo sapiens
atcaattttgtcaccaatttacacttaaagtgaactgattgtgtgaatatagtgcacgggtaggaagagaatggtgtgaaaaaaggaagattggtccttagtccatgttctaggataatgatattgaggagagaaagaactcaagtaaacgaacaaacaaaacaaaatgaagctacaagcaacatgagtgagaggcatcaaaagaaaaagagtggggaacatgcaacaccactctctgaaaaatagaaaaaaaattaaatatgaaaacagaggctttgcaaatacatgtgtccctgctctaaggtagcagggagagagtgttagaaggggccaaattttttttaaaaggcaaggagactagaatggaataagacaaggacaaagyatttctatgtggggcatatttgggacaacattcagcaggaggaggcattgaagtctaggatcttcccttaaaatttaaattaagcagttaatttagtctgttgcttagtggacaaacttagagaaatctgtctgaatttatcatcagcaaatatcctattttcacatgtggtagaggggaattgggaaaatcacccgcacaaaattcataatgctagaatgcattcataacca

SEQ ID NO: 654823 - DNA, 631 bp, Homo sapiens
gattactaatagtttagaaaagttgctcttagcattataatttttatgggcaatgcatrtattaataaattcttaggatgttgtcaaatttgaggaaacttctatcaggtttttcatatatgaactgtaagatttcagcacatctcaagttttctttatgcagggaaaacccttaaatactctttgaatgaacaaaactgagtaactagtcaatgtacttcttataagttttatgttattgttgctgtcagcattttaagtcagacatgtaaatatttttctaatacattcatgtaattgacatgttgggatgaataaaatatgtaacttcacaaagatcgtttgtagtactgctacatatgtgtgtcctataaacataataattctgataaatttgctcttgagagatttccaaaatatctctaaatatattgaatacttatttttttttttgagatggattctcaccttgttgcccaggctggagtgcagtggcataatctttgctcactgcaacctctgcctcccaggttcaagtgattctcctgcctcagcctccctagtaagtgggattacaggcatgcaccaccacacccggctaattttttgtatttttagtagagacagggtt

SEQ ID NO: 654824 - DNA, 594 bp, Homo sapiens
taaataataaaatgtatcaactcactagatgcattgattgattgccaggctcctgaagtgccttaccacattgtctcattttatattcatgcaggtattgtagctatccccattttacacatgcagagagtgaggctcagagatgttaaacaatctgcctagcatcacacagctagcaataggcagagaccagacagaaactcaaatctccctgactcccagctcagcctcttcactactattcaatattgcccagtagatgctgattttctctgtgtaggcttctaatgtgcttttagcgtaaagctaattttcattaataggctgaatatatgcaatctgacctcaaaggacatacataggggttttcttctcatttaagattagtttgaggcaaaaacaaaacatgaaataagatcaagtacagttgacctttgaacagcacgggtttgaactgtgtgggtccacttatacacttattttcttctgcctctgccacccctgagataccaagacaaaacccctcctctttctccttctccttagcctaytcaacatgaagactacaagcatagagacctttatgatgattca

SEQ ID NO: 654825 - DNA, 598 bp, Homo sapiens
acatttttaaaaggggtttatttggaaaacatataaaaacatgacagaacactttgtaggctactttacacaataaaataagcaataatgacacacatatttttgcaggcatgaacattcaggtataccaacaacagttgcatgagtacaacagttatgagctggcaaactgtatttacaaagcaatagggccaggtgcagtgactcatgcctgtaatcccagcactttgggaggccaaggcaggtggatcacttgagtccatgagttcgagaccagcctgggcaatacagtgagaccttgtctctaccaaaaatacaaaaattagccaggcatggttgtgtgtacctgtagtctcagttactccaggggctgaggtgggaggatygccacttgaatatcaggagttcaaggctgcaatgtgctgtaatcacaccactgtgctccagcctaggggacagagtgggaccatgtcgaaaggaagaaaaggaaagaaagaagaaggaaggaaggaaggaaggaaggaagggagggagggagggaggaaggaaggaaggaaggggaagggaagggaaggagagaggtcaaaaagggaaatgt

SEQ ID NO: 654826 - DNA, 467 bp, Homo sapiens
gaaagagaagtggttcgattcaaaatatatttggatgggagaacctacaggatttcttggtggatctgatgcatgccataagaaaaaaaaagaatagtcaaggatgactaagatatttgggtcctagcaactggaaggacagagttgccattaaatacgatagaatagactttgcagaagtcccagagtctcatttgaggygtgcaaactctgagcaatctcttagatttcccagaaaggtgtcaattaggcagttggaaatatgactggagttccaaagggagatctggcctggaggtataagtttgtgaatcaagagtgcacagatggaattaaaagctataagattagaaagaatcatcaaataatatgagtgtggaaagaggagaggtccaaggacagagtcctaaagagcctagatggtagaaaaagagtagaatccagcaaaggagattgagaagagcagc

SEQ ID NO: 654827 - DNA, 645 bp, Homo sapiens
cattcatagcagagctgggatttttaactctttctccaccctcttgctttgcctaccactaagaagcttatcaaggaatctcaacccatgcagtactcttttagaagagatctagaaaatagaatgttctctattttgtacatttccagcaatgttcaagtatctcatgatttttctgctattccatttaactccaccttaaatcctacagctcataaaacatggcttatgtcactagtttagcaataaaacacctttactatgacatctctagtgctattattttattttacatattttgtaacctcaactcaagtttacattctttgaaggcagaagccctgtgttacttacattttttaaattactttcagcatcttgtgctgtgttgttgacatagtgrtagatacttagcatttgtagtaaactgatcataatcaaagaacaacattactactgttattctgtgattggacatcaagagaaagcttccttaaccctcacacccagcatcttatcactataaagaccactgaaacaatagttgatggtccaggcccagccatgagattggtacacgttttttttaatctgatgtatcaaaatacaataacctctatcccttgctccttcttcttcttcaat

SEQ ID NO: 654828 - DNA, 645 bp, Homo sapiens
cattcatagcagagctgggatttttaactctttctccaccctcttgctttgcctaccactaagaagcttatcaaggaatctcaacccatgcagtactcttttagaagagatctagaaaatagaatgttctctattttgtacatttccagcaatgttcaagtatctcatgatttttctgctattccatttaactccaccttaaatcctacagctcataaaacatggcttatgtcactagtttagcaataaaacacctttactatgacatctctagtgctattattttattttacatattttgtaacctcaactcaagtttacattctttgaaggcagaagccctgtgttacttacattttttaaattactttcagcatcttgtgctgtgttgttgacatagtggtagatacttagcatttgtagtaaactgatcataatcaaagaacaacattactactgttattctgtgattggacatcaagagaaagcttccttaaccctcacacccagcatcttatcactataaagaccactgaaacaatagttgatggtccaggcccagccatgagattggyacacgttttttttaatctgatgtatcaaaatacaataacctctatcccttgctccttcttcttcttcaat

SEQ ID NO: 654829 - DNA, 584 bp, Homo sapiens
acttagtgaaatataatatagatgcttttgggatccaacatatagcacaataaaaatgacttttgagaaatgttggaatccaaaaacattatttacaaataccaaacatttttcaaaccccaaaccactaaaaataactgaaatttaacctaaatgtatgactcagcagtggatttaacaccattttgtccttgtttcccatttatgcctctctccaaaaatcctgtggcatatatatgattttggggcaagattcatcatttctcccactggatggagtttccaagctctgtcgccagcaccaagaagtcttcagagcaaactttgttggcatttccatcrattttaatatttaaatattaccctctttagggtctctgagttaaaaagaaccacttactccagtgagagaatcctcgatcttacctagtgctgaaaagaaaaggcacaaggagattctgctcctaagtggtctgcacccagagaggctgagatagatgcctctgagagagagatcattaacagctggacaaccctttagaaaatgaaggagccaaaaatgtaactctacagagttaaatcat

SEQ ID NO: 654830 - DNA, 466 bp, Homo sapiens
ctttttaagaacaaaagaaacatgtgaagtgaccaaagaacatcttcacagagtagaagcgagatgggagggaggacaaaattcagggaagaggcaatcagtgacacctgtcttcactgtctttcaataatgtcaataaatctcaaatactggggatgagtggtaaaagattcttgggagattaagaagaatagagttaaaaatctatatgcagatatgaattttccttccgtaaccctggaatagattatcataatggtaatttttcaatacatggttatctgttagtgccactattattatttttataaaaattataatcagattgtatattaaygataaagagtaacttcacacagccctactaatcttccctaatttgaaggggtcattgcttaaataatggtaggtcataggtagggtgaccacatgatctggttgactaagacagtcttagtttgcacca

SEQ ID NO: 654831 - DNA, 602 bp, Homo sapiens
aattcctcctgaaggacctgcctgaggctgttttacagttaactttctttttataagtagaaggagtgcattctaaaataatgataaaagatatatcagagtaaatacataagccagtatcatagtcatttattatcattatcaagtattgtgtactatgcgtaactgtatgtgcgatacttttatacaactggaggcacacgtttgtttacaccagcatcaccacaaacacataggtaatgcattatactaccatgttaggacaactacaatgtcactaggcaacaggtatttttcagctccattataatcatatgggatcaccatcataccatgtggttcattgttgactgaaacgttgttatgtagcacatgacagtacatgaaatgattagaaatgacactggaaataattgtctaaatgatctgcttaaacagctggcaaatacaactggatacaaatagcaccttgtatagaacagtgattctcaaagtgtggtccaaggaagcckgggaatccccaaaactctttcaggaggtcctcaggatcaaagtcattttcttaaagtttaattctcattccgttatgagcatagagaggt

SEQ ID NO: 654832 - DNA, 524 bp, Homo sapiens
aatatgatctgtagttgctaaggatatgctttctgcaatactctaaagcatgtgctgcacccatcgaaattctatgaggcagagaagtctttgaggtcctgttgtcctaacagaacacttgccagtatcctgacagaattaggaagtcactttgagctgccctccagacaggagcgcacacaaaggaaggcttcatctgaaatcctaagcaaagaaaagtgaagtgaggaaagtggaacattaaattttagaactggcaagtagcaacagtttgcaaccttgaagatatttaastaagagttgaaatttcacaaaagtatggttttgacaactaaatgccccccaagggtgaagattgttcctggaaaaaaaatctaaaatgctgttatttaacccaggttattggccactaaaatcacatatgccaaaattcgggggagaaaaaatagtctgaagaaaagagagaaagaagagaacttaccttggtagaaggaacgccctcattctttaaatggactgtagtc

SEQ ID NO: 654833 - DNA, 450 bp, Homo sapiens
aataatatcatgtagggttatgaagaagatagcattaaaatatattaattcaatagcacttatgttgggagagccatcatcagagaaaaagtattacaagattcttttattattaagaaggataataaatatattaacaaaattgtatttataagttaaaaatgaaagttaaaagcttcagggtaactcataaaggaattaaaatataacatctccawattcataaagaaaaagatattcaatcaccccaaaaagcaaatgaggtgagaaagaaattagaagaggaggggaaaatagagagcaaaaaataagaagccagaagttaaagagacatcagagtttaggaaggaggaagtaatttgagaggtaacaaaaatcaatgaatttggaaaaaaacagcaaaaatcaatgaatcaaagaagtgattcgtttaaaaggtaataaaagtcc

SEQ ID NO: 654834 - DNA, 587 bp, Homo sapiens
ttttggcttctttttccagattgctttagccattctgcatttccatatgaattttagaatcagcttgttaatatgcaaacaaggcagtgatattttgatagaaattacatttgctctgtaggtcaacttggagagtattgacatcttaaaaatattgtcttccaatccaccaacatgggatgtctccatttatttagctcttcttttattttttcaatgatattttattgttttctgtgtatcagttgaggttcttttgttaaacatatttacttaatattttatttttgacactactgtaaatgaaatatttattaattttattatattatttctagtgtatagaaatacaactgattgtktatattaatcttgtatcctaaaatcttgctgaattaattagttctattatttgtgtgtgtgtgtgcatgttccttaggattttttacatacaagatcatgtcatctgccaatagttttacttctttccagtctagatgccaattatttctaatgatatttaaataataaaaaacaatatttatatgtactcataatagtgaccaattcttatgctcttccatagt

SEQ ID NO: 654835 - DNA, 516 bp, Homo sapiens
ccacacccaaccctctactaacctgtgtaatcacaacctgtggagctcccaagttactgaggtccactcttctaaagttgttccctccgtctcatgctgatttctcaagctgatatcatttcttttacagttctcagatgagrctgctgctacctgagtctcctccaatgctctccacctccttgtctagagcttcaaaccgtaatttgtttccctaaccactcagcaaactctcctactgaagtctaccatattctgttataccatcctctttactaatttcagatttctactattctcctcacatgctttcatgctcctaagaggttccagcacctgttggaatgtttttcttcaccttatacaaggccactggccttgttaactttaatatccagcaccatgtacttttctcacccttcttaatttcatctctctgtcacttgacatagctgactctaacccagtccttgaatccaagtcctcctttgtttttgtgacactcatcattccgat

SEQ ID NO: 654836 - DNA, 559 bp, Homo sapiens
tccatgctttttgtccaacaccttgcttgtttcatgaacgtttgttgagccaactactaacgcagtgacagtacaaagatgaatcagaccatcagagaactcagccagcctagctgctattttgcaaggtgctcgtgaggattaaatgcattaatgtcatgtaatgtaaagaagctagagaggaagacaactggccagatgccagaagaccttctctgccatgctgtgaaatttggacttatatcccgagaactttgggaagtcactaaaggattttcatctgggaagtgtggatgtctcctsagtgccactcaaggtgtgtcattcagctctgagctttaatgtcttctcttcagcaaaacctttcctgacctctcaaatctaaagtagctccccagtctgcatggaacttaccactgatatttttcttctttattgtgtatttatatatttagctatagaattcaggctcatgaaagcaggaaccttgttttgttcattgctgtatccctaccacctaaaatagtacctggccatattgtaggataggtgttttaga

SEQ ID NO: 654837 - DNA, 584 bp, Homo sapiens
tgcaggaactgcaggaagattcccgtcctgcagaagaaactgaatgatctcagatcaggtggggaggaccaaagagaaggcagggaaagaaaagcagcagatgtgaggggcatctggaagggggacccaggggctgaggataagggggacagggagacagtaacatcctggggcaagcaagccacaccgcccaagaggctgctggcaccacagacagcagcaggcctcggattaagtccccgcacacacagccctcctctgaagcaccctctactggctctgccatgtcttcattcaaacaccgatcagtgtcctamtatgtgccagagacaccactagatttcgaggaaactgaggtgagtcaaacactgtccctgacccccactgtccacagtctggtattaaaaacagaagtgaaaaataaatcactgtaattcacaatagccaaaaggcagaagcaactcaccaactgtccactggctgatgaatgaataaacaaacggtggcacatacacacaatggaatatcactcagcctcaaaaaggaaggaaattctgacacacactacaacacaggtgaagctt

SEQ ID NO: 654838 - DNA, 507 bp, Homo sapiens
tgaaccaagtgagctttaacaaattggtagcaattcctaccacccaccccagagaagttaatctcttcttcccttttctttcattgcaggtaccttagcatagcatttttcacactatataattcattagagttgcctgagtatgtttctatctcctctattataggtagtgatggcctggaaaacagcagccattttataaatatatatatattttaaaaatatacatatatttgagtcctatatatatatacaggactcaaggactcaagaagcagattttatatatatatatattttatatttttttcattatatatctatatatatgtatgtatgcattttttgagacagatttcactcccatcacccaggctgaaatgcagtggtgtgtcagctcactgcgacctctgcctcctgtgttraagtgactctaaatacctgagattctgtgagtcaatttgttggaaacgggtgctcggtgtcacaaaatcaacactgagacaa

SEQ ID NO: 654839 - DNA, 572 bp, Homo sapiens
atgacaacttaacaaacgttgagaatagaaagaaatataaaatatgcctaatgacagtcctaaaagaggttaggccatgtttaaacagacataggctgacaattgtctagagctgacaaaaagactggaatccataaataaaaacaatgctatgatactaagaagaataaataagaaaaaattcatagttaaatactttgaaataaaacttgaaaacattaaacgaagaatatactcctaagaatagctcaaaagaaaacacaaattattgaaaggacagccactgttcaacagcaatgayaacagttggaaaatagcacaataatataataaaagaaacaaaagataaaactatttagaaatttatatctagtaaaaatattttcaagaatggggatgaagtagtcactttcagattaaaacaagagaacaaaacaacaaaaatcatgactgaatgagtttgccaccaacagatttttactataggaaccttagaagaaagaagacctctgacataaagtgtgcaatgcaagaagtattggtaagcaaagaaattagtagacatgggataa

SEQ ID NO: 654840 - DNA, 572 bp, Homo sapiens
atgacaacttaacaaacgttgagaatagaaagaaatataaaatatgcctaatgacagtcctaaaagaggttaggccatgtttaaacagacataggctgacaattgtctagagctgacaaaaagactggaatccataaataaaaacaatgctatgatactaagaagaataaataagaaaaaattcatagttaaatactttgaaataaaacttgaaaacattaaacgaagaatatactcctaagaatagctcaaaagaaaacacaaattattgaaaggacagccactgttcaacagcaatgacaacagttggaaaatagcacaataatataataaaagaaacaaaagataaaactatttagaaatttatatctagtaaaaatattttcaagaatggggatgaagtagtcactttcagattaaaacaagagaacaaracaacaaaaatcatgactgaatgagtttgccaccaacagatttttactataggaaccttagaagaaagaagacctctgacataaagtgtgcaatgcaagaagtattggtaagcaaagaaattagtagacatgggataa

SEQ ID NO: 654841 - DNA, 504 bp, Homo sapiens
cagcttccagaacagtatagtggtttttgatgacctggagaaatctccccaaaccaagcctcttcctgtaatctagcagaggtgaacagaacacacaaaggagctaaggggccaaccagaacctgcaaaaggggcaaaacagaatctgcaaaagaagccacacaatcattaggagaaggaaggggatgttggttgcactttgaatagtcaccacactaagttgaaagatgccttccaggaacaatttctccactgtgattaggctcaaacactatgggctgaaagcaccccttcagcatggacartgcctgggatggccctcagttcaagagaaataagcaactgctacaatgaacctctaaatccgttgtactggttgggggctgataagccacccaagcacccaacaggcaggtgcctgcaaaggcagatcctgattgagcctccacatgtgtaatcatctaacgagttctttctgcccattacacagaaaaaaaacaattt

SEQ ID NO: 654842 - DNA, 615 bp, Homo sapiens
attataggaaaaacccagcatgtatatgtgagtttactacttcttgccacttttagcaaagccctgcatgtaagatatgaactgtggctcaagctagatggcctgcaaagagaaataggatttcataaagtctctgtatctggcctaagacttcagttaactgagaatccaattatttgaatccttacctcactgtaaaggtcaatttctttattaccygaaattaaagtttatatggaatatcatgaaaatatatcttgaacagaaaataagatgctgtgtccccacgcaagattttcaagcatctcctgttaagaattgcaagatgctgtgttcccatgcaagattttcaagcatcttctgttaagaattgcttgctcaacaatgtaagtcatcacacttgcagagatcaaattaagaaaattgccttatcatttaaacccattgttacacatggtataatagtcattagagctgttcaccttagatgcatacagtaggattgcacttctccatcctttgtgaagttaaatgtcagacacaatgactttcttcggtgaataaaatgtgagtagattcatgtatttaatgacaatatcataaaaatgagtcagt

SEQ ID NO: 654843 - DNA, 570 bp, Homo sapiens
ataaataaaactggttgcaaatgacatgaatatatagaaaatccaaaagaactgacaaaattctcctggaactaatcaacaactacacatggtgaggttacatgatacaaggttaatatacaaaaggccaatattttctacataaatttagtcttaatgttgtcaataggttttttgaaactgtgactttaagtgaaacgatgtaacatcatttcatttagtatagttttgttaaaatgttcatgagagaaaaaaaatttttttaattcatatgtcctttcacttaaagttgcagtttcaaagaacctrttaatgatgttaattgaagacttattgtacctgcaataaaattgaaatttgaaataaaaacaatatcatttgtagtagcacactccaaaaataaaatatgtagatataattttagcaaaatatttacaaggtctatgcaagaaaaaccacaaaattctgatggaagaaaacaaaatacaaaataaatggagaaatattttatgttgatgaataaaaagatgcaatattgtcaagatgccatttcttcccaacttgcattga

SEQ ID NO: 654844 - DNA, 606 bp, Homo sapiens
agacttctcaaacgctgcagttgctttatcagctaagtttttataatattctaaaacctttgtagtcctttcaacactgtttatgtatcatcttctctaggagtagatttcttctaaaaaaaaaaaaagaacactttctttgctcatttttaagaagcaactcctcatctgttcaagttttatcatgagattgcagcaattcgtcttcagcctccacttctcattccaattatcctgttatttccaccacatatggttagttcctccactgaagtcttgaatccttcacagtcatccatgagggttggaatcaacttctttcaaattcctattaatgttgctatttccacctcctcccatgaatcctgagtgttcttaatagcatatagaatggaaaatcctttccagcaagtttgcaatgtacwtttctcagatctatcagaaaatcactatctctagcagctgtagccttactaaatatatttcttaaataagagaaaggtgaaattactccttggtccatgggccgcagaatgaatgttatcattgtgaaaggaacattcatcttcttgtacatcttcatcagagttcttggtgaccaggtac

SEQ ID NO: 654845 - DNA, 533 bp, Homo sapiens
ataatttcactctttctcccctctactcattttctcacacaactccaaagaaaatcttttggcctaaatcttaatcttctcgtggaaaaaaatattatctctgcactttgaaggtatagcaacgtaataaaacaagaacttggaagataaggcccagatgcatgctgttcactgttttaaaagttcaattggcctctcagctactggcttcaccatgttgaaatgccttttacagagacagatggtccattcagtagtcatctattgctggctatggcttgtcattatgatccccctgggtaaaatgcattctcaaagtgcgtcttcccttctaattcttcctagcaaatgggtaagtgggtagttttatctgcccacttgcccctagagtatgatcatatgctgcaaactctgagtcccaggagagctcagaaatcccaacattgaaataggcattgagccaaggcaaaaaaaagcagcagagrtaataggagaaaggtaagacagaaaagcctgctttatgatgttcagct

SEQ ID NO: 654846 - DNA, 615 bp, Homo sapiens
ataaacaactcctatcactgaatttaatacattataattatatttggtgtttatgcatctgtcttgttcactatgctgtaaacatctcaaaagaagtgatagtgttctattcatctcgtgtttcaacacttcacacagagtttatgcatggtatattctattggttttctattgctgaataacaaatggccacatatttagctgcttaaacaacacccgtttattatcatacactttccatgggtcagaagtccaggtgcatttgactaggttctctgcttatggtatcacaggccaaaaggaagttgtcagccaggctgagctctgggatctggggatgaatctgcttccaagccaattcggactgttgtcataattcagttctttgaatctgtaggatgcacaggtcatcatttccttgctggttgtcagcagsggggcactctgaccttctagaggctgtcatgtggcccttcctatccagaagccagctatggcacctcaaatccttctcatgctttgactctctctaccttccatcttttaagatggaagagcttgaacaaaaagctcttccatcttaaaaaggctcacatgatagattagacgagtgca

SEQ ID NO: 654847 - DNA, 605 bp, Homo sapiens
tatggttaggccagcatttaaccacgatcttctgccaattccaaactcctttcttctttttttcttttctaagctgtcatttcttaaatggcacccaaatctcagaatattacacttgcctttcaggtaaaaaatatgtgtgtaggcagtgtcataatctgtacacgctttcgagaattcttccaggtatgacttccaggtattctttcacaattctttctggatgacttgtatgtatatgtctcccttttctagaaacatagaatatttaaaatgtggggagaagctatctcatacagtaatagtaacaattttagctgaaatctaaatctatacacacacacatatatataagactttatatgtgtacactggatatcgatagaatccttccctgcaagaggaacctgaatatgtgtgctgtttcctarcatagaatcccatgaaaatgtgtgaatttcagccttattgatggctcacaatgaatgtgtcctcatcagtatatatggttccctcctttccctcacacagaggctatcaggaatcctaaaagcagataaaacacctctttagtgaatcaccttcctgcatatttttttgccacc

SEQ ID NO: 654848 - DNA, 566 bp, Homo sapiens
atctgaccacaatagaacaaaactagaaatctgtaacaggagaaattttggaaactatacaaagacacagaaattaaacaatatgctcctgaatgacaaatggrtcaataaagaaattaagaaaattgagaaatttcttgaaacaaatgataatggaaacacaaaatacccaaacctatgggatacagcaaaagcagtactaagaattttatagccataagcaccatacatcaaagaagaagaaagacttcaaataacctaacaatacatcttaaaggactagaaaagtatgagcaaaccaaaccccaaattaggagaagaaaagaataaacatcagaacataaataaatgaaattgaaatgaagaaaacaatatcaaaaaatcaatgaaattggtttttttgaaagaataaacaaaattgacaaacttttagctagactaaaaaaagagaagatctaagtaaataaaattacagatgtaaaaggaaacattaaaactgataccacagaaattcaaaggattatttggggctactatgagcaactatatgccaataaactggaaaa

SEQ ID NO: 654849 - DNA, 598 bp, Homo sapiens
tgcttttggtgattaaaaatgtgtaatgtttgcctctctgctgaaatatattgtctttttgaagatcttctaggactttttcatcactaagatagacataaatatgcaaaataaacaaacaaatacagtaacatccagtgtttatcatgttaggtaagccacctgcattttagaaatatagcaacaaatttcaaaatgatcaatacatttgatatttcagctaattaaagtgatataaactgtcctctgcattccacataaatagatcaygggagccattttgtttccccaaagctgagaacacgttgatatctgtgcccagcagttacaccatcgcctattgttcactcctgatataagcacagtgcctacacaagtacatgctgtaatgcaatcagaaattactcaagcaggagatatacattattttgtgtgtatttggtgtgttatcttaatattgatactattatgtcatcatgtatatacactcaacgaaattaacttatttttataataaaatcttgtgtccagtggaatgaagagaacaagagtaaatgggaagagaagtatttgtttatgagttactgcttgatttaaa

SEQ ID NO: 654850 - DNA, 560 bp, Homo sapiens
gatttaattcttactttccttccccagttactagatatgtgaccttggaggtcctttaatttctctaagactcggtctccttactaaaaaggtatagtacctattgagtaggatgtactgaagctcaaatgagrtaaggaaaacaaagcacttatagcactatctggaaaattgcaaaatacagagtcatacatcatgtaacgacatttcagtccatgacggaccacagtatagtttcgtaagattatgatggagctgaaaaattcaagactcagtgatgtcttagtcgtcataatgtcatagtgcaacacactaacatgtttgtggtgatgctgatgtaaacaaacctactgcattactagttgtgtaaaagtacagcatgtgcaattatgtatgtacataatatttgataatgataataaatgactatgataccagattatgcatttactacataaatactatactttttattgtttattgtttattgtgtactatactttttattgttattttagagtaatccttctacttaaaaaaagaaaattcaactataagac

SEQ ID NO: 654851 - DNA, 574 bp, Homo sapiens
tgctaggatgtttgtgttttaagtgttattataagagtcaaaaagttaaaaacatttaagtttataacgtaaaaaagttacagtaagctgaggtcaatttattatcaaagaaagaaattttttaaataaattttagtgtagyctatgtgtacagtgtttataaaatctagagtaggtacagtcatgttctcaggcttcacattcactcccactcactcactgtctcagccagggaaccttccagccctgcaagctccattcatggtaagtggcctatgcaggtgtgtaccatttaaaatcttttatactgtattttcactgtgttttttctatgtttagatacataaatacttaccattgtgttacagttgcctacagtattcagcacagtatgatactgtacaggtttatagcctaggagcaatgggctataccacagagcctagatgtaggcctcactctcatgtagcatatgtcttagttgcagtaaggaaggtgtgtagtaggctacaccatcaaggtttgtgtatgtatactttatgatgtttgcacaataacaaaattgtctaatgat

SEQ ID NO: 654852 - DNA, 574 bp, Homo sapiens
tgctaggatgtttgtgttttaagtgttattataagagtcaaaaagttaaaaacatttaagtttataacgtaaaaaagttacagtaagctgaggtcaatttattatcaaagaaagaaattttttaaataaattttagtgtagcctatgtgtacagtgtttataaaatctagagtaggtacagtcatgttctcaggcttcacattcactcccactcactcactgtctcagccagggaaccttccagccctgcaagctcyattcatggtaagtggcctatgcaggtgtgtaccatttaaaatcttttatactgtattttcactgtgttttttctatgtttagatacataaatacttaccattgtgttacagttgcctacagtattcagcacagtatgatactgtacaggtttatagcctaggagcaatgggctataccacagagcctagatgtaggcctcactctcatgtagcatatgtcttagttgcagtaaggaaggtgtgtagtaggctacaccatcaaggtttgtgtatgtatactttatgatgtttgcacaataacaaaattgtctaatgat

SEQ ID NO: 654853 - DNA, 574 bp, Homo sapiens
tgctaggatgtttgtgttttaagtgttattataagagtcaaaaagttaaaaacatttaagtttataacgtaaaaaagttacagtaagctgaggtcaatttattatcaaagaaagaaattttttaaataaattttagtgtagcctatgtgtacagtgtttataaaatctagagtaggtacagtcatgttctcaggcttcacattcactcccactcactcactgtctcagccagggaaccttccagccctgcaagctccattcatggtaagtggcctatgcaggtgtgtaccatttaaaatcttttatactgtattttcactgtgttttttctatgtttagatacataaatacttaccattgtgttacarttgcctacagtattcagcacagtatgatactgtacaggtttatagcctaggagcaatgggctataccacagagcctagatgtaggcctcactctcatgtagcatatgtcttagttgcagtaaggaaggtgtgtagtaggctacaccatcaaggtttgtgtatgtatactttatgatgtttgcacaataacaaaattgtctaatgat

SEQ ID NO: 654854 - DNA, 500 bp, Homo sapiens
gtcatgttctcaggcttcacattcactcccactcactcactgtctcagccagggaaccttccagccctgcaagctccattcatggtaagtggcctatgcaggtgtgtaccatttaaaatcttttatactgtattttcactgtgttttttctatgtttagatacataaatacttaccattgtgttacagttgcctacagtattcagcacagtatgatrctgtacaggtttatagcctaggagcaatgggctataccacagagcctagatgtaggcctcactctcatgtagcatatgtcttagttgcagtaaggaaggtgtgtagtaggctacaccatcaaggtttgtgtatgtatactttatgatgtttgcacaataacaaaattgtctaatgatgcattttgcaaaacatatccctggtgctgagcaatgcacgactgtgtgaatagatgttcatttactcattaatttactcaacaaatatttatcgagtgcctactcc

SEQ ID NO: 654855 - DNA, 580 bp, Homo sapiens
ggcaggtggtgggagcctctcccagcaactcagggtgcaaggcaggaaccagccctgaacagggcaccatcccactgcaggacacactcacacacactcactcagactgggaccatctagacacgccacttcaaattcacccaccaggcacatccttgggacatgagaggaaatgagagtacccagggaaaatccatgcagactggggagaacgtgcaaactccacacagtggccctggctagaactgatttttttctcattaacattataacaaaacaacattgaacaaacaatgtttgttcttctgtattttaggttttgcaggccacatattctgtcwtattctgctgcatatttttctatgctttttttctttgtttaataaccttttaaaaatctaaaaatcattcttgagtcctaggctggatggtcatcagataacagcaacagcccccaaataggtctacttacttccaaagtgttcacctacactgtccctccactctgacctcccccactcatctgtcaatattagacatcttaaagtcccaaggctcctgttccttacttttcatttaa

SEQ ID NO: 654856 - DNA, 587 bp, Homo sapiens
actagtctcccccaaattagtacagaaacatccatgacaaaattacacatgtgtgtttgtacttgttttcacagctccttggaaaactctgtgttaggaatatctctaaaaacatagaaaacwctacagtggtttagaaattactaattttacttctaagtcattcataaaccttgtctatgaaatgatttcttaaatatttagttgatagactgctacaggtaatagggacttagcaagctcttttatatgctaaaggagcatctatcagattaagttagaacatttgctgtcagccacatattgagatgacactaggtgcaatagcagggatagattttgttggtgagtggtctcatgccttgagatctgtggtggtctttaaaatggtggccagccagatcaaggatgtagtatctcatagttctggactaaatactggctttccactttaggtgatatttttcttattagaaaaatattataactcatttattgtttgacagttatagattgaaatttcctaattctaaattttaagtggttcttcagtttcagtgctttatgttgtttgttgttggtttggc

SEQ ID NO: 654857 - DNA, 587 bp, Homo sapiens
actagtctcccccaaattagtacagaaacatccatgacaaaattacacatgtgtgtttgtacttgttttcacagctccttggaaaactctgtgttaggaatatctctaaaaacatagaaaactctacagtggtttagaaattactaattttacttctaagtcattcataaaccttgtctatgaaatgatttcttaaatatttagttgatagactgctacaggtaatagggacttagcaagctcttttatatgctaaaggagcatctatcagattaagttagaacatttgctgtcagccacatattgagatgacactaggtgcaatagcagggatagattttgytggtgagtggtctcatgccttgagatctgtggtggtctttaaaatggtggccagccagatcaaggatgtagtatctcatagttctggactaaatactggctttccactttaggtgatatttttcttattagaaaaatattataactcatttattgtttgacagttatagattgaaatttcctaattctaaattttaagtggttcttcagtttcagtgctttatgttgtttgttgttggtttggc

SEQ ID NO: 654858 - DNA, 587 bp, Homo sapiens
actagtctcccccaaattagtacagaaacatccatgacaaaattacacatgtgtgtttgtacttgttttcacagctccttggaaaactctgtgttaggaatatctctaaaaacatagaaaactctacagtggtttagaaattactaattttacttctaagtcattcataaaccttgtctatgaaatgatttcttaaatatttagttgatagactgctacaggtaatagggacttagcaagctcttttatatgctaaaggagcatctatcagattaagttagaacatttgctgtcagccacatattgagatgacactaggtgcaatagcagggatagattttgttggtgagtggtctcatgccttgagatctgtggtggtctttaaaatggtggccagccagatcaaggatgtagtatctcatagttctggactaaatactggctttccactttaggtgatatttttcttattagaaaaatattataactcatttattgtttgacarttatagattgaaatttcctaattctaaattttaagtggttcttcagtttcagtgctttatgttgtttgttgttggtttggc

SEQ ID NO: 654859 - DNA, 536 bp, Homo sapiens
tattaggccacaaaacaaatctttaaacattcaaaaaaaaaatgaaattctatcaagtgccttctctgaccacaataaaatgaaactagaaatcgawagcaagaggaattttgaaaaccatacaaacacatggaaattaaataatatactcctaaagtaccagtggtcaataaagaaactttaaaatttcttgaaacaaataataatggaaacatgatgtaagagctatgagatgcatcaaaagcagtactaagaggaaagtttatagctataagctcctacatcaaaaaagtaaagacttcatataaacaacctaattgggcatcttaaagaactagaaaaacaagagcaaaccaaacccaaaactagtacaagaaaataaataataaagattgacgcagaataaaagaaattgaaatgaagaaaaaaaaaacaaagatcaatgaaacaaaaagttttcttttttttttgagaaggttgacaaaactgacaaaccttcagctagacaaagaaaaaaagaagaccaaaataaataa

SEQ ID NO: 654860 - DNA, 594 bp, Homo sapiens
gtagctctgaatcttagaagtatgttctggaagtaaatattttataacttttagaatgtatacagtcattgaaattatgtggataaggaagattacttagggagggtgtatatgtcaaggtgagaaggtggaaaatattatttcataaatgcttagctcaccaattatttttacacccattacagttatttattattctttactgtctctgcatttatattcctccatttttactgtgtttttaattaatttcttttttctcaataggtgatgctagatgtatttattttatcactttattgaaacaagcgacttttagttttcattaacattttaattgcttttttgttttctatttttttgatttttactctttataatttccttccttctagttttttgaggtttacttcgttcttctttttctagtttcttgagttacatgctatggaaagagaaaatttaaagtgtcatttttttaatgtagttattatatactctatgttctgtgattcagtttttgatttttaaawattctgtttggctattaggtcatggttgaagccaaatactaagcctctaattagcacttgt

SEQ ID NO: 654861 - DNA, 607 bp, Homo sapiens
tttttttttcctaacagaatagccccttgctttaatatttttgagttagtaagctacttttttgcttttttgatttaggatatttctgaactgaactagtgaggtgtgctcacaatgaggtttcctctaaaagttattattattattttactttttttctgttagcaaagtagttgctgctacagattgaatgcatttgggccatccacrggctactgggttaaggatttttgataggaaggcctcagtgcttttgggatacgcccttgtttacactgacaacaaagtagtattggagtgttacaggattatggagaataccttcaattatcaattataggtttcaaatttaccttggcttttaaaggaatagggtacactttttttcttaactacttgtatatctctgtctttctcttctctgtctctctctctcctctctgcctctctctctctctctctctgcctctgccagccacttatgctgcaattctctcaaccactgtgaagggatctaaaaccagcagtaaccaagcatctatgtacgggaactggtctgggtgccctggctttacaggttaccttgtgccatacctttgaaacaagg

SEQ ID NO: 654862 - DNA, 494 bp, Homo sapiens
attttgtattcccaaaacataaagctcttatttgcctctatgataccaccatcttttatttctgattcatgtttctcttgcccatgactaagtctggtagagggatcctttaatacttcttcttcttttctccaaactgcatagttkcttgacagttatgaaagtattatcctataagtaatgaaaagtgattaagttttttgtttgtttttaggaaacatacaggctacctccaaactttttctttctttctgttttttaaacatgactattactggaagaatgactttgtttcagagtttcgcttaatttcagtctctcttagacattactttgcaaggatatgggttagataaacgagtgggagtatattgagagattgatgttttatcccagccactatgtaggagatgactgaggaagagtcacagttttcctctctgctcttcagttcctctaccacatgtcctatttgtcagaaaggggaggcgtta

SEQ ID NO: 654863 - DNA, 620 bp, Homo sapiens
tgacccaaacccacattttcagacctctccttcagtcccttttcactgtcctggcctttctggggmttacctcattaaaaacaatatcccttatcctttccaccaggatactgccattgctgaaaattataactcatatgtaaaaacccaaaatataatgagaatcttttgttgtagtttttctcgacataaattactatgactgtcttacatgcttcttatttctgctcctcattcagccatcatttatgagtgcggagttactagaatgttatcctttaaagactttgatgtaaatatttgtcagaatcagtacagtaaaatctgttactcatgtttcccaagtttagttcctggagttacctcaatttttcatctcttaatggctttatttttctcatcaagggatagttttgaagacaagtataagaactgatagctatcaataaaatctttcatttgtttttcttctccatggtttgcatttgttatagcaaccacacagataatgaactgcttctctcaaattcagtgagtctatggacaattgattattgtggtccacaggtgattataaaaagcctttataagatctactaataattctcatgtcaaaaact

SEQ ID NO: 654864 - DNA, 530 bp, Homo sapiens
tattttatgtaacattacccaagaaatggtgaaaagctaacctgaaaacaaaaaattacataatttagcttttaaaattccatttgtaagtgtagtaagagactggcatttgaaattaagaaaggtattaagaaacaaagcattactatttggagaagatagataattccttccaagactaaactatttagtgacagtatgtgagatgaagataatttggttgtttattaataagatgcaagttacttgcctaatgaaccattttaatcagtgayttatcagttaatcagtgttaatcagcatttcattactaaataaggacttcatgatgaggtggacaaactcatagtgttgcatgactaataagcagacatcaatttttttcaaaatgatttttattattgaggtctataatattcaaagtttgggaaaagactatctttaggttagcagaatccagtggcttcatgagagaagtccagcatttgtggttggatgattttgagatatagagtacttggtgaatgtcc

SEQ ID NO: 654865 - DNA, 597 bp, Homo sapiens
tcttttcactggttgaaggtctttccttgatattgatggctgctggcatcagggtggtggttgaaggttaggggagctgtggcaatttcttaatattagtcccaatgaagcttgctgcatcaattgactcttcctttcacagaataattctctgtagcatgcaatgctgattaataatagcattttacccactgtagaacttctttcagaattagttaagactctcaaaccctgccactatttggtcaactaattttatgtagtattctaaatgctttgttatcattttaacaatgttcacagcatcatcaccagaagtagattccatctcaagaaaccactctctttgytcatccataagaaacaacttctcattcattaaaattatgtaatgagattgcagcaattcagtcacattttcaggctctacttccaactgtagttctcttgctatttccatgatatatgcaattacttcctccacttcagtcttaaacttctcaaactcatccatgaggtttggaatcaactcttttcaacatcccattaatgttggcattttgacttccactcatgagtcacaaatattcttaatgg

SEQ ID NO: 654866 - DNA, 597 bp, Homo sapiens
tcttttcactggttgaaggtctttccttgatattgatggctgctggcatcagggtggtggttgaaggttaggggagctgtggcaatttcttaatattagtcccaatgaagcttgctgcatcaattgactcttcctttcacagaataattctctgtagcatgcaatgctgattaataatagcattttacccactgtagaacttctttcagaattagttaagactctcaaaccctgccactatttggtcaactaattttatgtagtattctaaatgctttgttatcattttaacaatgttcacagcatcatcaccagaagtagattccatctcaagaaaccactctctttgttcatccataagaaacaacttctcattcattaaaattatgtaatgagattgcagcaattcagtcacattttcaggctctacttccaactgtagttctcttgctatttccatgatatatgcaattacttcctccacttcagtcttaaacttctcaaactcatccatgaggtttggaatcaactcttttsaacatcccattaatgttggcattttgacttccactcatgagtcacaaatattcttaatgg

SEQ ID NO: 654867 - DNA, 603 bp, Homo sapiens
caactgtgggcactgcaaatgctagatggatatggtgatggagtaacttgtgagttctaatattgtgtccagagatggtgcgagaaagaatggcagaggtaagtgaatgaggttcaactgaaactaagagttacaactatcccttttctcttttccacatcttttttgtctccactttccaaaaggaacataaaccttggcagctgtcactgtaaggagcaaatatagtgcgtgccaatctatcccatttattggaaacatcaatttctgtgataagttaaaatgaaccactatggctaataggaagcagctaaacgtggtttgtgcaaaattattttagttaaattagtcgaaaccatacaatacataaaaggatcggtttttttttgtcattgatcaatgaaatatttatcctgcaaaacctacactcagcatgcctttatatattttagaaaaaagtccctactgagagataggtctgtaaaccatgtcatataagaaatataaagaagaaactttataaaattcatctggtagctgtcttcacmatacatttattttacattatgccaaaaaagaataagtagaaataacatgtaagaa

SEQ ID NO: 654868 - DNA, 609 bp, Homo sapiens
ctacccatttaacaggttagccaagctaccgatctattgcctgaaaataaatgagaataattttggagctaaaaaaatttagtatctaaatttttgtaaaggatctagctggaattctaaatataaaatgtgttaacagtcaacaaagaataacacaacaaatatcaaattttctctggtaggaaagtagataacttgaaaatcatcatcacatctctgtggaatttaggtaagttatggtacagaatctttgagtccaataagctgagctattttaaacctaattgtgcacaactatgtaaatgtttgaaaacctgctcccagtcaayagcaacaaacactgtccagaaaaattgaaaaaaaaaagtgttaacagaatcaacatcaagaaacaactttgattaaaaatattgtacccagcgtaggagtgttgtgttttcaactattttgtatcagtttctaaaattagtcacataataccatgttcttctttttatcttttttttctttttctattttaaacaaaatcattctttaagggctagagaaaatggcctatcttctgggtagttaaattacatgtcaaacatttcagagcttagaaaccag

SEQ ID NO: 654869 - DNA, 618 bp, Homo sapiens
agatcttagatttaaattctgagaatctagtttcattcttctccacgtggcttgacaattatccaggcaccatttgttgaatagggtgtcctttccccactttatgtctttgtttgctttgtgaaagatcagttggctgtaagtttttgggtttatttctgggttctctactccattccattggcccatgtgcctatttttatatcactaccatgctgttttggtaactatggccttacagtattgtttgaagtcagatratgtgattcctccagatttgttctttttgcttagtcttgctttggctatgtgggctcttttttggttccatatgaattgactcttcatcctcaaactgtctatcttagattttctccctcagaacccaggataatgcataaaggctttcattgatcttaggtatccattcattcttttaacaaatatttttgactgcctgttacgggaagggcaatggagatttagggcaaaattagataaacacagcccaatagataaacaagtgagaatgaattacacaaagcggagagtgctaagagcacataacaagacacctaatctaatcatgggtcagagaggacatccctatccaaacga

SEQ ID NO: 654870 - DNA, 583 bp, Homo sapiens
tatcataatttttaacattcaggaaataatcttctgcgtattgtcaaaacaatcgaaaaaataaacactaccatataattaaacgtaatgtggcttctatgtgctggtattattttgttttgttcttgcatgtgggacagaatatatrtgcctagaataaaactgacttttggttttaatgatttagttaagcacatgccttttatcatttcatcaagcccatggattttatatttcctttacatagttcaacaatgcaaatattaagtttacagataagaattcaattagcatttcaaagaggtcaaattaattccctctccgatagttgctgttatttcaggctacgaactgaaactcaattctgtaactatacaatttttaaaatcatacctatcaatttattcgagagaaacagcattggccctttttaactgaatagttttttaactaaaatcttgaatctctttttatatttcaattttctttaaaaggttgttatgagggactttaaagtaaatatttgtgtgcttgggaccatgcctggcatgtaacaaatgccccataaacataataataaata

SEQ ID NO: 654871 - DNA, 583 bp, Homo sapiens
tatcataatttttaacattcaggaaataatcttctgcgtattgtcaaaacaatcgaaaaaataaacactaccatataattaaacgtaatgtggcttctatgtgctggtattattttgttttgttcttgcatgtgggacagaatatatgtgcctagaataaaactgacttttggttttaatgatttagttaagcacatgccttttatcatttcatcaagcccatggattttatatttcctttacatagttcaacaatgyaaatattaagtttacagataagaattcaattagcatttcaaagaggtcaaattaattccctctccgatagttgctgttatttcaggctacgaactgaaactcaattctgtaactatacaatttttaaaatcatacctatcaatttattcgagagaaacagcattggccctttttaactgaatagttttttaactaaaatcttgaatctctttttatatttcaattttctttaaaaggttgttatgagggactttaaagtaaatatttgtgtgcttgggaccatgcctggcatgtaacaaatgccccataaacataataataaata

SEQ ID NO: 654872 - DNA, 548 bp, Homo sapiens
ttccagaacagctacaactcaactgtccccccctccatgcatgctattctttccttattggccttcttggttattagaaaaagtgtctgtgtattcagaacctcagccattcgaacaggcgtttctccctcattccacaactggctagcctccaggtactgtggtgttaccttagaaatgtctgttacctctgttctctggattccattttaacagatattgttctaattcctttgcataaggttttcccctttctagtttttctctttctttttcagtatagctttcataatttcaacaaaataccctttccaatgcaaatatctaatatcatcccctactcaaaaaaaatttgacttttaactgcttgcataataaactatattatttttagtgttttccacaatcaggactttatcaaatgtcacatcctccaggcagttcaagtactttgaagaattttctctcctctatgactttccacatgttgttttatttctccacgtatgtattctaygtatatttcaaaaatactaatcaaaagtcac

SEQ ID NO: 654873 - DNA, 637 bp, Homo sapiens
aatcataagctttctcccctgctatttaggtatgtaataaaatgagtattttcaaatcaaaaatatgcgattttgtaatatggtaagtccycttatctacttaaagaactttgaaaacacattactgatttgataaatctcaaaggcagccttagcacataaacaatatggattactgtgaaaaatctgctagactatctaaatatgtgaatttgtatagggttatattttgaggcataaaattacttaaagtgtgtcttctaaagagaaaaaatatgaggccatgtttttcagctccattaaaattttctataataataaatgtatcagcttttcctcatgactcaactcgttataggagaccagcgcagccatttgtgactggtttcatatttatacatttgtattatctattttctatcctttaatgtcttctcatattgtttccctaaaatagcaaaactaagacaaactattgttaggatgctttgagttgtatacttaatagaaatcccaacataaattattttaaacattgtaggatattcattagaccacatacctaaaaacacagagattcttattggtacaattagttgaactttgtgctgagtgggtcaacttggaatcagctttg

SEQ ID NO: 654874 - DNA, 637 bp, Homo sapiens
aatcataagctttctcccctgctatttaggtatgtaataaaatgagtattttcaaatcaaaaatatgcgattttgtaatatggtaagtcctcttatctacttaaagaactttgaaaacacattactgatttgataaatctcaaaggcagccttagcacataaacaatatggattactgtgaaaaatctgctagactatctaaatatgtgaatttgtatagggttatattttgaggcataaaattacttaaagtgtgtcttctaaagagaaaaaatatgaggccatgtttttcagctccattaaaattttctataataataaatgtatcagcttttcctcatgactcaactcgttataggagaccagcgcagccatttgtgactggtttcatatttatacatttgtattatctattttctatcytttaatgtcttctcatattgtttccctaaaatagcaaaactaagacaaactattgttaggatgctttgagttgtatacttaatagaaatcccaacataaattattttaaacattgtaggatattcattagaccacatacctaaaaacacagagattcttattggtacaattagttgaactttgtgctgagtgggtcaacttggaatcagctttg

SEQ ID NO: 654875 - DNA, 628 bp, Homo sapiens
taggttcttaataaatgtttactgaattgctagccatatgaaattaaatatataacatgtaagttaattattatgagaatgtgtgactataaagacaataactaccccctaccagttactgcctcaagcaataacaatgataaactttatctcaatctaaatttaaagcaggtaatttaaattttttcctaaataattgtcttttgttgaagcttaataaagatttttgttctttaaataaaaggcaatcctgatgagaattaaggaatttcactgtcatgaaatataacttctctaataaatatagggtgtaacatttccaggtgagtgggcatttcctaggagctccatgtagttctctggtagagtaatctactacatttcattctactgaattgaacacgatccttctccagaattggttctctcatttagtaggatctgggccacagattttaaaaaattataaatgcttaaaatacatctgggaactttatcactcacagtatgtttttatttgatggttctccttccgkgagtttacaaatctgactattgtttttacacaattaagaatattttgcttggtttatattttcagtaaagtatttctcactgtatgcaagaa

SEQ ID NO: 654876 - DNA, 628 bp, Homo sapiens
taggttcttaataaatgtttactgaattgctagccatatgaaattaaatatataacatgtaagttaattattatgagaatgtgtgactataaagacaataactaccccctaccagttactgcctcaagcaataacaatgataaactttatctcaatctaaatttaaagcaggtaatttaaattttttcctaaataattgtcttttgttgaagcttaataaagatttttgttctttaaataaaaggcaatcctgatgagaattaaggaatttcactgtcatgaaatataacttctctaataaatatagggtgtaacatttccaggtgagtgggcatttcctaggagctccatgtagttctctggtagagtaatctactacatttcattctactgaattgaacacgatccttctccagaattggttctctcatttagtaggatctgggccacagattttaaaaaattataaatgcttaaaatacatctgggaactttatcactcacagtatgtttttatttgatggttctccttccgtgrgtttacaaatctgactattgtttttacacaattaagaatattttgcttggtttatattttcagtaaagtatttctcactgtatgcaagaa

SEQ ID NO: 654877 - DNA, 636 bp, Homo sapiens
caaatgatcaaaatatcaggtatgcatttcatgccaaggattctgtttctcagaccctccaagatgaatgttttctcctggcactgagggcttagcattgttctctcccctcgagatacaaaataattttctccatcataaatcatcagacaacattcatttggctccattttaggagtatcctatgcatatgatagtacacattttcataggcaatgggyatctattttcaggcatagtaaatacatacatatttcaattttgtaagttacgatttgtttcttttacccaacctggatttttctcagcaacctccctaatttctgatttttaattttcttcctgaaacacctacagttcttcttgaatttcaggtgacaaatgtgtaatctgtctacccagtgactatgctcttttaaataattttttctctttctctcaaattccacttctttcttttcatagtatatttgtgttgatcattgctcctgaatgaacgagaattgaccacaaattgtctctttggggacagagctctcactatcaaaacatacttgttacattcattaatacattaaaatttagacaaacacttatttttagacaataaatcacaacgttctatgtttgaaataa

SEQ ID NO: 654878 - DNA, 636 bp, Homo sapiens
caaatgatcaaaatatcaggtatgcatttcatgccaaggattctgtttctcagaccctccaagatgaatgttttctcctggcactgagggcttagcattgttctctcccctcgagatacaaaataattttctccatcataaatcatcagacaacattcatttggctccattttaggagtatcctatgcatatgatagtacacattttcataggcaatgggtatctattttcaggcatagtaaatacatacatatttcaattttgtaagttacgatttgtttcttttacccaacctggatttttctcagcaacctccctaatttctgatttttwattttcttcctgaaacacctacagttcttcttgaatttcaggtgacaaatgtgtaatctgtctacccagtgactatgctcttttaaataattttttctctttctctcaaattccacttctttcttttcatagtatatttgtgttgatcattgctcctgaatgaacgagaattgaccacaaattgtctctttggggacagagctctcactatcaaaacatacttgttacattcattaatacattaaaatttagacaaacacttatttttagacaataaatcacaacgttctatgtttgaaataa

SEQ ID NO: 654879 - DNA, 636 bp, Homo sapiens
caaatgatcaaaatatcaggtatgcatttcatgccaaggattctgtttctcagaccctccaagatgaatgttttctcctggcactgagggcttagcattgttctctcccctcgagatacaaaataattttctccatcataaatcatcagacaacattcatttggctccattttaggagtatcctatgcatatgatagtacacattttcataggcaatgggtatctattttcaggcatagtaaatacatacatatttcaattttgtaagttacgatttgtttcttttacccaacctggatttttctcagcaacctccctaatttctgatttttaattttcttcctgaaacacctacagttcttcttgaatttcaggtgacaaatgtgtaatctgtctacccagtgactatgctcttttaaataattttttctctttctctcaaattccacttctttcttttcatagtatatttgtgttgatcattgctcctgaatgaacgagaattgaccacaaattgtctctttggggacagagctctcactatcaaaacatacttgttacrttcattaatacattaaaatttagacaaacacttatttttagacaataaatcacaacgttctatgtttgaaataa

SEQ ID NO: 654880 - DNA, 472 bp, Homo sapiens
agcaagctattcagggtaggctaaagtcattttcttaaagtttattctaaatttagaaacacttgcattttatcctttgttaataatagtcttctagctaacctaacaagtggacataataaaggttattaaacattcataggattcctaatttcaagaagaagttctataaatatagtatacgtgaaggtaatgtatyaagggttttgaaatttgggataaagctgtatgggttattttcattaaaatggttttctctgtctgaacaatctatgttattcatttctatatatcatgttctgatactgttttaagccattttttgaccttacagcaatcggattcattaaaatttattacagctttattaaatacaggtagcaatataaaatatgcccagactaaatcatttgtgacaattctggtgtcgatctatttaaaataaagataatgccctcatgctaacttagta

SEQ ID NO: 654881 - DNA, 644 bp, Homo sapiens
caaatatcaagccgtacaaaaataaagctgttatacgttttatcataatttattaatgatagagttaataagcaagcccatgattcctactgaaactattccaggatgtgtgttagctaaaaataccaatgttcacacaygtgtacatgcattgcccataattaacccatcacaaaagtagatctcaaattagaagatgaatgcaaaccacccttgagtgctaaaatcagaaaagacaaaatgaagtggttggtacttatgaactatatcaggtacctctagtgctgcctaagaatctctctctggggcccttgaacacttatctcattccagatctggcaagtactgattttgaatgattacatctttctttatgctcacatggcacatttttcctgcctccttcatgttttcctcttgttcctgagacaagagatgcaactgggacacatcagggcttccttatgtgcaacctgaaagtgtgtgttggcaggtgaggagcgggggagggcaggttcatggcctatgaagaaaacctgtcacagtggaaactggaaaagactgattaattattttttccttcccccaaggtagactgaggtacagcagttcatgccgccttttgaagatggcaaaattgcgct

SEQ ID NO: 654882 - DNA, 536 bp, Homo sapiens
taataaagaattagcacataaactttttcttgagattctacgccttttatagctaggagaataaccaattccaaaaaaatatatatatatatatagaccctttggattrcagataacttcattaaagctttggaaaagcaaggacacatagttcttcaaaactgtttctatggagatttaaggaataaatgtttgcagacttcagccttttaacttaaaaaaaaaaacaacctttctggttgcaaacacaataaagatcagtaagcccagcttctgagttatggttcatggtctgatacccggagccaagtcctctggctacttcagaaggagggaatgtaggttttccttctttgcacttccggtagatgctgtttacagatgggtggaagatcagcaaactttctcagggaaagcataatgtgattaaaacataaaaagcaaatagaagttggcaagggaaagggaagtgaggaatttgggagtaatactagatgactagaaatcaggatgactagaaatcaggagagcacagt

SEQ ID NO: 654883 - DNA, 529 bp, Homo sapiens
gaattccttttagacagagatcatcaactccctggagctttggatagtgcttggcacatagaagatgcacattaaatgcttagtaaaygtatggaaacatttcacatatgagtagaaagaaataatgcagaggaaattagatgtaagtacatatgtataattgtaattttacttatgattttgaacaatctatcttcttatagcagcttcctgctagttttacctaactcagagctaactttgtcttaccttctccaggaggtaagatttagaaacctactaaagtgctctcagacatcagttattttgtaagtcagagttgttatctatgatacattaacatgtttgatgatgtgaatgctcaaattttacaagatcttttgttcctcttctgcataattcagttcttttaagaacaacttatgtgttgtagttccatgtgtgtatttcagactagtcaacacaactaaaatctgatcatgattactagcttttcaaagtcatccttcatttcccaccaggtagcttt

SEQ ID NO: 654884 - DNA, 529 bp, Homo sapiens
gaattccttttagacagagatcatcaactccctggagctttggatagtgcttggcacatagaagatgcacattaaatgcttagtaaatgtatggaaacatttcacatatgagtagaaagaaataatgcagaggaaattagatgtaagtacatatgtataattgtaattttacttatgattttgaacaatctatcttcttatagcagcttcctgctagttttacctaactcagagctaactttgtcttaccttctccaggaggtaagatttagaaacctactaaagtgctctcagacatcagttattttgtaagtcagagttgttatctatgatacattaacatgtttgatgmtgtgaatgctcaaattttacaagatcttttgttcctcttctgcataattcagttcttttaagaacaacttatgtgttgtagttccatgtgtgtatttcagactagtcaacacaactaaaatctgatcatgattactagcttttcaaagtcatccttcatttcccaccaggtagcttt

SEQ ID NO: 654885 - DNA, 529 bp, Homo sapiens
gaattccttttagacagagatcatcaactccctggagctttggatagtgcttggcacatagaagatgcacattaaatgcttagtaaatgtatggaaacatttcacatatgagtagaaagaaataatgcagaggaaattagatgtaagtacatatgtataattgtaattttacttatgattttgaacaatctatcttcttatagcagcttcctgctagttttacctaactcagagctaactttgtcttaccttctccaggaggtaagatttagaaacctactaaagtgctctcagacatcagttattttgtaagtcagagttgttatctatgatacattaacatgtttgatgatgtgaatgctcaaattttacaagatcttttgttcctcttctgcataattcagttcttttaagaacaacttatgtrttgtagttccatgtgtgtatttcagactagtcaacacaactaaaatctgatcatgattactagcttttcaaagtcatccttcatttcccaccaggtagcttt

SEQ ID NO: 654886 - DNA, 349 bp, Homo sapiens
tagtcagaacctcagcatgcacaagccctctgtgaagtcctgtggccatccagctgatctgtacctgtaagttcttttcccatgggtttggattctcacactctgtgtgtccatacratatttgaccagactcaaatgacaccgaggccaatttctggagctttttttctgcacagctccttctcttgtactctgccctacaaattctagactctcagcctctcccaaccagtggagtgccaagggtggggtgggaggaccaatccaacctaggtgctgaaaatttaggagtatttgtctgaagagaattttaaaacagtgactcaaagtctatcttcttttatcacca

SEQ ID NO: 654887 - DNA, 536 bp, Homo sapiens
gtttacttttctgtactttcggcagtgcattttctagagggaagaaccrcaactgcttcaatgattaatagcagaagatttgtccaggaggaagaacacacacacaaaattttaaagtaggtacaagaatctggaagtcacagtcacctcgggccattctgcaaaggggcaaaatgttaccacgcctcgacagcccctgaggacatctctggttttagctttaaaaaaacactgtcactcaagttgagaggggtatgacttagtcaccaaaacagttaaattaatacatctccaattagaggaaaaaatgcttctcatgatcaagttggtatggcattgcttctagaaaatggacataaatagaaggttttatttcccgatgttggtaggtgaacaagggggtactgaaaatgtttttcatgtcacaccaaggctaggattgaaatgaagccggattcagaattggcagtctctgcttacccatgccagctttgccactcaaatttctgagtcattatggacaaggcactaaaccc

SEQ ID NO: 654888 - DNA, 592 bp, Homo sapiens
gtaatctacagtgacagagacaaaatagttgttgcctgcatacttgttggagggtggggaggaatgaaaggagagatgacaaatgggaaggaagcagcttttgcggatgatragtatcttcattaccttgattgttaggatgaagccacggatgtacacatacatcaagactacacactttgaatatgtgtagtatgtcatatatcaataaagttatttttgaaagattacctgatatgttaagacatgcttcctaaagttttccaccaaagtatccctacagaatgaaactctagggatctagggctataatccattacccatcaatcccaaaacccaaatttctttaagtctcatcctatcttctgaaaatcatacataggtggttccttcctagtcaaaaaacaattcgtgtttgtgtgtgtgtctatgtttaatattaattactagttaaaatgcataatattttaccccaacaaatgtttaaattaaacagataccacagaggatgcaccctgtttgctccacggcattcctgacccctggcacgcaacagaagtataaaaacattttagccagtacaactttactg

SEQ ID NO: 654889 - DNA, 607 bp, Homo sapiens
aatctacagtgacagagacaaaatagttgttgcctgcatacttgttggagggtggggaggaatgaaaggagagatgacaaatgggaaggaagcagcttttgcggatgatgagtatcttcattaccttgattgttaggatgaagccacggatgtacacatacatcaagactacacactttgaatatgtgtagtatrtcatatatcaataaagttatttttgaaagattacctgatatgttaagacatgcttcctaaagttttccaccaaagtatccctacagaatgaaactctagggatctagggctataatccattacccatcaatcccaaaacccaaatttctttaagtctcatcctatcttctgaaaatcatacataggtggttccttcctagtcaaaaaacaattcgtgtttgtgtgtgtgtctatgtttaatattaattactagttaaaatgcataatattttaccccaacaaatgtttaaattaaacagataccacagaggatgcaccctgtttgctccacggcattcctgacccctggcacgcaacagaagtataaaaacattttagccagtacaactttactgttataaaaacattttag

SEQ ID NO: 654890 - DNA, 371 bp, Homo sapiens
gaattcagatagaatataattatacattctttttttttttttttttttttttgagacagcgtctcactctgtcacccaggctggagtgcagtggctctatctcggctcactgcaacctctgcctcccgggttcaagcaattctcctacctcagcctcccaagtaactgagattacaggtgcgcaccaccacacccagctagtttttatatttttggtagagacgggtttcaccatgttggccargctggtctggaactgacctcaggtgatccacccacttcagcctcccaaagtgctgggattataggcatgagccagcatgcctggccctgtgtattctttttgataggaaaaactttcaagactcatt

SEQ ID NO: 654891 - DNA, 501 bp, Homo sapiens
gttttataagagaatggtagttcatttaaccaagttaaaaacagaggcatggtctaataaggacatattcgttccatggttctaacttccagaataaggtttctggtcttctctggcgaggtggtgataatggcctggcagggatacgcttggtggctggcagggagagagcagagagagaaccagtgggtgcctgcaatcgccttctacccaggaaacagggaggrgaccactgaactgagtgcttgagggagcttggtgccagtcccagctctgccccctgccaagacacagccccaggatttcactccaccatctcaaagggccactccctcccatagtgttggtacataactgttatcagctcttagcagaaggatttcctaccactttacatccctatgttggaatctcaatgggaagcttctctgatcgtcctacaggcagtggctggaacaagaaaagaagactgggccaaatgttaggagacctggctcttaa

SEQ ID NO: 654892 - DNA, 621 bp, Homo sapiens
aatgaggtcaaagcggtaatgagagagtcagaccaagcccagcctggtagcccctcgtgaagctctggctttctttctgagtgagttggacaaccattagactgagcacagaagcaacataatccatatgatataaaaggacagctttctccttctgctgtgctgaggatgtactatttggggcatgggcaggagcaggaagcaaggaaaccagtgagcagggtagtgcctaagacctgggtgggcatggtggggatactggaaactgttcagatttcagacgtattttgaagagagagtcaatgggatttgttcaaagcttggatgtaaggatgacagaaacatagtaaaggataactttaaggattttggtctaagcaactagaagtatggcactgccacttattgaratggggaagacagggaatggagctggttggggtacaatgcaatgaaaagttcaggaagtttgagataattaatatccaagtatagatactgggaaggctattggacaaaaagagtttggtgatcatgggggaggtcaggtctggagatataatcatgggagctgtcagtatacagtgggtacttaaatccttgggactggatgacatcaac

SEQ ID NO: 654893 - DNA, 449 bp, Homo sapiens
ttctggaagtgcaaaataacaaagttatttctggggagtaaggtgatctctgtctcactaccgtgcccctctcaatccccatacatacacacatattttatttttggggttcttttcagttttaggcatcagaaattgtgtgtgtgtgtgtgtgtgtgtgtgtgtgtrtgtaaaaacgtaaaatgtcccaactttgtgctcttccttgtggatgctgtctctctcttggcatagcaccctccttagaaactttcacactgtgtgatgcctggtgctatgtgatttccagaaatctggcatgagaattggtccttgtttgcgtttctgactgcagtggagctgttaataaagagattgatgataaagttgtcgaaaagagacagttgggcagaactgctccccatgagtgacagagggcatgatctgccttcacagccaagaaagttgcc

SEQ ID NO: 654894 - DNA, 618 bp, Homo sapiens
ggtgctatactactaaagattagcatattagatcaagttccaggaaggaagggagaggagaaagtgttaatagcatgtgccacctgtccatctctttttattcaagaaaaaaaatagctttcccagaaaccatacctagaatgttttctcttatttttcattggcaagactgcatgtgcagggaaattaatacaatgagtatttaaytagctgcattaccatagtgaacaaagatgggctcctgtagctaaggcaaaagggaggaaggatgttgggcagcaactatgagcttgtgcttcatgtagatgtgccagtcctccagagctttagttgagatctctagtgcactgattttttttctctgcctcctttaagacatttaactgtgcagcccaaccaatcaaaataaacatcttcattttctttaatatccataagtcaaaggagttgaatatttcagatttgcttcctcacacaaggtataactctaatttcctgtttgagtcagacaagagtgtgactcaagatataataatatagggtggggtccctttatagcataggcttggtgccttttcaactgaggcactttctgccatactctaagtttattcatgt

SEQ ID NO: 654895 - DNA, 520 bp, Homo sapiens
ggaattcaaaattaagtccaaaatatcttcaggttatggtttagtaccatctaaaaaatacayggggccaattttcagacagaagccatatactttcatatttttctttcaaaactaaataacagcaagaaaaagggaacatgaagaacacaaaaataggtgaaagtaagaaagaagagaggtcagtgaatactaagctggctggcaataatgtttctgctgaacttggagcccttcaacttctgctctgaagtctgcataagtcagggacagaggcaaaacctagagcaagtgctaagtaaggaatcttataagaaattatacttcataaaactgaaatctcactgggtttcaccctcagtgtaaggatttgaaaaagaaatacatactcaggcacaaaaatataatagtctcaaccttggcactggaaactggaaagaaaagagttcccttgagaactcataaccacaatccagacctcatactagtatgcaagccaaaccatgcagtctgtgcaatc

SEQ ID NO: 654896 - DNA, 603 bp, Homo sapiens
ctagcatgaatctaatggaagttccagaaaaataaaataaaataataggggaaatttagaagaatatggaaacagatatctgagaatattctagaatttttgaaagtctccaactatcagaagcccaacaatattaagcatgatataggaaaaaaatacagatacagacataatctccacagttagatacattattcattttggaaaacgacaggacaccatatttcaagaaaccttaaaatcagccaaggagataagatcaatcatcttgactgttttacagtaatgaaagctagaagcaagatatgctccatgtgctagaaaacaaaaacaaagagactgccagtctaaaattttataaccggtgacaaaacccttcaatactgaaggtgaaatcagtacattttgagacaaataaaaactgaaaagagtttgcctttgtaaacctgaatgtattaatcagagttctccagagaatagaaccaataggatgtctgtacacacacagacacagagagagagagtcacggagagagagataaaaagagagagaatgagattgattatggatattggcwcatacacttaatgaaggataagaag

SEQ ID NO: 654897 - DNA, 613 bp, Homo sapiens
acattttccaggagagcccatatgctaggccataaacaacatgggtattaaccataggaaaaggtcaagagaattgtaaagaaagcaattctgacttcactaaacccctgaaccaaccccagcagccacctacttatagatttcttattatgagctgaaaataaacgtctttttattaatctgctgttagtaagaatttctatttcttgttgaaagctgaaagtattcataaaaaattctattgctataccagaaagaggagaagatggtgcttaaaattttggcaggagactgaggctttttacaaaagaatatgcttttttcttccccacatacaccattctattaggacaatgttagaagtcacttgcactatggccatccacaatctcacttaatrctatgcacagcctgacagtagagcagcccagtcattcacccttattgctcaggctctcagtgtgcatgtgtaatgatgtcaaatccttcctgtttgttttcaaggctctcaacttgtagtttaaagcctttaataatgatctaaaaatcacttttaatttggtcgacaaactgaaaaaaaattagtcgatatcagaaagtggtaaacatcttt

SEQ ID NO: 654898 - DNA, 524 bp, Homo sapiens
ataccccttgaatctaaaataaatattgaaattattttaaagagagattgaggttcagtggtaggacaaaataatagaaaaatcagtggctcaagatccacctagtaggtagagccaagactaattatattcttatcacatgctgggaatgcaccattacttccacttgaacctattcttttctgtcttccactctaacatgcaaacttggagtaggtcaytgagttctatgaaccttggtagtatcgcctgtaaactaacgttattggactagatgatctctaagctccctattctaatggcccctgcttctataaataagaggtgagcaggttcttttaacaattcttgaaaagtaacaagtgagaaagcaatgctcagagatcatcaagttgggcttgatcaaccctagctaatgattaccacactttagtgtgcagcaaaatcatctgtagtatgcttaggattcaggctgcgtatgtggggaatatagcagagttatgtatataattacttcaatctca

SEQ ID NO: 654899 - DNA, 545 bp, Homo sapiens
ccccttctttaaaaaaacaaaaaactgacaaattaactgattagctgggcatggtggtacatgcctatagtcccagctactcaggagcccctgaggcaggaaaacaacatgagccctgatgtttgaggctccagtgagctatgattgtgcctgagtgacagagtaagaccctgtctaaaaaaaaaaaaaaaaaaaaaaaaaaaaaaamaaaacaaaaaaaaagagcatgctaagtacttctttggtggattaaaaaattggatacaaactcctcctaccccaggatgcaggttcctttgcaattaactttgctattcctcccatcatgacatggagtctatttccctcaccacttatatctaaactgcccttgtgacttggtttaaaaacgtagaatgtggcagaaatgatattatgtgacttcaaggtaggtactttgtagcatccccactccctctcttggaatactccctaaggccaccacataaggaggctggcctagcactgggggatgaaaggctggaggctggatgaaggagaaccaa

SEQ ID NO: 654900 - DNA, 657 bp, Homo sapiens
tgtacaattagaagaaaatattaaattactaactatcttagcttggggtccccccagaaagtagaccccgaggcaaatgcttctgtgttactactttatcgagaagtattatcccaggaaagcagagacactgagaaggtgaggcagggaagacagaagcaccagtatgaggtatgttttgaaagtggccaccagtaagtgcaactgattgcataatcactcaggactatcctccaaggagctgtgtacactcagtgtctcgggacattccaccaagaagagatggtaggggttagaatttatctaccaattcctttctcccatcaccaaaaaggttcattggacaggtactgtcccctgcacgtccacagtacataggggcaggcactgagaatcccacagcctctatcacctcattcaacagagaagccccagggcagtcggcaagtgacgtgtggcacaggcgggaggcgaggggctgtctgtggctgcatgtggtttgtctgaatctcatctgtggctggggcagagatgaaagggcctgaagataagtgagagcaagaggatatgaagcagcttattaaattaatctgatttaccaagtgaaataactcaccagggatgacctaatcctcacatrgacccacacaccatacc

SEQ ID NO: 654901 - DNA, 410 bp, Homo sapiens
tttgtatttctgtgggattggtggtgttatcccctttatcattttttattgtgtctatttgattcttctctcttttcttgtttattagtctggctagctggaggcatcacgctacctgacttcaaactatactacaaggctacagtaaccaggcatggtactggkaccaaaacagatatatacaccaatggaacagaacagaggcctcagaaataacaccacacatgtacaatcatctgatctttgacaaacctgacaaaaacaagaaatggggaaaggattccctatttaataaatggtgctgggaaaaccggctagccatatgcagaaagctgagactagatcccttccttccaccttatacaaaaattaactcaagatggattaaagacttaaatgttacacctaaa

SEQ ID NO: 654902 - DNA, 410 bp, Homo sapiens
tttgtatttctgtgggattggtggtgttatcccctttatcattttttattgtgtctatttgattcttctctcttttcttgtttattagtctggctagctggaggcatcacgctacctgacttcaaactatactacaaggctacagtaaccaggcatggtactggtaccaaaacagatatatacaccaatggaacagaacagaggcctcagaaataacaccacacatgtacaatcatctgatctytgacaaacctgacaaaaacaagaaatggggaaaggattccctatttaataaatggtgctgggaaaaccggctagccatatgcagaaagctgagactagatcccttccttccaccttatacaaaaattaactcaagatggattaaagacttaaatgttacacctaaa

SEQ ID NO: 654903 - DNA, 410 bp, Homo sapiens
tttgtatttctgtgggattggtggtgttatcccctttatcattttttattgtgtctatttgattcttctctcttttcttgtttattagtctggctagctggaggcatcacgctacctgacttcaaactatactacaaggctacagtaaccaggcatggtactggtaccaaaacagatatatacaccaatggaacagaacagaggcctcagaaataacaccacacatgtacaatcatctgatctttgacaaacctgacaaaaacaagaaatggggaaaggattccctatttaataaatggtgctgggaaaaccggctagccatatgcagaaagctgagactagatcccttccttccaccttatacaaaaattaactcaagatgsattaaagacttaaatgttacacctaaa

SEQ ID NO: 654904 - DNA, 594 bp, Homo sapiens
aaattgccctgggaattttatttgccttgatcacattaactaactacaatgcacataaacatttctaggatccagccagagagtgatctgagtttggttaagttagagacaattgatctttgagcaattgtctttactgacaggatagatgtaaaactgacaggattagatgacattagcttaaggatgtaagaaagagaaagttatggttgactctgacatttctattcaagtgactttatggaagatgacaactcgaattgagagaggatttacatgaagaaagctcggctgaggataatggatggagagatcaattcagaatgggcttcaatgaacttgtaaaatatccagttttagcaactcttaaatatgggttaggagctcagaagaaagaaggagggtttcaagtagtgtaagtcatgagaataaatggactttctgagcagagaaatgtagagataagagggcagggtgtgattcctgccccttaacagcttacagagtaaggagatagagatcaacacagaaacaactgcatgacataaagcagtattgaatccrtatagagagaattatatacaaagcaagaaa

SEQ ID NO: 654905 - DNA, 588 bp, Homo sapiens
gcattacttagaataaagttagccactgttatttaatattataatttttctcttctgcattaattatctctctaatataaggatgataaataacaaaccacacagccactaatgtgtaccacatagaatagaatttagctgtctcacactaccacttcacatgcctccccttctcccatcagctctatataccaggggttggggacccctggtatatgagatgtagatctacatctcaatctcaatctccatctcagtcttacatctcaatcacagcaggaggtgagccacaggtaagcattactgcctgagctgtgcctcctgtcagatcagcagcagcactggattctcataggagtgcaaaccctattgtgaactgtgcatgtgaggatctaggttatgtgccccttatgagaatccartgccccatgatcggaggtggaacagtttcattccgaaaccatcaccccgccaccctgacgcctgaatcccctgaaaaaattatcttccatgaaactggtccctggtaccaaaaaggctggggaccactgctatacacttatgattactcgtttgtttgtttcagtc

SEQ ID NO: 654906 - DNA, 482 bp, Homo sapiens
tggggaccactgctatacacttatgattactcgtttgtttgtttyagtctctatttcatttcccttaagctctgatccttggctacccatttatatttaagtttgaggcatttagatcgagaatggcagtttgaggtgcctgaacatctcttctctactatctgtaaacttgcagcattatatctttttttattcctttactattatcttggtaggttttcaagagggaaaagaggaaaacaaatgttcttaacccattaacttctggttaacttagccattaacttcacaaacaagcccagtcaaaatgcttcctgaacaaagtgtccctatgaagggcatacagctctcaactaactaatgttttcagcactcaagctagtcagcttctctgttaatcaatctttcccactaaaactgtttttaaagattctgctttctcttggtttttcatgcagacctctaattactcagtcttatat

SEQ ID NO: 654907 - DNA, 620 bp, Homo sapiens
gatacagctcaaaaatatttttaatatatcaaaaagcttaaaggtattcaaacattgggattacatttattcatagtgtaaacttcctcaaaggtaaatgattatttggacagaatctcaaaaaaatgactccagaaatagaaaaataatcatcttgggaggtgaaaagaacaggatgcactccactccataatgttacgttgcagttcctcagaaacaaagaagcaaaactgttattatttaactatatatctctaattgctatttaatttttaccttctgtttcttaatccaagagttacaaaaagacaataaaaataaaaagttaaaaatgagaatgatgaattttatttaattattctttaatgaaatacattttaaactacccgtttcttttgaaaaccttgcctatacttttttctagtatgattctaaatgcctgtcaccactcactttaaagcctgttaccagtaacccattctgagtaactatttcctgccctgtttgaaacagatttattttgctatatttgcaaakggaaaagaggaaaattttgagaaagttaccactaaacagcagagtacacattacaggaatcattttatttactaagtaacttg

SEQ ID NO: 654908 - DNA, 345 bp, Homo sapiens
aataatatctaatacagaaaggatagtggaatcaacttgtgtaaaaaaaagaaaaaaaagtttccgaaaaaaatgccactgcagaggctaaaaaactgtaataatattttatctcagatgcacccaatatcggttaccagatagtccatgatctttccacatgaaaatgcatattactaaccatggcaccttatactgcgcatgaaaacccagggcatataggtagattctgcaactcttttgaggagggccaacacaatgacccaagtctgagtcaaccttcaccatttagagrgatttgtaacctcagtcagtttgcttgttctttctgaggttccatgtttt

SEQ ID NO: 654909 - DNA, 553 bp, Homo sapiens
tatctttacagtttttagttcagattccatttatctgtgaaattttcttcttctccactacaaagtctcctgcattactacttttaaacttttcagtctaagggtcatatatctaaatttcttgaaatgatccgatttatctgcttcacatttagaaagcatctgtagttcaagtgtagtgaaggctaattagaacatttctaagtcatgtacatctatgaaagattaaaattgattggatgtggcggaaagaacattggctcgggttgaaattctgcttttcctactttctaatacatggtctttgaaatccttttacctttatacatatgtattatttgtgaaatgataataacacacacctggaaggtgtattatacatgggaaattatcctttaatcaactagacaatgcctggcacagaataagcactcactaaataatagctatcaatattagaaaacactcaccactacttgcctgatttttcatttcaattcaagtcagtactacarataggtagtgtcttctatcgccaatcaattttgcggat

SEQ ID NO: 654910 - DNA, 550 bp, Homo sapiens
accagggagttgaaggttgcagtgagccgagatcgcgccactgtgctccagcctggtgacagagcaaactccgtctcaaaataaaagaaaaaaaaattaaactttggctatgctacatgtcattaataaaacacatcttgtccagctaagcatttttaaaattttacgtgcaaaacacacacacatacatacccaaaaattgttggcaaaaatccagggaatcagacagagttatttttctcccaaaatctaactctgctttaaaaaataaacacagagatatcagccttctaatctcatactcaaaggatttatctttttcaagccaaagatatttggaaattaagttgaagttgkatatataagctagttctatacttaaagggtatatggataacagaatctaagggtattgtcattttcttataaatggctttatttttaccagaaattaatgttctttgtaactctaataacatacattaacaaaatgaagaaaactaaaattacctacaaatctcatgacccagagtaaatcgttaatgtttaa

SEQ ID NO: 654911 - DNA, 597 bp, Homo sapiens
gaattactaagttccaacacagcatcagtattcggaactctccatgcccatgttccctgcatctgccagacaatgacaagctcaaaatatttctaagagtagcgtaagagtgaaaaatgcacatctagaatttggttcctgcaggtccctgggtattaatgcatgcataccaacaagataaactccaaatgtctaaatgtttggacaccacccataaatgatgaaaatttataagaactgtcttacatatattcttgaagtctttcaaaaaacagaggtaatatggcacagtgttataaaaacactttcattcccatgaggctactgttctggtcaccaccagttcaaaggccactgcatcatctgtctacagatggtcgtggctttgtgctagaggtatcttctcttttgattacatcttgagaayagagtaggtaataatccgggctaggatagtggggacaaactgattctattgacaaggttgagtctctctcatgctcacacaacaactccaataatgttcaaagcatacattctcttgcccaccaaccatctacaattggcaaactcagaaagaaaatgttcagttgtttc

SEQ ID NO: 654912 - DNA, 542 bp, Homo sapiens
tattttgactatgtacatattattcattaagtcaggtaatatactatgattatatttaatttcttatacaactttttgtctgtcctggaattaataattgtcttatttttttcatatgctttgtttaaacatctgactaagtttcccataccctccaacatgcttctattgaagacagttttctatagaggcatctttcagattattcttgctttcacytgttttgcattggatcccatacatcctgaataccatccttccttctcctagtttgcttcctccttttagtggagcatttccaccagcaaggcccaccagcccttccaccaacaccttgacagtaatcagggttgtctaagtcacaggctcttgtagatttctcaggaagaactcataggattgccacttcctaagtttgggcatggtcataaagcatgtctgaactgtgtatgtgaaggtaagtttggctggatataaactccttagctgacattttcttaagtattgtaattattattctgttgttctcgggctaacatact

SEQ ID NO: 654913 - DNA, 509 bp, Homo sapiens
gaacaaattatacggagaatggaaccaaattttaccattttcccccagaatcaaagccatggaatattttcaggacaaggataacttttaagccccagcctcctcagatcaatctttgtgtgagcccatcagatgtactgacaagactagagacaaggtgaaagccacactaggaagggagtaaaggaccatttattttatcaggagacctctgtgtctaccttcatacaagacaactgacatgagagacacaaaggtaagacagattgaccaaggattctaccccaacctccttccccaggtgcaagagtgtgtggccgccgcttagytaaggtgcaatactatgcaacagtgtgtggccgcctagttaagctctttacttggcaagccaccagccacttgggacagacaactgggtcaccatggccccctgacatcaacactgttcagacaccagagagaataaaacaggaatttaatccaaagattggttttggagaaccacgctc

SEQ ID NO: 654914 - DNA, 524 bp, Homo sapiens
acactgctcttctttggctaaattatgtcacataaaacctcccagagaaatgaaaaagagcacagttatgaacaagacatataaagttcccaaactcattcaaaagccttgccaatatactcatcccagtactgaacacattttcaaatcagccactctgacctttctaatgagcatattaccagaatcgcaactgtcataaaaggaaagagatcttattaaccaagaaagtttatatcccacgtaagcctcacacattaaatattgcataatccatgcactgaaaagcaggaaggatcaatattctaagtacaggaatctcaaataagcttaaatgaatgtttttatatttgtataataatggcatactctgaactctaaattatgagtaaacattttaatacaaagcatataagcacttttccttatttttsagaatttacttcaaactgttaattatgcctttgatgcctgatccattatacatgggttataccataaattaaagtcaaaaatgggtacca

SEQ ID NO: 654915 - DNA, 524 bp, Homo sapiens
acactgctcttctttggctaaattatgtcacataaaacctcccagagaaatgaaaaagagcacagttatgaacaagacatataaagttcccaaactcattcaaaagccttgccaatatactcatcccagtactgaacacattttcaaatcagccactctgacctttctaatgagcatattaccagaatcgcaactgtcataaaaggaaagagatcttattaaccaagaaagtttatatcccacgtaagcctcacacattaaatattgcataatccatgcactgaaaagcaggaaggatcaatattctaagtacaggaatctcaaataagcttaaatgaatgtttttatatttgtataataatggcatactctgaactctaaattatgagtaaacattttaatacaaagcatataagcacttttccttatttttcagaatttacttcaaactgttaattatgcctttgatgcctgatccattatacatgggttatacyataaattaaagtcaaaaatgggtacca

SEQ ID NO: 654916 - DNA, 588 bp, Homo sapiens
cctttctttttcctataaactttcagggataaatctcagagtgacttagcatctagaaaataaagttctggcttagcagtagctataaccctacagcattgtgaagttaattatttggttttaaggttgtgttttatcctctaatcttcctcattttaaagcaaaattgaatcggccactttgggtttaggctatttcaaacacaggatgaaacataaagttcctgaagtcctcaaggagacataaaatttctggggtgccaagagatagaatttccagggcacagatttccttgaggcctggaagccgctgacagtcacctcctttgtacaggaygggggcctccgtcctttttctccttatgccgtttaggatcatggtaaagcagaggtcctggagtcaaattgttccacctcacctcttactacacattttgctttaggcaaataaccctgcctctctctactgccattttctcatctatgaaatggggatattaatcataacagcttcatagagtggttgcagtaattaaagagatagtacacatacagcatttagaaaaggtcttgacatttagtaagtgct

SEQ ID NO: 654917 - DNA, 581 bp, Homo sapiens
aattgaatcggccactttgggtttaggctatttcaaacacaggatgaaacataaagttcctgaagtcctcaaggagacataaaatttctggggtgccaagagatagaatttccagggcacagatttccttgaggcctggaagccgctgacagtcacctcctttgtacaggacgggggcctccgtcctttttctccttatgccgtttaggatcatggtaaagcagaggtcctggagtcaaattgttccacctcacctcttactacacattttgctttaggcaaataaccctgcctctctcyactgccattttctcatctatgaaatggggatattaatcataacagcttcatagagtggttgcagtaattaaagagatagtacacatacagcatttagaaaaggtcttgacatttagtaagtgcttaagtgtttttattatttcccatattttatatagcatagaatgaatctaagtagacatgaagatggcacttaaaatactaattaaaaaatacatgtatcattgaaagtactttgagaaatgaattactctacgtctggtcaagaatgcattctatta

SEQ ID NO: 654918 - DNA, 581 bp, Homo sapiens
aattgaatcggccactttgggtttaggctatttcaaacacaggatgaaacataaagttcctgaagtcctcaaggagacataaaatttctggggtgccaagagatagaatttccagggcacagatttccttgaggcctggaagccgctgacagtcacctcctttgtacaggacgggggcctccgtcctttttctccttatgccgtttaggatcatggtaaagcagaggtcctggagtcaaattgttccacctcacctcttactacacattttgctttaggcaaataaccctgcctctctctactrccattttctcatctatgaaatggggatattaatcataacagcttcatagagtggttgcagtaattaaagagatagtacacatacagcatttagaaaaggtcttgacatttagtaagtgcttaagtgtttttattatttcccatattttatatagcatagaatgaatctaagtagacatgaagatggcacttaaaatactaattaaaaaatacatgtatcattgaaagtactttgagaaatgaattactctacgtctggtcaagaatgcattctatta

SEQ ID NO: 654919 - DNA, 579 bp, Homo sapiens
tttaataaaaatcattgctctatcatttttaaggaaagaagacctcatctctattttttgcagaataaaacaccttaacttagatactaaaattcttatcttggtcttcacattcaaaagagagatttgttcctgacttataaagcaaacattcctaaatgatgctctcccaatctaataaattcagcatttagtggyttataacaagctttttaacaaaattactactgggtaagagtaataatgacataaatactaagaatggaagaatgacataaatgcaagactgacataaatattaagttaaattcccaattactttttctttctttaaatataagtcgatttgtagacttacacaggtcttctatgggaaggttacagaaaaaaagcaatgcttcatacaaaacaattaggaatctttcccttaagtcttacaaccatataagtacaaattgtactttaaagtgtcatgtggttttatataatatatacataaaataacatactttatatgtaaaatcatatgatactttatatatacgcaataaattgaattgtctaacctattaaccaatt

SEQ ID NO: 654920 - DNA, 579 bp, Homo sapiens
tttaataaaaatcattgctctatcatttttaaggaaagaagacctcatctctattttttgcagaataaaacaccttaacttagatactaaaattcttatcttggtcttcacattcaaaagagagatttgttcctgacttataaagcaaacattcctaaatgatgctctcccaatctaataaattcagcatttagtggtttataacaagctttttaacaaaattactactgggtaagagtaataatgacataaatactaagaatggaagaatgacataaatgcaagamtgacataaatattaagttaaattcccaattactttttctttctttaaatataagtcgatttgtagacttacacaggtcttctatgggaaggttacagaaaaaaagcaatgcttcatacaaaacaattaggaatctttcccttaagtcttacaaccatataagtacaaattgtactttaaagtgtcatgtggttttatataatatatacataaaataacatactttatatgtaaaatcatatgatactttatatatacgcaataaattgaattgtctaacctattaaccaatt

SEQ ID NO: 654921 - DNA, 609 bp, Homo sapiens
gtacaaattgtactttaaagtgtcatgtggttttatataatatatacataaaataacatactttatatgtaaaatcatatgatactttatatatamgcaataaattgaattgtctaacctattaaccaattgaagtaagattaaggagtatatttgtatttgaaatgtaaatgatgctttttccacttagtgatttattgcttttaagtcacgttgaaaaattacaggtattatcagcataaaccactggcctcccaagattcttttctcttttaaaatttgtgtcataaagttgatagatacgttaagacaaagttttcagtgattatccttttttctttctatcagaggctttggagatctttttattttcagagaagtaacagctctaaagcaaagcaaaatcatcaaacaagcacatgcaaatgaacagatcattctgcagataaattaaaattgtagtcctgggaagataaaagacctcaattgactcacaggtttaggtagtaagtttcatattttcctcagaaacttaagtgactatggtcattaccctatgtattttagaaaaatatttttaaggctaggttcttcccaagagatggtcat

SEQ ID NO: 654922 - DNA, 609 bp, Homo sapiens
gtacaaattgtactttaaagtgtcatgtggttttatataatatatacataaaataacatactttatatgtaaaatcatatgatactttatatatacgcaataaattgaattgtctaacctattaaccaattgaagtaagattaaggagtatatttgtatttgaaatgtaaatgatgctttttccacttagtgatttattgcttttaagtcacgttgaaaaattacaggtattatcagcataaaccactggcctcccaagattcttttctcttttaaaatttgtgtcataaagttgatagatacgttaagacaaagttttcagtgattatccttttttctttctatcagaggctttggagatctttttattttcagmgaagtaacagctctaaagcaaagcaaaatcatcaaacaagcacatgcaaatgaacagatcattctgcagataaattaaaattgtagtcctgggaagataaaagacctcaattgactcacaggtttaggtagtaagtttcatattttcctcagaaacttaagtgactatggtcattaccctatgtattttagaaaaatatttttaaggctaggttcttcccaagagatggtcat

SEQ ID NO: 654923 - DNA, 486 bp, Homo sapiens
taggaactggtggcagaagcaactgtgaaagcactttattctgtgacaggaagaaagggaactaaaacctagcaactaatctaacatttagagacagtggaccaccactaacagcaacaaaaacaaacaaaacagacaaacttgatcatgcttaagttatgctttaataagacaacttctaatattcttcaagcaaagtagcctggaatcctacaggagtgaagttacctagaagcctgaggttaaatgggcatggaaatgtggctacmtaaaaacgtattttattttagtgaggaataaagaggatgaagaatagaagggttaactcaggatacaagacataagttgtcttcagctacggaacattggttgggacaaataatgttcttatctggagaggagatagaaaacagatgaaaaggtggttataacagataacaatttgccctattttattctgcagagtgagaaattatggaaacacag

SEQ ID NO: 654924 - DNA, 486 bp, Homo sapiens
taggaactggtggcagaagcaactgtgaaagcactttattctgtgacaggaagaaagggaactaaaacctagcaactaatctaacatttagagacagtggaccaccactaacagcaacaaaaacaaacaaaacagacaaacttgatcatgcttaagttatgctttaataagacaacttctaatattcttcaagcaaagtagcctggaatcctacaggagtgaagttacctagaagcctgaggttaaatgggcatggaaatgtggctacckaaaaacgtattttattttagtgaggaataaagaggatgaagaatagaagggttaactcaggatacaagacataagttgtcttcagctacggaacattggttgggacaaataatgttcttatctggagaggagatagaaaacagatgaaaaggtggttataacagataacaatttgccctattttattctgcagagtgagaaattatggaaacacag

SEQ ID NO: 654925 - DNA, 581 bp, Homo sapiens
tgcatttttttcacttagaagaatgagcattttccacattcttaaacagttttctcaaacatcattttattcattgtgcaatattacatcctaggatgttctataatttaagaaagtaaatgcaaattgtaaatatttaaactgcttctttttttaaatttgtgtaacttttatattttatttttattgatatatgatagttgtacatatttataccatacatgtgatattttgattgcatacaatgtgtaataactaaaacagggtaatttagatatccactacctcaaacatttttcatttctttgtgttggaaacattccaaatcctctcttctgactatttggaaaaatactctaaattaatgttaactgtagttgccctagaaatatactataaattaatgttaattatagaacttattccttctatctaactgcatttttgtatccatgagtcaacgtctctttacaccccctgccccactatgctttccaycctatggtaaccagcattccactctctacctccatgaaatcaacttttttatctcccacttataagtgagaacttattatatt

SEQ ID NO: 654926 - DNA, 594 bp, Homo sapiens
tatccctttttaaaattctcctagcctggtacttgtggattatgtcaaggacagcacaagctacttatggaacaaagattttgcttaagtatccttcctgaccaattagatttttatcctttatcactagacgtaggtgtggctaggaggcttctatcaaactcaagaaacttwcatttttgccccacatttatttagggactagaatgttccctctccaatcactcctgagaattacacacatgtggacattcactcagtcctccagactgccaggaatctgtgtgattgtatttgtaagcatagcttcctaagaagttgctcttggttcagtgtagtttgttatttagctagtgtttgcttagaggttttgcttaagcttcttgtgccagtaaggcttcaaccctttgtcaatggaattgtgtgtggctttaagaatgttttcatttctgccccacacctttctctgattttcttctaagtggatgcagccagtacatatccacagcgtctcctattcccaggactatctatgattccagtagggctcttatctgtctcttgcctgatcctctttgataaacatgttgactc

SEQ ID NO: 654927 - DNA, 594 bp, Homo sapiens
tatccctttttaaaattctcctagcctggtacttgtggattatgtcaaggacagcacaagctacttatggaacaaagattttgcttaagtatccttcctgaccaattagatttttatcctttatcactagacgtaggtgtggctaggaggcttctatcaaactcaagaaactttcatttttgccccacatttatttagggactagaatgttccctctccaatcactcctgagaattacacacatgtggacattcactcagtcctccagactgccaggaatctgtgtgattgtatttgtaagcatagcttcctaagaagttgctcttggttcagtgtagtttgttatttagctagtgtttgcttagaggttttgcttaagcttcttgtgccagtaagscttcaaccctttgtcaatggaattgtgtgtggctttaagaatgttttcatttctgccccacacctttctctgattttcttctaagtggatgcagccagtacatatccacagcgtctcctattcccaggactatctatgattccagtagggctcttatctgtctcttgcctgatcctctttgataaacatgttgactc

SEQ ID NO: 654928 - DNA, 594 bp, Homo sapiens
tatccctttttaaaattctcctagcctggtacttgtggattatgtcaaggacagcacaagctacttatggaacaaagattttgcttaagtatccttcctgaccaattagatttttatcctttatcactagacgtaggtgtggctaggaggcttctatcaaactcaagaaactttcatttttgccccacatttatttagggactagaatgttccctctccaatcactcctgagaattacacacatgtggacattcactcagtcctccagactgccaggaatctgtgtgattgtatttgtaagcatagcttcctaagaagttgctcttggttcagtgtagtttgttatttagctagtgtttgcttagaggttttgcttaagcttcttgtgccagtaaggcttcaaccctttgtcaatggaattgtgtgtggctttaagaatgttttcatttctgccccayacctttctctgattttcttctaagtggatgcagccagtacatatccacagcgtctcctattcccaggactatctatgattccagtagggctcttatctgtctcttgcctgatcctctttgataaacatgttgactc

SEQ ID NO: 654929 - DNA, 594 bp, Homo sapiens
tatccctttttaaaattctcctagcctggtacttgtggattatgtcaaggacagcacaagctacttatggaacaaagattttgcttaagtatccttcctgaccaattagatttttatcctttatcactagacgtaggtgtggctaggaggcttctatcaaactcaagaaactttcatttttgccccacatttatttagggactagaatgttccctctccaatcactcctgagaattacacacatgtggacattcactcagtcctccagactgccaggaatctgtgtgattgtatttgtaagcatagcttcctaagaagttgctcttggttcagtgtagtttgttatttagctagtgtttgcttagaggttttgcttaagcttcttgtgccagtaaggcttcaaccctttgtcaatggaattgtgtgtggctttaagaatgttttcatttctgccccacaccttyctctgattttcttctaagtggatgcagccagtacatatccacagcgtctcctattcccaggactatctatgattccagtagggctcttatctgtctcttgcctgatcctctttgataaacatgttgactc

SEQ ID NO: 654930 - DNA, 562 bp, Homo sapiens
tggtaaattgatcctcactgagcacaggaccagagctcactccctgagggctctgttcataatgcctccatcctccagcaaacaccaagagaccttctccctatttctgctccttcattctttgatggctaacatagaaaaggctacctctcctctccaggacaatcagacagtctcagagaaacttcaggtttgtgatccccttttgtccatgaaaggagatgatgcaatggacaaagtttccrggattggtaaagcctaggttgtaattcaagtcctaggctccttactcaaatccactgtttttctactatgcctgagttgcctaccccttctcataaagggaaaagctgttcttattttcaaggactttgcagaaagtaaataggtgtaatgatatgtagtcaaaatcaagtgaagcagatggatgtgtgctgctgagatcagaacaataatgcttccgatccacactgcctttttgagctagccttggggaaaaagtaaaacatcagagaaatgcttttgtctcatattatgtattatagcacaggagctggctaac

SEQ ID NO: 654931 - DNA, 636 bp, Homo sapiens
tttagccctgtgccaggtaaacactgctgctgctctctgtacagaggagctaggtaataaaaggtgagtaacattacactcttgttagaaatatcttttttctgtcacacgctcttgatctacttaagtcaagcgtcaaatggtgacagcacacagagaatcattttcacacccttcttgttttctagggcagctttgttagactctcaaagtcgaaaaattgccctgagggggaacttgcctggaaattttgccttcgtgtataaatgtcaaactacccaactggcattttttttttttttttgagacagagtttcactcygtcacccaagctggagtgcagtggcacgatcacggctcaccacaacctctgcctcccgggttcagttgattctcctgcttcagcctcccaagtagctgagattactggcacatatgaccatacccggctaatttttgtagtattagtaaaaacgaggtttcaacatgttggccaggttggtctcaaactcccgacctcaggtgatctcctgcctcggcctcccaaatagctgggattacaggtgtgaaccaccaagcccagcccccaaatggtattttcatctgagagacaaatgcaacaaacatcacctctag

SEQ ID NO: 654932 - DNA, 636 bp, Homo sapiens
tttagccctgtgccaggtaaacactgctgctgctctctgtacagaggagctaggtaataaaaggtgagtaacattacactcttgttagaaatatcttttttctgtcacacgctcttgatctacttaagtcaagcgtcaaatggtgacagcacacagagaatcattttcacacccttcttgttttctagggcagctttgttagactctcaaagtcgaaaaattgccctgagggggaacttgcctggaaattttgccttcgtgtataaatgtcaaactacccaactggcattttttttttttttttgagacagagtttcactctgtcacccaagctggagtgcagtggcacgatcacggctcaccacaacctctgcctcccgggttcagttgattctcctgcttcagcctcccaagtagctgagattactggcacatatgaccatacccggctaatttttgtagtattagtaaaaacgaggtttcaacatgttggccaggttggtctcaaactcccgacctcaggtgatctcctgcctcggcctcccaaatagctgggattacaggtgtgaaccaccaagcccagcccccaaatggyattttcatctgagagacaaatgcaacaaacatcacctctag

SEQ ID NO: 654933 - DNA, 633 bp, Homo sapiens
tccacagcgtctcctattcccaggactatctatgattccagtagggctcttatctgtctcttgcctgatcctctttgataaacatgttgactctgccatgtgacatgttgataccagaaacatggtgctatcagcaacttcttaattgttctccatcagcatctctgtggtttctgacaatgcctatagacatggaactcttgaagctctgttccaaataaaggtaggcccctcaggtggagctgcagagttttcatccttatggcatgcctttcttcctggcagaacttctgtgccagtgcacaagagcagggacagcagcccacttctcccaagatgatatgcctgctctctgagtgggcactgagaagagtcgagtctctggtcatcttggcttgccttttctggcacaaacgactgctgtacaagcaagctaaaagacagaggtgataagagggcgctagtattctcagcctgttcctgctcactctacaagtagatgctaggtagggaaagatagcctcatcctctcctcagagtctactaggaacaaagcttctgcaatacttaagtcctaacgctcccagggtgaaacctgaaaccayagccctccacctaaaagtgagggaagat

SEQ ID NO: 654934 - DNA, 580 bp, Homo sapiens
ctccaatttttattacaaaagcatctgattctgatgcaaatatctgcagacaatattttggaactccacattctactccatatgcactgtcatcagtgatgcacgttctgttacctcatcttcacaattccatctgataatttaaccataccctcctcctcatcactttctacagcctcaggtcaggctttcaccatttcttacttggattgttaaaatgacacagtaattacttctcagaaccactaccatagccttctraaaagtcaattttcttcatagtctctaatttaccacttcaatagttgccaactaactataatatatattccaaattgctttgattgatatctcagatctttgaaaattcttatctgacttttctgtccttactgaaaactctcccttcttcacgactccacgaatctatggtatatttcaaacatactagatattttctgttcacttctatgtcacaatattttaggctcccataaattcctacatataattatttctgcctagaattttcttctggtttctcttagcagtttctattgcctttaaagtctctatttat

SEQ ID NO: 654935 - DNA, 580 bp, Homo sapiens
ctccaatttttattacaaaagcatctgattctgatgcaaatatctgcagacaatattttggaactccacattctactccatatgcactgtcatcagtgatgcacgttctgttacctcatcttcacaattccatctgataatttaaccataccctcctcctcatcactttctacagcctcaggtcaggctttcaccatttcttacttggattgttaaaatgacacagtaattacttctcagaaccactaccatagccttctgaaaagtcaattttcttcatagyctctaatttaccacttcaatagttgccaactaactataatatatattccaaattgctttgattgatatctcagatctttgaaaattcttatctgacttttctgtccttactgaaaactctcccttcttcacgactccacgaatctatggtatatttcaaacatactagatattttctgttcacttctatgtcacaatattttaggctcccataaattcctacatataattatttctgcctagaattttcttctggtttctcttagcagtttctattgcctttaaagtctctatttat

SEQ ID NO: 654936 - DNA, 580 bp, Homo sapiens
ctccaatttttattacaaaagcatctgattctgatgcaaatatctgcagacaatattttggaactccacattctactccatatgcactgtcatcagtgatgcacgttctgttacctcatcttcacaattccatctgataatttaaccataccctcctcctcatcactttctacagcctcaggtcaggctttcaccatttcttacttggattgttaaaatgacacagtaattacttctcagaaccactaccatagccttctgaaaagtcaattttcttcatagtctctaatttaccacttcmatagttgccaactaactataatatatattccaaattgctttgattgatatctcagatctttgaaaattcttatctgacttttctgtccttactgaaaactctcccttcttcacgactccacgaatctatggtatatttcaaacatactagatattttctgttcacttctatgtcacaatattttaggctcccataaattcctacatataattatttctgcctagaattttcttctggtttctcttagcagtttctattgcctttaaagtctctatttat

SEQ ID NO: 654937 - DNA, 580 bp, Homo sapiens
ctccaatttttattacaaaagcatctgattctgatgcaaatatctgcagacaatattttggaactccacattctactccatatgcactgtcatcagtgatgcacgttctgttacctcatcttcacaattccatctgataatttaaccataccctcctcctcatcactttctacagcctcaggtcaggctttcaccatttcttacttggattgttaaaatgacacagtaattacttctcagaaccactaccatagccttctgaaaagtcaattttcttcatagtctctaatttaccacttcaatagttgccaactaactataatatatattccawattgctttgattgatatctcagatctttgaaaattcttatctgacttttctgtccttactgaaaactctcccttcttcacgactccacgaatctatggtatatttcaaacatactagatattttctgttcacttctatgtcacaatattttaggctcccataaattcctacatataattatttctgcctagaattttcttctggtttctcttagcagtttctattgcctttaaagtctctatttat

SEQ ID NO: 654938 - DNA, 632 bp, Homo sapiens
agcaaatgctatcaaacatggtagaagtatgggtggccgggtgaggtagctcacgcctgtaatccrgcactttgggaggccgaagggggtggatcacccgaggtaatgagtttgagaccagcctggccaacatggtgaaatcccatctctactaaaaatacaaaacttagccgggcatggtggcatgtgcctgtaatcccagctacttgggaggctgaggcaggagaattgcttgaaccaggaaggcagaggttgcagtgagctgagatcatgaaactgcactccagtctaggcgacaagagcaaaactctgtctcaaaaaaaaacaacaaaaaaacaaaacaaaacaaaacaaaaaaaatgtatgggtgattctaacatttataataaaaaaaatttaaattaactgttatgactccttcaataaaagagtctatgagaaaaatctagattaagccataggttaagtggtgaatttaacagggactaagcaaagacttcgaaatagtgacaaatgtcaattaatttgaatttattcacaacatcccttgatagcaagttattcaaataaactatgaagcctgagatatgtggtgtaccagaatcatcaatatgattaattttgtaaaagca

SEQ ID NO: 654939 - DNA, 632 bp, Homo sapiens
agcaaatgctatcaaacatggtagaagtatgggtggccgggtgaggtagctcacgcctgtaatccggcactttgggaggccgargggggtggatcacccgaggtaatgagtttgagaccagcctggccaacatggtgaaatcccatctctactaaaaatacaaaacttagccgggcatggtggcatgtgcctgtaatcccagctacttgggaggctgaggcaggagaattgcttgaaccaggaaggcagaggttgcagtgagctgagatcatgaaactgcactccagtctaggcgacaagagcaaaactctgtctcaaaaaaaaacaacaaaaaaacaaaacaaaacaaaacaaaaaaaatgtatgggtgattctaacatttataataaaaaaaatttaaattaactgttatgactccttcaataaaagagtctatgagaaaaatctagattaagccataggttaagtggtgaatttaacagggactaagcaaagacttcgaaatagtgacaaatgtcaattaatttgaatttattcacaacatcccttgatagcaagttattcaaataaactatgaagcctgagatatgtggtgtaccagaatcatcaatatgattaattttgtaaaagca

SEQ ID NO: 654940 - DNA, 632 bp, Homo sapiens
agcaaatgctatcaaacatggtagaagtatgggtggccgggtgaggtagctcacgcctgtaatccggcactttgggaggccgaagggggtggatcacccgaggtmatgagtttgagaccagcctggccaacatggtgaaatcccatctctactaaaaatacaaaacttagccgggcatggtggcatgtgcctgtaatcccagctacttgggaggctgaggcaggagaattgcttgaaccaggaaggcagaggttgcagtgagctgagatcatgaaactgcactccagtctaggcgacaagagcaaaactctgtctcaaaaaaaaacaacaaaaaaacaaaacaaaacaaaacaaaaaaaatgtatgggtgattctaacatttataataaaaaaaatttaaattaactgttatgactccttcaataaaagagtctatgagaaaaatctagattaagccataggttaagtggtgaatttaacagggactaagcaaagacttcgaaatagtgacaaatgtcaattaatttgaatttattcacaacatcccttgatagcaagttattcaaataaactatgaagcctgagatatgtggtgtaccagaatcatcaatatgattaattttgtaaaagca

SEQ ID NO: 654941 - DNA, 632 bp, Homo sapiens
agcaaatgctatcaaacatggtagaagtatgggtggccgggtgaggtagctcacgcctgtaatccggcactttgggaggccgaagggggtggatcacccgaggtaatgagtttgagaccagcctggccaacatggtgaaatcccatctctactaaaaatacaaaacttagccgggcatggtggcatgtgcctgtaatcccagctacttgggaggctgaggcaggagaattgcttgaaccaggaaggcagaggttgcartgagctgagatcatgaaactgcactccagtctaggcgacaagagcaaaactctgtctcaaaaaaaaacaacaaaaaaacaaaacaaaacaaaacaaaaaaaatgtatgggtgattctaacatttataataaaaaaaatttaaattaactgttatgactccttcaataaaagagtctatgagaaaaatctagattaagccataggttaagtggtgaatttaacagggactaagcaaagacttcgaaatagtgacaaatgtcaattaatttgaatttattcacaacatcccttgatagcaagttattcaaataaactatgaagcctgagatatgtggtgtaccagaatcatcaatatgattaattttgtaaaagca

SEQ ID NO: 654942 - DNA, 405 bp, Homo sapiens
ggcattcattctgtatgagaaaataatgcagttaattgtaacatagagggatgatcccaacatacttgttgaatcatatccccaaacccactcatatggaccatacaaattcaatcaataattaatactttggctgtaartatatagcaatttaatttttgagacaatacggtgtattggtataagcccaggttctggtgtcaaactaactcagcttgaatactagctctcatccatgttagctgtgtaaccatgaatacgtcattaactatttgaatgtcacagtttccttacatgcaacatgaagaaaaaaatagcacttacatcatggtatgagcattaaaaaaattaatgtatatgaaacacttagaatggagcctggcacatactaatcacttaattgtt

SEQ ID NO: 654943 - DNA, 508 bp, Homo sapiens
agatctcagtctcaactctaggcttgaaacaaccctgtgtttatttccagctcattgtagccatttgtagtatggccaacccaaagactcatcaaatgatgtagtgaaaggcctctcagaaactcggagaaagccaaacctgtcagcattgcaggtaacagggctgctgtctgagaatccagaagcaaaycttcaccttacctccaactcttcatgggactccagcttgggcaacagcagccactatggaccttgtggtttctaagcctgtaacagctgaagtcattgcagtgctgacaatgacttcaacagtcacaggcttaggaaccacaacagtcttctcaatattcctgaacgtgcctactgtagaagggcaatcacagaaaagcaagactgcaaagattgcaatacattcctatgtcatccaatgcacagatattgaaacatgaccacaaggaccaagaacaaccagagaaactgacatcactggcataaaataaaatgcaaa

SEQ ID NO: 654944 - DNA, 484 bp, Homo sapiens
aacaaccctgtgtttatttccagctcattgtagccatttgtagtatggccaacccaaagactcatcaaatgatgtagtgaaaggcctctcagaaactcggagaaagccaaacctgtcagcattgcaggtaacagggctgctgtctgagaatccagaagcaaatcttcaccttacctccaactcttcatgggactccagcttgggcaacagcagccactatggaccttgtggtttctaagcctgtaacagctgaagtcattgcagtgctgacaatgacttcaacagtcacaggcttaggaaccacaacagtcttctcaatattcctgaacrtgcctactgtagaagggcaatcacagaaaagcaagactgcaaagattgcaatacattcctatgtcatccaatgcacagatattgaaacatgaccacaaggaccaagaacaaccagagaaactgacatcactggcataaaataaaatgcaaactg

SEQ ID NO: 654945 - DNA, 544 bp, Homo sapiens
aaaaaaaaaaaaaaaaaaaaaacagagagaaaaaaaaagaaaaaccaccaacaacaacaaacttcgcttatgtgatttagttcacaaactttgatatgagaagatttcctggaatatttgaatgtgtccagtgtaataacatgaatttctaaaagtgataaagctttcctgtcagtatagaaaaagagagtcatggcagaagagaaggcctttttttttttttttttttttgagacagagtcttggcagtggcacgatcttggctcactgcaacctccacctcccaggttcaagcacctgcctcagcctcctgagtagctgggattacaggcgcccaccaccacatgggctaattttttgtatttttagtaraaacggggtttcaccgtgttagccagaatggtctcaatgtcctggcctcctgatccacccgcctcagcctcccaaagtgctgggattataggcacgagccaccgtgcccggctggggatgagcctttcaaagggtcccgtccactgttaatggcttaaaagaggaaggggat

SEQ ID NO: 654946 - DNA, 544 bp, Homo sapiens
aaaaaaaaaaaaaaaaaaaaaacagagagaaaaaaaaagaaaaaccaccaacaacaacaaacttcgcttatgtgatttagttcacaaactttgatatgagaagatttcctggaatatttgaatgtgtccagtgtaataacatgaatttctaaaagtgataaagctttcctgtcagtatagaaaaagagagtcatggcagaagagaaggcctttttttttttttttttttttgagacagagtcttggcagtggcacgatcttggctcactgcaacctccacctcccaggttcaagcacctgcctcagcctcctgagtagctgggattacaggcgcccaccaccacatgggctaattttttgtatttttagtagaaacggggtttcaccgtgttagccagaatggtctcaatstcctggcctcctgatccacccgcctcagcctcccaaagtgctgggattataggcacgagccaccgtgcccggctggggatgagcctttcaaagggtcccgtccactgttaatggcttaaaagaggaaggggat

SEQ ID NO: 654947 - DNA, 470 bp, Homo sapiens
tggttcagttccagggatcactccacctgatcagttagtgagaactgcttccaccactcatcactatcacagctatctttaagtaacgtcttgcctatgttttcctattataaagcattgtatctaattctaagttatcttatatatttacaaataaatactacttgatttcaaaagctagaataaaatagggttaataaaaactctcctataattaatctatttaaacaagccactgtcaagcttaaacaagaacttctgaggccctcatcttgtaattactatagccaaaccactgattgcttacaggactttcttgcatagtcttgggcatattattcaccaaattatgaaygactgtaagaacttggaaataaactagattaaataataaaaagcaaacttgcctgttttgtttcactttctttgtttacagacatcttctgaacactctcttactccaaaaatac

SEQ ID NO: 654948 - DNA, 565 bp, Homo sapiens
cttttgttcacggtgtctttcttgcttcctctgtaatatgtggctcttgttagaatgtgacaaggccacatagccccagagtattcatccgtgttgcttaatctcagcctcctttggccttatagaaattatttagaaatatgggtttcagccacaggaggccatgagtagtagcagtcacatcagaaaaaaataatatttgccaaaaagactttctaagagagttacaagactagaagcccactggtggaagataaggaggaaaaacacagcagtatgcattacttgcaacctcgctaactcacttatctagagcagctttaaatctgctgagtcagagtcccttcaaaactctggggatgattcagaactaaaacagaatttcttaaggtcrttatgggaaaataacaactccaatattcactcaaatttaaaattttgagtttgaaagagtagaggttgtgctgaaaccctttgttctccaaggaattcagactaaaccatctttcaacccagaaagtcacagatttcctgaagatggttctatctcttttgtcctatgaag

SEQ ID NO: 654949 - DNA, 461 bp, Homo sapiens
gactagtaagtttcaggaatagcagagtcagtagacagattatctgagttccactcagaaatttaccacttatacatttgtggccttaggcaaactatttatactatttatctgtaaaatgggagtaaaaatattcgattttttgaggagtctgaaaaatatagaaaataaggtgctttctttttgtcttctcccccaaagtaaagagatttataagtccatatrtgggttgatgctttccccaacaggtcccatgtggacaagccagtaagagttttcaacttgggtgccagcagtaaccggttatacaaaggaaactcaacattcctcttccccaaagtaaacctattgcaaaaaccccttccatctaataatagcaactcaaggttagtaaatgtgatttatttctctgtcttcaacacctatcatagtggttaaccggttataggagcttcacagac

SEQ ID NO: 654950 - DNA, 597 bp, Homo sapiens
ttggtatctataggcattctttttattttttagctgtacattgataaggtcgaggtagaatatatcttctgcttgagaaagttcttaaggcttggacatgggccagggcttctgtgtaattactttcatttacacacttagatgcattttagtaagagagtataagtaaaaatagatgtgaaaaataatggagatccagcactagataaagcagaggataaaactactggaaagctttgaactaacagggtgagtggccatggcaaggcatcctaaactttttagattccagtttcatctctagaaaaacaacttgctaattgtcctggctcataaccaaaggacaaagagaatgcaaagcagcagtcattgaatgctgtaattgtagtgaaaaccttgattatatttggttctcatttcaaaaatggtaaaaacatttaagatatatagtacggaattgaaattgtgtctccacaacaatgctgaagcaataaagatacctgcattttacctaaaatgctatagagatgmtagaaatccaataataaaagtaagataattgtacacagatttaagaacaaaagacatatgatcatt

SEQ ID NO: 654951 - DNA, 349 bp, Homo sapiens
gtacgcactgcagccagagctagtagaaactggttgttttctttatcaacaatgctatggagttagactaagaattcaatagtattcctagttacataccataatactcttccatttccaatactggatgcccattgacatggattctgctatctttgtattatagtgattccttttttgatgttaatagggttaatagataaacaagaggtgcataccagatcaaatagctacctatccacaagattactcggaraagcacaggatttatttgttacctatgcagccaaagttgcataccctttaatcacatcattctatcaccagtattattgaaaccacaagaaag

SEQ ID NO: 654952 - DNA, 628 bp, Homo sapiens
ataccaccctttccccatttttcttttcaaaatatccaagttatatttgcacatatttggrgaagaaattaaagattaagattgctgtttgagactttttctgagttgtagaaaataacattgtaccaagaaaaaaaaagaaaaaaaaacattaagtctttctgcagtccccacataaagtcattcacttagtgattttagatttaattcagccaatactgtcttaacactcacatgaatttatctgttaaatggagagtataaatcatcataaatattcttaataggagttgggccaaagggcttatttgaactcagttaattaatttttaaatagggcacaatctatcaatgaattccatatttttaaaaaagtaaagtttagtcacaaggaaattggatgtgggtgagaggacaggatatttatttatttcttttgggttttattgttttcattctgtttttcattaatgttgcataaaaatattatatcgaaaacattaagtgcaaattaactttgctcctttgctaaacttctaaaatagatgtattagttaagattccattcagtggggtgtaagagacacccagagttgttatggccaaaacagaaaaggagtatatttat

SEQ ID NO: 654953 - DNA, 628 bp, Homo sapiens
ataccaccctttccccatttttcttttcaaaatatccaagttatatttgcacatatttggggaagaaattaaagattaagattgctgkttgagactttttctgagttgtagaaaataacattgtaccaagaaaaaaaaagaaaaaaaaacattaagtctttctgcagtccccacataaagtcattcacttagtgattttagatttaattcagccaatactgtcttaacactcacatgaatttatctgttaaatggagagtataaatcatcataaatattcttaataggagttgggccaaagggcttatttgaactcagttaattaatttttaaatagggcacaatctatcaatgaattccatatttttaaaaaagtaaagtttagtcacaaggaaattggatgtgggtgagaggacaggatatttatttatttcttttgggttttattgttttcattctgtttttcattaatgttgcataaaaatattatatcgaaaacattaagtgcaaattaactttgctcctttgctaaacttctaaaatagatgtattagttaagattccattcagtggggtgtaagagacacccagagttgttatggccaaaacagaaaaggagtatatttat

SEQ ID NO: 654954 - DNA, 594 bp, Homo sapiens
caatctttacattacttgaaagscagagcaaactgtaagagatactaagtaatggaggctaagggggcactgtagttttaggcaagcaagtcaatttttctttttaaggattctctaaactcgccataatggaaacatgaagcaatagcagccgaagggacagaacacttagaagcacagaaaacatgtctcattcaatctacctttcccaactatgttaggttagccttgggatgttaaacctgccaaattattcccaaggctcagcctaatcaattttgggacattctctcccaaaaggagaaatcacatctctccagtttctcacacaaaaaaagcatttgcagcattgtccaatcctagcctttcctatttctgggccctacctggactacagggagtgtgtggaagtgtcaatctaacgaaagaaataaacttagagccccttttcaacctacattaccttctcagcagcccccagcagaatcacagtcatttttggctagcaagctgagaagatctgactaggtgcccatttcatccctgcctataatatataaaagtccaatggttgaggaaggggaggagaggggg

SEQ ID NO: 654955 - DNA, 601 bp, Homo sapiens
tccaggaggcaagaaatatttatacccacacaaaataacagaaaattatggttttctgtttctgcgttagtttgctaaggatgatggcttccagctccatccatgtccctgaaaaggacatgatcttattattcttcatgtctgtgtagtattccacagcatatgtacaccacattttctttatccagtctaccactgttggacatttatgttgatttcatgttcttgctattgtgaatgttgctagaatgaacatacgcatgcatgtgcctttgcggtagaataatttatattcctttgggtatatacccactaatgggattgctgagtcaatgatatttttgcctgtaggtctttgaggaatcaccacactatcttccacartggttgaactaatttatctcccatcaacagtaaataagtattccttttttttctgcaggcttgccagcatctgttatttttgactttttaataatagccattctgactggtgtaagatgatatctcactgtggttttgatttgcatttctttagtgatcagtaatattgagggttttcttatatgactgttagttgcatgtatgttttcttttacaa

SEQ ID NO: 654956 - DNA, 607 bp, Homo sapiens
ctgtcagtggagcattgaagtctcccactatcactgtgtgggagtctaagtctccttttagatcttgctttataaatctaggttctcctgtgttgagtgctgtatatgtagggtagttaggtcttctcattgaattgaaccttttaccattatgtaatggccttctgtgtcttttttgatcttagttggtttaaagtctgttttgtctgaaattagggttgcaacccctgttttttttttctgttttcttcatttgcttggtagattttcctccatccctttattttgagtgtattggtgtcactgcatgtaagatgggtcttttgatgactgcatatcattgggtctttcgttttgttcagattgccrctctttgctgtttaaatagagcatttagctcatttacattcaaggttagtgttgatatgtgtggatttaatcctgtgattgcatttttagctggttattatgcaagcttgtttgcgtagttgcttcatagtatcactggtctgtgtatttaactgttttttctattggctagttagtcgtttctttccatatttagtgctcatttcaagatcttttgtaaaatgggtctggttgtaat

SEQ ID NO: 654957 - DNA, 536 bp, Homo sapiens
atgggagaaaatatttgcaaattacatgtctggtaacggattagcatctagaatacataaagtattcttacaactcaataactaagagatatataatccaattttacccagtaggaaggttataatgaaaaagattgacaatgacaatgctggagattatatggaaaaagtagaactctcacataataccwgtaggaatgtaaaatactggagcttatttggaaaacagctggcattttctcgtaaatttaaacaaagagttataatatgactaaactgtttcactctgaggtatacactcaagagaaatgaaaaacgtatctatgaatgctcacagcagcattattcatagttgccaaaaagtgaaatagccaaatgtcaggccaggcacggtggctcatgcctataatctcagcactttgggaagctgaggtgggatgatcgcttgaggccagagtttaagaccagcctaggcaacatggcaaaacctcatctctacaaaaaatccaaaaattatccaagcatggtggcttgca

SEQ ID NO: 654958 - DNA, 449 bp, Homo sapiens
aatggctgaaatgtatagtatgtgaatgatagctcaataaagccgttttttgaagaagagtaagatggaattgactaagttagccaccaatacacagaaaaaattaggcacaagatttatttcaagcaaacaagtacttttagtgtagttgtccaattaagaaataaacatttgaccacttaaaaagttgaataataagtaattactttcttatctgtggaacagaaatttgattttcattgccactgtcatataactgtgtatatttcaggcaggtgcaaataaaaagtataacttgaccattccaactgttcaagtctgttaaataccataggattcaaaatggatgcatttayaatttaactgatagacggatagatagatagatagatagatagataaataggtacatagatcaaccaaaataaaaggagtgcctatgtaatcaa

SEQ ID NO: 654959 - DNA, 547 bp, Homo sapiens
atacttgaaactatgcttgatataaaccagtaaatatttcaaagaacttccctccaccttcaccrcagaagaccaactggcataagttaacaggtgttttgctttggtttaatttctccttccacagttatgaacccacaggcctgatgtctccaatatgtagacacacacacacacacacacacacacacacacacacacacaatttatccttgatttcaccagggatacagaaacattaacacagaaaatggtgaaactcatttacctgaaataaattccttaatgtaatacatcatttgttactgccctttatttgcatgtcttggatccaaaagaactgtctgcatcacaaaatttccctcttaacctgggactaaacacatcacatccctgggagacagaaggaggggtttgaatagtaccaccagtagagggcagtggcgtaccatgcacaaaacttggctggagcgaatgcctccaaacttgccttgcaacctgtagttaataaaaactgggcaggagagcaaagtaagtgggtttagat

SEQ ID NO: 654960 - DNA, 614 bp, Homo sapiens
tctgcagtagtgtgtgtgtgcttgagtgtgagtctgcagtggtgtatatgtgagtgggtgtgagtctgcagtagtgtgtgtgtgcttgagtgagtgtgagtctgcagtggtgtgtacgtgagtgggtgtgagtctgcagtggtgtgtgtgtgagtgggtgtgagtctgcagtggtgtgtgtgagtatgagcgggtgtgagtctgcagtggtgtgtgagtgagcgggtgtgggtctgcagtggtgtgtgtgtgtgtgtgtcttctggaggataggggattaggctgtttttcttacttccctttgtaggagaggaaatatgatttggtgacctaacaggttgttgttcccaacttcaacagctaaaaccttagactcgataaggsctccctcatgaatcctataacctgtctctgcaggcccaacataaaacaacatgagcagcgtttcagaaaacacgaattttcctccggtgatcagattttcacacagactctgtctccttacaaagtagtcctttacccctctttcactctaacgttgcaggtggcagcagtaagcattcatttcaagggcagagggatctttccattcagtcaggcacttttaaaccaca

SEQ ID NO: 654961 - DNA, 614 bp, Homo sapiens
tctgcagtagtgtgtgtgtgcttgagtgtgagtctgcagtggtgtatatgtgagtgggtgtgagtctgcagtagtgtgtgtgtgcttgagtgagtgtgagtctgcagtggtgtgtacgtgagtgggtgtgagtctgcagtggtgtgtgtgtgagtgggtgtgagtctgcagtggtgtgtgtgagtatgagcgggtgtgagtctgcagtggtgtgtgagtgagcgggtgtgggtctgcagtggtgtgtgtgtgtgtgtgtcttctggaggataggggattaggctgtttttcttacttccctttgtaggagaggaaatatgatttggtgacctaacaggttgttgttcccaacttcaacagctaaaaccttagactcgataaggcctccctcatgaatcctataacctgtctctgcaggcccaacataaaacaacrtgagcagcgtttcagaaaacacgaattttcctccggtgatcagattttcacacagactctgtctccttacaaagtagtcctttacccctctttcactctaacgttgcaggtggcagcagtaagcattcatttcaagggcagagggatctttccattcagtcaggcacttttaaaccaca

SEQ ID NO: 654962 - DNA, 599 bp, Homo sapiens
ttgttgttcccaacttcaacagctaaaaccttagactcgataaggcctccctcatgaatcctataacctgtctctgcaggcccaacataaaacaacatgagcagcgtttcagaaaacacgaattttcctccggtgatcagattttcacacagactctgtctccttacaaagtagtcctttacccctctttcactctaacgttgcaggtggcagcagtaagcattcatttcaagggcagagggatctttycattcagtcaggcacttttaaaccacaggactgttctccctgtaccactgccaaattcttcccggcaggagtttgagggaagcctaacagggcagagatgtatcttgtttgctggctggatttgttctcacctaacacagctaaggcaaagccatctattattgtctcctggttttgaatgttgtctgaggaatatggatagatagctcaagttccagcaaagatttttaagtcagcctacgtggatctttcctcccaagccccaccactgcagctccaggctaactgttgtttgtcttgggtttttgttcagcctggggctttccagttacgaaggctgattctaagac

SEQ ID NO: 654963 - DNA, 522 bp, Homo sapiens
gaccccattccaaataaggttgcattcacagacaccagggattagctcctgaatatgtgttttggggtcacacaattcaacctgcaacagattgcaatagaagggttaatccatggtgcatagagtcctaaattagatacctgaggctatcaagtcctccttccacctataattcggttaacttccgaaaaattgagcaactcatttcacctttttgcacttcatgtgcttcatttaaaaagaaagaaaaaagayatgatcatttctaagattctttgtaaatctagtttacaaaacactatgatatcatgtcctgctgactcagccatctctacctgcagtctagcttgagtattcctcctggatagttctctagcatcctgggcatgttgatatcacagcatctaacacagtgtattactacaattactaaattgtagtgcacagactttcttttgcaagaaaaaccgtgatgttattttattctagttcattgatgttgccttttattttagatcaatt

SEQ ID NO: 654964 - DNA, 522 bp, Homo sapiens
gaccccattccaaataaggttgcattcacagacaccagggattagctcctgaatatgtgttttggggtcacacaattcaacctgcaacagattgcaatagaagggttaatccatggtgcatagagtcctaaattagatacctgaggctatcaagtcctccttccacctataattcggttaacttccgaaaaattgagcaactcatttcacctttttgcacttcatgtgcttcatttaaaaagaaagaaaaaagatatgatcatttctaagrttctttgtaaatctagtttacaaaacactatgatatcatgtcctgctgactcagccatctctacctgcagtctagcttgagtattcctcctggatagttctctagcatcctgggcatgttgatatcacagcatctaacacagtgtattactacaattactaaattgtagtgcacagactttcttttgcaagaaaaaccgtgatgttattttattctagttcattgatgttgccttttattttagatcaatt

SEQ ID NO: 654965 - DNA, 631 bp, Homo sapiens
aaatatatcctataagacttcagatattgaaataatcacaataatgtaaagaatacaaaataattaagcttacaatatttgagaactattagtttaaagcatcttcaggaaacagtaacatgctacttttacaactttaagaagaaaaaattggaaaaaaaggaaagtgcaaaaaaaaattgctacatttatttacaataaaactaacaaattagggatagaaggaaattcacttaacctgaaaaagagtgtcttcaaaatccttaaacaaattgctttttataygtagatacattgaaaactttctctttaaggtaagaaataaagaaaagttgctgatccataccacatctattaaacaatgtactagatgttttagccagcccatcaagaaaagaaaaagaagaaaaaaagtagattaggaaaaaatgaactgtcattatttacagctaatataatataattttctgttacagaaaatccaatatgtatcagcagaaaaaaatttagcttaaaatgcacaatggcaatttttcaagaaataagaacaaaatataaaaagtaactatattgttataatcaaaacaagtcaatcataaaaatagaaaatatttattaaaattagccatca

SEQ ID NO: 654966 - DNA, 545 bp, Homo sapiens
ggaatgtcggactattgcaattcatttataatcagaaagaaactgcaatgtattaattgtttcaaattcttggtcactcttccctcacagagttggagttcatttttcttctatttgcctcagatggactgtgccttctgaaccaatagactatgttccaaatgataacatgactgttctgggtctagcttttaagaagactaatgacttttcctttttttgtctttgaatgcatatgcctgggacactgcctcttggaacccagcccttttgttttgagaagttcaagctatgtggtagagtcacatgcaggcctgcctgctagccagcaccaactaccagccttgtaagtgagtctttgagctcccagatgactacagtcccagctaataacttatggagcraaagaaccaaccaacttgatctggtcagctcgagaaccatgagagataataaaacagttgttacattaagccagtatgttttgggatggtttattttgcattgataatttaaatagtttaggatatgatcaaatagaactg

SEQ ID NO: 654967 - DNA, 680 bp, Homo sapiens
attccatttctgctgaatttaatgtttgtgaagattgccctacacatttgaaccatttttctactatattttcataacttgtaatgataatactctcattccacattatatatttgtttytatacaaaggtccttcacaagcctcaaatttttggacacttttgatgacttgtgatgtgttggggggcaaggcaaccacagataacaaacaccctgcaattgtggataagatccttcacaacagaaaggtgtccaaacacatacaccagcaaccctgctgagaaacattgtgctgatatgcaaggttagaaatagtatagacgatgcaggccataaggcaggataaatggcgagaaactctctgggtagatcaatccttaggtgtccctaaattataccttcctacatgttttaagtctgtcgctatgtagcttaataaaacataaaataaaatttatataggcataagtaccctctacctgatttaatttcccaattgttaatggtaattcaagaaaaatattaaaatacaccaaaagaaagttgttagaaggcccttgatgttcactcattgcataagcttccacccaatagtgattctcaaccttggaagcatgttgaatcattctgagtgcttaaagtgccaatgcccagcacttagtccagaccatttaaaccag

SEQ ID NO: 654968 - DNA, 680 bp, Homo sapiens
attccatttctgctgaatttaatgtttgtgaagattgccctacacatttgaaccatttttctactatattttcataacttgtaatgataatactctcattccacattatatatttgtttctatacaaaggtccttcacaagcctcaaatttttggacacttttgatgacttgtgatgtgttggggggcaaggcaaccacagataacaaacaccctgcaattgtggataagatccttcacaacagaaaggtgtccaaacacatacaccagcaaccctgctgagaaacattgtgctgatatgcaaggttagaaatagtatagacratgcaggccataaggcaggataaatggcgagaaactctctgggtagatcaatccttaggtgtccctaaattataccttcctacatgttttaagtctgtcgctatgtagcttaataaaacataaaataaaatttatataggcataagtaccctctacctgatttaatttcccaattgttaatggtaattcaagaaaaatattaaaatacaccaaaagaaagttgttagaaggcccttgatgttcactcattgcataagcttccacccaatagtgattctcaaccttggaagcatgttgaatcattctgagtgcttaaagtgccaatgcccagcacttagtccagaccatttaaaccag

SEQ ID NO: 654969 - DNA, 680 bp, Homo sapiens
attccatttctgctgaatttaatgtttgtgaagattgccctacacatttgaaccatttttctactatattttcataacttgtaatgataatactctcattccacattatatatttgtttctatacaaaggtccttcacaagcctcaaatttttggacacttttgatgacttgtgatgtgttggggggcaaggcaaccacagataacaaacaccctgcaattgtggataagatccttcacaacagaaaggtgtccaaacacatacaccagcaaccctgctgagaaacattgtgctgatatgcaaggttagaaatagtatagacgatgcaggccataaggcaggataaatggcgagaaactctctgggtagatcaatccttaggtgtccctaaattataccttcctacatgttttaagtctgtygctatgtagcttaataaaacataaaataaaatttatataggcataagtaccctctacctgatttaatttcccaattgttaatggtaattcaagaaaaatattaaaatacaccaaaagaaagttgttagaaggcccttgatgttcactcattgcataagcttccacccaatagtgattctcaaccttggaagcatgttgaatcattctgagtgcttaaagtgccaatgcccagcacttagtccagaccatttaaaccag

SEQ ID NO: 654970 - DNA, 680 bp, Homo sapiens
attccatttctgctgaatttaatgtttgtgaagattgccctacacatttgaaccatttttctactatattttcataacttgtaatgataatactctcattccacattatatatttgtttctatacaaaggtccttcacaagcctcaaatttttggacacttttgatgacttgtgatgtgttggggggcaaggcaaccacagataacaaacaccctgcaattgtggataagatccttcacaacagaaaggtgtccaaacacatacaccagcaaccctgctgagaaacattgtgctgatatgcaaggttagaaatagtatagacgatgcaggccataaggcaggataaatggcgagaaactctctgggtagatcaatccttaggtgtccctaaattataccttcctacatgttttaagtctgtcgctatgtagcttaataaaacataaaataaaatttatataggcataagtaccctctacctgatttaatttcccaattgttaatggtaattcaagaaaaatattaaaatacaccaaaagaaagttgttagaaggcccttgatgttcactcattgcataagcttccacccaatagtgattctcaaccttggaagcatgttgaatcattctgagtgcttaaagygccaatgcccagcacttagtccagaccatttaaaccag

SEQ ID NO: 654971 - DNA, 576 bp, Homo sapiens
taatctcttaatttactttttataaggataccgtgtgactatcatattggattagaggccactgttctctagtgtcacctcaytgtaacttgactaattacatctgcaacaactctatttccaaacaaggtaacattctgaagcattagggcataggatttcaatatatgaatatttgagggaacacaattcaacccataacagcaacattcaaataaatctttaaaatttccttaatgcatctagtacatttaaggaatatgattagtttagaaatatagtgagtggtcttaatgtttgaaagtaaacattttccaacggcatcactctatactctctagctgccttcatttgcattctattaacagaaatcagaaagacacagtatgtctcaaacaaaaaaaagcaacgatttaaaactaaatgtttactgactcaccacagttaatgaagtcagagagaaaagctaaagcactgtttactgccattaaataataatttgtctcaaccttccatctgggagagatatatgagcagtttgttgttcagcatgatattggaattttacaggcaaga

SEQ ID NO: 654972 - DNA, 576 bp, Homo sapiens
taatctcttaatttactttttataaggataccgtgtgactatcatattggattagaggccactgttctctagtgtcacctcactgtaacttgactaattacatctgcaacaactctatttccaaacaaggtaacattctgaagcattagggcataggatttcaatatatgaatatttgagggaacacaattcaacccataacagyaacattcaaataaatctttaaaatttccttaatgcatctagtacatttaaggaatatgattagtttagaaatatagtgagtggtcttaatgtttgaaagtaaacattttccaacggcatcactctatactctctagctgccttcatttgcattctattaacagaaatcagaaagacacagtatgtctcaaacaaaaaaaagcaacgatttaaaactaaatgtttactgactcaccacagttaatgaagtcagagagaaaagctaaagcactgtttactgccattaaataataatttgtctcaaccttccatctgggagagatatatgagcagtttgttgttcagcatgatattggaattttacaggcaaga

SEQ ID NO: 654973 - DNA, 366 bp, Homo sapiens
ctttctgggaatatttatttttaaaaaggtgattcactttggaatttctmttacttgaagttggaagcctttgtatgagttttctttctttttcctctgtgtctgcagctccctgtttgtttaatcacaatatgttttgtttaatatttcagtgctgtttatcaggacaccctaatttgattgttttcttttgtatttgtcttcaccaggtgtttcttgactacagcacatttcccacatgataaaattaaaggtctaattaatgcctttaagaacactggtgcacaattcaacacctaattttctgcagggggcatatttaggtgtttaactaggtggaacttggtgccaaagatttcatttgca

SEQ ID NO: 654974 - DNA, 458 bp, Homo sapiens
tgtgactacgtcactttttctatcactcaggatctaatcttgattagaagaccttttattattaaccataaattttctgaagccctgggataacatgggaaatgccccctgtttttaaaatgctctattacttaaaaaaaaaaaaaatctttctgccataggaccaatcttggacccgcaagtttcccaactctttttcctcaacttctatatccccagtgactgaaaactattgtatggtacaaaaagtacaaacgagagctcaaagatgggctttgatacctaaggaaaattaaccacascatttagtaaaacatagctaatcctggagatcagattttgtgtaactgtagtaagaagatggacagtgtggaaaaagcattggaaaaggaatagaagtgtggaacatgtggctttcatttaagaatgaaaaaaacgggaagaaaggaaggattttt

SEQ ID NO: 654975 - DNA, 436 bp, Homo sapiens
tgtgaggagggcacaagccattcatgaaagatactcccctaagacccaaactactctcatgcgggtctccacaccaggattacatttcacatgagatttgggggggcagcctccacctacatcatggtccatctactcaggtactttgcatgtcaaaatccaaacttctttgccacatgggctctctactaacaggctctagaataagcaaatttggaccacaacaacaacaacaaaaaagctgggagattctattatatgtaatgttttgtgaaaaacacataatgaggttcrgagagcgtaaagaactaggtccagctagatttcaaaattccatgtccaaaaatgaagtcaacatagttcctcaaacatttatgtttgctatatgttccttttctcatgagaaatactggcagctcccctacttcagaaacaa

SEQ ID NO: 654976 - DNA, 531 bp, Homo sapiens
tgttttaactggcctttcaaacaagaaagaaaccaagcaaatttattcaaaataaaatactagtaacacttatcacccattgcaggagcatttctttgcattaaataacatgagggaaatattaattcatacacataaaggaatttcaaaacatagcacctcaagcacaatagaattgagttggaaaggtatttttaaagggtaggccttggcccttctaatcatgctgcttacgtattttatacatgcggtaaaaggcactggtttcagagaagctactgtaaaatccaccatggccgaaacatgcaaatcagcacagaatgtttgctggagggtaagtcagagcaatgccattgaagtagcctstatatgcatgtctcattggtgacatcttgatctccattaatcaattcctatttgagataaatgcatctgcttgtatctcaaaagactagattcacggaaccgtgactaagatatttcatagatgctctccaaggactttaaaaggcaaaacgacaggaaatttac

SEQ ID NO: 654977 - DNA, 524 bp, Homo sapiens
catgaatatattcctcacttctgatcaaaagcagggagctcagactttaaaaaaataatggacagttagaattttttttacttttttaactcaaagtatatagacagtagtatctgtataactcattaattacttatgattttctattcttaaatttattaccttaaattttttttgtgattacacatgtagaatataccattttagagaaattagagaatgatcataaggagtgaataccaacaataaaaaacacaatctagagaaaatcactcttgacgttttgtagtgaaactatccaaaccttaattatattctacagtaaaaatgttctataaaatacttaacttggtctctagtgttgtacatttaggttgtttgaattttattcaatgagaaattgagcatataatgaaaatacatctcyctacaaatctctgattattccctagggtaggtttctagaaatgtcattgttgaattagaagtacacacatttacttttaaggaaagccattggataa

SEQ ID NO: 654978 - DNA, 608 bp, Homo sapiens
cactctttcaaagttcaaacagaactggtggttagcaaagcagcrtcacacaccatatcttcatcagctgctcaaaatattccagagtaaagcagaagggaaaataaaagggaatggttgctttgttttaagatgtactattagccaggccctatgatagctggtttatctgtttaatccacatattcaaaaggcagatgtgattccttctacttttcatttgtgttaactaaggctcagaggtgttagctagctccagccatatagctattgggtggtgcagaacagtttcaaatgattttatctttctgccacagtgagttctttgcttggaacatatgcttttcaagatatatcaataattgaatttagggattacatgataggaaatgaggtttttccctcctatatgttttactatcaagataatggtagtaatgaaaaccccaagaagagacaggtctagaaaactagcaacagtcattttaagagttctgcctacatgtaagatataaaaatgatgtaagtggctataccttctctagtttctgccttttatttctacaatgttcattaataaaagtgcctgatccaactgataaatcaga

SEQ ID NO: 654979 - DNA, 494 bp, Homo sapiens
ttatgatgtgtctctggaggagtgcagagaagtaaacaatggaaatttggggtaaaggcacgtttcaatacatttgactgtaaatgcaagaaaagagtagaaggaaaaggtgtgaacttgaggaaaatgtatgtatgtattatttctgagttgagagaattaagtacrtgtaaatgttaaggatggccagtcagaaggtcaagggacaacccagatgtgggcatggcaagagaaagatacaagaggataggatgagggcagaagtaggctgacttgcaaatatgggtatgagaggctatgagtcctcagcatactttttggcttcttttttctctttgaagtgagaagtaatgtcgttattcgaataggagaggaggtggagggttgaagaatgtaggagagttttgaaatatttattttaaagaatgtgagaagcaactaactagaagagacagcattgccagaaagttttggaaaagtggttgatgttgaac

SEQ ID NO: 654980 - DNA, 494 bp, Homo sapiens
ttatgatgtgtctctggaggagtgcagagaagtaaacaatggaaatttggggtaaaggcacgtttcaatacatttgactgtaaatgcaagaaaagagtagaaggaaaaggtgtgaacttgaggaaaatgtatgtatgtattatttctgagttgagagaattaagtacgtgtaaatgttaaggatggccagtcagaaggtcaagggacaacccagatgtgggcatggcaagagaaagatacaakaggataggatgagggcagaagtaggctgacttgcaaatatgggtatgagaggctatgagtcctcagcatactttttggcttcttttttctctttgaagtgagaagtaatgtcgttattcgaataggagaggaggtggagggttgaagaatgtaggagagttttgaaatatttattttaaagaatgtgagaagcaactaactagaagagacagcattgccagaaagttttggaaaagtggttgatgttgaac

SEQ ID NO: 654981 - DNA, 571 bp, Homo sapiens
gtcttaaaaatattattttagtattatagatttaatttggttcaaaatgaagaaaaaaaaagaggcataacacttgatgatgtgaaggctgattattgttattcatattctccttaccacttatttatcttttgtgttaaagttactaggatacacaaaaatgaaaaaaggaaccctcaaaattagtattggctctttttttgtatatagtaactgatacaattaaaactctttataaaagtaagaaaataggatttaattttgaagtcatttttttctgttttcactttttattaccacagttgattgagagctgattatacatctcgtataaataactaacataacattgtcacacaayctctaaattgtcacattctgtgtactacttgtactctgtaactctctgtgatgatatcaggtgtcatctctttctcttattttcagtctttctgactaaaacctaccttagtatatagtgtacacagtttctttccatgggcaaagctagtgttcttagtgaatacgtcttttgaaaaatgtcaaaattttgatggggtggaaaatgctt

SEQ ID NO: 654982 - DNA, 606 bp, Homo sapiens
tgcagtggcgcaatctcagttcaccacaacctctgcctcctgggctgaagggattctcctgcctcagcctcagaaatagctgagattacaggcgtgcaccaccacgcctggcttattttgcatttttagtagagacagggttttaccatgttggtcaggctggtctcaaactacagatctcaggtgttccacccacctcggtctcccaaagtgctgggattataggcatgagccattgcacccagcctagaactatatttagcaaacacattctacaaaagaagatatactgatgacatatacacctatgaagaactacatatcattagacattgtgtacatggaatgaaaagccacacttattggaatgaataggaaataaacaattccaagtgctagagaagatgtggtccaactagagttgttatacattgctcatgagaatgcaaaatgggacggcccctctaaaacacagcttgtctgtttctttaaacacacatttaccatagtatctaagaattttacttaaagacatttacacagtaaagtcartacatatattcacataaaaagttgtacacatttgtgtgaccactttattgatta

SEQ ID NO: 654983 - DNA, 532 bp, Homo sapiens
tcttaaaacaacaacagcaacaaaacagaaactcccatgacagcaatctaaatctgttggccacccaatgcagtacaaaacactaataggatgtcagcaaaatttcatcctccttcctccattagttaattaataaccagttgatatccctatcacggaagcatctcycagccaattttggtagaattctccatggacagcagtgttaaatgattggaactattgtaggggtgagttctgctaaacagcttgctcaagtttatgtaacacaaaagtagaattcaaagagcattttaatttccttttattttctggtcaatgttaagcctattttatacgaaaatattttattaagcccaattacagagcagagaattccactatatttagattatattttaattttatataacactataaactgcaataataatagtttacttatcaattacgcatcagtggctaaattaattattcttcagaaatactcatttactttcatgaatctagatctctttaaataaaattgagg

SEQ ID NO: 654984 - DNA, 500 bp, Homo sapiens
tggtactctatgctaccaaccaaatctaaactgacaagtgttttttgttctcctcagcttaagtcgtgggaaaattctttagttatctaagtgaaaccaaataaaccaaatgttaatgaattataagattgcatcaggatcttaacactcatggaaaatgataaagaaataacttagcaactagggtttcagttattcagccactgtggaaggataaagacaattattttggaaaagcacaagaagttacaaactattgtctaaagatacctttgattagccaggcgtggtgttgcatgcatgtcattctacttacttgggatactaaggtaggaggatcctttgagcccaagagctctaggctgcaatgagccctaattgtaccaatgtactccactttaatgsaagtgtttaaatgggctttgagtttcaagaagaaagaagaaacactggaatgcttaagtctgccatacttggggaagattaaataaaacaaggac

SEQ ID NO: 654985 - DNA, 377 bp, Homo sapiens
accactagccaaagaataaaagtttgcttgctgtggatagcactttaaaaacctaggagagtgctaaatattcaatattttttaaaattgtagtagtactagtagtagtagtggtggtagcaggggtaagagtggtagcagcggtgatagtagcagtgcttgtactcatggcttacattkattgaatgttttgtcacacaaactttctacattgttctaggtactccatcttaattattttgcttaatcatttctacaaatctataattcatgttctattattttgctattttaaaaatgagaaaaattaggtaaggagagttaaatttgatccataacatataatatttggagtagactgttcttgaaggcaggaa

SEQ ID NO: 654986 - DNA, 609 bp, Homo sapiens
atgctgaaacacaaaaatacagaaagaaaagcaatttctcaaatatcttctataagtacctataataatcatgtttctctttctttatggtccacttgttttttctttactaattagtggcatctcctgttttataattgttctttctcataacctagtctttgacttgtccagtaatggtcaccatctgtcttctatctggatcatttttctatataatcatcctagtagttctattcttattgtcaactgctgtagccccagaatttagattagttrccctaaagtcaagtatcagtgacaggagaataggacagcatgctcttctgttagtggcctggtaaagctgatggcaaggagataagcatctggaaggatactgtacgacatgaagaataaaaaagaggtgaaaattgcatgactgctgatgattgaaatagataataagtatccaccataaatactgacttgcatagagaaaaactaggtttagatatgatttttatgaaacatttttctggggtgctcagcatctaacaagttagacccttcaaggaaaactgttaatatctacattattcttcaagataaatttcaatcagagatatg

SEQ ID NO: 654987 - DNA, 609 bp, Homo sapiens
atgctgaaacacaaaaatacagaaagaaaagcaatttctcaaatatcttctataagtacctataataatcatgtttctctttctttatggtccacttgttttttctttactaattagtggcatctcctgttttataattgttctttctcataacctagtctttgacttgtccagtaatggtcaccatctgtcttctatctggatcatttttctatataatcatcctagtagttctattcttattgtcaactgctgtagccccagaatttagattagttaccctaaagtcaagtatcagtgacaggagaataggacagcatgctcttctgttagtggcctggtaaagctgatggcaaggagataagcatctggaaggatactgtacgacatgaagaataaaaaagaggtgaaaattgcatgactgctgatgaytgaaatagataataagtatccaccataaatactgacttgcatagagaaaaactaggtttagatatgatttttatgaaacatttttctggggtgctcagcatctaacaagttagacccttcaaggaaaactgttaatatctacattattcttcaagataaatttcaatcagagatatg

SEQ ID NO: 654988 - DNA, 599 bp, Homo sapiens
tcttaaatttgccagttaaaggtatttcaatctctttatttttaaagcaatctttttcaagttaacaaagttcattatgattaaatgtgcagtttttcacagttcctattcttgttcacttattgttgcaagttagtatgcagatgtagctgaaagcttatgtgttaacttgatgtagagagagctcagatccacgtgtgtcctcttgagtctcattagtcattgtttgagagatgttatcctgccttcatctgaaactttgcttttttctgctcttacagaaatgtgtggctgctgaaacatttaagctacattccattgactctgactgctggtgatctcctggtctggtacctgacactaccgactagctttattgytaaaaccttgaataacctttgggcaatttactgggcctcctctctttagcttcctaatattaggtatcctatcaatgcatgactcttgatagcttctattcctaattatcagcctaatccacaatttctgtttgaattcacctcactctatgaatgacctcacggaatggaagtagaagataagctcacttatgaataaaaagaaagataagctcactt

SEQ ID NO: 654989 - DNA, 544 bp, Homo sapiens
cctttcctattatacatttcccttaaaataaaaaaattgaacacatttatctttcctttagtccatcctcaaaataaaactcttcctttcctctctccttgattaccatccccaaakctactaaatgacaaaagggtttcatctgacctcactcattgtatgttatactgcatacagtttttaaccgacataaaaactacagaaacaggcaaaattcctaagtatgaagttgtagaaatttttataatgtaagggtatctgtgaaacaaccactcagaggtaaccactattctgatttctttcatcatagactgctttatctaatttgaaatttatatgaatttattcatgaagtatgttctactttgcatctaatttattttttgatattcatctgtattgtgtgcaaaggtggcttgttaagtctcattagctttatattatttagttaaatgcatatgctgcaactaattttttttattgtgctactgatgaacatttgattatttcccagtttttggttcttttgaatggtactgctatg

SEQ ID NO: 654990 - DNA, 544 bp, Homo sapiens
cctttcctattatacatttcccttaaaataaaaaaattgaacacatttatctttcctttagtccatcctcaaaataaaactcttcctttcctctctccttgattaccatccccaaagctactaaatgacaaaagggtttcatctgacctcactcattrtatgttatactgcatacagtttttaaccgacataaaaactacagaaacaggcaaaattcctaagtatgaagttgtagaaatttttataatgtaagggtatctgtgaaacaaccactcagaggtaaccactattctgatttctttcatcatagactgctttatctaatttgaaatttatatgaatttattcatgaagtatgttctactttgcatctaatttattttttgatattcatctgtattgtgtgcaaaggtggcttgttaagtctcattagctttatattatttagttaaatgcatatgctgcaactaattttttttattgtgctactgatgaacatttgattatttcccagtttttggttcttttgaatggtactgctatg

SEQ ID NO: 654991 - DNA, 544 bp, Homo sapiens
cctttcctattatacatttcccttaaaataaaaaaattgaacacatttatctttcctttagtccatcctcaaaataaaactcttcctttcctctctccttgattaccatccccaaagctactaaatgacaaaagggtttcatctgacctcactcattgtatgttatactgcatacagtttttaaccgacataaaaactacagaaacaggcaaaattcctaagtatgaagttgtagaaatttttataatgtaagggtatctgtgaaacaaccactcagaggtaaccactattctgatttctttcatcatagactgctttatctaatttgaaatttatatgaatttattcatgaagtatgttctactttgcatctaatttattttttgatattcatctgtattgtgtgcaaaggtggcttgttaagtctcattrgctttatattatttagttaaatgcatatgctgcaactaattttttttattgtgctactgatgaacatttgattatttcccagtttttggttcttttgaatggtactgctatg

SEQ ID NO: 654992 - DNA, 412 bp, Homo sapiens
acccaggttttgctccaagctgtgcatttgggcccccagmgacccaacttaggcctgaaggtcctttagctgtgccatgtcccgcagggactgagcgtatacttcacgtagtgcagtcagaaatgcccatccaactctgctggcgaaggtgcaccccttcttggtggtgtgagcttccagttgcttcagtgccttcttcacacttgtgggagacctgtccactgcctcccatgtttccactggggcgcatccaagcagcgcctctgccaccgggtaccacagctcatgctgcagccacatagtctggttctctcactgtggagtgttccttactccactcaccttccccattctgcctggtgaacctatgcatccttcctttccttagacaagccttcccagaaaacccaga

SEQ ID NO: 654993 - DNA, 551 bp, Homo sapiens
attacagtttgggatgcccttatttatgacttatttatgagccgggaggactgcagaaataatttatgcttcattagccacagattattcttcttagtcctgaaactcttgcaagcgtaagtgaggccctttaatcagccctctgcctctctaagccccaagctaagacccaaaccgagattcctagtgcttggtgtcctcagtatccatcatgatttatgaacacaggtcacaagaaagctttgtgagatacacaaaatrcagtcagatatctactgaatttgtgaattgaacaataaaatttgcaaatttatttaaaagcctaaggaagaactatgtgtcttgtgtttttaaattttaaccaatgtgaattccaattgctaaaaccaaaataaacttctgaataggctttccgaaaaaactgttttgagtgctccagaaaactcacatcagcccttctgttttgcatcttctgttctgcaatagcctgataacatcagcatgtcctcaatcgctgctcagtgcttagtttagagaaaaatccccatgat

SEQ ID NO: 654994 - DNA, 531 bp, Homo sapiens
taacgtgatggcagaaactccccaaaacatgaaaatgttctcttaagagattcatttattctccacaactatctgtagaagctgatattatcctcactgaatagatgaggaacataagttmagtgagattagtaaaagttgcccaaggccatgaaactaatgagaagacagaatggggatgcctaaaactaaagcctgtgatctcaacaatgcaaactgcctctcaacctaccacttacattgcccagtaacaagttccttttgatcatatattgtatggctgtattcacatatgaaaatttaaattcaatatagccacactaaattgggaggattgtttcttacactcagattggaaatcacagaagcaaaatggacatcagcattatcacatcctttgagatgtctttaatctccaaattgtattattgtacccctccttcatttattctttatcacagtatatatcacttcatatcaagattatcttctattttgcctttttcatcttaccagactttaggaagctag

SEQ ID NO: 654995 - DNA, 587 bp, Homo sapiens
ttagaaagtcatagtgagccttgagaaactcctacatgctcttttggcctgaaaagctgtgttcatttacaaggttatgcacatgattgggagacaacagggaggcaactagccagccacacatccctgaatgtacataagacctgcatatgaacgaaagagacatgagagaacataaaataaaagatgggtcaaattcataaactgcctaaactttatatgcattccccaatccaaacacagattcataggcgaggtatacaatccttacttatgttataaattgagtacaaccactgactaattaatatctgacctttaaattatgctaaccccgtaagaaatcataattttttaaaatatctgagcacagatattagtgaccacataccacaagagataattagtacaggcatgtcacttaacaaaccaacaagtagcactaaaaacaactgcggcaagattraaatacagagtggctagattatcttaaatgtccagtttttagcaaaaaaacaaattaaacatgcggagagaaaaaagaaatatgactatattcagggaaaaagagcaaccagtagaaactg

SEQ ID NO: 654996 - DNA, 428 bp, Homo sapiens
gaattcagtgcagcttatcatccagatccttggcaaactgcatgtgcatatgagtctctgwaaacaatactctgaaagtacagtcaagacagtggggaaatgggcttgctgacatctccaatttgcagagcaccttgtcctcccatagtccaggctatgattcctcagtgattcctctgggtctgtccacatgctatttctcacctggatctttctttcctcccactaaccttacccaacaccctattcatttactacctatagggctgtgaatatgttctttaacttctctgtgcctcatttttattttctctaaaagggacaaaatactggtttttatttcagaggttgtggtgaagattaagtgagttaatatatgtgaagtgctttgcacagtgcctggcacatagcgagggttcaataaacat

SEQ ID NO: 654997 - DNA, 540 bp, Homo sapiens
ttcataggctctctagtcatgataaagccaggtgggcttttctacacacacacacacacacacacacacacacacacacacacacacagaaatgccttcacttctcccactacttgcctcaggctttttgctgataatctttctccctaaaaacatactaatcttttcttttcctcatagttcaattgataagtaaaaccagaccggytattatatttagggtaatataattagcagaataattgatgacttttctattgctatattgagggtcaaagcctaggatacaaaatccccttttctccactcccttcaagggaaatgattcaacattcattctaaggaaagtagctaatctttatcttctctaactctttcttttattactccagtctctccatcttttaaaatgattgcttctaaagaaataaagacaaaatatcgtttgatggcataaaagaggtttaacgtttaaatgattcgacattgaaaagctcctttcctcttagattgcttaggatttcaaataagggccctcag

SEQ ID NO: 654998 - DNA, 384 bp, Homo sapiens
gaatataatagtgaataaaacagattaattttttacttttcgaacttattcttagaaaagtatgtggatggagagacaagtaaaaattccaagtggggataaatggtagaaacaaaaataaatcatgatatggagctagaaagtaaggggataggwtgcggaagctacttcagatagggtagtcatggacagccctttgaaatggtgatattttaacagggactgcaataaaatgagagtgaaacatgcatgcattggaagacattatattccataaagagaggacagtaagctcaaagaccttaaggtggaagtagctcaaagattttgaaggacaactgtgttttgcaagagacaagtgtcccagcagcctgggagagtgcc

SEQ ID NO: 654999 - DNA, 539 bp, Homo sapiens
tgtacattttgtccactaagggaacccctcagcacacacacacaatggtgctactgaaaccagatcactgtctcatttaggttagatatgtcagaaacccttctctcctaagtcgacctgatgctctatgtcaatcgctcctacttctggaaggaggttgggaccttccagcctggatatgccatcactcatctacacaaaactcttgaatgccaagctttgccacacgttaaatcagccaaagtggctaaattaactgttctcattcaggcttatataaggcagagggaattaagattagcacctacagtgacagacactgggtctttggtgtagtgcatgattttggtatgttttgaaaacagagaggattcatgacagcaacttgtccccagtcaaaagtaaaccccaaatagcagaacttctagagtcattgctattgccccagctagttgttacarttaaagctgagggatatagtataaaatactcagatgaggctcagggaaataaattggctgataaaggtgctaagctag

SEQ ID NO: 655000 - DNA, 518 bp, Homo sapiens
gtgaataattaaacaaactgtattacatccagacaactgaataccattcaatgataaaataaatggctgtcaagccatgaaaagacacagtggaagcttacatgcataytgcagaatgaaagaagccaatctaaaaaggccacatatgtcacttccaactttatgaccttctggaaaaggtaatactatagaaatagaaaaaaaaatcagtggttcccaggagttaggaggaagagagggatgaataaccagagcacagaggatgcttaaggcagtgaaagtacgtgtatgatattttaatagtgaatacttgtcattgtaaatttgtccaagcccaagtgtgaaccttaatgcaaactataagatgtatcatgtaggttctttaattgtaacaaatgcaccactctggtgggggatgtttattatgggggaggctatgcatgtgtgggggacagggagtatatgggaaatctatacctgctgctcagttttgctgtgaactttgaactgctcttaaa

SEQ ID NO: 655001 - DNA, 581 bp, Homo sapiens
tttaatttgaaaatactcatttcaggtgtaaacatttccattcatacctacattatggtcttaacatgtggcaacataaagtcattaaaattattatttcagcagtacagaactatctaccttaaaatatgactctgtgcctaataaaatttyataggtgacacaatgtcttttctcaaagtgaatcatctctcacctctaccttttatttcctagaaatgaggcatgtttctaagctgatatagtaaacacatttttcctttttttattaaaacagctttgttgaaatatagtttacatactatagaatgtatctgttttaacttaaagttaaaagatttttagtccatttactgagttgtgcagccatctctacaatccagctttacagcatttccatcactgcaagatccctcacgcccattagcagtcactaccagcttccagtcccagccctttgcaaacattaatctactttttgtccctatacgtttatcttttctggatgcttcatgtaaatgcaattatacagtatggtaaacacactttttaatctattgatttttatattcaactaagtt

SEQ ID NO: 655002 - DNA, 217 bp, Homo sapiens
ctttagaacacaatgtacagaactcarctttctactaaagagtcaaaggttaaatttttagctaagaaattatgcttcttacatgataaaaatcatacatgccaaaacttaccatactttattaaacaacataatgtaaggtctgattcaacagaaatattggagtggtgattttttaaaatatgtggaagtatatatttgttttcaaaatattgga

SEQ ID NO: 655003 - DNA, 418 bp, Homo sapiens
atgtacagaactcagctttctactaaagagtcaaaggttaaatttttagctaagaaattatgcttcttacatgataaaaatcatacatgccaaaacttaccatactttattaaacaacataatgtaaggtctgattcaacagaaatattggagtggtgattttttaaaatatgtggaagtatatatttgttttcaaaatattrgaaataaccatgatggaactataaattcaaacagtttgagctaagcagataaacttgcatgcatgaaaacacattaaacagactcatttggctgggaatattcattgcaactctcaaggctagacgtgtatttgtggctcatctcagtcattgcttccctctcattgtactcccattctatcattaaataaatgtaattcatctctaaataaata

SEQ ID NO: 655004 - DNA, 451 bp, Homo sapiens
attcaagccatgcaaaatcacagggtcactcacaaattgttccacccaacataagtcaacaaaactgttrgaaacaaaacagaaatttgaaatacagtcaaaatatacaatgtaatgctttactatacttcataacagtatctttttaacaagacactgagttggcagttactaataatttgcaaaattattgttctttatacctcaattagtgtgcaccccattttttacatcacaaatgttttcccctgctttctgaaaaatttattttcatcttttaagactcagaaagtaggctgggcataatagctcacatctgtaatcccagcactttgaaaggccaaaatgggagaattgctcaaggccaagagtttaagacaagcctgggaaccataggtaaccttgactctacaaaaaattagacaggtatggtgatatgttcctgttgtcc

SEQ ID NO: 655005 - DNA, 501 bp, Homo sapiens
agaaaaatgtatataatttataaagttagattcaaggatttaattcatttgtaaagttggcttcaaatatagagtattactataatctagttgcctctaaacctcagtagccagctttttattgtgacagggaacctctattgaggtttgaggtaatgagggtaaaagtgtaatttcccagagaagaagcttgtgatgttgatgacgttagggatgtaaacaggattatgagggggggaaaaaaaaacagacaacaaaacttgcctccagagagatggaaactaccacttgggctctaagtcagtgtcaaaatattttttggagttagcctgactctggagaggtcagtaaaataaayagttgcactgagaggccagattagcaagtatgggtttctaaatgataaactgcttttaggctagaatcagggctgaatcagccttcccaccacttatttgtttctagggtgtttgaaaggcctagtactgagttcacgtggtg

SEQ ID NO: 655006 - DNA, 502 bp, Homo sapiens
tataagcggtgtgctttagtgagtgctactggtgctccacctatatccccattacaaactggcatgctcatccctacccgtgagtatggttatccctcaatttccatggggaattcgttctaggacctctagcagttaccaaaatccacagatgctaaaatccctgatataaaatggtgtagtgtttgcatataacctatgcacagcctgccatatacttcggatcatctctagcttcatacctaatacaatgtaaatgctatataagtagttgttgtatggtattgtttrgaaaataataagaaaaaaagtctgtacacgttcagtacaaacacaattttatttccgaatactttccatctgcagttggttgatcccagggatgcagaactcatggacgctgagagggccgacagtattgcctgaagacaacttagagttgtccccttcaaggagaatttacctgggccaaatggcaattgccttgcccaggaagcctcac

SEQ ID NO: 655007 - DNA, 595 bp, Homo sapiens
atttaatagtaaaatttccactccagggcttgtggggcccttgtggtgccagagctagctagtctatagttgaaatcacattcttatttatcttttttcccttgccttatcctacttttctcctaccccttctattgcatgcacttctccaataaatcattggatttactagggctccatgtcaagctctgcctctaggggacacaatctaaaaaccactatatgggttttctctacgttgggagcagttcttctgccacagccccccaccccctgaaaatgtagcctgcttcaagttcctctccacgtcctccttggtcaagaacacctctcagctgctgagccatccactatctgcagtggtgctgaaatgaccagagacattgacagatgagagcctcagcagcttggcagtctcatgtccccttacctcacttgcccatagccgcagcttccaaaccagagccattccaagggacatcgacacmgcatccaagttcactggggttggggctgccacagttagggtggctggttctggggctgagactgctattgtgtttgagagcctcattatggtcatgccaggaacccg

SEQ ID NO: 655008 - DNA, 403 bp, Homo sapiens
ggctaggcgcggtggctcacgcctgtaatcacagcattttgggaggctgaggcaggtggatcayttgatcacttgaggtcaggtgtctgagaccagcctggtcaacatgttgaaaccccatctctactaaaaatactaaaattagctggatgtagtggcagatgcctgtaatcccagctacttgggaggctgaggcaggagaatcgcttgaaccagggaagtggaggctgcagtaagctgaaattgaaccactgcattccagccaagtcaaaagagcgagactccatctcaaaaataaaaaataaaaataaaattagcacaaactattcatattcttctaagcatttagtttattacactctgttccctaaaataaaaggatgaagtcaccagatatctcaaa

SEQ ID NO: 655009 - DNA, 496 bp, Homo sapiens
taggaagccatcattgctgacatggtgaatgagatgtttaagagagatgaattggtgagtacatgctacacagaatggagagtaggggctagagtcagggaaggcaaccagtgggattctgtagcaattttggtaaggaagcttagaaagaggaaggcagtgggaatgaagaggaaggttgctgaagatgcatttccagkgtgacaatggaaatgtgaaggtctgggaaagctaatgaagagcatgagatctaagctggcttcccttcttaaatgaatttttgaaatcatttgtgagtgacttgaatcctgcccctttcacctcctcaggatactgttcaatgccttttaaccagtcaaacaaatcagaattttgcccattaaaatgctctaatagcacatggacaggagttgtctctccagtaaattagctaagtatattttaggtacaattgtaaagtgtccattatttatagcatcattggcagtgccaagca

SEQ ID NO: 655010 - DNA, 613 bp, Homo sapiens
tatagggactgaagcaaggagatggctactgcaataatcaaaaaggccttgaacccaggttgtggaggtgagaaatgcaaggaaggcataggtcctctgcctagacagattttgaayagaagaatggactatctgaccagaactatgggacaaataatagagggtccaaaatgactcagatctgaaacctgggtaagttggatattgctggcgttttctacataaataaaaaagtcgggagaaggaatatgtgcatacagacaggtgacaagcttgtcccgagtaaaatcaagcttcaggtgacataaggtgaagggttggttctacagttggtatccacctattgcagatctttattttttataaccacttatgaatcataaaattccttagcttggctaaaagacaaacgcttccatttttaacagctcatgtatttaaattaaccttcagcctggtcatttacagccccatttgtatccttgctgtagttaattgtaggtactgtacaaggtcattcttgacaacagagaagttcaattacaatatgtattctgttgttttaatcacaattctgtactacacaaagacagacagggacaagaagtttgaa

SEQ ID NO: 655011 - DNA, 613 bp, Homo sapiens
aactgatgctccgtaattacctaacctgtctcctattgttggatatttatgttttctctaatcttttcctgttgtagtaaatattctgtgcaagatttcttctgtacttttatgaatgtagctgtgggataaattccaagaagtatatccacttggtaaaagggtacattcatttattattaataaatatttctaaattaccctaaaaagaaatagtgtaaagtaccctcttttctttttcctttttttcttttttttaattgaaacagggtcttcctcccttgcccaggctgtgatgcagtggttgctgtcatggctcactgcaacctcgacctccccagctcaatggatccgtctgcctcagactcccaagtagctgagactatagacatgtgccaccacactcagctaatttttgtacctttttgtagagayggggtttcgccatgttgcccaggctggtctcgaactcctgggctcaaacaatccaccggcctctgcctcccacagtgctgagactacaggcatgagtcattgtgcctggcaaaattacactcttatgcaaatttttaccttttgagaataggtttaacttctgaaaactgccccaagt

SEQ ID NO: 655012 - DNA, 607 bp, Homo sapiens
atcactaagaaacatagtcatcagattccataaggtcaaaatgaaagaaaaaatgttgaaggcagctagcgagaaggggcatgtcacctacaaagggaacctggtcaggctaacagtgaacctttccacagaaactctaccacccagaaaagattggaggcctatattcagcattcctaaagaaaagaaacwccaaccaagaattttatatcaagccaaacagctttataatcaaaccagaaataagttccctttcagacaagcaaatgttaagcaaatttgttaccagcagacctgccttacaagaggtccttaagggagtgctaaatatggaaagaaaagactgttaatggctaccacaaaaacacatgtaagtacatagacaattaacactacaaagcaaccacacaatcaagtctgcataataaccagatagcaacacaatgacaggatcaaacctacacatatgaatattaaccttgaatgtaaacaggctaaatgtgccaattaaaatgcacagagagggccaggtgcagtggcttatgtctgtaataccagcactttgggaggccaagggggacagattgcgagttcaggagtttgagac

SEQ ID NO: 655013 - DNA, 589 bp, Homo sapiens
aatatataacaagaaggtagggataaaaataatggtgttactacaccacatatgaatgatttggattttcttattaaaagacagaaatattacactaaatgtaaaaacaaaatgtttttctgtactgttacaaagaaaacacccaaaatgaagtggtaaaaaatgttaaaaacaagatggtacatataaacccttagctcccataatctctttctttgtaacatatttgataaataataccagtagaaaaaattgttgaataagtcacaatacttcattgacaccatgaaatattgcctccatacaaaagaatgatacagtgctatgtcactggctttaaaaatgttccctaaatattgttaataagtaaaacaagattccaaaaagtgttcatatttgatctcattttatgtataaaaatgttgaaaaaaatcccatatatatttacatgttattgtggacaayatacgaaatacgtaaacccaagatgttaatgtagattaagtagcgattatattggtgagttattgaagcaagacagaaacactaataattaaaaaaataaaaattctgtccaaaaaaattgaca

SEQ ID NO: 655014 - DNA, 577 bp, Homo sapiens
ttccttgccagtagcacagtgatattaacagataactattgcaagggtcaaatataagcatcttacaaaaatgttttcatcctatttatatactggcaatggttccataaaagaggctgtcaaccacagagcccactttgtaatctgaggtctgtgatactcactaggcattattcagtggcaakttaggatgaaaatccacagtaataaaaatctcacagaggtgaagtcaattacagtatcaagtgaagtttgttaagaacagatacttgttattaaagtatccactcctcaacgaggctgaccttctcaaatgctagtatgtcacaagacatgagatttttaaaaaatccaataacaagtttccccactgtggtttcaattgccttttcagatctcccacagtgttctgtttcagtctgagataatgcagacagttctggtcctcagtgggtcaaagtggcatgtatttacactagagtaatcagagacaggatttctaccttgatcagattatctctctatatattttactgtaatctttactccacttggcttgtgtagtcaaattttgagc

SEQ ID NO: 655015 - DNA, 457 bp, Homo sapiens
aaaaatccttcctttcttcccgtttttttcattcttaaatgaaagccacatgttccacacttctattccttttccaatgctttttccacactgtccatcttcttactacagttacacaaaatctgatctccaggattagctatgttttactaaatggtgtggttaattttccttaggtatcaaagcccatctttgagctctcgtttgtactttttgtaccatacaatagttttcagkcactggggatatagaagttgaggaaaaagagttgggaaacttgcgggtccaagattggtcctatggcagaaagattttttttttttttaagtaatagagcattttaaaaacagggggcatttcccatgttatcccagggcttcagaaaatttatggttaataataaaaggtcttctaatcaagattagatcctgagtgatagaaaaagtgacgtagtcac

SEQ ID NO: 655016 - DNA, 578 bp, Homo sapiens
acctttgtctgaatggccatgcaggggtttcttacaaaatgggaatgtttgtggtgtaagcagaaacaatatgttctcctgattagtacttgttgactgcttgctgactggctgggagcctgggtcacagctgctgagttagtctccggtctgttcacaagcagrctgtgtaatcttgcccaagttatgttaccccttggcattttgttggtgaaatgggtgtaatcagctttcctgacaggaatgttgtaagggttaattaattactatttgttaagtgtgctgagattgtcagattaaaggattagggaagtgtcaagtttgtgttattatggtattatttttctttgtttgataggaaatgccatttctgtgtaatttgctttaatggtaaaataagccactttaatcaatgcacaatcaagtccttattcagtgagaacaagggtatacatatacagttagcaagaggacttgggttagctgacacaagggcagaaatctgaaaattagacattggatacaaagaaggtccagcaaatgagagtgggggtgatcaggttctaagtgcccaggag

SEQ ID NO: 655017 - DNA, 578 bp, Homo sapiens
acctttgtctgaatggccatgcaggggtttcttacaaaatgggaatgtttgtggtgtaagcagaaacaatatgttctcctgattagtacttgttgactgcttgctgactggctgggagcctgggtcacagctgctgagttagtctccggtctgttcacaagcagactgtgtaatcttgcccaagttatgttaccccttggcattttgttggtgaaatgggtgtaatcagctttcctgacaggaatgttgtaagggttaattaattactatttgttaagtgtgctgagattgtcagattaaaggattagggaagtgtcaagtttgtgttattatggtattatttttctttgtttgatargaaatgccatttctgtgtaatttgctttaatggtaaaataagccactttaatcaatgcacaatcaagtccttattcagtgagaacaagggtatacatatacagttagcaagaggacttgggttagctgacacaagggcagaaatctgaaaattagacattggatacaaagaaggtccagcaaatgagagtgggggtgatcaggttctaagtgcccaggag

SEQ ID NO: 655018 - DNA, 619 bp, Homo sapiens
ggttggacagtgagaggagaggaggatttggagaactcttcctctggtggcatttgcttaccctggaaaagttgycttacaggtgaaaaagctgagaagttgcattggaagtctcacagggaaaggtgggaaaaagcattagtattcagggcccactaatggtggaaggaatctgataaatggcctctactttgagctgaggctacatcatagaagtaagggtagatgaaaggagatgcagaacatttgcaaggactgaggctgacttagcctgaccacttgtcagaatcaaagttcaatcatctttgagctattataacatcaagagccttgaattatctccataatttttcagtgtccaacatttaataataataataacaataatagtaattttaaaaacccaacagggccagccctcagtggggtgagtgatactgcttttgagcaggaaggtgatgttcttatttaggccaagataaagaccccagaaagagaagagcagcttctggctaagaagaagaagggcaatgaacagggatgtcaggctttgtgaataacttgtttggaatggcttctgtatttttgttttctggatccaggcacttagatagtctct

SEQ ID NO: 655019 - DNA, 604 bp, Homo sapiens
gatgcctcctttgtgcactgtgataggcactggaataaatccagctctcctccacgagctgcctgaaaaatragagggatagagcctaacaaacaattaccatgcaagatgttgagtgtaatatttgagatgtggggtgtcaggaaaagctctactcactattcaacttttgagaactgccttgaagagtgattaggggctttccatcttaagaaaaaggtggcatataacaaaaggaaaatcatgtctatggaagaataagaccaaaaaaaaatcgaagatttaaagaagtggaataaatcagctgtcactacagtagagaatgaaactatgtagaatgggatggaaagataagggacaaaatatgacagtataaaacattcccactgaagtacagtttatagccttatatgaaacttgtggatttcctatagaaaacaaagtatgggagtaacaagaatatactcagcaacataatggataactttaactgcaatgtagaagatttgatattaaaagcagaatcaggcacaagcgtttgcagtagtctaagaacaatatggtgaagatttataccaaaccagcggttctcaactgagggaga

SEQ ID NO: 655020 - DNA, 558 bp, Homo sapiens
tacctgtgtctttaatattgttcagttggggaatcacagcacaaaatatttcggtgactttacraagtgtctcttcccaaatcatctgaaacggaagaggattagcacgaggcagctgatactgcaaagtgctctggctgaactgagccctgcggaacatgaagccctgggggctgagaaatctctagactagccatgtttgccccctgcccttagggtcaattggtggtattgtttaaagctgtctgaccccagactcccaaacaatcccttttgctttgctgacataaatatgattcccaggacattatagtaaagactagaaaagttgcaaagggagaaaagttaaaagccagtttttttctcctttgaaatttttatgtgctgaaatgcaaaattcactgtcaaaaaaagtaacacttttacacggcctccggcatcagaacatcctaaaaatagtccagtaacaggtaagtgtgaacaacgtgccaggaggcctctagcacattttagcagaaatctgcacatctattctcaatgctcacaaacactccccgc

SEQ ID NO: 655021 - DNA, 562 bp, Homo sapiens
cagttcagaaaccacctcttcctagaagtctctcccatacctcacatcaaccactctggagagcataaatcatttcctgctctgtggctgcctctctcttccctgtgctacactcactcagcacaagtcatcgtcggcgtgtcagtcttcacccacaaactgtgaggtcctccaagtcagggacytgaaccaaacccgtccctgtatccccagtgtcaagaatagaactggggtcaataaaatgttttccgattgaattgagaagtacttgacgatcaaatgaatagagatttaatgaacagtattttgggatgcacgcataagtagttaaaatgtacttattgataaactataaattcatctttcttccatttctcaaaggataaagtatgtgatgatgaaatgtttataaaatttaatgacaatacagcacataataaagaaatgcctaataaagagggaatatttcacatttaaaaatatcatttattactttccataaacatacatctgctcagattgattttcttacttttactgaataccctggcagcagtaatag

SEQ ID NO: 655022 - DNA, 559 bp, Homo sapiens
ttttgctcatctacaaagtagaactaacaataatgcctatcctccaagaataggtacgcaatgggaaagtgtttgtgaaaatatgagatgcaagataatgaggtggtgagtacaggctctagagccaggcttcctggagatgaacctcagtgccattgcttactagttgcgtgaccttaggcaagttacttaaattctctgagcctcagccacctaatctacaaatcaggtaagtaaatgtatcctcacaatgactgtgttagaatgattaattcagctgacaagctagattcatgataaacactatatgcatgtttaataactaagtaaagtctatgtagcacactcagctatagaattacaacytttacctgcccaggtaaaaatcttctttaaagaatcatatgctggagttacgtgcttcatatagccttttcttgttgttctattttgtatacatgtatgagcaatacaccaaaggtaccaatgaggccaaggatgtgaaactcatcatggaaataaatgtgactactaggtaacaacggaagacaatcgattt

SEQ ID NO: 655023 - DNA, 462 bp, Homo sapiens
gtcatagcaggaagctattcagtgaggacactgctgctctcagaggtcagggaacatcacaggaccacacagctgggaagttctttgggcttratctaagccaggtacttctatgtgtccatgccgtctctgcaaccctcatggccagggtcatccaatggtgttgttacttttttatgccctatgtcctcaggcaagaagacatttatcatactgaatttataaaacagtagccagtacttccatttccctgaagcctcaaaccaaattatgaaagaaaaagaattatgtaaaaataaatactttaatagtaatataaataaaattcagacagaatgcaataccttgtaacttatctcttcctagatgcttagtttatgggaaacattgtgtaaaatatgctgtgggcagagcctagtacataatagatgctcagtaaaatagtattataactaacatttg

SEQ ID NO: 655024 - DNA, 650 bp, Homo sapiens
tataaaacagtagccagtacttccatttccctgaagcctcaaaccaaattatgaaagaaaaagaattatgtaaaaataaatactttaatagtaatataaataaaattcagacagaatgcaataccttgtaacttatctcttcctagatgcttagtttatgggaaacattgtgtaaaatatgctgtgggcagagcctagtacatartagatgctcagtaaaatagtattataactaacatttgaatctaagagactctactgatacttaatacttgaaataggaagtaaatcaacagtattcctcagtgtcccccagattctgtcttggctaacccagtgaaaactgctttcttcaacacacatacactcacacacacacatacatatacacacacttatttacttatattaatgctaaaaattatcgatataaacctcccctgattactgtgaccctgctttgtgaatgacacaaaataagcctcaacctttgcattggtacctcctaaattaagaggcattttttagtcttagaggagaatgtgtcttaaatgtcttaaaatgtgtagcttatgtttgcctgtttttgcatgttacctgtaaatgaatgactgtatatattttctcccctgtctagtgcttcaaacctc

SEQ ID NO: 655025 - DNA, 650 bp, Homo sapiens
tataaaacagtagccagtacttccatttccctgaagcctcaaaccaaattatgaaagaaaaagaattatgtaaaaataaatactttaatagtaatataaataaaattcagacagaatgcaataccttgtaacttatctcttcctagatgcttagtttatgggaaacattgtgtaaaatatgctgtgggcagagcctagtacataatagatgctcagtaaaatagtattataactaacatttgaatctaagagactctactgatacttaatacttgaaataggaagtaaatcaacagtattcctcagtgtcccccagattctgtcttggctaacccagtgaaaactgctttcttcaacacacatacactcacacacacrcatacatatacacacacttatttacttatattaatgctaaaaattatcgatataaacctcccctgattactgtgaccctgctttgtgaatgacacaaaataagcctcaacctttgcattggtacctcctaaattaagaggcattttttagtcttagaggagaatgtgtcttaaatgtcttaaaatgtgtagcttatgtttgcctgtttttgcatgttacctgtaaatgaatgactgtatatattttctcccctgtctagtgcttcaaacctc

SEQ ID NO: 655026 - DNA, 614 bp, Homo sapiens
cccttcctttccaaaagcccctcctctcttccccgttcatcctttctcagcctactcagcattgactgggccttgggaagtccctacctctcataacsttgaggctcattaaataggacccagttggtgggtcagaatgcctcgtcctgttaatcaggaagacaacaactgtttattgtcaggctactatattaggtgttgatagagtcgatgagtaggtattagcattgttattttacaggtaagaaaacaagggctcaaggcaaagtcaaggttaaggctcaggtcacaaatgaattctttatgactgtatttagtatttatatatgagtatccaccacgtgctgacacctgtgctgggtgctggggagtcagcagtctccatgctggtggtgccacaccccaatggagctggctttcaaattgtccttgaagtgctccacaggcaccacggtcaacacattctgtctcccatgggtaatatttgcttcaaaccggcaccatctggttgtccaggaagttctccaggaaaagtaactcttataagaacactaaccagcatctgacttaatccaaggcttatgaaatattagagttggaaggagccttagaag

SEQ ID NO: 655027 - DNA, 614 bp, Homo sapiens
cccttcctttccaaaagcccctcctctcttccccgttcatcctttctcagcctactcagcattgactgggccttgggaagtccctacctctcataaccttgaggctcattaaataggacccagttggtgggtcagaatgcctcgtcctgttaatcaggaagacaacaactgtttattgtcaggctactatattaggtgttgatagagtcgatgagtaggtattagcawtgttattttacaggtaagaaaacaagggctcaaggcaaagtcaaggttaaggctcaggtcacaaatgaattctttatgactgtatttagtatttatatatgagtatccaccacgtgctgacacctgtgctgggtgctggggagtcagcagtctccatgctggtggtgccacaccccaatggagctggctttcaaattgtccttgaagtgctccacaggcaccacggtcaacacattctgtctcccatgggtaatatttgcttcaaaccggcaccatctggttgtccaggaagttctccaggaaaagtaactcttataagaacactaaccagcatctgacttaatccaaggcttatgaaatattagagttggaaggagccttagaag

SEQ ID NO: 655028 - DNA, 614 bp, Homo sapiens
cccttcctttccaaaagcccctcctctcttccccgttcatcctttctcagcctactcagcattgactgggccttgggaagtccctacctctcataaccttgaggctcattaaataggacccagttggtgggtcagaatgcctcgtcctgttaatcaggaagacaacaactgtttattgtcaggctactatattaggtgttgatagagtcgatgagtaggtattagcattgttattttacaggtaagaaaacaagggctcaaggcaaagtcaaggttaaggctcaggtcacaaatgaattctttatgactgtatttagtatttatatatgagtatccaccacgtgctgacacctgtgctgggtgctggggagtcagcagtctccatgctggtggtgccacaccccaatggagctggctttcaaattgtccttgaagtgctccacaggcaccacggtcaacacrttctgtctcccatgggtaatatttgcttcaaaccggcaccatctggttgtccaggaagttctccaggaaaagtaactcttataagaacactaaccagcatctgacttaatccaaggcttatgaaatattagagttggaaggagccttagaag

SEQ ID NO: 655029 - DNA, 542 bp, Homo sapiens
aaaggaagctagatagtaacaataaccagttaggaagcctagatatgcaagtaataaaataaaaataagaatttaattttaatttcaataactgagtaaaacagtaattgtagcacagaaaattagagaattagcaaattgggagataaakaaatataaagtatatctgtcagaagggtgaaaagatggaatatatgaaaggaagtttaaagatacagaagctcaaacttccctataagacccaggtggagagaaaacagaattgcaggaaaacgatttttgaagtgtcaccggctgactggcgtgtatgcagcaacgaacacaatcgttagtaaagcgcaaacagaatctgcttgcaagggtctgaggcaacagatactgtcatttttgctttctacctttccctttggttctaactggaacttcagagaaggctggagcttcagccaccaaattatgagcatgaagtgacctggaagccatcgaaaaggaaacagcagggccagatccctgtgtatgttgcacaattagcacacaagcca

SEQ ID NO: 655030 - DNA, 542 bp, Homo sapiens
aaaggaagctagatagtaacaataaccagttaggaagcctagatatgcaagtaataaaataaaaataagaatttaattttaatttcaataactgagtaaaacagtaattgtagcacagaaaattagagaattagcaaattgggagataaataaatataaagtatatctgtcagaagggtgaaaagatggaatatatgaaaggaagtttaaagatacagaagctcaaacttccctataagacccaggtggagagaaaacagaattgcaggaaaaygatttttgaagtgtcaccggctgactggcgtgtatgcagcaacgaacacaatcgttagtaaagcgcaaacagaatctgcttgcaagggtctgaggcaacagatactgtcatttttgctttctacctttccctttggttctaactggaacttcagagaaggctggagcttcagccaccaaattatgagcatgaagtgacctggaagccatcgaaaaggaaacagcagggccagatccctgtgtatgttgcacaattagcacacaagcca

SEQ ID NO: 655031 - DNA, 542 bp, Homo sapiens
aaaggaagctagatagtaacaataaccagttaggaagcctagatatgcaagtaataaaataaaaataagaatttaattttaatttcaataactgagtaaaacagtaattgtagcacagaaaattagagaattagcaaattgggagataaataaatataaagtatatctgtcagaagggtgaaaagatggaatatatgaaaggaagtttaaagatacagaagctcaaacttccctataagacccaggtggagagaaaacagaattgcaggaaaacgatttttgaagtgtcaccggctgactggcgtgtatgcagcaacgaacacaatcgttagtaaagcgcaaacagaatctgcttgcaagggtctgaggcaacagatactgtcatttttgctttctacctttccctttggttctamctggaacttcagagaaggctggagcttcagccaccaaattatgagcatgaagtgacctggaagccatcgaaaaggaaacagcagggccagatccctgtgtatgttgcacaattagcacacaagcca

SEQ ID NO: 655032 - DNA, 575 bp, Homo sapiens
ttctctttaccatctttcctactgaccacccaacgtggcctccagtcatcaccttgcttccttggtttcacaagtggtgggttaatggaatttaacgttcctacctagaaaaagcacttaagcatatatatcaggctcaactcctttttttcccttttctcatatagacccaccccctcaaggccttctcactttgtctttccctgaaacaaaggcttttgacattgggcaaattctctttagacttcaaatagatagggtgaactaaatgatctgatctttcagagcttgacatatactgacaattctatgatccctgatatggtttggctgtgttcccacccaaatctcatcttgatgtagttcccataatccctatgtgtcgttagagggacccartgggaggtaattgaatcctgggggtggttttccccacgctattcttgggatagtgagttctcatgagatctgatggttttataaggaatttccgccttcactcatctctcatttttctctctcctactgccttgtgaagaacatgcttgcttccccttccacaatgattgtaagtt

SEQ ID NO: 655033 - DNA, 550 bp, Homo sapiens
agtaaacacaactcacaggaggcgacaggaagggaagcaccggagctgaaagcacacgacattctgcaacaatagaatcagaaacgggaactgctgttgcttctgggttcttgaaaccatgttagaatgtggggcgacttgcatttgtccctttggctgaagtgagcttttatcctgaatcaaaatccacaggccggtttggtattgttgctattgttttctttgccttctttttttttttttttaattttctttccttttttagttcttataatgctaaagcagagaatacatgagtgcacactaaacaaccaacacaccacagctctttgcctcttgtgtattttagtgmggcagtgttttagtgggcataggctatttgagaaaatgcgggctttcaacccagaagtggggtccagcccttgcagaatctcctgtggaggagctgtgtgacctgggcacatgtggagcttcatttcatttgttcattagcgacatagaggtaataagaccgacttcctggcattgttgagctgatgagtgaaaaatc

SEQ ID NO: 655034 - DNA, 528 bp, Homo sapiens
gcaccactgcacctggctattttttaattactttttgtaaagactggggtctcactatgttgcctaggctggtcttaaactcttggcttcaaatgattctcctacttygggctcccaaaatgccaagattataagcatgggccacaacacccagatgttttactgatttagagatcattctggctatctgatgagaggggcaggctggtcagggagtgagcctggaaacaggaagctgagcagagcacgatgatggcttggaccacctgccagtatcatggcagtacagttgggagctggggggtattggagatgtaagtggaaccggagtcatcaggaggtagtgatgaattggattggggtctactcttgagagaaaggaaacagtccaagggacccttgggcttctagcagtaacaatgtggggagctgaggagagagaaaaattttcctagtcagggaagactaggaggaaaaataggtttggagtggaagtagactcatttcgaacacatcattgttgagggt

SEQ ID NO: 655035 - DNA, 600 bp, Homo sapiens
ctattttagttgcaggaggtgccacaggtattatgaaattcatctcattcaaactgatctgtgtgactgagggtttacagtcaggggatgagccccaagatattggctccagagattttggaataagaccttgctctgctacctgtggcctttgcaagcctccatttttccatttgtaaattgcagtcgtcagttcctagtctggctgctttctgggagtrgaaaggaaaagcaacatggagccctgtgtgtacaaccctctttgttgaggctaagagggctcattgtatactatgagccttgattataatgccaggaggcctgatttctggtcaaggccttcaagcttccctttaactctttgtcttacattgccaggcccctatttctcatcaatatacatgtgaagtcacacctagttgtaggccctagttgatctttcagtactccaaggcatagtagggtattctgtgattctatccatatctttgccattaaggactaacacctcctctgtgtaagtgatgtgaaatcctttgaaagtgtacgctcaccagagaaatcatcatgcggcgtctctggtctatgcatgcagctgtt

SEQ ID NO: 655036 - DNA, 638 bp, Homo sapiens
gctgggcatataagaggtgctcaaaagcatgtgctgcattcacctgtacaaagtataattgttcagctaacagtgaaccattaccatacagaggcattgtggtgggcatctgggaagagcacaaaaaggccagagtagagaagatctstgagtacctgtgtccaaggcccttgggaacctcacataataaggactgatcatacacacctgtccctctactataagagataagactgggcttacgctgtggttgagaaaactgagactcagagagaaagattaaataacatgcctgagtcaataccacaaatcctaacccaggtcctggacttgagaagccataccacatcatgctgtcctgagtgctgataaatggtgagtagatgtagaagaggaggagcatgaggaacaaagagtgacaagagacccacccatgtgattggtgggaaaaggctttaaaaacagcacgaggttgccattgatgatggctgcatgctttcttttatccggagttcttgtcacgtaggctcttggtatttggctgtgttagttaacctgtaggagataataaacccaaggcatcatacttggaaaatcaatacacaggtcaaagctgtagcatgccggagaagagccat

SEQ ID NO: 655037 - DNA, 590 bp, Homo sapiens
ccactggtaaagtaataaaaggtttatgattcatttctttcttgataatggaggagacaattaagtaattactggacttacggtattggttgtgttaactcaaccaataaagtatctagccaaattgtgctttgaagtacccttatagaataatacaatgaatgcttaaaaaaagaaatcagctgcaccatgcatcacctacatttacaggcaggcggaggtttagacaatgaccatctgagacctaaaaatggtgtttttcattactagtttccccatttcattctttctaaagttaagtcaaagaagtaggatccagcatctaataccacaactttcccttaactcgctttctcagaaacacgttttctcggctccatygcaccatggatggcccttgtaggccctcaggaccttgaattttacatgtacttgtgtgactgattgacatgtctcccaccttctgccagttggcccttcctgtctacctgcaccaagctgagtgcaaggcatattactgctcctcagggaatgtttgttgaataaaatggatgttttaaaaagatccagcaaacaagggtttcccctgc

SEQ ID NO: 655038 - DNA, 555 bp, Homo sapiens
tcacatttccgattttagatcagaaaagttaaaatcaggaaatgattgtactgttttaaacagctctaaatcctaactgtgatgttaacagtaccatccctggagactgccagggttcaaatgccagctccatcacacacagcactgaaatgctcccaggtgagaacttggtgccttaattttccacaactggaaatgtgatgaataagaacacatccttcacaggattgttgagaaatgagttaaaacatggaaagcactcagggcagtatctagtacatactcagtgtttaataaacgtcaattataattattgctcaagttttttaacagatggactttactacagcaaaacatagaacagtcacttaataacgtatgtctcctaacttctccagccaggaaaacagagttaccaattctaatggcttaacrtttttacattacttcctatgtacttagcacattgtctactaaaagcctcaccagaactgtatggaaaggtattattatctcagttttacagaaaaggtaactgaggtttacagagattaa

SEQ ID NO: 655039 - DNA, 555 bp, Homo sapiens
tcacatttccgattttagatcagaaaagttaaaatcaggaaatgattgtactgttttaaacagctctaaatcctaactgtgatgttaacagtaccatccctggagactgccagggttcaaatgccagctccatcacacacagcactgaaatgctcccaggtgagaacttggtgccttaattttccacaactggaaatgtgatgaataagaacacatccttcacaggattgttgagaaatgagttaaaacatggaaagcactcagggcagtatctagtacatactcagtgtttaataaacgtcaattataattattgctcaagttttttaacagatggactttactacagcaaaacatagaacagtcacttaataacgtatgtctcctaacttctccagccaggaaaacagagttaccaattctaatggcttaacgtttttacattacttcctatgtacttagcacattgtctactaaaagcctcaccagmactgtatggaaaggtattattatctcagttttacagaaaaggtaactgaggtttacagagattaa

SEQ ID NO: 655040 - DNA, 523 bp, Homo sapiens
gaaggtcagatgacatgctgtatgtgagagcactttataaaaaaaaggggataatttgagatgtgattccatctttcccatgacccaggaagaatttgagggccttaccaacaagatttgatatatggttctaagccctgggaagacctagaagatgtttggcttggcgaagtgtgcaaaagggacttgcacctactaagtcagaaasatgtaacaaggtcactgcctaaatgttcctaaggacaaagcccaccgtctaaacctcagccctcttcaaacccagtgcctatgtgtggggtaaataaagaaggaacctgagcccagatgaaacgtgcagctgaaccaggtacttggaaccacataattatgacctggaatggaagtggatgtagacgttatacttagaggctgttatgtacaagtgtctttgtcagcagtccctgcatagggattgaagattgattgaggagggttttgggttttgctacttagcatgctattgaagtgagaggaacatacatgt

SEQ ID NO: 655041 - DNA, 608 bp, Homo sapiens
ctttagttgctgaccttaaagctgtctcttcgtcctgcttctaaggtttcagaatctgttaaacaccactgtgtcatgcatccaccagtacaaaacatgcacctgctaagccgatgtgtagcaagcaccccacrctttattgcatgtccactaagcatcaggtacttagccaataacattgcctggcaggccatgagattccattttatgtatgaggacaatgaggcttatacattgaggacatttagaggatgcagtgacttgttttagaaggtcatagtaaggtcataattgggtgtggaacttagacatacaccacgagttgcctaattccaatcctgtgtcctttgtttcacatcaggctatttccatctctccatgaaagaaaagaactctgcaaaatgaatcagaaaaaaaccttggtttcaaagtatttgaacccaagggacagacagacagatttgaacccaaaagggacagatagaatggccttcctggcagaggtggcaaaacagaccaaggtataggggtagagctctcttggtctattttggaggtgagcacattacctgtttagctagagtgttgcatgtatgcacggtgttagg

SEQ ID NO: 655042 - DNA, 626 bp, Homo sapiens
gaagcaatttcagcaaaactgaaaaagtgcaccacttatttccagtttctttttctcccgcatcttagcctacaaatcttagtcagacccatagttgggcctgagccttagccagacaaactttccttccacggcacagggaattttctttgttcactgcggaatcataggagcctaaaactatgtatcgcatgaacaaggtactcaataaatatttattgattaagcatcccaaggaaaagatgaacataggtgtccctggagagagaggagggtcgcactgcaaggtctgaagactcatgttgatgtcccagatgcctgacttcaagtyagcgcccccgtctctctgagcctcagtgttcatgtccagcaaatgagaataacatgcctacctcccaagtttaaaacttgactatcttatgaagatgaaagctttcccaaccctgccaataccttaatcttggacttctagcctccagaaatgtgagaaaataaatttctgttgtttaagttgcccagtgtatagtattttgttatggaagccctaacaaactaatctacccatcaacataaactaacacaaactgtgcagtcattcagccattcaacaaatatatactgaccac

SEQ ID NO: 655043 - DNA, 626 bp, Homo sapiens
gaagcaatttcagcaaaactgaaaaagtgcaccacttatttccagtttctttttctcccgcatcttagcctacaaatcttagtcagacccatagttgggcctgagccttagccagacaaactttccttccacggcacagggaattttctttgttcactgcggaatcataggagcctaaaactatgtatcgcatgaacaaggtactcaataaatatttattgattaagcatcccaaggaaaagatgaacataggtgtccctggagagagaggagggtcgcactgcaaggtctgaagactcatgttgatgtcccagatgcctgacttcaagtcagcgcccccgtctctctgagcctcagtgttcatgtccagcaaatgagaataacatgcctacctcccaagtttaaaacttgactatcttatgaagatgaaagctttcccaaccctgccaataccttaatcttggacttctagcctccagaaatgtgagaaaataaatttctgttgtttaagttgcccagtgtrtagtattttgttatggaagccctaacaaactaatctacccatcaacataaactaacacaaactgtgcagtcattcagccattcaacaaatatatactgaccac

SEQ ID NO: 655044 - DNA, 586 bp, Homo sapiens
tgaacatttactagctgtcaggcatctggtgcaaagccctgtgtcttcaagggcacaagaaagggcaagacccttgagaaagcaattctatgacaaagaatatggacaaactggctttccccatctgaccacatgaatttactaaacacttaccaataccagtcagtatggtgcagtgtccatgtgcagaatyacactttgtttgtgtaacagcccagcagtcaagatccaccaatcctcccatttaaccaagaccgaggtgggtggatcacctgaggtcaggagtttgagaccagcctggccaacaatacaaaaattagccgggtgtggtggcaggtgcccgtaaccccagctactcaggaggctgaggcagaagaattgcttgaacctggaaggcagaggtgcagtgagcagagatggcgccattgccctccagcctggcaacaagagcaaaactccgtctcaaaaaaagaaaaataaaataaaataaaataaaataaataaataaataaataaataaataagtgctgaagccaggacttgaactcaagtctagttctaatgcacatgcattcagctttcagat

SEQ ID NO: 655045 - DNA, 586 bp, Homo sapiens
tgaacatttactagctgtcaggcatctggtgcaaagccctgtgtcttcaagggcacaagaaagggcaagacccttgagaaagcaattctatgacaaagaatatggacaaactggctttccccatctgaccacatgaatttactaaacacttaccaataccagtcagtatggtgcagtgtccatgtgcagaatcacactttgtttgtgtaacagcccagcagtcaagatccaccaatcctcccatttaaccaagaccgaggtgggtggatcacctgaggtcaggagtttgagaccagcctggccaacaatacaaaaattagcygggtgtggtggcaggtgcccgtaaccccagctactcaggaggctgaggcagaagaattgcttgaacctggaaggcagaggtgcagtgagcagagatggcgccattgccctccagcctggcaacaagagcaaaactccgtctcaaaaaaagaaaaataaaataaaataaaataaaataaataaataaataaataaataaataagtgctgaagccaggacttgaactcaagtctagttctaatgcacatgcattcagctttcagat

SEQ ID NO: 655046 - DNA, 578 bp, Homo sapiens
atgctttttaaacattatcataaagtcactttatatgtttatatgtgatttttagtgattgtatagtataccaggaggctccrtttaccatgtatctatatttcattctatgcaaatatgccttagggaggtgtgtaaggtggaaaccctgtactataacattatataaatgacctaatatcttttaaagtcatttctttatttctggacatcaagtgttattgtttatttgttcttccaatcacacttttggtagagttaaaagagcactaaatatctcatcagatagacctgggtttggatcccaactctgcaacttactactggtgttttcttagagaagcaccttaatctgtctatatctcaggaaagatagggtgttgcaaaaattaaataagatgtcatgggtgttaactgtttagcacagttgctgacacatggggagcggctaatatctagtaatccttttcattattaatcattatttatgacagctctaatgtttttagcaatattgtcaattatgtgaccataaattatctgattcaatcttcacatcaatgcaataaaataagcat

SEQ ID NO: 655047 - DNA, 629 bp, Homo sapiens
tttgtcctgctttcatcaggactggattgagttttgagcaaggaagaactttgaggctgaaggagactccaagtgagagggcgtgggaaagtttccacgggcacattcttgatcttcctgcatctcagctttggttccttctggtctctgttgctgacgatttatgtcctaatcctttaggcacttattccccaccctctctgggtgctggtttcctgattcccgagtgggtagaaaacagtcatgtaggtgatctgtgaggtccctgacccttttaaatctactaatctataattaattgaaatattgtaaaatgcagcccacattaatgtatgctgttaggcaagctgttattttyattaatcatagacagctcttccccacactcccagttaatgggcaccgactgcaggtttcaaaattcatttacagggggcacttggaagggggatgctgtgtccaaataaaacttctcttgaagtttaattgcaattcactgccgagtgaggcagagccgtttccaagtaagagcaattctctaatgcatgccgagttttaaaataaaagttaatactgctcataaccgtggctgatgatactaggaaaacacaattgcttgaagcatttga

SEQ ID NO: 655048 - DNA, 554 bp, Homo sapiens
gcttttgttccaaaatttacctgcttatttatttttgtcaagtatctttgtttcccagtctgtaaaatcaggatgataatccatgatctcrtcttaaagtagtatatgattaattgacttgaaaattctaattgttcaaattatctaaaatgatccagagaggcttacaataaaataaactataagtcaatgaaatcagaaccagaaaattaaaatcaatttagaaggatacaatagcatatttatttttaagcatatttatttttaagataaaatgcttgtgattgagcaatgaattgagccctgagactccagcagcaaatgaagatgttgagatacatttatttattatttcaacaacagcagcaagaactcattctgtaatgggaggacatatgcatttattaggtcacaggaacgtttcttggaaatatttcagtgtcacaactcataaaaggaacagtgaacaagtaatgggtgtactccagtataatggatgaaagtcaggttggactgaattcaagtcccatagctgccagttttgagatctcact

SEQ ID NO: 655049 - DNA, 554 bp, Homo sapiens
gcttttgttccaaaatttacctgcttatttatttttgtcaagtatctttgtttcccagtctgtaaaatcaggatgataatccatgatctcgtcttaaagtagtatatgattaattgacttgaaaattctaattgttcaaattatctaaaatgatccagagaggcttacaataaaataaactataagtcaatgaaatcagaaccagaaaattaaaatcaatttagaaggatacaakagcatatttatttttaagcatatttatttttaagataaaatgcttgtgattgagcaatgaattgagccctgagactccagcagcaaatgaagatgttgagatacatttatttattatttcaacaacagcagcaagaactcattctgtaatgggaggacatatgcatttattaggtcacaggaacgtttcttggaaatatttcagtgtcacaactcataaaaggaacagtgaacaagtaatgggtgtactccagtataatggatgaaagtcaggttggactgaattcaagtcccatagctgccagttttgagatctcact

SEQ ID NO: 655050 - DNA, 471 bp, Homo sapiens
tgtttttttttctttagaaagcaattaacttggttagactcaaaatgcacactgcctgcccagggtgtgggaagatttaggggaaagaatctagggcaactggaatcaccggagaataatgggaaaccccagtgtactagtcccttttcatactgctataaaaaactgcccaagactgggtaattcataaaggcttagttgactcacagttcagcatggctggggaggcctgaggaaacttacaatcatggtggaaggtgaaggggaagtaaygcactttcttcacaaggtagcaggaaggaagagtgccaagtgaaggggaaagagtcccttataaaaccatcagatctcatgagaactctctcactatcatgagaacagcatgggggaaacttccctcatgatctaattaactccacctgatctcttccttgacacgtgaggattatggagattacaattcaagacgag

SEQ ID NO: 655051 - DNA, 561 bp, Homo sapiens
tccaactttccttgagaaatctggcaatatagtcatcattttaagcgtgcatactcgtcagcactgcaattccatttctcggaacatatcttgcagaaatactcaacaagtatacacatatatagatacatgagattttttgcagcatggtttttaatagcaaaaagaaaaagtggaagtattaaaacgaccattagtagagagcttgtcaaatacattatgagcaatactcaggawggaatccaacacagcttttaaaatgggacatatccatatatatggatgtggaattaattatcactatagtaagcaaaagagagtttcaggcagtatgtattgtataattccacttgtgtataaaaagctcaagactatatgcatttatataatccatattgatggctggagtcatggttaggcaatgccatagaaaaagatagataaacacccaataattttaacactgttttcccccttgggaacaagagtgcaggaataactcaaggaatcttcattttaactttatactgttcagtgttatttgaagtttttcaacaagaa

SEQ ID NO: 655052 - DNA, 561 bp, Homo sapiens
tccaactttccttgagaaatctggcaatatagtcatcattttaagcgtgcatactcgtcagcactgcaattccatttctcggaacatatcttgcagaaatactcaacaagtatacacatatatagatacatgagattttttgcagcatggtttttaatagcaaaaagaaaaagtggaagtattaaaacgaccattagtagagagcttgtcaaatacattatgagcaatactcaggatggaatccaacacagcttttaaaatgggayatatccatatatatggatgtggaattaattatcactatagtaagcaaaagagagtttcaggcagtatgtattgtataattccacttgtgtataaaaagctcaagactatatgcatttatataatccatattgatggctggagtcatggttaggcaatgccatagaaaaagatagataaacacccaataattttaacactgttttcccccttgggaacaagagtgcaggaataactcaaggaatcttcattttaactttatactgttcagtgttatttgaagtttttcaacaagaa

SEQ ID NO: 655053 - DNA, 635 bp, Homo sapiens
ggagcctttgctgactcctccctgtgttctttgtcacctccagactcctttttcctataggcatgtatcagttaattgttcactcctgggtctgtgtgtcccacaagacagtgaactttctgggagcatagccgagtgtgttcacctttgtatcaccaggatcttatgcatagtaggtacttggtaaacattcatggaaggagtgaaggaaagatcccgtgaatacccccattccactcagagacactatattctctaacaggacaaagtctccctgaaagtctatatgcagaaaacaatgttaaatcagagaatgggccaggcacagtttctcaagcctgtaatcccaacactttgagaagccaaggcaggtggattgcttgagcccaggagttcaagaccagcctgagaaataatggcaaaccacatctcgacaaaaaatacaaaaattagtccgcccgacggccgccatgtctagggggtgggggggcccctctgcccggctgccacatctgggaagtgaggaactcctctgcccggccgccaccccgtctcggaggtgtacccaacagctcattgagaacrggccatgatgacgatggcggttttgtcgaatagaaaagggggaaatgtgg

SEQ ID NO: 655054 - DNA, 551 bp, Homo sapiens
gtttgactttcatttttttttcctacttgcttttctttttgaagaatcccaatatcaggaagacagaaaaaaagccccaagatatttaaatggaatgtggcagaaactctgagcagcctcctactcctctctcttttttcttaacaacaggaccttgattttatttggtccagcagtgcacacagctgaaaggtgtttgtcagcctgctttgtggttagcagtagccatgtgactgagctctggtcagtgagatgtatcatatgggacttccaagaagactgtttgaagagatttaaggatgcctgacatgctgggaaaagaggctgttgtcctccttcctccttcctgctgcctgggatacagacatgattgctagagcttcagcagccttcttcttcttctaagaagacttgggggattgagaactatgctgaagatagaggagcctgggtctctaatgacttcacagagctgccatacaagctctgggctgctttcttcyggatttccttaagtgaaaggatttaagccactgtgtatttgagttact

SEQ ID NO: 655055 - DNA, 618 bp, Homo sapiens
cataattcccagtagtccaggataaagccacttttgattgggtgcctcctttttcacattacaaactaacactcttggcatttcttaatgaaaaacaggtctttagaatctgagaattagtagtcagatttttaacaccttgtcaaagacaacctcactcagcacagtgttttggaaacagccctgttattggccacccgagggtcaggttacagtgctgctgttctgttgattggccgtgagatcttgggcaagtcacttggacttatggagcctcgagttgtatccagtcatctttatttttgtgacttctatgtactaagcattttccaaggtgctgagaattcaagagtaaacaaataaatcaaaaatccttgccattacagggtttatgatggagggacgtggggatgtgggaaragaccttaaatacagatgtcacatattcatagatgtttacaaactttgataaatactatgaaaggaaagtacctagttctcagataggtagtcatttaatttagattgaggggtagaagacaaggaatgtatgggacatagccaggcaaaaatggggaaagacagttccaacagcagggagtagacagggaatggatc

SEQ ID NO: 655056 - DNA, 304 bp, Homo sapiens
ggcgagtatccacttcatgagtgttttggcagattcrtgatattgcatgtgacacgtgatattgcataaaacccgactatttttctctatctcggaaacctactgttgacactgaacctattgcaattgtaattttattagtttgcaatttacttgcatttactgttattgttgttgctgtttatatccctcaccagactataaaatccatgagagcacagaccatagctgccttgctcacatgcattccagaagctagcacataataggtactcaagaacactattttctgtaaaatgtatat

SEQ ID NO: 655057 - DNA, 575 bp, Homo sapiens
ctttgggcctactgctgtttttttaaagtaataattacatacttaatggtgtactaatcaaaaacaatacattaatatatgtaataattagtgattataatacatccaatattctaatatatgtaatcacaagtgattatacaatatttaatatgtataataattagtgattataataacaatgacaacctgtatttctaggacaggcacagctagaatacacatacacactgtaggataaatatagatatatatatacacacacacacacatatgtgtatttatgtatttttaaaaacatactgctggaatatatatacatgtgtttatatgtataatctccatcaatccttacaataactttacaaggttagttctattatctcaattcaattcaactcaattcatttcaattgacggtgaatccaaggctcagtaattcccaatgtcacatcactaataagtggcagcatgtgaaatgratctgagagatctgtctacagcccaaacccctaccctctacactatgcttcactacaaaagccacaaagctgcctccatcctgttaggttaat

SEQ ID NO: 655058 - DNA, 575 bp, Homo sapiens
ctttgggcctactgctgtttttttaaagtaataattacatacttaatggtgtactaatcaaaaacaatacattaatatatgtaataattagtgattataatacatccaatattctaatatatgtaatcacaagtgattatacaatatttaatatgtataataattagtgattataataacaatgacaacctgtatttctaggacaggcacagctagaatacacatacacactgtaggataaatatagatatatatatacacacacacacacatatgtgtatttatgtatttttaaaaacatactgctggaatatatatacatgtgtttatatgtataatctccatcaatccttacaataactttacaaggttagttctattatctcaattcaattcaactcaattcatttcaattgacggtgaatccaaggctcagtaattcccaatgtcacatcactaataagtggcagcatgtgaaatgaatctgagagatctgtctacagcccaaacccctaccctctacactatgcttcactacwaaagccacaaagctgcctccatcctgttaggttaat

SEQ ID NO: 655059 - DNA, 580 bp, Homo sapiens
ctaagtctatgaggaacactgggctctattctagaagagcttagagttttcttccaatcttacctggtaaacctttaagactcttccctctgtagatttctgggttacttccttatccatgctgtctttcagagaaagtacagggttgggttgaagagtcttctgaggccctacaacaactctcctctgttctttctgggcctaagctggggctggagtgttgatagctgggctttttgccaaggcctaaactccgtccccattgccaagggcagctctggtcagggtaagttgcagatggctgaagaaactccatcctggacctctggattaggctcttttccagggggttaagtgtgtataggaagatcttgggctgatagrggttgggtgcattggagaagcattgagtgtgccagtacagaggaaagagtaagggaggggagggcgggtcactagggccctgaggagctgaaatttgtagacttcaggttcattcattcattcactgcataagcaattgtataccatatagtgattttcaggccctatgcctgtagaactttgatgctatgaaaga

SEQ ID NO: 655060 - DNA, 580 bp, Homo sapiens
ctaagtctatgaggaacactgggctctattctagaagagcttagagttttcttccaatcttacctggtaaacctttaagactcttccctctgtagatttctgggttacttccttatccatgctgtctttcagagaaagtacagggttgggttgaagagtcttctgaggccctacaacaactctcctctgttctttctgggcctaagctggggctggagtgttgatagctgggctttttgccaaggcctaaactccgtccccattgccaagggcagctctggtcagggtaagttgcagatggctgaagaaactccatcctggacctctggattaggctcttttccagggggttaagtgtgtataggaagatcttgggctgatagaggttgggtgcattggagaagcattgagtgtgccagtacagaggaaagagtaagggaggggagggcgggtcactagggccctgaggagctgaaatttgtagacttcaggttcattcattcattcrctgcataagcaattgtataccatatagtgattttcaggccctatgcctgtagaactttgatgctatgaaaga

SEQ ID NO: 655061 - DNA, 631 bp, Homo sapiens
ggtgacattcatagtaactggaatcgcaataagaagagaaacaagtacagccttagtgataggttgacttcacattacctggaatatctaactggagctgtctggcagagagttggatatattaatttgaagttcaggggagaggtgttagctacagatattgagttaaatactagctgagggcgagagaatggaggtgatctcccaagtacgaatctccaagtatgaatcatccgttagcctgttgggcaagaaaagccatggctgaggatagaacctcggggacaccaaggtttgtgtgggtcaggtgaaaaccttgaaggaggccaagaataaataaccagtcaaatcacctggctatattgggagtcagtgagggatacttaggctgtagatctcaaccccatttccacccctcttttatggtgtcgtactattctgcagaggtgaaaagtcatcaaatgatacttgcttggttggaaggcagatgggaggcagaggctatcctctgtcagctgtttctgctggcaagtaaaatcacgtattcatgagtgaagagacaatygcagggccagattcagatggccagatgatggctttttggcttccatgtccctttatacccatgcct

SEQ ID NO: 655062 - DNA, 458 bp, Homo sapiens
tcggattatgttttgatgttgatggagtatattctcaaacagctttytgaggacgggtgcacagaaagtaaattttttgagaccttgcatgcctgaaaaacaagatctttatttcattctctagaatgaatagactacagtagcctagtataaaattctagactactagcactttgggaagctgaggcaggtggatcacttaagcccaggagtttgagaccagtctggcaatacagcaaaatcccatctctacataaaagaaaaaattagttgggcatggtggtgctcatgtcccagctactcaggaggctgaggtgggaggatcacttgagcccaggaggtagaggctgtagtgagccgagatcacaccactgcactccattatgggtgacagagtgagacctatctcaaaaaaaaaaaaaaaaaaaaaaaaagagagagacagagaaagagaattc

SEQ ID NO: 655063 - DNA, 458 bp, Homo sapiens
tcggattatgttttgatgttgatggagtatattctcaaacagctttctgaggacgggtgcacagaaagtaaattttttgagaccttgcatgcctgaaaaacaagatctttatttcattctctagaatgaatagactacagtagcctagtataaaattytagactactagcactttgggaagctgaggcaggtggatcacttaagcccaggagtttgagaccagtctggcaatacagcaaaatcccatctctacataaaagaaaaaattagttgggcatggtggtgctcatgtcccagctactcaggaggctgaggtgggaggatcacttgagcccaggaggtagaggctgtagtgagccgagatcacaccactgcactccattatgggtgacagagtgagacctatctcaaaaaaaaaaaaaaaaaaaaaaaaagagagagacagagaaagagaattc

SEQ ID NO: 655064 - DNA, 592 bp, Homo sapiens
ctagtacttattattcagtatctgttatttatataagtttctcattcttctaacttctaaagttctggcttttcaacctagaggtgcatgtttggtaagaccaaagcgatgtagaaatggagggatttaaaattctttgttttaaacagatgagatggttgggtttggaagctttgaggaattctgacatagagagtgaaatagctctgatttaggaaatgctttgagagattacaatactgggttctatctatatgggaaaggaataatactgacaactagcataaaatggatggtagaattcacttagcataagtttttatgtcctaagagtttcagctccaatttatgcagaaacctcagtgtgagtcagttagagayaggaagccaggacatggtaagaccgaaggtggatcatgagggactgttcaccagtcatccaaatggcaaatgttatgctcagccctgaccaaatggcatcaatagccaagtgttcctgatgtggaagtggcataggcagaagacagcatgtgagtcaaggggtggcccaagtgtagtctaggactccacccagtagtgctggttacagaga

SEQ ID NO: 655065 - DNA, 592 bp, Homo sapiens
ctagtacttattattcagtatctgttatttatataagtttctcattcttctaacttctaaagttctggcttttcaacctagaggtgcatgtttggtaagaccaaagcgatgtagaaatggagggatttaaaattctttgttttaaacagatgagatggttgggtttggaagctttgaggaattctgacatagagagtgaaatagctctgatttaggaaatgctttgagagattacaatactgggttctatctatatgggaaaggaataatactgacaactagcataaaatggatggtagaattcacttagcataagtttttatgtcctaagagtttcagctccaatttatgcagaaacctcagtgtgagtcagttagagataggaagccaggacatggtaagacygaaggtggatcatgagggactgttcaccagtcatccaaatggcaaatgttatgctcagccctgaccaaatggcatcaatagccaagtgttcctgatgtggaagtggcataggcagaagacagcatgtgagtcaaggggtggcccaagtgtagtctaggactccacccagtagtgctggttacagaga

SEQ ID NO: 655066 - DNA, 568 bp, Homo sapiens
aggaaagtatttaggaagagtttttttaaggaagatgttgtcctttaggaaggacaatgtctttagggactggggaggaggccttccctgtcctcttgaccattctttcccctgtggcctctgactccrgggcaggggagaggcagtactctgctacacttcagtggaagctgcagctgggagtctggggccagggtgcagcatgaacattgctgagcccaccattgcagtggctccagtcagccttggcgtttgtatgcaaggtccctgagcctctgcatcatgcacaagcacttgggaggagatggtagcattgaacagacattctctcctcacccacataaatcctcagagggtttccctctgtgggtttataaaagccctttatctaattcatggctcagagaattgagctcactggcaagaggctttttaagtcaaattttgaataatttctcagcaattcattacgtaggaaaacaggtcctttttgttctaatacttagcctaggaatgcaactactctctgccaaattcattaacaaaacctgtgtataaggcctggaag

SEQ ID NO: 655067 - DNA, 555 bp, Homo sapiens
catggaagaagcacttggctcagcccagagcagacctggccaataaaaatacaaaggaacttcaaaaggtttgtagaaagtggaatgaaaagataaaaataaaaaatataaactttgtttctcaacgtaaactccatcaagttcaagacacttttgtaagtggtcataccagccatttagtccatccctaaagacctgaggctcctgggcatttaaccatgtcaatgcagtttttatacattatacagaatgggtgccctttgcagatattttaagattaggaaacaacaaagaagtcacaaggagacaaatcaggactataaggtggatggccartgatttcccatggaaactctcacaaaattgtccttctgcaagtgaggaatgagcaggagtattgttgtagtgaaggactctccagtccttcactccgggactttcctgagtgtttctctgctaaagctttgctaactttctcaaaacactctcataatgaacaggtgttatcattctttggcactccagaaggtcagcaagcaaaatgctttgttcatc

SEQ ID NO: 655068 - DNA, 495 bp, Homo sapiens
ttattttattttattttttttgagacagagtttcactcttgttgcccagtctggagtgcaatggcacgatctcagctcaccacaacctccgcctcccaggttcaagtgattgtcctgactcagcctcccgagtaaatgggattacaggcatgtgccaccatgcccgrccaatgttgtatttttagcagagacagggtttctccatgttggtcaggctggtctcgaactcccgacctcaagtgatccgcccgccttggcctcccaaagtgctgggattacaggcatgagccactgtgcctggtgggtctctgtagatttttagagaaacatggaaatggaggtgaagctaagggaaaacagagaccccactgcaagagttgcagggaaagtgagtaagaaaaacgcttggctaggagaaggcaccagaagtagctcttgagaaaagagccgaaagagcaaccccaagcagaagggatctcagagaaggagggttca

SEQ ID NO: 655069 - DNA, 567 bp, Homo sapiens
cccagtagcttttctagaaccactaccttcatcatgaggctccctaggttttcccagttcagagttgggcatcttcagcttcacttttctaatgaacacattatagagaggataactagattggcaaccctctcctatgtctttccagcgctttctgctatcaattcaatggccacttcttccaagacatccatctgtacctcctaggtcgagatttctatcatcttctttcaggcttggcaggcctatagttgctcggtgtaggaggtcatcagaatctgattgttgctttttcttttyttttttttttttttttttagtaaaaccaacacaaaagagatgaagcaaataaccatcagtagctctgacattaacgtaaacttcatacctggtctgacactttttaaccatggagcacattttttcgtgggtgaaatccctgccacagaagttggtcaggcaatcttcaccctaaataccttcagtaatgaacttgaattttctaaatgcaacctcattgttctgtagatcaacaaggctcacttcaaaaaaatggctcaaccactt

SEQ ID NO: 655070 - DNA, 639 bp, Homo sapiens
gctcccaccttcgtggtaacgagtaagtcagcactcagcaaagtataaagaaattacaaatayagcagtatctccattctcttcttcttttcactggtatagtcgggtctattttgggactctactctaacagacaatctgtctatctggtgtcaataatataatattttagctactttcactttttattatgttttatatatgatggagctaaagataagattcttcctgtagtctttttttttcttcaggaagatcctgactattcttacataattatacatctgacaaatgactaatatctacagtctacaaggaactaaaaaaaaatttgataaaacaaataattttaccaaaaagtgagctaaggacattaatagacaattcccaaaagaagatatacaaatggccaacaaacatatgaaaaacatgctcaacatcactaacgatcagggaaatgcaaatcaaaaccacaatgcaatgccaccttactcctacaagaatggccataataaaaaatctaaaaatattagatgttggtgtggatgcagtgaaaaggaaacacttctacactgctggtgggaaagtaaactagtataatcactatggaaaactgtgtagagattccttatagaacta

SEQ ID NO: 655071 - DNA, 639 bp, Homo sapiens
gctcccaccttcgtggtaacgagtaagtcagcactcagcaaagtataaagaaattacaaatatagcagtatctccattctcttcttcttttcactggtatagtcgggtctattttgggactctactctaacagacaatctgtctatctggtgtcaataatataatattttagctactttcactttttattatgttttatatatgatggagctaaagataagattcttcctgtagtctttttttttcttcaggaagatcctgactattcttacataattatacatctgacaaatgactaatatctacagtctacaaggaactaaaaaaaaatttgataaaacaaataattttaccaaaaagtgagctaaggacattaatagacaattcccaaaagaagatatrcaaatggccaacaaacatatgaaaaacatgctcaacatcactaacgatcagggaaatgcaaatcaaaaccacaatgcaatgccaccttactcctacaagaatggccataataaaaaatctaaaaatattagatgttggtgtggatgcagtgaaaaggaaacacttctacactgctggtgggaaagtaaactagtataatcactatggaaaactgtgtagagattccttatagaacta

SEQ ID NO: 655072 - DNA, 620 bp, Homo sapiens
ctacagtaaaaacaggtatgtatataaataagataaccaggaaaccccccaatcattgaaaaaacctttggaatagatttgaaatatccttcatctcaaatcctgttgtgtctaccagagtcctgggaaaatgtgaatcaacaggcacaaaatwacaggacttctatatttttcatcctgaaggtgctgataatggtgatgggggaagggagacattgattgattttcttctttattcaacttctagttgagtttcattaaccttttagcaaacaatgatgttctaaacaagcaaagtgtttcttcgaagtttattcccccctaaatacgtggtaatagtatttgaaagtggatttctatttcaattgccacccaagcatccttttctctagcctgtcaccaaaaaaaaagattatacataatatgatttttttttaaaaaagtggaattcaaaatttaaatttgcaatgaaaaacacaatcatcttagttcagtcaataaaaagatagaaagtgagcctgagtattttgatccacccacttactgcaaagttccacataactttgactttcagatgaaaatattttcaataaacattggtagaatcaaactgaaatctg

SEQ ID NO: 655073 - DNA, 611 bp, Homo sapiens
aaagcttcaaaaaatagtgatgaaaaaggttaactctgatgctgttctggagctgaaagcagattttgaccttggataaacatgctggattttcgytattgaatgtattgggcacaattcaaggtacacagtcattccagaatgtacttgataaaaataagaaatttgcatgtcttagagggacatggacacattctttatactcagttgcagactggttgttttaaaaaattaagtgttaacaatttgcttacagttcttgctcatatatggtaactcgaaaattgtcagtgctgagtttagctggaaaactcctggaagtgtcaacccattctcaaaataaatggttttcacagctatgattttatacaaaaattttgagcggtttagagtatcaatccttttcattaccattgtgcttcatttaaattaaattttcaagagagttaatgtgccgacatgctattgtcaaactgaacaacaacaaaaaacaaaccccagtcccttgaatagaatttatttcaagattgttttgaaatagttttccactttaaggtatgtgaactacagaatttgtatttttatttagtcaaaaacatgtggttgttgaa

SEQ ID NO: 655074 - DNA, 515 bp, Homo sapiens
atatatatatatatatatatatatatatatatatatattccaaattatccatctcttttagctgttacagtgggagtagtgttctgtgcttcctattccttcctattagaaacaggggtccttaatcaacatttaaaaatagttactacatttcctgatagcattattttctactaaaaacatctattactagagcccttaggaacttgctgcaagactcaggtttggccatacgcagataacaatttctgaaacttttgaattattttttctaattattagtatcaccttcctttccagttttattctgacccagttacattttgtctttttgccggtccactttaagtaaggctggtaaaatgcccatatctgctggtgagttgaaacagttattaaaatggacgatgtcagcttgagttttcctgtaacttgaaaggaaatctcgtggtgacagcacgagrgtttcctataaaatactgatttctaaacagattattaatcaatactggttg

SEQ ID NO: 655075 - DNA, 579 bp, Homo sapiens
aaatgggaatctttgatggtttggagaccagtgatctgtggaataagagtgtctgaggaagaagaataactttggcatgtaggatgacttaggcaggagggggatgcctcacctagtcagctatgagcccatgccagccatcccrgtgtgaagtgatgactgaggggctggggagtgatgtggaagggatgggatgttgataaggggcatttcaaaagaagactcagcaggatttaataaacacttttcggtagatcaaaatctgtaggcttactgaggtcgcagcagaagagataagaaaatgactaacagttgtagaagtagcagaagacagaaggtctagaaaatagaaaccaggcctaggagtcagcaacccatgaccttgcccaatgcacttgttaattcattccttaaaaccaggaggtagcctcgccattatggaaccttgctaggctcttgcattctgccattgagtaagagatctaagatcgaaggagaaaagacaccccagccctgtcaatagcagcctttctgaaatttcctggatcctgccacttcacaaggcaagcttctcctggc

SEQ ID NO: 655076 - DNA, 571 bp, Homo sapiens
aaatgggaatctttgatggtttggagaccagtgatctgtggaataagagtgtctgaggaagaagaataactttggcatgtaggatgacttaggcaggagggggatgcctcacctagtcagctatgagcccatgccagccatcccggtgtgaagtgatgactgaggggctggggagtgatgtggaagggatgggatgttgataaggggcatttcaaaagaagactcagcaggatttaataaacacttttcggtagatcaaaatctgtaggcttactgaggtcgcagcagaagagataagaaaatgactaacagttgtagaagtagcagaagacagaaggtctagaaaatagaarccaggcctaggagtcagcaacccatgaccttgcccaatgcacttgttaattcattccttaaaaccaggaggtagcctcgccattatggaaccttgctaggctcttgcattctgccattgagtaagagatctaagatcgaaggagaaaagacaccccagccctgtcaatagcagcctttctgaaatttcctggatcctgccacttcacaaggcaagctt

SEQ ID NO: 655077 - DNA, 527 bp, Homo sapiens
agctcaagaaaaataaacacatatgaatatgtgtattcaaaaaatacaaatggaattttaaaacttcaaagacagaaaatttcaggccccggtaacatccctagtgaattctaaaatttagggaagataaagtattagtctccraagattagaaaacttaacagaagattacagaaactgaaaataagcaagaccatcaatgtctcagaacttacaggtatgaagatatagtttaacccactgaataaaaaactgcctgaaagcatagggaaaatgaataacagaaaaaggaagtcataaacactaactacagctttttcatcagcttcagataggtggactgtaatacctacctgtattttattttttttccttgatacatgatatgtatgtttctatctttaaaataatttttctcatgttttaccccttttcgtttatatagagtatactggtaatcgttaacctagtaattttcaggttactgagtatacagaccacattgtggcaaaacagaaggaggaaag

SEQ ID NO: 655078 - DNA, 641 bp, Homo sapiens
tcgtgaagtaggcattcagatttctttctgcagaagtagtgatatttcccccaggcgcytctcttatggtagctggtcctaagggaatactcttttgtcagtagcatgcagtagtcctgtataggtaataagagacctccatctccatattgctttcagcaatttgccctaaaacaaataatctaaactctttgattcctcatttccatatgcagtaataggactaataataactgccctgtcaatctcatggcagttgtgaaaatgaatatatacaatttttatttatcaattatattacacctcaataaaactggagaaaatgagaaatgtacagattatggttcaatgaagattctatgaagatatttttagggacaaaatctgcagtgttgtctgcagcattgacttggttgtctccaaagattataatagcattaataatatttttccttgggtttagataactctatggtgtctgtgcagtatgattaattgaatgcttcatatgtactgaatcttttttcatgaactaggctgatttacaatgatacagttagcagttatttagggtgtcactggaaaattcttgtttatattactttttatttatacattatgtacaaaaaattgccttcttc

SEQ ID NO: 655079 - DNA, 552 bp, Homo sapiens
tgtaagagtgctacatttttgttcctcttttaaagtaaagtgcaagcccaagatattccaagtagataggaataaagtctgatactgttactcctgactcaggtgaaaagtgaaggcagtgttgtccaatagaaatactgtgtgagccacatgaaaaattctttagaagctacatgtaaaaagcagatagaattaattttaatagtacatatttttttactgctataatcaaatatatcaaaatattaccatttcagcatgtaatcatacaaaaaatattgatgaggtattttacgtccttcttggtgctaaggctttaaaatctgatgtgtattttacacttagagtatacatcagtttcagtaagtcacactcaagtgcccaatagccaccatagagtgcaggtctaagggatggtttgtttaagagatgtattcttatttcacagtgtattataaatagccgctacctagtagaaggaaaatagtttgcatttaagtattgaatgttaaarctaaaatggaagaagcaatattagtatagttttgactt

SEQ ID NO: 655080 - DNA, 553 bp, Homo sapiens
ttgggtatgtctttatcagcagcatgaaaattaactaatacaggggtttatttagactttaaaatatgttgctttttttttttttttgagatggagtcttgctctgtcactcaggctggagtgcaggggggcaatctctgctcactgcaacctctacctcctgggttcaagcagttctcctgcctcagcctcccaagtagagtagctgggtctacaggcatgtgccaccatgcctggctaatttttgtatttttagtagagatagggttttaccatgttggccagscttgtctcaaactcctgacctcaaatgatctgcctgcctcagccttccaaagtgttgggattacaggcataagccaccatgcctggcaatatctatctagttttctatctagttataaaagtaatacttattcactgtagagaatttttaaaaatacagaatgtcatcaatcataaaaaatcacttatctatcacctatagataaccattaccaatatttcagtacattgatacgtatactcttttgttcccccgcaggcataagcc

SEQ ID NO: 655081 - DNA, 583 bp, Homo sapiens
aaggccggtcaaattctttactatacagcatactatcaacatgacatatcactgatgatggtgaccttgatcaccaggctgaggtagtgtttgtcaggtttctccactgtaaagttattctctcccctcaccttttccgtactctactctttggaaggaagtcactacaggcacttcagatataaaaagttatgcccaacctccttgaggggtaaatatttacattaaattaatcggaatactttgacaagagagatttatatcttcctcctgtttatctatttattaatgatttactttatatcagtgtgggttcatgaatattttatactttggttataatctaatagagctttattttactactcacgttgttctagccttggttgttgggaagtcttgcagaggcatcttgtgttcctttgacttcctcccgccactgtgaattgttttgtttttgtttgtttttagcacwtcctttcttgtactacaagatgctctaagctcatcttctgtttcctgccccagtcctagagccagccatttctctagagagcactggttttttgaaattggagaatac

SEQ ID NO: 655082 - DNA, 567 bp, Homo sapiens
tactccctggctcttctgggcacttcctagggactccagatgccgcaacagtagcagaaactacagcatgaaccatactttggggtgagcaagccagtggacatgagccagcaatcatcccaatctgcaggatctaactgcaaccacccaggcttaacgaggcaagccagtgtttgcacatagatgcaagaaaatctcaaagtatcaagacctggcaaggagggaaactcttattctgtgttggtgggattggtataactactatggagattgtaactactgtgaaaaacaatttttcatcattttgttaagttgaacatttgtatatgtcttgaccctgtttgcaaatgtaaaattacttgtttttaaacagccagaacaatgacaaagattgctcataagagaagttttcacaacagcaaaataacggaaacaattcatgatgagtggataaaaaaatgtggcgattcctcaaggatctmgaactagaaataccatttgacccagccatcccattactgggtatatacccaaaggattataagtcatgctgctataaagacacat

SEQ ID NO: 655083 - DNA, 295 bp, Homo sapiens
acaggcaatttctatccatgtgtaaaggcattttctagctatgtgtactgtttgttcttgcattgttatagagaaatacttgagactgggtaatttagaaagaaaagaggtgtagttggctcayggttccacaggctgtacaggaagcatgatgctggcatctgcttggcttctggggagacctcaggaaacttacagtcatcatggaaggtgaaggggaagcaggctatggccagagcaggaggaagagagagagaggaggtgggaggtgccacacacttttaaacaactcgat

SEQ ID NO: 655084 - DNA, 620 bp, Homo sapiens
gtatcaactaagaatatttggcatagacacatataagaatgactaaagcacttaaacgaagcggagacagtaatatttggattagaaattgcaaggaactggctgaattttctaatttataaatgaacttcatgttttatatacttgaaattaggtataattagcataattatcttgatgaggacattgaagatatgaaatgttaactttcctaagataacgtatataccaacttatttttgaaatttgattcaaagttttgaaacataaaaacacatgatctttcacctatcccacatatttcccaatagaaagccagggaactaagattcccagagtaaagatttgtgttcaatatgcagagtaaaacctataggttggtgctaaaataactgagtttttgccattactttcagtggcacaaactgcaattacttttgcaaaatcctattattatagaaaagattatgaagagaatttgtggcattatttttctcttattgccttagaaaagaagtgatttcagggatcagaaactgtttctacatgctcttgagrtctgtgtatgctttaaaaatcagttatttttatttttacaatttttttctatcaacttatga

SEQ ID NO: 655085 - DNA, 590 bp, Homo sapiens
actaccattcttccctctgagacaatatacgtaacaagatgttagatgcaactgtttctgttgtattggagttttaacaaagactccaacagctgaaaataaaatagttggtgcaagggacatttataccctaatgtaagatgacgtagcatgttatattaggatgtaagtgtggcattcaggacatgcaatggagttggctccaaactagttctctccactttggtctatcatctgtggcccaggtattcaagcaaatattaatggggttccagaggcactmtccccaaatatggctcattggcattttaaaaaatagcagaagcaagaatgtcactctgaccttccctattttcccctgaagtagatcataagacctggaaatgaattgctgatcttctcctgaactaggtcatcagaccttcaggtgagaggtgctcactctatacccagaggaaaggaacaaatttacctttgaagacacagggacacagagaagaatctgaacaaacaggccttgctaagtttcctccaaactagtaccattagatcataccccatttgtctaattatactctctgcaactatcc

SEQ ID NO: 655086 - DNA, 590 bp, Homo sapiens
actaccattcttccctctgagacaatatacgtaacaagatgttagatgcaactgtttctgttgtattggagttttaacaaagactccaacagctgaaaataaaatagttggtgcaagggacatttataccctaatgtaagatgacgtagcatgttatattaggatgtaagtgtggcattcaggacatgcaatggagttggctccaaactagttctctccactttggtctatcatctgtggcccaggtattcaagcaaatattaatggggttccagaggcactatccccaaatatggctcattggcattttaaaaaatagcagaagcaagaatgtcactctgaccttccctattttcccctgaagtagatcataagacctggaaatgaattgctgatcttctcctgaastaggtcatcagaccttcaggtgagaggtgctcactctatacccagaggaaaggaacaaatttacctttgaagacacagggacacagagaagaatctgaacaaacaggccttgctaagtttcctccaaactagtaccattagatcataccccatttgtctaattatactctctgcaactatcc

SEQ ID NO: 655087 - DNA, 553 bp, Homo sapiens
aatgctgggcattgtctagaaaacaacgtacgaattttctgattctatagtgatctttgccttggattatttcacttggttaatttgtagctctgtagagatgaaagttaactagtagaaaactgwtggtaatgcaagtatttcctgcctatgtctttgcaaatgattcccattcatagaaatgcaaaatattttttacaagtagacaatacaaatttctatcaatcaaatcctcagttgagcagtttgaaacatcttaccaatgccctcattaattcatgagttatctatatttgtgtgagagggatgacttaacttactttttaaaaatttctcttttaggaaaaggcagagagagctggtaaaaggtattaatcactcagagctctggattttctgaaagataaccaaagtaatgaaggctatctggttgggatctgagtagagaaacaatgttgattaagtgattcaccaaatgaggtactcaaggacgttacactgagccagagtgtatactcaggaagtggggagtaaccactactagatgtacacg

SEQ ID NO: 655088 - DNA, 553 bp, Homo sapiens
aatgctgggcattgtctagaaaacaacgtacgaattttctgattctatagtgatctttgccttggattatttcacttggttaatttgtagctctgtagagatgaaagttaactagtagaaaactgttggtaatgcaagtatttcctgcctatgtctttgcaaatgattcccrttcatagaaatgcaaaatattttttacaagtagacaatacaaatttctatcaatcaaatcctcagttgagcagtttgaaacatcttaccaatgccctcattaattcatgagttatctatatttgtgtgagagggatgacttaacttactttttaaaaatttctcttttaggaaaaggcagagagagctggtaaaaggtattaatcactcagagctctggattttctgaaagataaccaaagtaatgaaggctatctggttgggatctgagtagagaaacaatgttgattaagtgattcaccaaatgaggtactcaaggacgttacactgagccagagtgtatactcaggaagtggggagtaaccactactagatgtacacg

SEQ ID NO: 655089 - DNA, 602 bp, Homo sapiens
tacactaatttctctatgtgcctaagtaagcctctagagcaactgaactcaacrtggattaccaatttatgcttcttcagtcttgtaagtctgccatcttaatgtgaggctttctcaaaatgattccagtaaggaatgataaatctggatgattctgcactgctaattcagcagcatgtctcaagaatgattttggtaacttcgtttaacagtccatcgtctcaactaagcacatgctccacttcgctgaggtttgctaggacctatgtgttcagaatagggttttttggaatgtgcttagatctccggatagggagcactacctatctccagatggtatttcagaagctcacgagagggccctacaaaacttgagatcaagatctgagatggggccaccatctagccttctctagtaaaactgggaggaaaacgagctgatcagggcagcaccaaaagaagctggtggttggagccaacagctaatgggtggagcctgactgacaggaacaataaacaaaatcaatcaatcaaataaataaataaataaatatctccccaccaccaccacttcaatattctaatgctcttctaacctaaaa

SEQ ID NO: 655090 - DNA, 602 bp, Homo sapiens
tacactaatttctctatgtgcctaagtaagcctctagagcaactgaactcaacatggattaccaatttatgcttcttcagtcttgtaagtctgccatcttaatgtgaggctttctcaaaatgattccagtaaggaatgataaatctggatgattctgcactgctaattcagcagcatgtctcaagaatgattttggtaacttcgtttaacagyccatcgtctcaactaagcacatgctccacttcgctgaggtttgctaggacctatgtgttcagaatagggttttttggaatgtgcttagatctccggatagggagcactacctatctccagatggtatttcagaagctcacgagagggccctacaaaacttgagatcaagatctgagatggggccaccatctagccttctctagtaaaactgggaggaaaacgagctgatcagggcagcaccaaaagaagctggtggttggagccaacagctaatgggtggagcctgactgacaggaacaataaacaaaatcaatcaatcaaataaataaataaataaatatctccccaccaccaccacttcaatattctaatgctcttctaacctaaaa

SEQ ID NO: 655091 - DNA, 484 bp, Homo sapiens
gtggccggccctgtatacatgcaaagctctttaacaagttgggtggaacatgccttagcgatccattgtttgcagtggtcttctttaggccatagcagcctgtcttgccattctgcacatgcaagtctgcatactcatttttgttgaggtctcccacaggggcttatctcgatctcctacttggcctctttccatcccagatttttaccttgttggtttcccttattcatagctcctttaagctgatcatgtttaccccttgtctccttggctaacttcctgactttgacacagtaatcttaccttaacctctctatgaattgcatctctcatatattttagaggagattatcccaaatgcttataattagttataagaatttacyatttgttccttttttgcgttggcaaccagaaaattataagaagtttcatgcacgtccatgtgaagagaccaccaaacaggctttgtgtgagcaataaa

SEQ ID NO: 655092 - DNA, 529 bp, Homo sapiens
atagaatctcaaaaggccctgaatagccaaagcaatcttgagcaaaaggaacaaagctggacgtatcacactgcctgacttcaaaatacactacaaagctatagtaactaaaacagcatggtactggcataaaaacagaccagtggaacagaatagagagcccagaaataaattcacacatctatggccaattgacttttgacaaaaatgcaaaaatacacattgaggaaagatcaatttattcaataaattatgctaggaaaactgaatatccacttatagaagaataaaattagacycttatctcccagcagatacacaaataaatgcaaaaatgagttaaagatttaatgtaagaccaaaacctatgatatcactggaataaaacatagggaaaatgcttcatgacattgacctatgcacagatttttttgaaaagacctcaaaaatacaggcaacaaaagtaaacatagacaaattggattacatcaaattaagaagcttctgcacagcaagaaaacaataaagt

SEQ ID NO: 655093 - DNA, 593 bp, Homo sapiens
aatagacatttctcaaaaagtgacatacaaatggccaaaaagtatatgaaaaaaatcactgacatcaggaaaatgcaaatcaaaactacaatgagatatcacctcattccagttagaatggctattataaaaaaaaaagatggaaaaaagcaaatgttgcaaagatgtgaggaaaaggaaacacttatacactgttggtgggaatgtaaattagtatagtcattatggaaamtagtatagaggttcctcaaataataaaaaataaaactaccatgtgatccagcaatcttattgctgagtatttacccaaagaaaatgaaaccagtacgtcagaaagatatctgcactctcatgtttattgtagcactattcaccatagccaacatatgcaatcaacctaagtctttatcaacagatgaatggataacaacaggataatatatatacacaactactatttagccataaaaagaatgaaattctgtcatttgcaacagcctgtatgaacctagagaatattataagtgaaataagccagaaatagaaacaaatatcacataatcttactcatatgcagaatctggtaaaacact

SEQ ID NO: 655094 - DNA, 594 bp, Homo sapiens
gaatattctataaaattacactcagagtgtctttctccttcccagagtataaatagacttaatatttatcacaaaaacatttaaattatgtcatataaaatacctaccagttcaatcaatgtagatataataccccatattcaaatcctacaaaccactrctactggaatttatttggaaagaggacaagattcagaagattgcaaccattcttataaagaaggagctattctgaaagcgatgtagttgtgcatgtattgcatgtcttagaaaatattgcaatggatcccacatgtttattatttacgtattaataaagaacattaaaagatttaagaatggactattattactgcttaaaacatgtgggagcatcacttgagcacaggaatttgaggctgcggtgagtggtaatcacaccactgcactccagcctgcatgacaaagccagaccctgtctctaaaaaaaaaaaaaaaaaaaattaattaattaattaaattaaaattaaaattacaaaaaatcctcaaacatgtaagagcataggaatggcaaagtaagattctccaagaatttactcttctataaaagaatga

SEQ ID NO: 655095 - DNA, 594 bp, Homo sapiens
gaatattctataaaattacactcagagtgtctttctccttcccagagtataaatagacttaatatttatcacaaaaacatttaaattatgtcatataaaatacctaccagttcaatcaatgtagatataataccccatattcaaatcctacaaaccactactactggaatttatttggaaagaggacaagattcagaagattgcaaccattcttataaagaaggagctattctgaaagcgatgtagttgtgcatgtattgcatgycttagaaaatattgcaatggatcccacatgtttattatttacgtattaataaagaacattaaaagatttaagaatggactattattactgcttaaaacatgtgggagcatcacttgagcacaggaatttgaggctgcggtgagtggtaatcacaccactgcactccagcctgcatgacaaagccagaccctgtctctaaaaaaaaaaaaaaaaaaaattaattaattaattaaattaaaattaaaattacaaaaaatcctcaaacatgtaagagcataggaatggcaaagtaagattctccaagaatttactcttctataaaagaatga

SEQ ID NO: 655096 - DNA, 408 bp, Homo sapiens
atgcccttctgtcatccattgccaccttcactacgccggagacgatgacatttatatttttaaaccctttttgtcaaaattaatgctatcgttctcaggtgcaggatcctaccccatggagcacctgcagaaacaggaataaattgtaaacaaaaaaatcccggtattacataagacattaaaattggaacaagagtttaattttaaaccagttcaatttcatccctaatagcaaatgctgaacaatggagaaaccctttctctattcaaagtcttccaagaacaaagaaattgtccccatgtaaagcaataacctaataccatattaataawaaccttgcattcgtataaccttcttcactttcacaaagctcttttacatctgctgtttcatagggaggtgaattc

SEQ ID NO: 655097 - DNA, 499 bp, Homo sapiens
ttggactgcaactatatcatccactctcccgggcctccagcttgctgtgtacagatcttgggacttgtcagcctccacagtcacttgagccaactccttattctctctctctctctccatcctattggttctgtttctctgaagaacccagcctaacttactcctccctgyattcaggccgctgtgagatcttcccatgtccatgggaaatagcaggtccctccacactacatatcttgccctgccctttcccttcatacctgacaaattccagcatcacataacacctgtgtttacatgttatagtctgttgttcttactggaatatcagcttcctgaaagcagggccttggttcattaatgcatctcctgtgcctgtagcaatgccaggcatactgtagacattgacaaatatttgagaaatgaatggatgactggatgaatggtagcatgggagctgggacctgagacttctgttatcaacggagttccaaagact

SEQ ID NO: 655098 - DNA, 499 bp, Homo sapiens
ttggactgcaactatatcatccactctcccgggcctccagcttgctgtgtacagatcttgggacttgtcagcctccacagtcacttgagccaactccttattctctctctctctctccatcctattggttctgtttctctgaagaacccagcctaacttactcctccctgcattcaggccgctgtgagatcttcccatgtccatgggaaatagcaggtccctccacactmcatatcttgccctgccctttcccttcatacctgacaaattccagcatcacataacacctgtgtttacatgttatagtctgttgttcttactggaatatcagcttcctgaaagcagggccttggttcattaatgcatctcctgtgcctgtagcaatgccaggcatactgtagacattgacaaatatttgagaaatgaatggatgactggatgaatggtagcatgggagctgggacctgagacttctgttatcaacggagttccaaagact

SEQ ID NO: 655099 - DNA, 564 bp, Homo sapiens
atgatgatgtataccagaattagtctcttgtgacagaagtttaagaaaattttttctagctaattatttataaataaaaatttatctaataatagttaattgttaataccattatttataccattttttgcttgtgtcaacaatttttatttggaaagttattaaacaggaaaatggaaataatagtataatgaagtcttatatgcactacctatgttcaacaattgccatattttgtgattttttaaaagaaatttacagatatttctttactatcttgcttatattgaaatttctatgattgtccataaatattgttttggagattttgtttttcttacaagatcactgcagttggttattatttctctctctctctgtctctctctctcttttaatctagaagagtcttcatgctctttttatgtcattgatatttttggaggcaccrggccaatgtcctcataaagtatcttacatgagcattttctcatggtgctgactaacctgttgctccatttcctgcattctcaagatactataatttttattcccaggcaagtg

SEQ ID NO: 655100 - DNA, 559 bp, Homo sapiens
tgctttgctagccctgctcttactgggtcccactcagaggccagtagtccaattaggagattggaaaccagraaatcttataactactgtatctgcttctgtttgtatgtgtggttatatatgtgctgtgtgtggtgtctataataaaagagagctctaataattggcctaaaggaaaataagcatatagatcaaatattttttgaaggaaaaataaaagctgtaattccttttggcctgtatgactctaatctttgagaaataagaacagttttaaagattactagtaaaatgcgaatgtcaataaaacgtaaataggtggtctaaattatgcaggtcagatactaggtttgctcaatgttttaaggttgtgaactgtttgttttgcctttgagaagtgttcaatttgcctactttacaacttggtcaggcctaggaatataggctttaatcttagtaaataattattaattatataatcttagtagaagattataagaagccacagaaatgtaaatttttgcctagggttagaggattgcttgaaatacacaaaata

SEQ ID NO: 655101 - DNA, 559 bp, Homo sapiens
tgctttgctagccctgctcttactgggtcccactcagaggccagtagtccaattaggagattggaaaccagaaaatcttataactactgtatctgcttctgtttgtatgtgtggttatatatgtgctgtgtgtggtgtctataataaaagagagctctaataattggcctaaaggaaaataagcatatagatcaaatattttttgaaggaaaaataaaagctgtaattccttttggcctgtatgactctaatctttgagaaataaraacagttttaaagattactagtaaaatgcgaatgtcaataaaacgtaaataggtggtctaaattatgcaggtcagatactaggtttgctcaatgttttaaggttgtgaactgtttgttttgcctttgagaagtgttcaatttgcctactttacaacttggtcaggcctaggaatataggctttaatcttagtaaataattattaattatataatcttagtagaagattataagaagccacagaaatgtaaatttttgcctagggttagaggattgcttgaaatacacaaaata

SEQ ID NO: 655102 - DNA, 652 bp, Homo sapiens
ctgcgctaatggaagttagacctacccctttagagaagggaatgatagatgcgggagacagatgagagaacctgcacagggtattgctttggcatgcctgcaatggacgatggacctacatgtgcactgggagaacgaggtggagccatcaggaatttttgtctttttcagggggaagagctggcctcttcaacttttgggtggtggcctggtattcaatctgtgaagtgggagcctgctggcaggccccctctttctctactgagagctttctttttgctgaataaatccatcctcctcacccttcartgtgtccacctgcctaatttttcctggtcatgagacaagaacctggatattagctgatttaaggagcaaaaaccctgcatcacaagaaagttatggggccagataatgtcagtcatgactcatttcaaatacttaaggaataaatgaggccaaacacagaaactcttccacagaatataagataaaaagtaactgcccaattttgttctgtttttgtcaataaccctgacaacaaaacctgaaaggaacatgaaataagggataaggatccaagattaaaggtcaagctcagtaaaaattctaaacaaaatattgtcaaactaaatctggcaatgtataaaag

SEQ ID NO: 655103 - DNA, 526 bp, Homo sapiens
tggatattagctgatttaaggagcaaaaaccctgcatcacaagaaagttatggggccagataatgtcagtcatgactcatttcaaatacttaaggaataaatgaggccaaacacagaaactcttccacagaatataagataaaaagtaactgcccaatttkgttctgtttttgtcaataaccctgacaacaaaacctgaaaggaacatgaaataagggataaggatccaagattaaaggtcaagctcagtaaaaattctaaacaaaatattgtcaaactaaatctggcaatgtataaaaggaataacaacacacacacacaaacacacatgaataacacatcaaaacaaaattagatttttgcattaaaagtttgcttcaaatttagacaaataaaagcaaagtaacaaaaataggacaaagattaaatattccaaataactgtgttaacaaatgcagggaaaacatctcatttcacatataattatgattaaaaccattaagataataggaatcagaaagaaagt

SEQ ID NO: 655104 - DNA, 526 bp, Homo sapiens
tggatattagctgatttaaggagcaaaaaccctgcatcacaagaaagttatggggccagataatgtcagtcatgactcatttcaaatacttaaggaataaatgaggccaaacacagaaactcttccacagaatataagataaaaagtaactgcccaattttgttctgtttttgtcaataaccctgacaacaaaacctgaaaggaacatgaaayaagggataaggatccaagattaaaggtcaagctcagtaaaaattctaaacaaaatattgtcaaactaaatctggcaatgtataaaaggaataacaacacacacacacaaacacacatgaataacacatcaaaacaaaattagatttttgcattaaaagtttgcttcaaatttagacaaataaaagcaaagtaacaaaaataggacaaagattaaatattccaaataactgtgttaacaaatgcagggaaaacatctcatttcacatataattatgattaaaaccattaagataataggaatcagaaagaaagt

SEQ ID NO: 655105 - DNA, 531 bp, Homo sapiens
aaagagtaagtaaagggcatgaatagatatttctcaagaaaagatagtaaaacagccaataaacatatgaaataatgctcagcatcactaatcatcaggtaaatgcaaattaaaataacaatgaaatactactttacwcctgcaagtataatcataactaaataatcaaaacaactatagatgttggcatgggtgtggtgaaaagagaacacttttaccctgcttgagggaatgtaaatgggtacaaccactatgataaacagtatgtaaattccttaaagaaccaaaaggagaactatcatttgatccagcaatctcactactgggtatctacatgaaggaaaagaagtcattatatgaaaaagacacatgcacatgcatgtttatagcagcacagttcataactgcaaagacttggaaccaacctaagtgtccattgattgaatcaataaagaaaatgtgttaaatatatacacaccaaggaatactactcggctgtaaaaagaaataaaatatcatcttttacagcaa

SEQ ID NO: 655106 - DNA, 531 bp, Homo sapiens
aaagagtaagtaaagggcatgaatagatatttctcaagaaaagatagtaaaacagccaataaacatatgaaataatgctcagcatcactaatcatcaggtaaatgcaaattaaaataacaatgaaatactactttactcctgcaagtataatcataactaaataatcaaaacaactatagatgttggcatgggtgtggtgaaaagagaacacttttaccctgcttgagggaatgtaaatgggtacaaccactatgataaacagtatgtaaattccttaaagaaccaaaaggagaactatcatttgatccagcaatctcactactgggtatctacatgaaggaaaagaagtcattatatgaaaaagacacatgcacatgcatgtttatagcagcacagttcataaytgcaaagacttggaaccaacctaagtgtccattgattgaatcaataaagaaaatgtgttaaatatatacacaccaaggaatactactcggctgtaaaaagaaataaaatatcatcttttacagcaa

SEQ ID NO: 655107 - DNA, 531 bp, Homo sapiens
aaagagtaagtaaagggcatgaatagatatttctcaagaaaagatagtaaaacagccaataaacatatgaaataatgctcagcatcactaatcatcaggtaaatgcaaattaaaataacaatgaaatactactttactcctgcaagtataatcataactaaataatcaaaacaactatagatgttggcatgggtgtggtgaaaagagaacacttttaccctgcttgagggaatgtaaatgggtacaaccactatgataaacagtatgtaaattccttaaagaaccaaaaggagaactatcatttgatccagcaatctcactactgggtatctacatgaaggaaaagaagtcattatatgaaaaagacacatgcacatgcatgtttatagcagcacagttcataactgcaaagacttggaaccaacctaagtgtccattgattgaatcaataaagaaaatgtgttaaatatatacacaccawggaatactactcggctgtaaaaagaaataaaatatcatcttttacagcaa

SEQ ID NO: 655108 - DNA, 531 bp, Homo sapiens
aaagagtaagtaaagggcatgaatagatatttctcaagaaaagatagtaaaacagccaataaacatatgaaataatgctcagcatcactaatcatcaggtaaatgcaaattaaaataacaatgaaatactactttactcctgcaagtataatcataactaaataatcaaaacaactatagatgttggcatgggtgtggtgaaaagagaacacttttaccctgcttgagggaatgtaaatgggtacaaccactatgataaacagtatgtaaattccttaaagaaccaaaaggagaactatcatttgatccagcaatctcactactgggtatctacatgaaggaaaagaagtcattatatgaaaaagacacatgcacatgcatgtttatagcagcacagttcataactgcaaagacttggaaccaacctaagtgtccattgattgaatcaataaagaaaatgtgttaaatatatacacaccaaggaatactactcggctgtaaaaaraaataaaatatcatcttttacagcaa

SEQ ID NO: 655109 - DNA, 608 bp, Homo sapiens
tattgtatgttctcacttataaatgggagctaagctatgaggatgcgaaggcataaaagtgatatacgggacttttaggactttggggagaaagctggaggggaagtgagggataaaatattccacattgggtacagtgtacactgctggggtgataggtgcactaaartctcaggaatcaccactaaaaatcttatccatgtaaccaaaaaccacctgtaccttctaaactacagaaattaaaaaaaaaaaaactggtgtcacagaaatagttaaaagatctaaaaaaaagtgggaaaattcttgctcatggattggaaaacacaatattgcaaagctattaattttgatcaaggtgatctgtgggttcattttagttataaacaaaaatctcaatttgtgtgtgtctgtgtgtgtgtgtgtgtgtgtatttctaaattggcaagatgtttccataatgttagctatggcacttacaccattttgggccatttagatatccgtatacaaactgatgaagtctgaccacaatatcatgtactgaaaaaaaaggaggtgccaaaaacacaatattatgcattctagaagttaccaaaaagaattatctt

SEQ ID NO: 655110 - DNA, 625 bp, Homo sapiens
gcagtcagaataggtaccttaaaagaatgtagggaccaaatggttattttcctgctgataggacagtatcaagactaaaatttggttccagagaatattttactcctaattgttgaaggcagagttttccaaccatagaaacagcataaagcctggtttctggtagacaggtacaaaaagggagggaattgggaagctagggtgttttgttaaagaaccracaatggagaggatccctattccactaggttatgctgttgaccttgagatgccatgtgctttccagtccaagggcagagtgaccttgacatgctatgtgctctccagaccaagggcagagagagacctggaaatgtcatgtgctttccagaccaagggcagagagagacctagaagtgccatgttctctctggaccaacggcagagagagagactttcacttgagaggggaaccctctgttcctagaaaattacaaagatgccttcccttgagctatatccccatttactatgatattccctgatctttgccaaacaagattacttccctgaactgtaaaacttcccacacattgcgtacacagagaggataagagaaatgatagtcacagacagaaaaagagga

SEQ ID NO: 655111 - DNA, 625 bp, Homo sapiens
gcagtcagaataggtaccttaaaagaatgtagggaccaaatggttattttcctgctgataggacagtatcaagactaaaatttggttccagagaatattttactcctaattgttgaaggcagagttttccaaccatagaaacagcataaagcctggtttctggtagacaggtacaaaaagggagggaattgggaagctagggtgttttgttaaagaaccaacaatggagaggatccctattccactaggttatgctgttgaccttgagatgccatgtgctttccagtccaagggcagagtgaccttgacatgctatgtgctctccagaccaagggcagagagagacctggaaatgtcatgtgctttccagaccaagggcagagagagacctagaagtgccatgttctctctggaccaacggcagagagagagactttcacttgagaggggaaccctctgttcctagaaaattacaaagatgccttcccttgagctatatccccatttactatgatattccctgatctttgccaaacaagatyacttccctgaactgtaaaacttcccacacattgcgtacacagagaggataagagaaatgatagtcacagacagaaaaagagga

SEQ ID NO: 655112 - DNA, 600 bp, Homo sapiens
ctatatccccatttactatgatattccctgatctttgccaaacaagattacttccctgaactgtaaaacttcccacacattgcgtacacagagaggataagagaaatgatagtcacagacagaaaaagaggaaattatgatagaaaagttggagatcctgttgccracacccaattgcggcagtcggagactgggatcaatccagaagcctttggataacactgaggggtagccctggccagaaatcctcagttgctccaggacttcttccagccccacatgatggctaagtccaccatgaagggaagctggttcaaacatggcaaatatgcccagcaactcatgggtattgggggattctccaatccatagcctccccatgttctccccagcaagcccgtctcccaaatcttgtaaggctggcaaccacgtgaatagtttttaaatgtccgagggggcccagtatttggtttgattttgttctaaaatggaggccaagagcctcagaatgaagggacagagttgaagtctgctcctctactcaccattttgataaatgttgtaccttggtatcctggatgatatccccaatatgaagcg

SEQ ID NO: 655113 - DNA, 634 bp, Homo sapiens
agatggcgtaaaatggagaagctctcagaatgacaaacagtaagacataaactgtaacatttgagtgattaagaaatgagaattgcttataacaattctcagatttctagcattatgttactcttaaatgagtcattaaacatgacatatttgaggtataattgttgaattttgaagtcagtaagaggcaaagtggaggaagagatagaaatatgattgattacattgatgtacacatggcgatttataccataagacattattagattgccctgaattacaacatatattcataataggaaaaggagaaactcacagtgaagtgatttaaagaacagcagaaggccaatgatgggatcttaggggtaaaaatagtatccctaggaaacaagttgtttttcaatggcttctcagtgttgattctctcagaaatagccaagagcttttataacartgtagacaggtttcacacagaacataattcttctttctttttacaataaaaattgtacaaaaatgtttttgaggagctttatttgaagtcatttattaataggattgtaccttaaaaatagtatgtccaaaatatttctatactttatcaaaaatatactattgtaaaatattacacatc

SEQ ID NO: 655114 - DNA, 596 bp, Homo sapiens
caatataatttttgcatacatttttatttagagaaaaataataataacatatgagaagggagayatgagaacaatttaaaatttgttgaagaagaacagtcattcaaatcatagctatataaacagtcataaagattgaaataaaaaagttgcctctgtgcagaggagaacataaagagtagacttagtggtattttaatataagcttattcaataattatttttaatataataaaatttacttactttgatgcttttggggtaattaaccttagtgatagagaaattgtacttacagtaatggcctttaccatccccaaaatgtataaaaactttttcctgaaaggtgggtgaaatctggtttcaagtgctattgacaatctatatagtctgaagtaacaagtcctagctctgagatgagtatatactccataaagcctttttacaaagacaaatttaagtaaatcatttatttccccattgaagttttgaaagcgaatgagaaacacttggcatttatttctttagatcttttctaatgtgaagcaacttttctaagaatataaaaagaaagcttacttttctaatggaggtaa

SEQ ID NO: 655115 - DNA, 596 bp, Homo sapiens
caatataatttttgcatacatttttatttagagaaaaataataataacatatgagaagggagacrtgagaacaatttaaaatttgttgaagaagaacagtcattcaaatcatagctatataaacagtcataaagattgaaataaaaaagttgcctctgtgcagaggagaacataaagagtagacttagtggtattttaatataagcttattcaataattatttttaatataataaaatttacttactttgatgcttttggggtaattaaccttagtgatagagaaattgtacttacagtaatggcctttaccatccccaaaatgtataaaaactttttcctgaaaggtgggtgaaatctggtttcaagtgctattgacaatctatatagtctgaagtaacaagtcctagctctgagatgagtatatactccataaagcctttttacaaagacaaatttaagtaaatcatttatttccccattgaagttttgaaagcgaatgagaaacacttggcatttatttctttagatcttttctaatgtgaagcaacttttctaagaatataaaaagaaagcttacttttctaatggaggtaa

SEQ ID NO: 655116 - DNA, 633 bp, Homo sapiens
attgcatgccaaattatataaaattttctgatttgggggtttactagactaaacttgaataacacttcaagcatcatacttgtgaacagtaaaattttgtttgctctgtgaagtaaaactattcattaaattgatgtctattttattatagaaataattttaggtcatttcttatagatgtattttataatttaacctatcactagatgaaaggtaagactgacatctaattttttattgtaagactatttagaaaatctatttctatagtcatgctgatatatactactttaactgggtatgtaaaaattgcaattaattgattacaaattcttttgaattcttttatatttatttcaaacatataattttgcaatgtcaacaaattctgttcaaaagaatataatgtaaaattagcaaaaaagaaaaaataatagaaaggcaactgttcagattggaccagggtggtatttcaataaatgcatatttcttgtacttctctcagttcctaggtgagactggggcaccacctcagaatccattagatccttttcatttattagacagaattccttataaacctgcrtatttcatgttctttccagtgctttcccttactggccagcagcccca

SEQ ID NO: 655117 - DNA, 622 bp, Homo sapiens
gaacttgtgcaaaaccacttactctattccgtctgcttcagagggcttcttgcaaaaattgcagtacataaggtataccaaagtgctttataaacagttaaagccccaacaaataaaatgttttgtattgagtttaaacattactcaaagacagtattcaaagtgatattgccacctctacagcaattctgagggatcaatattattcaggtagatgacactttgacaaatcttcaaattaaaataaaactaaagaaaacagaataaaaacatattgtcaatgttttcacttttacacaaagcaggtgtgaaaggtaacaaattgtctgtagaaagcctaaaatataataaatayaagagaagagcactaaagaattaagaagagcagaatcaagtttctatataaaatctgcatattctgtcacagacaaataatcactgtttaatacagtgttttagttagatgggaaatgataatatcttttcaacataaaccagccttatggcaaaagaggtttcagaaaaatccttaactgtgaagaacagttttgggactttgaaatagccacattgttgattttcatgggtgaaacaattcctaatttaattcaacccaaagttg

SEQ ID NO: 655118 - DNA, 609 bp, Homo sapiens
ccaaataacagagaagtaagaagtatatataattcatttttttccatgtagtaaaataaggagtagctttagaagagactaccacattcaagttttccattgaataattaagttgtatgataattttaaattatttttctatttaattctcacaacaattttttaccatttatctagaaagaagtaaggttttttgaataaatagctaatcccatctggaatagaaaatgtgcaagataatcctggggartcttgtgtgccaaaaacgaagagttcataggttaaagagagcatgtaaaaaatatgtagcagcaaggtggagcaagatggctgaatagaaggctccactgaacgtccccccagaggaacatcaaatttaacaactacctacacaaaaaaaatcaccattatgagaaccaaaaatcaagtgagtactcatagtacctgcttttaactttatatcactgaaagaaccgaagagggtagaaaagacagtcttgaattactgatgccacccctacccctttccctagcagcagctgcatggcataaagagagaatctgtgtacttgaaaggggaagagtggaatgattgtgagactgcactga

SEQ ID NO: 655119 - DNA, 621 bp, Homo sapiens
aaaccaaactaaactcaattgataacttcacacagagggacaatttagacaacccctagtcagaagggtattgcccatcgcagtggtcagaatttgagttctaccaagcctttccacagaaggataaagtgctctgggactctaaataaacttgaaaggcagcctaggccacaaagactgcaactcctaggtgagtactagtgttgtgcttggctaagagccagtggattgggggagcacataaaataccagctggggcagctaaaggaatgcttatgccactatcctctaaaaccaggcagtatagctcatggctccaagagaggcccctttcttctgcttgaggagagaaaggggaagagcaaagagtaaaaagaggataccagctcagccacagtagggtagggaaccactcagagtcttaaggccccctttccttgctctagctcccagatgacatttctagacacaccctgggccagatttaaacatgctgccttaaaggaaaaaaaaaaaaaaaaaagagacatggraagacccatcgtgctgactaaagagcccttgggccttgaataagcagcagcaatacccaggtagtatgctgtgggccttgagtgagac

SEQ ID NO: 655120 - DNA, 558 bp, Homo sapiens
gcgaacagaccaataagaagcaatgagataaaagttgtaataaagtttcccagcatagaaaagcccaggacttggtggctttactaatgrattctaccaaacatttaaaaagactagtgccaatcctactcaaactatttcaaaaaacaggggaggagggaatatttctaaactcattctagaggttaggattaccctgataccaaaaccaaaaaaatacacatcaagaaggaaaactgcatgccaatattactgataaatatttatgcaaaaatcctcaacaaaatactagcaaactgaattcaacaacatgttaaaaagttcattcatcatgaccaactagaatgtatcacagggaagaaaaatggttcaaaatttgcaaatcaatcaatgtgatatatcaacagaatgaaggacaaaaaactttttgataatttcaattgatgctgaaaaagcatttgatgaaattcaacatcctttcatgattaaaaccctcaaaaaatggatatagaagaaacatacctaaatgtaataaaagccatatatgactttatttat

SEQ ID NO: 655121 - DNA, 558 bp, Homo sapiens
gcgaacagaccaataagaagcaatgagataaaagttgtaataaagtttcccagcatagaaaagcccaggacttggtggctttactaatgaattctaccaaacatttaaaaagactagtgccaatcctactcaaactatttcaaaaaacaggggaggagggaatatttctaaactcattctagaggttaggattaccctgataccaaaaccaaaaaaatacacatcaagaaggaaaactgcatgccaatattactgataaatatttatgcaaaaatcctcaacaaaatactagcaaactgarttcaacaacatgttaaaaagttcattcatcatgaccaactagaatgtatcacagggaagaaaaatggttcaaaatttgcaaatcaatcaatgtgatatatcaacagaatgaaggacaaaaaactttttgataatttcaattgatgctgaaaaagcatttgatgaaattcaacatcctttcatgattaaaaccctcaaaaaatggatatagaagaaacatacctaaatgtaataaaagccatatatgactttatttat

SEQ ID NO: 655122 - DNA, 590 bp, Homo sapiens
gaactgataaacaaattcaaaaagttgcaggccacaatatcaacacacaaaaatcagtagctttttatatgccaacagcaaacaatctgaaaaagaaatcaagaactaatcccacttatgatagctacaaataacattaaatattcaggacttaaagaagtgaaagatctctacagtgaaaattataaaatatttttgcataaaattgaagagtacacacaaaaaatgmaaaggtattttatgttcatggattggaaattcaatattgttataatgtccatattatccaaagtaatgtacagatttactgcaatctctatcaaaatatcctgattcttcacaaaaaatagaagaaacaattctaaaatttatatagagttacaacatactcagaatagccaaagctatctgatatgagttatgggtgaaataatatggtttgatcgtgtccccacccaaatctcatcttgaatcgtagctcctataattcccacatttcatgggagggacccaatgggaggtaattgaatcatgaaggcaggcttttcccatgctttctcatgatagtgaataagtctcataagatctga

SEQ ID NO: 655123 - DNA, 353 bp, Homo sapiens
cacaaaaaatgcaaaggtattttatgttcatggattggaaattcaatattgttataatgtccatattatccaaagtaatgtacagatttactgcaatctctatcaaaatatcctgattcttcacaaaaaatagaagaaacaattctaaaatttatatagagttacaacatactcagaatagccaaagctatctgatatgagttatgggtgaaataatatggtttgatcgtgtccccacccaaatctcatcttgaatcgtagctcctataattyccacatttcatgggagggacccaatgggaggtaattgaatcatgaaggcaggcttttcccatgctttctcatgatagtga

SEQ ID NO: 655124 - DNA, 418 bp, Homo sapiens
cctacttttgaagtgttgggatttgaactaatttaccacttgcttccttgctcctcaacttgcagatggcctatcgtgggactttacattgtgacyctgtaagtcagttatccttaataaactcccttttatatatacatatatgctattaattctgtttctctagagactaatagctgtatacatactaatacagtccttgactaatacagatattaaaataactttgcatcattgtatttattaattttttagatttatcatagtattcagtcttctggatagtgttattttttaagcaagaaattcaaatccatgaaagtgatatttagaaaaggagtttaaaatgctttaagatgtgtaattttataaattaaacattttcacagaattttttaaataattgttaaaatgtgtt

SEQ ID NO: 655125 - DNA, 387 bp, Homo sapiens
agctacacatagactttattacttggttggttaaacctaaacaaatagatttataatggtttgtggacaattcccatgcaatagctatattattaaatccaaagcattattaaaagttaattatatttaaaattattgagatttaacaatgatgtaatctatggagaagatatttatcttctcctgtttgtactataattaccaaacctaactggacatctttagaagttgarttaaagaaattagtttaaaatatactgggttgaatagtcaatgcctttatcaatatgaacatagataataaaactaaactcactaaattgtgaatactaaattgataaatttgtgaatggatgtcaaagtatttgtattcaataaatgcatgtt

SEQ ID NO: 655126 - DNA, 551 bp, Homo sapiens
agttcccgtaatcctcacatgtcgtggaagggaccaggtgaagacaagtgaatcatgggggcagtttcctctgtgctgttctcatggtagtgagttagttctcatgagatctgatgatttggggggcttcccccttccctgggcactcattcttcttgctgctgccatgtgaagaaggatgtgtttgctttcccttccaccatgattgcaagtttcctgaggcttccctagccatgctgaactgtgagtcawttaaacctctttcctttataaaaaaagatgtaaccagtgttgggtacatctttattagcagtgtgagaatggactaatataatttgtttagtatttttgtactcctctctgtctttcgaacctactggctcagtacccactttcccttgtcaaatttcatgcaaaagacttcttctaaactatattagttaaaaaaaaaagttctctttctctcttattttatctttctcttcctctctctttcacacacacttgaagcaatggggcagtgtaaattggccttgtttctctcttacctt

SEQ ID NO: 655127 - DNA, 551 bp, Homo sapiens
agttcccgtaatcctcacatgtcgtggaagggaccaggtgaagacaagtgaatcatgggggcagtttcctctgtgctgttctcatggtagtgagttagttctcatgagatctgatgatttggggggcttcccccttccctgggcactcattcttcttgctgctgccatgtgaagaaggatgtgtttgctttcccttccaccatgattgcaagtttcctgaggcttccctagccatgctgaactgtgagtcaattaaacctctttcctttataaaaaaagatgtaaccagtgtygggtacatctttattagcagtgtgagaatggactaatataatttgtttagtatttttgtactcctctctgtctttcgaacctactggctcagtacccactttcccttgtcaaatttcatgcaaaagacttcttctaaactatattagttaaaaaaaaaagttctctttctctcttattttatctttctcttcctctctctttcacacacacttgaagcaatggggcagtgtaaattggccttgtttctctcttacctt

SEQ ID NO: 655128 - DNA, 592 bp, Homo sapiens
tctggctcattgtaattgtcctgtattttaacagaccagattactattcatttacaaaacctgatctctactttctcacttggtgactttgattgagctaatgtgtaccttcaggtgcccttcattctatatctgccaatcctaatcccacccattctttagttcccagcttaaattatccctccttgagtttggctcattactaaaaacctatctttttttcctaacttgtatataccaataaggggtctttggtrgccttaattaaatgaatcttttttaaagacaagaataggtttcttttctttgtagtgtttgattaattccatccaaactattgagattgaaaatgtttctcatggtgctattatatctgtgaccagttattaattctattttttacctcagttgtctcatctatatcatctgggttaataatatgtattttgctaagttactaaaaattttaattaatgaactgtaagtaatgtgcttgcacagagtaaatgtcctccaaaacttattttcccacctgcaaggccatggtaggaacctattgttttctatgttcctttgaattaactaattgcaa

SEQ ID NO: 655129 - DNA, 434 bp, Homo sapiens
gacttcatgtttattcaataataaaactgttttctttctcttccattatgaagaggttttctgggtttacaggagattttctattaaactgttacactagatttccccaacaattctcagtcagtgtttagcaggtattaaatggcagttcaacaaattccaaccgtgttcctcaagagttagtttagcatctgaaaaatgggctataatacctgattttctttcagagtggccaaggattggtggagttatttggccatttgaccatgatgtgtggccwcaatgtgtgtagaaagtaatgatttggggggtatgagatagtgcagtgcttgtttcagaggtgagcttgcctgtggctgttggctataagcaacttttttcttctccagttaaagatacatgttttagtgttagagaagattaaagaataatag

SEQ ID NO: 655130 - DNA, 480 bp, Homo sapiens
gtttttatatgatgggaaatatagttaatcatttaactactgctattgtgaggattaggtgggaaagccctggtcaaagacttggcactgaaaacattcatagtaaataaatattagctatttgttattattgtagtagtttaggaacaatttcatattatgctttttaaaaaatgcatacaatggggaatgttggttttctattttgcctgttactaaaagttcatgcaaataataatgtccagaagtttaggggaaagaatatttccacaagaacgaagagagagatttcactaattgtaactaagctttgttcttcccgaccctctatttctgcttccagaagctgagactcaggttagcatctcactgtatttctgtgaggaggagatattggtgcaagmtctcaagcagacaagcaaaatccatccctatccaacaactcctacctattgagcaaatgatttaaaaagtggttac

SEQ ID NO: 655131 - DNA, 442 bp, Homo sapiens
aaccagctcactattcatctcagctggctttaatagaatgactttaggattatatccacatgtcagattaacccatgtgagctacccaaaattcagctggaatatcatagtacttattcttatcaacaactgctatatgaaaaatgtaacatttcataatattcaaaaatctttgccattaggtggaaaataaacctttgkatcctctcacaccttcaagggtcattaatgataaattggtaaatatacgcccccattttaagaacaacagatttttaaaaattgcatttcgctgatcaaactaggtgggcgctgcatactttggtaatcagataaggtgatggagtagtcacctttgagtgtagtggctgaaaatagagtaattattttaaaaatggctcattgaaaattctaactatgcatgttggtagctctgggtctt

SEQ ID NO: 655132 - DNA, 410 bp, Homo sapiens
ctggctttaatagaatgactttaggattatatccacatgtcagattaacccatgtgagctacccaaaattcagctggaatatcatagtacttattcttatcaacaactgctatatgaaaaatgtaacatttcataatattcaaaaatctttgccattaggtggaaaataaacctttggatcstctcacaccttcaagggtcattaatgataaattggtaaatatacgcccccattttaagaacaacagatttttaaaaattgcatttcgctgatcaaactaggtgggcgctgcatactttggtaatcagataaggtgatggagtagtcacctttgagtgtagtggctgaaaatagagtaattattttaaaaatggctcattgaaaattctaactatgcatgttggtagct

SEQ ID NO: 655133 - DNA, 562 bp, Homo sapiens
taaagttggtaaagtatttaagtggattaagtggatatacaaaaatgctgtgtcacatatgaaaaagccaacatcgaaggatttcatcctaagacatcagaaatccataaaatagaaagatagcccaccaaggttgaagaaatatgagacataaaataattggtcaaaattgaggactaartttgagcaacttgtaaaataagatgaacatggacagtgacacaatgaagacagtttttaaaacttttgctatatttttattttctcctgaaaagatatttctaaacagtcactgaatgtgaaggagtcagtgagtgtcagtgagtagttcaatcaatgtcacaaaaaatgagagaccaaaaaaagactggcaggaagtaaaggagggggaaagtgctgctctctacataacctctaaattctactaactcaggcaagtcacttatcttcctgcagtcttagtcctctcatcttcaaatctaggataaatttgacctcctttgaggatgaattatgaggactaaatgagtactcgttaagagcatgaactcaaatcaagcag

SEQ ID NO: 655134 - DNA, 447 bp, Homo sapiens
cagtgcaaataattcttttcagaccatgcattagcatctttcaaatcacattcccatgctcagtgtattctcagaagtggggaatcaagtcctgtgaacaaacccgtgtgttgagtaagccttctgcccattcctgtgtccataactaagtctttttatagcatttcccagtcctatccccctactagctttggctygtccacccaacaaggtcatgtgcgatgtcagttctaattttcattagcttatttagtattaagacaacttcttgagaaacacaaccctatttactttggttcactatttattttatcttgcttagtgaagaaaaacttcatgatatggttaggctttgtgtccccatccaaaactcatcgtgaattgtaatccccaggtgttaaggaagagacctgtggggaagtgattggattatgggggcggtttccc

SEQ ID NO: 655135 - DNA, 605 bp, Homo sapiens
ttttactaatcataagggtcatggccaacacccatataacaaaagacaggttaacaagggaaagcataacaaatgtatttttttctagttttactggacacaggagccttcaagacaaagacccaaacatagagggaaarctgtccatttttatgcttaggttcaatgaagaatggataagtgtgtagaactgtgataggacaaagagggtatggtctaatgctgatagaccaagtggggaaactcagcaaggcctgttcagattttccttagtttgggtgtgtagcattacttcctcatgggtgtggggcaagaccccttctgaagtgagtcttatgatgacttacaatcaaaccaggtagatcagagagaatttctttatggacacttcttgcacagaaaggtggggaaagttagaatacaatttttaggttttatggctggatgccggggaaaggggcgctggtttctatgacccactgtggcgaagatggattctagctcctttgacttgctttgggggaggatgaggagtgagagacaggatggcaggaagaggcagagagaaacattgttaggaggctgcttctgagaccttgactatg

SEQ ID NO: 655136 - DNA, 555 bp, Homo sapiens
catcagaaaccaacctcttcatctaatgaaagaaagaagtctgaaatggctgatctgtagctttcttgtgtctatcatttgtgtaagagaatgagtgatgctgaaaaatagattaaaaaaacgacaattttctcttaatgttctggcatcagacagaaatcgttagatgggtattcctatagcaattcctaggatctatgaatccattcattccctaagtatacttggtggatcaaaacaatatgatacccagtaatatgtgcactactgttattcaagttaatatagaggtatattaatatgactattaatatacatattacataagacctaagaccagaacagaaaaagactaaagaaaatgcttgaggtttctggctgagggaaaaggagtacacctacaggatggggtgttaatatttgccattctggacagcatcaacaactattataaaagaattttaacttgaagttaacacgagaatctgtctttcakttctctttatataacttctgtcatatgtcagaagctctttccagctctgtccaaaaaag

SEQ ID NO: 655137 - DNA, 640 bp, Homo sapiens
aatggtgctgattacagaggagctctcttcatgggagtttttagcctattaagaacgtgtggtgctatacatttcaatattgctatgagaatayatttctaatattctcataaaaaattttaatatttgaagtaatgatgtagaaattagcttaatttaatcatttcatattgcattgaaaagtataacaccaccatacacttaataaatatatgcaactataatttgtcaatatgtaataaaaagaaatacatttattcctttaaaagtatgtgtacatgactattcttcaagtgacagtctaaggaagaaactcaagctctttggcaacaccttaaatctagaaaaaacaatttccaagcttctgggaatcatcaatacatatattaatgtgtttattatgtctcaattattgttaatgaagtggaggtatatacacgtagacattttcaaagaaaagtgcttaaattattttacaaaacatggaatatgttaacattattcatattaaaattaaaagctatgaaaataatctttaaaaagtatgctaatctcaactaatacattataacaggtttctttcctacaaataatagaaattcaactattttgtaaattgtttagcttgtggaaatcacat

SEQ ID NO: 655138 - DNA, 610 bp, Homo sapiens
catgaaacaaataccttacatcctagtgggaacaatctgctttggaatttgagccccagaatgactccaaagtcatgagtccctaaactctttgggggtaactggttgaccccacatgtattagtctgttttcacactggtataaacacatacctgagactgggtgatctataaaggaaagagttttaattgactcattgttctgcatggctggggaggcctcagaaacttacaatcatagcagtaggggaagaggcatgtcttacatggtgacaggcaagagagtcagtgaggagcaaagggagatgagccccttataaaaccatcagatcttgtgagaactcagtctaacgtgagaacagcatggaagaaaatgttcctatgatccagycacctcccaccactagagagaccactagaggtctatagccacatgaggattatggagattataattcaagtagagatttgggtgggaacacaaagcctaaccatatcattctgcctgtggcctctcccaaatctcatgtccacacatttcaaaaccaatcatgccttttcaatagtccctcattcttaacttgttgtagcataatttcaaaagtccaag

SEQ ID NO: 655139 - DNA, 576 bp, Homo sapiens
atctgaaagtgtaccacagtgttctgaatagaaattaaggtcattctgtcagagaaccaattgaattgcaatgcacatcatttttatcttagtataataagctttttccccatagtacttcacaatgtgtttagcttcattmtttacttacaagcagcaggaaattagaattgaatataagtttatttttcagacagagaaaatgaaagtgtggattgcattttctcagggttcaatgtgggagaacttcctgtttctattcagtgtaaataatctagattattaaaccagctataaatctattaaattaactgatgagagagagagagaaaaaaaaactaggaaagcagttaaatgtccagcaaacagcagaaacatctgtaaatgatttagacctatgatagaattttgttaaaacatactcaggaatttaacagtgacatatattataatggggcaaaattgtgcaagtgagtaacaaggacgtagacaccaagaaaagtagacatgaacaggtgttggcgaagtaagacctgtgagccaaatctatattactacttgtttttgtgaataaaa

SEQ ID NO: 655140 - DNA, 561 bp, Homo sapiens
caacataacgtatattaaaaaggtacaatttatatttttaatttgaaatgacagagtgagggaagtctgagtagtttttggtttatgtcttaggtagatctgtgtctgaggagggatttatttggataaaagcaaaatttgggtgggacagacaataaattaatatactatcagataattgtgtgatttcacctttatcaaatcacttattattaaacctgtgtgtaaactagtcacccagggattgtgctgaattgcagattctaatttagtaggtgtgttgtggatcccaaaagtctatatttctaacaagcttccagatgatactaactttgccaattgaggaactatatgttgagtagcagagagctagactatggttctacatattaatggattaaagacctcctaaatctcytaagaagggatataatcttataagaggaattaacttattgcaccctttcctggtgctgtttccagactgtcaattatcttttcctatctcaattactcactgataatagaagcaatcatcctaaatggcatgtataataatgg

SEQ ID NO: 655141 - DNA, 241 bp, Homo sapiens
gacatgaacaggtgttggcgaagtaagacctgtgagccaaatctatattactacttgtttttgtgaataaaagtttattggaacttactcaccatcattctttacatgttgtacatggctatgttcatgctacaacagcagacttgaatacttgcagcaaagatcttacttaggmcccacaaagactgaaatacttactagctgaaccttaataaaaaaagtttgacaacttctgctgcag

SEQ ID NO: 655142 - DNA, 485 bp, Homo sapiens
ttacttagtctatcctttgaaagccagttactaagtcaagcccaatctcgtgtgtgtgtgcgygtgtgtgtgtgtgtgtacctaagaacttcacttctggaaagggcagcttctacatgtattaaaggtaattcttctgtaagaaagatttatctcttttctaccatttaattatttattcagtcctttatattatatacatttattttatattggttatactttaatactaggttatttgttttcttgcttacattgttccagctttggccattggttacagttggttcctttgtcctctaacgtgtcctcatcactttgtattttcagaacttccttaccttctggtcctacaaaatgtaccaggttcatgttgcattttctatgcctcagagctggaatcaattactactccaaggagctctggtttcttttttttgagaacggtatttagaaactaacatctagacactgagtgtgcttat

SEQ ID NO: 655143 - DNA, 533 bp, Homo sapiens
gaagaagaaataagtgctttttttcagataaacaaaatgaagagaatttattgctagtagacttttgttgaaagaaatgttaagatgttcttcaagcaggagagaaattatatgtatatatgcataatatattatatatactcatatatatgtttaatatttaattataaatttataatatttaatgttatattaaatatataattacattatattatatataattgtatatatatgactagtgaatgcttctcctctacaatgagaggtcaaagatagtctctttcagcacttttcttcattatgatactgaactctctaggtaatggaaaaatcttaaaaataaattttacacattggagagaartaataaactatattttcttcatagatgatatgttattctatgtagaagactccaaagataccttaaccttttacaaaaattaagtaaatatttactatagtactaaatgtaaaatgtaaaattataaaactttcaaaagaaaccataagaaaaattctatgaattc

SEQ ID NO: 655144 - DNA, 553 bp, Homo sapiens
tatttttacctttgtaaaggtaaaaaatagactccgtgactcctgcttttttctgttgtaacaaaattcagctttctctacatagtggctccaaacaaaatcctagaaatgactaaatactacagaaaatatgtcagattttgtttatctaatgcttataaatatataatatagttacaactgaatgtagtcacattgatgttataccatttgtcattattataaaataagtattcataaactgtgtgcctactacatccagaggttgtcctaggcactgctaagatgttgtacaaaatagcctcagctactctcagataggttacattctaggagtatttagccccagmgtgtagggctttatgagtcctcactaaaacggctatataaaaatatcaatcagtgatatgattgtaactaatcctaaaaaattaaataagtatttatagaatcagaaatactcagatctaatccagcatctttaaaactgggcaacatagctgaatgtcagatatctgtttaaatgctctacggagatctctatgttaaataa

SEQ ID NO: 655145 - DNA, 481 bp, Homo sapiens
tcagggtttggagacaaaaaatatcttatagtgtaaaatagatgctttcttatctggagtaaaatctagttctacttcactggtggtggaataaaacatgtaaatatcatctggaaggccaagcctattaagatcaggagtggaggggtaccacgttatcaccaatataattaggagagagagctatataatgaataaaatcattttataagtctattttcattcaacattagtaagaataaatacttatacaataatataaacatggaaaatactaaagaaatgacatattttaccaatttaacaaagaccacaacacacaaaagragacaaacaataaatcaggtagttacaatttagtttaatgacagggcaaaattatcgagacatctataggaatagcaagtaattcaaacacaactaaaggagggcatgtcaaagaaaaatgctgacaggtgctcttcgagctgaatgttaaagg

SEQ ID NO: 655146 - DNA, 600 bp, Homo sapiens
aggggcatatgagtaaaggtggtgtgaatagatgaatagatccagttaagaggatagcatttgataggaggccaatattttcagtgatgttcacagtgaaattttttttttgttggtttaacacatgacctcagttataatcagatttatcatgtatccataaagtaaaaatgaatctattatctcagaaataattttcttttaagcagtgcagttttcattattatctcatagattattttcctctttgacattttattgtgccgaaatttagtttcaaatttttcattgagaattattccttttttagcaaaaaaaaaaaaaaaaaaaaaaaaaatacagtgagacagtgagttttatgggaaagccagagtattttcgttaacttccaaggttgtgaaacttcctcagtagctgtctgggtgaaggccataccaatgacatcagattatttttccttgtttgyttttgtttttgagtttattcttgttttgttttttaagccaactatactactaatggtacataataaaaattgggctcttttccatgaatttctactaattacatttttcggtttaatttcagataaatgttaaa

SEQ ID NO: 655147 - DNA, 629 bp, Homo sapiens
tttaggtgcatgtggcatttctgcaaagtactgggaaataacatgatgcattcaaggacatatcagtaatttgatgtatttggaagatagaattccaaaaggaaagaatcagaaggagaaattgataagataagaaattgatataataattgttatgctaaaaaatattagtggactaatatagggctttgggcagagaggaaatctrctttcacctttgtcttagatatttcagtctgtctggatgtcaggatgaaaattgggatatctattagaatcttgcggaattaatcctagtggaagatgagagatgtgacattgaggggtgaggaaaataaaatgggttcaagagatttaaaaaataaagccaggaggtcatgccttggtgttagattagactcaagaagtgagggaatggatacagtcaagtgtgttttccacatgggcaactgcatctattgtggtgccaggtgcacggatagtagcaaaacatatttgataagtactaataataactacaatgcatccagtttggaatattctcagcttgagatgcttagtggtaaatcaggcagatatatctaggagaaactatatataaatgttagtaaccagattagaactcggca

SEQ ID NO: 655148 - DNA, 617 bp, Homo sapiens
taaatagctgttgtttcaagccactaagttttgaagtgtcttgctttctaaaaaaaagaaaamaaaaagtgaaacctctaggccctaaaacttggaatatcttctttgaccattataggtttaggaacctgggattatattttaatctctatgggcctgatcacattatttggttcagcaaagagtaatcaacactgtttattggttctcacttacaataacaactaaagagaaaacaggaaggaaaaagtagatataagtaaaagtaaatattgcaaaatttgacgacttacatataatgttagaagttccaataaatataatggactgaaaacactgtagcctattctttctttcttaagtgaacaaaactaaagaaagtaattttaaaaaataaataatgcattgaaaaataagaaagttttctctactaggattcatgagggatagctgaaaaaataaaagaataacatagaaaaagaaagtaatggtccgaaacagacataggagaggaaagtaaaaaacgaggcaggagctactttgaataggaggttgttcaaatcaatggatagggcaattggttgtggcagcacgacagtggtagccaggaagtctgc

SEQ ID NO: 655149 - DNA, 617 bp, Homo sapiens
taaatagctgttgtttcaagccactaagttttgaagtgtcttgctttctaaaaaaaagaaaacaaaaagtgaaacctctaggccctaaaacttggaatatcttctttgaccattataggtttaggaacctgggattatattttaatctctatgggcctgatcacattatttggttcagcaaagagtaatcaacactgtttattggttctcacttacaataacaactaaagagaaaacaggaaggaaaaagtagatayaagtaaaagtaaatattgcaaaatttgacgacttacatataatgttagaagttccaataaatataatggactgaaaacactgtagcctattctttctttcttaagtgaacaaaactaaagaaagtaattttaaaaaataaataatgcattgaaaaataagaaagttttctctactaggattcatgagggatagctgaaaaaataaaagaataacatagaaaaagaaagtaatggtccgaaacagacataggagaggaaagtaaaaaacgaggcaggagctactttgaataggaggttgttcaaatcaatggatagggcaattggttgtggcagcacgacagtggtagccaggaagtctgc

SEQ ID NO: 655150 - DNA, 564 bp, Homo sapiens
atgatgatgtataccagaattagtctcttgtgacrgaagtttaagaaaattttttctagctaattatttataaataaaaatttatctaataatagttaattgttaataccattatttataccattttttgcttgtgtcaacaatttttatttggaaagttattaaacaggaaaatggaaataatagtataatgaagtcttatatgcactacctatgttcaacaattgccatattttgtgattttttaaaagaaatttacagatatttctttactatcttgcttatattgaaatttctatgattgtccataaatattgttttggagattttgtttttcttacaagatcactgcagttggttattatttctctctctctctgtctctctctctcttttaatctagaagagtcttcatgctctttttatgtcattgatatttttggaggcaccgggccaatgtcctcataaagtatcttacatgagcattttctcatggtgctgactaacctgttgctccatttcctgcattctcaagatactataatttttattcccaggcaagtg

SEQ ID NO: 655151 - DNA, 564 bp, Homo sapiens
atgatgatgtataccagaattagtctcttgtgacagaagtttaagaaaattttttctagctaattatttataaataaaaatttatctaataatagttaattgttaataccattatttataccattttttgcttgtgtcaacaatttttatttggaaagttattaaacaggaaaatggaaataatagtataatgaagtcttatatgcactacctatgttcaacaattgccatattttgtgattttttaaaagaaatttacagatatttctttactatcttgcytatattgaaatttctatgattgtccataaatattgttttggagattttgtttttcttacaagatcactgcagttggttattatttctctctctctctgtctctctctctcttttaatctagaagagtcttcatgctctttttatgtcattgatatttttggaggcaccgggccaatgtcctcataaagtatcttacatgagcattttctcatggtgctgactaacctgttgctccatttcctgcattctcaagatactataatttttattcccaggcaagtg

SEQ ID NO: 655152 - DNA, 602 bp, Homo sapiens
aagcttctatcacctttttctccctccctcaaccggagtccctcctactcctctatgcgagtccagcccctgacccctctccccagtacccacttcccacctcttttgtaaacccaayagggtgggacaccaccaccccttccctagctactcaccacgaccccatcaaaatccagttaaaagacctctctaaatttcccagcatccccaaaaaccctatctccctaacccaccaaaagagcttacagcccatcacaaacaagctctgttcacgccgtcttcttaggccaacacgttcttcatataacaccaccatcctcctggttaaaaaatcagacggctcataccgactcctgcaagacctccgagccatcagtcaggctgtctttcctattcatcccatagtccctaacccctctacacttctctgtctcattccctccaacaccacctgctacactgctattgacctaaaagatgactttttttactattcccctgcaccctgattcccaaaacctctttgctttcacctggaccgaccttgacaccctccagtcacaacaactaacctggactgtcctccctcaaggcttcagaga

SEQ ID NO: 655153 - DNA, 476 bp, Homo sapiens
agaattctatcaaataaatttacagagattgaaataattaaaaagaatcaagcagaaattctggagctgaaaaatgcaattggcatactgaagaatgcatcagagtcttttaatagtagaattgttcaaacagaagaaagaattagtgagcctgaagacagactatttgaaaatatacggccagaggagacaaaagaaaaaagaataaagaacaatgaagcccatccacaggatctagaaaatagcctcaaaggggcaaatctaagagttatgggccttaaagaggaggaagagaaagagatagaggtagaaagtttattcaaagggataataacagagaatttccmaaacctagggaaagatatcaatatctaagtataagaggttctagaacaccaagcagatttaccctaaagaagattacttcaaatcatttaataatcaaacttccaaagatcaaggatagagaaagtatt

SEQ ID NO: 655154 - DNA, 353 bp, Homo sapiens
aaactctagtagggaaggtagataactgcataagtaattataatatatggtagaatgtgacgaaccgcaaaacataggtacaataaaggactctctcagttctagggaatgaaagattgctttcacctggagaaaggtctcaatcattcatacaaagaaatgaatggctagatttgtttgaccctatgaaaatcattcatacaaagaaatgaatagctagatttgttggacccttcacaatttggtttgacaaaattttctaggcaaattcagaactactcccttttaatcgttcctgrtttttctcaagaaaactaacttgtatttctcttcataccccatgcttcccacct

SEQ ID NO: 655155 - DNA, 395 bp, Homo sapiens
ttggctgtaggtgtgcagctttatttctgtgttctctattgtgtcccattggtctacgtgtctgttattgtaccagtgccgtgctgttttggttactgtggtcttatagtttgaagccacatctgtgtgatgctgctggctttgttctttctgctttgggttgctttggctattcaggctctttctttggttccatctgaattttagaatagttgttttctaattctgtgaaaatgttccaacctctgtgaaaaatgaggttggtagtttgataggacagcattgattctgtaaattgctttgggcagtatggccatttttaaactatattgrttcttccaatccatgaacatggaatgtttttccattttttggtttcatccctgatttctttc

SEQ ID NO: 655156 - DNA, 240 bp, Homo sapiens
agctttataaataatggcagttctgatcacaaatctgattgtatttgcaccaaacattagagttagccttcctgccttaaatcttagtgctcactttccttccttactaataaatgttctttgtggcatttttccccccacagaatagggcactttagtctacattaaaaacctrttcaccagcctggccaacatggcaaaaccccgtctctactaaaaatataaaaattagctgtgtgt

SEQ ID NO: 655157 - DNA, 406 bp, Homo sapiens
aaatcaatattgttcttatcatatagccaggaaatggacttggccttataatctactgttaagattgtcacaaataaaatatttgagcactgaatatgttttcatataatcaaccttatttcatctttagaaaatccctatgagtatctccatttcacagaggaggaaayaggctaggaggtgaagtcgcagagctagtaattataaaatccaggacaaagaggctgccattcatacagggtgaatttcaggggacaggtaggaaggtgactaccaacatttcactcctcactatatcctggattctatcagtatttctctgcttaaggtaaaacatcctcttagagttatcaatgggtgagttaatttagtaaattgctatttgccatttacacactatgaattc

SEQ ID NO: 655158 - DNA, 406 bp, Homo sapiens
aaatcaatattgttcttatcatatagccaggaaatggacttggccttataatctactgttaagattgtcacaaataaaatatttgagcactgaatatgttttcatataatcaaccttatttcatctttagaaaatccctatgagtatctccatttcacagaggaggaaataggctaggaggtgaagtcgcagagctagtaattataaaatccaggacaaagaggctgccattcatacagggtgaatttcaggggacaggtaggaaggtgactaccaacatttcactcctcacyatatcctggattctatcagtatttctctgcttaaggtaaaacatcctcttagagttatcaatgggtgagttaatttagtaaattgctatttgccatttacacactatgaattc

SEQ ID NO: 655159 - DNA, 508 bp, Homo sapiens
tttgtatagttttagtaacttcaggaaagaagtttatcctaatgaatcgaatataaataccctatagttgaaaatgcaggcacctattttgttcaacagttaaaatttgaagaaaagagatggttgacccttgacttggcttttaaccccagatccacgggctagtcatttttctctgagccttagttttcccattttaaatatgataatacttgttttaaatatgataatactttccttgtctatctcctaaggttattataattacaatgagttaataaagttgaaaatgctttgtaaacaggaaagtgctttaagcagaaggtggtagtcagcacagtggtgagaartggaaagtgaaggttgaatgtgaaaaggtcactaaagccaggctgtagaaaggagaagacagccagcagaggagaggggtgacggtggaaaagaagacaaggaaggtggctgagtgcttgtgttctgtggtgctgtcatagcatataccaaagactgt

SEQ ID NO: 655160 - DNA, 430 bp, Homo sapiens
gaattctggtttgtttgtaaaacagcattattataatgtaggtatggtcaatgagcagtggtgtccatcacatatattatagaagcaagcgagsacattccaccctagaaatggttcagaaactcataggcacccttagctgatggaaacaatcaatcatatttaatacgcttagaatcagttttactccaatcagctggcaattttgagctgccggttatacaccaaaatgttctgttcagtacctagctctgctcttttatattgctttaaatttttaaagaaattatattgcatggatgtggttatttgtgcatattttttaacaatgcccaatctgtatgaataatgtaaacttcgatttttttttaaaaaaattagattttagctggagcttttgactaatgtaaagtaaatgccaaactaccga

SEQ ID NO: 655161 - DNA, 619 bp, Homo sapiens
tgtaaaacagcattattataatgtaggtatggtcaatgagcagtggtgtccatcacatatattatagaagcaagcgagcacattccaccctagaaatggttcagaaactcataggcacccttagctgatggaaacaatcaatcatatttaatacgcttagaatcagttttactccaatcagctggcaattttgagctgccggttatacaccaaaatgttctgttcagtacctagctctgctcttttatattgctttaaatttttaaagaaattrtattgcatggatgtggttatttgtgcatattttttaacaatgcccaatctgtatgaataatgtaaacttcgatttttttttaaaaaaattagattttagctggagcttttgactaatgtaaagtaaatgccaaactaccgacttgatagggatgtttttgtaagttaattttctaagactttttcacatccaaagtgatgctttgctttgggttttaactgtttggccacggcgggggtgggggcggggggttggtacagaaacttgaagctgtttgtgatatgtacaactcagatgtttctcattaaaaaacaaaattagccagacttctgttgtactgaattc

SEQ ID NO: 655162 - DNA, 606 bp, Homo sapiens
ctaccatcccaccctaagtctggtctgaggtgtcccctgatactctgacagtgccctgttcatcctcagcagagacaccatgttgccccacatgctggatktctgccttgtccccacacacaccccacagccacccttctgccctcagcaagactggacatgagtgctttgagggcacagacctttttttttttttcttttcttgagacagagtctcactctgtcacccagcctggagtgcagtggtacaatctcagctcactgcaacctccgcctcccggtttcaagcaattctcctgcctcagcctccttagtagctgggattacaggcatgcgccaccatgcccagcaaattttttgtattttcagtagagacagtgtttcaccatgctggccaggctggtctcaaactcctgacctcgcaatccgcctgcctcagcctcccaaagtgctgggattacaagcgtgagccactgtgcccggccagacccttattttttttagccaaacacacatcatatttgaaatggtaaatatgcatgctaatgtatgttttaggtacacacagaaaattatcaaaagtacagagaaaattatttcaagctt

SEQ ID NO: 655163 - DNA, 530 bp, Homo sapiens
aattctttgtgcagctctttcccactcagtactctcccctccaagtcctagctgccttgctaccaagggagaccactggtgtctatttgggttaccctttgtgatggttagtcttaggtgtcaacttgactggataaagggayacccagatagcagataaagcattatttctgggtatgtctgtgagagtgttccaggaagagactggcattagagtcagtggactaaggccaggcacagtggctcacacctgtaatccctgcactttcggaggccaaagtgggtggatcacttgaggtcaggagttcgagaccagcctgtctaatgtggtgaaaccccatctctactaaaaatacaaaaaattagccaggcgtggtggcagatgcctgtaatctcagctactctggaagctgaggcaggagaatcgcttgaacccagaaggtggaggttgcagtgagccaagatggcaccactgcactccagcctgagtaacaaagcaagacttcatctcaaaaaaaaaaaaaaagaaa

SEQ ID NO: 655164 - DNA, 438 bp, Homo sapiens
gcaaagtgctgaccaagggtgatagaaatctaaaatgggaggtagaagtaggggatggcagatgtcaattatggccttaggatcagctataatggagggactgcatcttgcttcactagtcctcttgccttggacctttttggaaatgcaactaccacaatcttgaaggagactctgygacagattatactcatacctcctccgtcagggaaaaatggccatcttgttctcagaaaaatagaggctccagagtgtaccaagtgaaacagataatgaagggcaccagcaggctgcgtggtgtgaggggtgggctcattagactgttctcactcaccactttagacctctcagcttcactcgtctcttgtgccaactgtcacctcagcaagcagcttcctgaaggcacaaccagatggcactttgcctcatgcccacccc

SEQ ID NO: 655165 - DNA, 676 bp, Homo sapiens
aattaatgcatcttcacaacgtcattgctccctggatgatgacacttacatgaagagaaaaatcataagagaggacatttgaaaatcacctggtttatagcaaatcaaacgcttctcctagacctaggaatgggacctcttgccatgttactttatggaaaatgtagactagtttctctttcgtactctgtagaatagattaagtgtggttgaccataaaatgattcttcagaagtaaagatcctgcataggaaacacacacaggagaatgagtggattttgttttcatattccagatccctctgtggcagcagggttttgaattccaataaaatttaacatccaggtattgggggctaaagaagacrgatgtgctcttgagccctggcagtgtaaaggacgaataagtcatgttctctgcctttgaggctcacagttgtgcctgggagacggacacttggataaccaggatataaaataatcaacaccaccaatggggtctgtttatggggtatggggatctggtgaagggacacgtgatttcatccagccataggggtgtgtcgggggagggggaggcggagactggcagatcagggaaagcttctgagagaaggtgtcgattgagttgggtgttaaaggatagatgggcatttaccaaggggtgatggggtag

SEQ ID NO: 655166 - DNA, 591 bp, Homo sapiens
ctatatccccactatggtagtcacagcttgttgagtcagatttacacccggaagaaaagtaaccattgatatcctgggtggactggctctgggttctgaccaacgacaggtgccctttattgtataaggtctgtctaacaaatcctttcacagtgtctgagcataagacatcaacagagactcgcagaaaacacaatggcaaagaagccaagatgcacaaaaagctcatagaagctgtgaatgagaagaaacctggagatgctgagaaaagcagagaggccagtcagaagcagcaggaaagaaagatgctgagccagagaagagctgagtcctgtgggtggggcagccaatgtcctctggacaggtgctcctgagcttccaggactattgtcccacaattagagcccttcatgtcacctatgcagtgttctgatgccaataagctggctgtttggctgcttagatttttttttcctgctcttattttctgtgtctctaaaaaaaccraattcaaattaactgagataacttgtgtagtctcttgcaaaccgaaggaaactgacacatctcaccgagtgagatagcagcatt

SEQ ID NO: 655167 - DNA, 610 bp, Homo sapiens
aacagagttttacctagaaccctaggcttctttacgccagtgttgtatttttttcagctacactagactatcaaattgacaaagcttcatatacattagaatgaagtggttgaggcaaaggaatggtaaattgagaattcacaatttggggtaaggtcaaagtatgatctgaggatcgcctttgttaatcacatggatgctttctgaaaatgtagattcctagactcttcctaggttcccagacagattgaatctcaatctccatgggtgggacccaggaatatgccatttaaacaagttctctagataacttttatgtacactaaggtttacattccataggccaatgatatcctatatattcctctagaatgttatttaatatgttttaaactgaggtgttaacattttcccatttggggaatttgtactgttttgcmctagattctaaggactggtacagaggagacctatggtgaaagtgaagggcattgaatctgggttccattccaggctaaccttgctatgtgggcctgggcaacttacttactgaacactctaagtcttcaatttttcttcttcgaaataactataatgccacccttgcaga

SEQ ID NO: 655168 - DNA, 610 bp, Homo sapiens
aacagagttttacctagaaccctaggcttctttacgccagtgttgtatttttttcagctacactagactatcaaattgacaaagcttcatatacattagaatgaagtggttgaggcaaaggaatggtaaattgagaattcacaatttggggtaaggtcaaagtatgatctgaggatcgcctttgttaatcacatggatgctttctgaaaatgtagattcctagactcttcctaggttcccagacagattgaatctcaatctccatgggtgggacccaggaatatgccatttaaacaagttctctagataacttttatgtacactaaggtttacattccataggccaatgatatcctatatattcctctagaatgttatttaatatgttttaaactgaggtgttaacattttcccatttggggaatttgtactgttttgcactagattctaaggactggtacagaggagacctatggtgaaagtgaagggcattgaatctgggttccawtccaggctaaccttgctatgtgggcctgggcaacttacttactgaacactctaagtcttcaatttttcttcttcgaaataactataatgccacccttgcaga

SEQ ID NO: 655169 - DNA, 299 bp, Homo sapiens
ttgttctaggtttaagttcctcatttcttaggctctatttttctccttgccatggccagctaaatccctggacctttgtcatgcttatcttagcttgacatgacttcttagcttcrtaatgcaatgttttatacctgggtgaaatataaacacactaagctcttgttaaactggtactggtttattctggacagtagttccattgctccaaattgaaagctactcttcttcctggaacagtgagtgctcaggtgcttttaaaacgctgtctatcccaaatttctgagtagaaatccctt

SEQ ID NO: 655170 - DNA, 462 bp, Homo sapiens
aatttggaagctatctgaggagctgggtggggactcgtgatgccttctataaagacttgggctaagtggagaagtttgcttggctgaagcaatacraaaaggatagttcatttttattttggataaagtgaaacttcagctttaaaaaaaagctgttgtaaccagagcccatctcacagataaacacagaaaagcactgttggctgtagccatccaccctcaggaattgtgccttggaagtcacaataagtggcagtttgaaggtcatgaacaggttctgtccagctgtctaacaggaggagaaaacaggtgagcagaaggggaagcgtttaaaataacaagggggctctttaaatagagctataaaactgggtggcaaacctagtccaagggttaaaaacaagcttttcttccaaagtttctatggcaactagataacatctacagcaagagtgtagttaa

SEQ ID NO: 655171 - DNA, 461 bp, Homo sapiens
ttccaatttggaagctatctgaggagctgggtggggactcgtgatgccttctataaagacttgggctaagtggagaagtttgcttggctgaagcaatacgaaaaggatagttcatttttattttggataaagtgaaacttcagctttaaaaaaaagctgttgtaaccagagcccatctcacagataaacacagaaaagcackgttggctgtagccatccaccctcaggaattgtgccttggaagtcacaataagtggcagtttgaaggtcatgaacaggttctgtccagctgtctaacaggaggagaaaacaggtgagcagaaggggaagcgtttaaaataacaagggggctctttaaatagagctataaaactgggtggcaaacctagtccaagggttaaaaacaagcttttcttccaaagtttctatggcaactagataacatctacagcaagagtgta

SEQ ID NO: 655172 - DNA, 484 bp, Homo sapiens
aagatgtgaaggcattgggtgatgttcactcttctctatgatatccagtaacttaaatactgtggtgtaatgttaactattactaatacatgttatagtagatgatctagggctaagacagggaagaaaacaaaaatgtttaaaatatgtattaaattagatatatacatacacatctattatgacaaaataagagatataacaattacaatccttgtttctgcaacttgtcatatagtcatagctgttatttataactaccttcttccatgaccatttccatattacttttacctgtagcaagcacttcagctggttgtagtctttgcctggtgaagtgacccaaactctcattcgtgaaggaactggggcattagcagtcctgcttgagttgagttgtcgtggtttcccactgacttcaatcttaggaaatggtagttgtcttagctggggctgmtaaatcaaaataccaaaaactgggtag

SEQ ID NO: 655173 - DNA, 587 bp, Homo sapiens
gtgtgttaggcttcagcaaagtgcttggctgcattctattcatgctccagggatctktgggagtttgaacttaagagtgatgatttagggtatctggcagtggaaatttttaagcagcctgcagaactgtgagccaattaaacctcttttcttataaattattcagtctctgtatttctttatagcaatgcaagaacagcctaatatagatgactgtttttctttttccaaaaacaatggcctcgtatattttgttcattgttatagtttattttagtgggaaggaaagtcaggtgtccattattctgtcattgtgggacgctaaagtctctgaacacattatcttaaaactatttttgaaatatggttaaacacacacacacacacacatacttgcttgtatgtgatgcttgccaatgagaagacaaaacttctataaagaaaaatatggttatctgtgatcttctttaataaatatttttaaaatattgcaattgaaaatgtaacaccattaattcactcatcaaatagctaagtagagtctacattttgtatttcttaaagataaaatcagttccacaaatatt

SEQ ID NO: 655174 - DNA, 587 bp, Homo sapiens
gtgtgttaggcttcagcaaagtgcttggctgcattctattcatgctccagggatctgtgggagtttgaacttaagagtgatgatttagggtatctggcagtggaaatttttaagcagcctgcagaactgtgagccaattaaacctcttttcttataaattattcagtctctgtwtttctttatagcaatgcaagaacagcctaatatagatgactgtttttctttttccaaaaacaatggcctcgtatattttgttcattgttatagtttattttagtgggaaggaaagtcaggtgtccattattctgtcattgtgggacgctaaagtctctgaacacattatcttaaaactatttttgaaatatggttaaacacacacacacacacacatacttgcttgtatgtgatgcttgccaatgagaagacaaaacttctataaagaaaaatatggttatctgtgatcttctttaataaatatttttaaaatattgcaattgaaaatgtaacaccattaattcactcatcaaatagctaagtagagtctacattttgtatttcttaaagataaaatcagttccacaaatatt

SEQ ID NO: 655175 - DNA, 587 bp, Homo sapiens
gtgtgttaggcttcagcaaagtgcttggctgcattctattcatgctccagggatctgtgggagtttgaacttaagagtgatgatttagggtatctggcagtggaaatttttaagcagcctgcagaactgtgagccaattaaacctcttttcttataaattattcagtctctgtatttytttatagcaatgcaagaacagcctaatatagatgactgtttttctttttccaaaaacaatggcctcgtatattttgttcattgttatagtttattttagtgggaaggaaagtcaggtgtccattattctgtcattgtgggacgctaaagtctctgaacacattatcttaaaactatttttgaaatatggttaaacacacacacacacacacatacttgcttgtatgtgatgcttgccaatgagaagacaaaacttctataaagaaaaatatggttatctgtgatcttctttaataaatatttttaaaatattgcaattgaaaatgtaacaccattaattcactcatcaaatagctaagtagagtctacattttgtatttcttaaagataaaatcagttccacaaatatt

SEQ ID NO: 655176 - DNA, 476 bp, Homo sapiens
agaaaaatgtgaaaagaagacatgggtctagcctcttggtgtacatctttctcccatgccgggtacttcctgccctcaaacaacagactccaarttcctgagttctccttgctcctcagactggttctccttgctcctcagcttgcagacagcttattgtgggaccttgtgattgtgtaaattaatgattaataaacatatatatatatgtttattatatatatatcctgtaagtactttccttctaggagaaacctgactaatacatattttggtaccaggagtggttttaaaggaacagaatattaagggtggagttctttcattgcttttggggtttctgaagttggctgcttaatatgattagacccataaatgctaaggaccctacttttaatagtacagagaacactgatagtccttggcatgaactgttttagagagacgcaaaataaatgtgtttgacactcctgttt

SEQ ID NO: 655177 - DNA, 590 bp, Homo sapiens
tatggtggctgctgattcagtctacttcttggtcaccgttgttttttgaccatggttcaatttcttacttgaaatctctgcttatggccctttctctacattctcccttctgtccactgtattccagggcccacttccacctccctggaacacaagttcccctttctttctgtcccccggggtcatcctcagtgacctcaacatccataagcttcattctcccttcttgacctgtgtttctactccaaatcagatacccaacaaggccacccttgacttctcatccctagacagagtttatctgtaacatctctctgataacttctaaactggttacttttctaatagaccacatgtacgaactgtgctctgatccttctctgtgtttctatttgcttgtctctctctttttgcaagttcatttgtctttatctggcttacatatgatgcccattaagactgaatttaatggtaaaccactctcctctcatttctcttgcctgacagacatgtttcctaatccttgctcttgscctcttcactttctgtactcttccctcatctaggtttgctgaagaaaatcacaaact

SEQ ID NO: 655178 - DNA, 587 bp, Homo sapiens
atatgtgtaatgtgtcagatgagggatgaaggatgagagtgaaggaaggagcaaaggaattctgagcaggaggagcaaaatgagcagggctggacaggcaaggtcttatggaggaagaatttgaactgggccttgaggattgaatagaagttgctcaaaagagccaaggaggtagggatagggacatggacatctgagaagaaaaagaactacaaatgctgcaaacattgtctacaggtggcaagatggtcaacatgctatacttggcaggaaaatttatgcaggcaataaaggactggtcccatccactggaagtgctgtcwacagatcacccttggctgtcattttctgtaggaatggccttagctgtagaaagccacttcctccaagttcacgtcccttcctgccacatccagtgactgacctgtttgcggtctaaaggcctggtcatctcagcccaacgtaggacatctctgaagagcagttttagctccatagctcctcatggagttgagtctggctgttttgaagtctgtatcacagtttgatttatctctttccttactcctgattctctacttcctttc

SEQ ID NO: 655179 - DNA, 541 bp, Homo sapiens
attctattaacattcagtacagacccttcattccaaagataggcatcatactgtcagagcctcttagcgtgtttaccaagcttgccaccagctcatcagcccccttaacttccaggagtggatctgaggagctctgtggtttgctcatggttacctctccaccctggccatggttcattgggctgtatgtggaccctcatgcagctgcgcctgtcggggtcctgttctgagagttcaggacgggactcagatgcccaatctgggcaagtctcttaaatggaaggagcagggtcacatcttacacccaccaaagctctctaaaatcaragagaataaataagatgtccagagggaggcagccctggctgtgtgcttggttttgatcctttataagacatggtctcaagtctggagatacaaatttcccctttcgacttaagctagctcacagtggttgttccttgaaaacagagtccttatccagtgtctcccaccagctccaaagctggatgcaagaacatgagtttgctgggtatgcaca

SEQ ID NO: 655180 - DNA, 541 bp, Homo sapiens
attctattaacattcagtacagacccttcattccaaagataggcatcatactgtcagagcctcttagcgtgtttaccaagcttgccaccagctcatcagcccccttaacttccaggagtggatctgaggagctctgtggtttgctcatggttacctctccaccctggccatggttcattgggctgtatgtggaccctcatgcagctgcgcctgtcggggtcctgttctgagagttcaggacgggactcagatgcccaatctgggcaagtctcttaaatggaaggagcagggtcacatcttacacccaccaaagctctctaaaatcagagagaataaataagatgtccagagggaggcagccctggctgtgtgcttggttttgatcctttataagacayggtctcaagtctggagatacaaatttcccctttcgacttaagctagctcacagtggttgttccttgaaaacagagtccttatccagtgtctcccaccagctccaaagctggatgcaagaacatgagtttgctgggtatgcaca

SEQ ID NO: 655181 - DNA, 605 bp, Homo sapiens
gtgctatctctttgccatagaggacacagcaagaaggcagctgtttgcaaaccagaaagtgagccctcaccaagaattccaccaagtcagctccttagttacagactttctgcctccataagcataagaaacaaatgctgtttaagccccccagcttatggcattttgttctggcatcccaaactgtctaagatagcaactcaggtgtcctctacaattctaagctcctgcttagattgagacactatttggcttggggtcttttctgggtcggaggtagcagggagccctgcagattcttcacccaggatctctgcagtcagtgttgcttttcctcttggcaagagagaagagttcagaaatattttaaaggagagagatgcattcctttcttcagcctgaccctgactcataaattgtgtggctctagcctccactccctcttggaagagaacctaagttaaaaatgtaataaaataattggattytttgttctggatttaaaaaaaaaacgtcaccaggatccagccagcctctgtgactccagttttataaccaagcttgagtggttttcctatctcaggaaaagtttgagacaccgaaat

SEQ ID NO: 655182 - DNA, 487 bp, Homo sapiens
attatgaaaggaaaaatcgtctgactcaatattgcacatcagttccacacacaggaaaaccgtgagtgcacagtaattctttttgtggcaaatgcaaagtctgtggtctctgcaggtctcagaaaagaccacatactagaaaaaccgctacctgcctgtcagtgggaaggtctctgctgtasctagtgtgcaactttgaccttcaccaggacaacgtaaagcctagctggatgtttccagatgccccttaaagctattttgcagggaggaattcctggttaattaaaaggataatcaaacattttgaacagtagtgcagtagtggtttgtctggtttgcatttgccgtcctgacaaggtctaatattttaaggctccagtcttgaaaaaaacatgttaaaggagatgaatgaaaagtgaggaagaggcactgaagagaggtctgtgaagggcactgcagggagagaagttgggcagaaacccagagt

SEQ ID NO: 655183 - DNA, 656 bp, Homo sapiens
atttctcttttctggagggggcaagtatctgatgtctgtagtcagtcatcttgagctggaattctacaccccagaatttcatatgtgaatatcttttgtatagtcagacaccagcactcttcacaagctgtgaaggagatgcagataacctacatagcacatttaaacaaaacaaaagaaaatattacatttccttagtacatgaggctgccatgtgagaagaacaaaatggagagaaaaagagtttaaaaagctgccaagtagaaaattttacatatataatggggtgtcaaggtgaaaacactcaccaaaagggctttccatgcctgggatcacaaggggataaacatctatctaactattcatatggtgtggctgggtccccacccaaatctcaacttgaattgtatctcccagaattcccaygtgttatgggaaggacccaaagggaggtaattaaatcatgggggccagtcttttccatgctattttcgtgatagtgaataagtctcatgagctctgatgggtttatcagggttttccacttttgcttcttcctcactttttctcttgctgtcaccatgtaagaagtgccttttgcctcccaccataattctgaggcctccccagccatgtggaacaataagtccaattaa

SEQ ID NO: 655184 - DNA, 606 bp, Homo sapiens
gatgcattgttcagtatgccaattgcacttttcaactacagaatttctgcttgattttttaaaaaawtatttcaatctctttgttcagtttatccaacaaaattatgaaatctttctttgtctaatcttgtatgtattttagtttcttcaaaacagctattttgaattctctgtctgaaggtttacatgtctctatctctccaggattagttcgtggtgccttatttggttcatttagtaaggtcatcttttcctgaatggcattgatgctagtagatgttcttcagtgtctgagcattgggtagttaggtgtttattattatcttccctttctgtgtttatttgtactcggtcttcttgggaaggccttccaggtttttgaaagaatttcggtggtatgatctaagctgtatctgcattagggagcaccctaagtccagtaatgctgtggtttttacaggctcatagacttaacactttgacggtcttggcaaagatccaggataatgctctggattaccaggcagagactcttattctctttccagactttctcctgaaccatagagtctctctctatgttctgagctacctaaatctgggatg

SEQ ID NO: 655185 - DNA, 606 bp, Homo sapiens
gatgcattgttcagtatgccaattgcacttttcaactacagaatttctgcttgattttttaaaaaattatttcaatctctttgttcagtttatccaacaaaattatgaaatctttctttgtctaatcttgtatgtattttagtttcttcaaaacagctattttgaattctctgtctgaaggtttacatgtctctatctctccaggattagttcgtggtgccttatttggttcatttagtaaggtcatcttttcctgaatggcattgatgctagtagatgttcttcagtgtytgagcattgggtagttaggtgtttattattatcttccctttctgtgtttatttgtactcggtcttcttgggaaggccttccaggtttttgaaagaatttcggtggtatgatctaagctgtatctgcattagggagcaccctaagtccagtaatgctgtggtttttacaggctcatagacttaacactttgacggtcttggcaaagatccaggataatgctctggattaccaggcagagactcttattctctttccagactttctcctgaaccatagagtctctctctatgttctgagctacctaaatctgggatg

SEQ ID NO: 655186 - DNA, 607 bp, Homo sapiens
ttaagcttctgaactccaggaggggattaggaggtaatcaccctgtgtttctctcccacatgcatattaataatttttatgccctttctctaattaatcagacttttgcaagttgatttttttcgtggatcctcggaaggcaaaggagaactttttctttgacttttgtccattgtcaaactgctataaagaaatacctgagactcagtaatttctaagagaagaattttaattggctcatggttctgcaggctgtacagaaagcataacagcttctgattctcaggaagcctcagaaagctcccaatcacatggcaaaaggtaaagcrggagtgagctctcttacatggctggagcaagagatagagagagaggagggaggtgctacacactttaaaaaaaacagatctcatgaaaactcacttactactgccaagaaaataccaacaggggtggtgttaaatcattcctgaaaaactgccccccatgatctaatcacctcacaccaggccccccacgcctaacattggaaattacaactcaacatgagatttgggcgggggcacagatccaaaccatatcaacccctatgttagattttactaca

SEQ ID NO: 655187 - DNA, 562 bp, Homo sapiens
cacctcaacattcctggttggaggaagcactagcccatccctttaactgtaaaatagggcagcaagcccaagttaggggcttttcttcacccactgggcrtacctgtcctgtacttgtcacactttcattatttacttatctatttttcctgctaaagagtaagctctttaaagaaaggggctgttttatctttgcataatatcaagcaataagaaactccttttttactaagttatttgttgttttccgtcctctactcagtctagtaaattctaagacaatttattctcttttcaaccacgttcattttggagataagaagtttctatattcatggtgcaattcttggctttacaacagccttagtgccatacccgtggcttcatcttccagctggaagaattgacctccatccagtgcctaaggtatgactatattgtgggaaatcaagatcattatactttcattgtcctattccatgtgtctttgtatattttaagatcacatttttaaagcaaatacttacataacaattacaacatgttaatctactaactcata

SEQ ID NO: 655188 - DNA, 562 bp, Homo sapiens
cacctcaacattcctggttggaggaagcactagcccatccctttaactgtaaaatagggcagcaagcccaagttaggggcttttcttcacccactgggcatacctgtcctgtacttgtcacactttcattatttacttatctatttttcctgctaaagagtaagctctttaaagaaaggggctgttttatctttgcataatatcaagcaataagaaactccttttttactaagttatttgttgttttccgtcctctactcagtctagtaaattctaagacaatttattctcttttcaaccaygttcattttggagataagaagtttctatattcatggtgcaattcttggctttacaacagccttagtgccatacccgtggcttcatcttccagctggaagaattgacctccatccagtgcctaaggtatgactatattgtgggaaatcaagatcattatactttcattgtcctattccatgtgtctttgtatattttaagatcacatttttaaagcaaatacttacataacaattacaacatgttaatctactaactcata

SEQ ID NO: 655189 - DNA, 562 bp, Homo sapiens
cacctcaacattcctggttggaggaagcactagcccatccctttaactgtaaaatagggcagcaagcccaagttaggggcttttcttcacccactgggcatacctgtcctgtacttgtcacactttcattatttacttatctatttttcctgctaaagagtaagctctttaaagaaaggggctgttttatctttgcataatatcaagcaataagaaactccttttttactaagttatttgttgttttccgtcctctactcagtctagtaaattctaagacaatttattctcttttcaaccacgttcattttggagataagaagtttctatattcatggtgcaattcttggctttacaacagccttagtgccatacccgtggcttcatcttccagctggaagaattgacctccatccagtgcctaargtatgactatattgtgggaaatcaagatcattatactttcattgtcctattccatgtgtctttgtatattttaagatcacatttttaaagcaaatacttacataacaattacaacatgttaatctactaactcata

SEQ ID NO: 655190 - DNA, 513 bp, Homo sapiens
actcattgagttattgaatttgcacactggcttacttttaaaatgacccaaatgtctggcagtgttaaaggacatatttctgtacaaaaccattccaggcaatgttgggatggctcataatgagagatatgccagacttgtgaagttactatatgtttccaccatctccagccctcatgcctgcttgagggttgatacacagacatacagattcaggcatactcacacatatggtttgattttctctgattcagtctgggttttcttcatgcttttcttctgaacaaagtccacctttactcacaagttccatctgtgagacttgcacacatataactttggtcttaagagcagaatagaggggtgaactgaattaaaagaagaactgttcaaggcccctaaagatgaggttaataaggagctcgaaacagtgacctatraggaacagtagaagatcaatacagtctagcaaataaataagaatacaagttttggagacggaacatactacag

SEQ ID NO: 655191 - DNA, 597 bp, Homo sapiens
tgttgggggtgcccattggagggacagcagggcccaggtgcactctgcaggaccagggtggcccagcacagcagcagcgactgtgccctggaagcctgaggccctggaacgcaaggcctaatgccattcccgctgcgttcattgttcagcttccctgccctgcccaggcagagatgtggcctgagaaagtgtggggaagaggggcccaggctagacagggaggagcctccattgcttttgccttggaatcctgagctcaaagcacaggctggcacacagcagggctcacgaaatgctgagtgagcagaagagctctgcagccagatgacaacatggcctccaggaaggtgtggcaccagccccagcctcactttccccatgtgtctgtgaggctcacaggaatggcccaccacacagtgctggagggaagagttgggataactaatgtgtgctctaacccactttacaaatgggagggaacaaagattagaaaatygctgccatctgctatgtctgaagcctgctcacttcactggcactattctagtgtaaccaatatataatctgagcttaaaaatgtatattttgaattaatat

SEQ ID NO: 655192 - DNA, 639 bp, Homo sapiens
cagtgacctgcagacagtgtggcgtggggccagaagcatttctctggagtctgactgccagcttcttagctgtgtgaccttaagcaggttacatcacctctctgtgccccagtttgcttgtctgtaaaacaaggctaacagtagtaaacataagagcaaattcttccagagtgcttattttgtgagaggcactattctacaccaattacaagtattaactcttgaatcttcaccacatccagtgaggtaagcccttagcccagggccaggagtgctgcctgcacttggtaattgttggcgatsatgagctgtatattctggctgagccccctgaggctgcccagctatctgcttaaaacacaaccctggctgggcacagtagctcactcctgtaatctcagcactttgggaggctgaggcaggaggatcacctgaggtcaagagttcgagaccagtctggccaacatggtgaaaccccgtttctactaaaagtacaaaaaattagccgggcgtggtggcggatgcctgtaatcccagctactcaagaggctgaggcaggagaatcgcttgaacccaggaggtagagtttgcagtaaactgagattgcgccactgcactccagcctgggcaacagagcaa

SEQ ID NO: 655193 - DNA, 440 bp, Homo sapiens
ttttcaaacaaataactttctggagctgaaatctatgatttcctcattaaacaattcagtacatgaattaaaagaggggcagtgcaagaaatttttggagagcaaatgtataaagatagaaatcatgaaagcaaagaaacttggaggagaaatttgagatgtccaaaatttgaataatatgacttccagaaggagagaaagaaacagatggaagaaaagactacgtattgtgtacagtgtacactgcttgaatgatgatgggtgcrctaaaatctcagaggtcaccgctaaagaacccatctgtgtaaccagaaactatctgtatctccacaactattgaaatgaaaagaaaagaaaagaaaaaggaaatggatggatgtggcagtaagccacaggagaaaaaaagacaggtatcacatttcaaatttgaacactgtagc

SEQ ID NO: 655194 - DNA, 629 bp, Homo sapiens
gctgcaggctctttttttcttttaaataataaaattcatgactgaaaagacatcctgtatgtgtgtgtatgtgcatgtgtatgtagaggcattggcctccatcctagagccttacctaatttggcaggcatttaacaaaggcagcattattgaataccagtgaattatctggcaacagagggagagaccaagagatgcatgggtatggagcgcacctcataggatgaaatgctggttattcacagatgtctttcagaaggagtcaccaacaagtgctacattatgtttgcctcgtagaaactctttatttcctgtaaggtttctgaccttgagaaacaaggctgatattgcagacaagagcctcaagattaggcagttctgcctggacttctctagaattgctgctcaggacctgcacccgctgctaccacctgccattgggatttggcacagggatccgcttagctgtttcttcatgctccaggcttccactggttagtgctgaggactgtcagctagtattgagagaatgtcactaccacagaaacactgtgtagaaagaaggctgggttgtgaggagacgggggacaaacayagaaaagtcaagatctggcctcagcctggccggt

SEQ ID NO: 655195 - DNA, 503 bp, Homo sapiens
gtttcaattgaagtcacagtgttgaacagtccctttcatagaacaggattgaaacactctttttgtagtatctggaagtggacatttgtagsgctctcaggactatggtgaaaaaggaaatatcttccaataaaagctacttagaagcaatgtcagaaactttttcatgatgtatctactcagctaacagagttgaacctttcctttgagagagcagttttgaaacactctttttgtggaatctgtaagtggatatttgtctagctttgaggatttcgttggaaacgggattacatataaaaagcagacagcagcattcccagtaacttctttgtgatgtttgcattcaagtcacagagttgaacattccctttcatagagcaggtttgaaacactctttttgtagtatctggatgtggacatttggagcgctttcaggcctatggtgaaaaaggaaatatcttcccctgaaaactagacagaagcattctcagaaactaatt

SEQ ID NO: 655196 - DNA, 569 bp, Homo sapiens
gtcttcatataaactctagacagaagcattctcagaagcttcattgggatgtttcaattgaagtcacagtgttgaacagtccctttcatagagcaggtttgaaacactctttttgtagtatctggaagtggacatttggagagatctcaggaatacggtgataaaggaaatatcttccaataaaagctagatagaagcaatgtcagaaactttttcatgatgtatctactcagctaacagagttgaacctttcttttgagagagcagttttgaaacactctttttgtggaatctgcaagtggatatttgtctagctttgaggatttcgttggaaacgggattacatataaaaagcagacagcagcattcccagaaacttctttgtgatgtttgcattcaagtcacagagttgaacattccctttcatagagcaggtttgaaacactctttttgtagtatctggatgtggacatttggagcgctttcaggccaatggkgaaaaaggaaatatcttcccctgaaaactagacagaagaattctcagaatcttatttgtgatgtgcgccctc

SEQ ID NO: 655197 - DNA, 622 bp, Homo sapiens
ctgaaaactagacagaagcattctcagaaacttatttgtgatgtgcgccctcaactaacagtgttgaasctttcttttgatagagcagttttgaaacactctttttgtaatatctgcaagaggatatttggatagctttgaggatttcgttggaaacgggattacatataaaaagcagacagcagcattcccagaatcttgtttgtgatgtttgcattcaagtcacagagttgaacattccctttcagagagcaggtttgaaacactctttttatagtatctggatgtggacatttggagcgctttcaggcctatggtgaaaaaggaaatatcttctcctgaaaactagacagaagcattctcagaatcttatttgtgatgtgcgccctcaactaacagtgttgaagctttcttttgatagagcagttttgaaacactcttttcgtaaaatctgcaagaggatattttgatagctttcaggatttcgttggaaacgggattgtcttcatataaactctagacagaagcattctcagaagcttcattgggatgtttcaattgaagtcacagtgttgaacagtccctttcatagagcaggtttgaaacactctttttgtagtat

SEQ ID NO: 655198 - DNA, 622 bp, Homo sapiens
ctgaaaactagacagaagcattctcagaaacttatttgtgatgtgcgccctcaactaacagtgttgaacctttcttttgatagagcagttttgaaacactctttttgtaatatctgcaagaggatatttggatagctttgaggatttcgttggaaacgggattamatataaaaagcagacagcagcattcccagaatcttgtttgtgatgtttgcattcaagtcacagagttgaacattccctttcagagagcaggtttgaaacactctttttatagtatctggatgtggacatttggagcgctttcaggcctatggtgaaaaaggaaatatcttctcctgaaaactagacagaagcattctcagaatcttatttgtgatgtgcgccctcaactaacagtgttgaagctttcttttgatagagcagttttgaaacactcttttcgtaaaatctgcaagaggatattttgatagctttcaggatttcgttggaaacgggattgtcttcatataaactctagacagaagcattctcagaagcttcattgggatgtttcaattgaagtcacagtgttgaacagtccctttcatagagcaggtttgaaacactctttttgtagtat

SEQ ID NO: 655199 - DNA, 622 bp, Homo sapiens
ctgaaaactagacagaagcattctcagaaacttatttgtgatgtgcgccctcaactaacagtgttgaacctttcttttgatagagcagttttgaaacactctttttgtaatatctgcaagaggatatttggatagctttgaggatttcgttggaaacgggattacwtataaaaagcagacagcagcattcccagaatcttgtttgtgatgtttgcattcaagtcacagagttgaacattccctttcagagagcaggtttgaaacactctttttatagtatctggatgtggacatttggagcgctttcaggcctatggtgaaaaaggaaatatcttctcctgaaaactagacagaagcattctcagaatcttatttgtgatgtgcgccctcaactaacagtgttgaagctttcttttgatagagcagttttgaaacactcttttcgtaaaatctgcaagaggatattttgatagctttcaggatttcgttggaaacgggattgtcttcatataaactctagacagaagcattctcagaagcttcattgggatgtttcaattgaagtcacagtgttgaacagtccctttcatagagcaggtttgaaacactctttttgtagtat

SEQ ID NO: 655200 - DNA, 622 bp, Homo sapiens
ctgaaaactagacagaagcattctcagaaacttatttgtgatgtgcgccctcaactaacagtgttgaacctttcttttgatagagcagttttgaaacactctttttgtaatatctgcaagaggatatttggatagctttgaggatttcgttggaaacgggattacatataaaaagcagacagcagcattcccagaatcttgtttgtgatgtttgcattcaagtcacagagttgaacattccctttcagagagcaggtttgaaacactctttttatagtatctggatgtggacatttggagcgctttcaggcctatggtgaaaaaggaaatatcttctcctgaaaactagacagaagcwttctcagaatcttatttgtgatgtgcgccctcaactaacagtgttgaagctttcttttgatagagcagttttgaaacactcttttcgtaaaatctgcaagaggatattttgatagctttcaggatttcgttggaaacgggattgtcttcatataaactctagacagaagcattctcagaagcttcattgggatgtttcaattgaagtcacagtgttgaacagtccctttcatagagcaggtttgaaacactctttttgtagtat

SEQ ID NO: 655201 - DNA, 513 bp, Homo sapiens
tgaaaactagacagaagcattctcagaatcttatttgtgatgtgcgccctcaactaacagtgttgaagctttcttttgatagagcagttttgaaacactcttttygtaaaatctgcaagaggatattttgatagctttgaggattcgtggaaacgggttgtcttcatataaaaagcagacagaagcattctcagaagcttcattgggatgtttcaattgaagtcacagtgttgaacagtccctttcatagagcaggtttgaaacactctttttgtagtatctggatgtggacatttggagcgctttcaggcctatggtttaaaaggaaatatcttcccctgaaaactagacagaagcattctcagaaacttatttgtgatgtgcgccctcaactaacagtgttgaagcattcttttgatagagcagttttgaaaaactctttttgtggaatctgcaagtggatatttgtctagctttgaggatttcgttggtaacgggattacatataaaaag

SEQ ID NO: 655202 - DNA, 517 bp, Homo sapiens
atcacaattacttgtggggttttttttgtttttttttgttattggtgttgttttttgagacagagtctcactctgtcacccaagctggagtgcaatggcaccatcttggctcactgcaacctccacctcccgggttccagtgattctcctgcctcagcctcccaagtagctgcgattacaggtgtgtgccaccatccygcctaatttttgtattttcagtagagacagggtttcaccatgctgggcaggaactccttctgtcttgaactcctgacctcaggtgatccgcccgtcctggtctcccaaagtgctgaaataacaggtgtgggccaccacagccagcccacaattacttgtttttatgtgtgtctcacccattaaactgtgaatttcttaagagcatccagcacaaacctggtacacaggccttcaaacatttgctgaataaatgatataagcatataaattcacatagtgaaaaatttgcttttatcagattacctgaggggcaggaagt

SEQ ID NO: 655203 - DNA, 517 bp, Homo sapiens
atcacaattacttgtggggttttttttgtttttttttgttattggtgttgttttttgagacagagtctcactctgtcacccaagctggagtgcaatggcaccatcttggctcactgcaacctccacctcccgggttccagtgattctcctgcctcagcctcccaagtagctgcgattacaggtgtgtgccaccatcccgcctaatttttgtattttcagtagagacagggtttcaccaygctgggcaggaactccttctgtcttgaactcctgacctcaggtgatccgcccgtcctggtctcccaaagtgctgaaataacaggtgtgggccaccacagccagcccacaattacttgtttttatgtgtgtctcacccattaaactgtgaatttcttaagagcatccagcacaaacctggtacacaggccttcaaacatttgctgaataaatgatataagcatataaattcacatagtgaaaaatttgcttttatcagattacctgaggggcaggaagt

SEQ ID NO: 655204 - DNA, 549 bp, Homo sapiens
accacgcccagttatttatttatttttttgagacggagtctcgctcttcacccaggttggaatgcagtggtgcgatctcggctcactgcaagctccacctcctgggttcatgccattctcctgcctcagcctgtagctgggactacaggcacccgccaccacgcctggctaattttttttgtatttttagtagagacggggtttcactgtgttagccagaatggtctcaatctcctgacctcgtgatycgcccgccttggcctcccaaagtgctgggattacaggcgtgagccactgcgcctgaccccaatttttgtacttttagtagagacagggttttgccatgttggccaggatggtctccatctcttgacctcatgatctgcctgcatcagcctgccaagtgctgggattacaggcgtgagccaccactcccggcctcctcatcatatttctaataactcacaaagtacttactgagctctgaaaaatatttactgaatgaaaaattgacacttttgaacttttaaaataatgccgtaggctaaa

SEQ ID NO: 655205 - DNA, 549 bp, Homo sapiens
accacgcccagttatttatttatttttttgagacggagtctcgctcttcacccaggttggaatgcagtggtgcgatctcggctcactgcaagctccacctcctgggttcatgccattctcctgcctcagcctgtagctgggactacaggcacccgccaccacgcctggctaattttttttgtatttttagtagagacggggtttcactgtgttagccagaatggtctcaatctcctgacctcgtgatccgcccgccttggcctcccaaagtgctgggattacaggcgtgagccactgcgcctgaccccaatttttgtacttttagtagagacagggttttgccatgttggccaggatggtctccatctcttgacctcatgatctgcctgcatcagcctgccaagtgctgggattacaggcgtgagccaccackcccggcctcctcatcatatttctaataactcacaaagtacttactgagctctgaaaaatatttactgaatgaaaaattgacacttttgaacttttaaaataatgccgtaggctaaa

SEQ ID NO: 655206 - DNA, 519 bp, Homo sapiens
aaactgtgtgatgtattaagttctatattggcacatcctttacactaccttatgtgccactaatgaaagaacatgcttttttttttcaaatgccaaaaaaatcccacaaaggaaataactgaaaatcacrtactcacaccaccatcactatccccgccctccaaaaaaagataacggcttttcatttataaccactgggcatcttaatccaaaaagaatccttatcatgtacagatggatgtcatttgaacaaagcttattacaaatcaataccacagtgcatctttcctagttgtcccaaatttcaaagggctcgattaccctgctgtgtatttcttcttccagttcaaagcttacaagaagctgacaagagaaactggcccatatagttcaactgtctttagtgagaaacagcatgttctctgggtaaatataaaaatgagactcagacctcccaaggcccaggatttccatgctagttgacctgtcagaaaatacataccaaaataaataggcaaa

SEQ ID NO: 655207 - DNA, 413 bp, Homo sapiens
ggggcgtgtatcctttttttactggatgcacctatatactattctgtattttgttttgttttgtcttgtttttgagacggagtctcccactgtctcccaggctggagtgcagtggtgagatctcagctcactgcaacctctgcctccmagcttcaagagattctcctacctcagcctcccgagtagcttggactacaggtgcccgccaccatgctcagctcatcttcctgtatttttagtagagtcagggtttcactatgttggccaggctggtcttgagcttctgacctcgtgatccgcccgcctaggcctcccaaagtgctaggattacaggcctgagccaccacgcctggcctatttctgtatttttaagaagaacatctaatttaagaagaacaaaatttttaaggaaa

SEQ ID NO: 655208 - DNA, 413 bp, Homo sapiens
ggggcgtgtatcctttttttactggatgcacctatatactattctgtattttgttttgttttgtcttgtttttgagacggagtctcccactgtctcccaggctggagtgcagtggtgagatctcagctcactgcaacctctgcctccaagcttcaagagattctcctrcctcagcctcccgagtagcttggactacaggtgcccgccaccatgctcagctcatcttcctgtatttttagtagagtcagggtttcactatgttggccaggctggtcttgagcttctgacctcgtgatccgcccgcctaggcctcccaaagtgctaggattacaggcctgagccaccacgcctggcctatttctgtatttttaagaagaacatctaatttaagaagaacaaaatttttaaggaaa

SEQ ID NO: 655209 - DNA, 640 bp, Homo sapiens
acattaaaaataactgataaatttgtgggcttttgcattatatagcatattaattagtatgtgaaactcaatgttctaattcagtctacagaacataaacatcacaatacttttcttatattgtctttacttttaagcatgaataaaatacattacctttcaaattttctaggtaacataagttatcaaaagacatgccataacattaccacagagtaatcaggctctaaagtgttttaaacacatttacagawgtttgctgttcatgtttctgtgaatgtatgccttaatattgattttaatttacctttagcaaaacaccgaaggtctggttttctgaagcattatattacttctattcatgaggcttgtaattttacacagtacaacatgacttcttttcagtggtcatagagaataaattcttacattgcctgtacttacattctaagtaatccttttgcgcactatattcaactttaatatactttttaacatgtttgagctttgattttgcaaagagcaaaatgcaatgaagaaaaagtgactggaaatgtacttcttgtaaaaacaatatgattgattcccaggcaagatggccaaataggaacagctccagtctatagctcccaatgagacc

SEQ ID NO: 655210 - DNA, 640 bp, Homo sapiens
acattaaaaataactgataaatttgtgggcttttgcattatatagcatattaattagtatgtgaaactcaatgttctaattcagtctacagaacataaacatcacaatacttttcttatattgtctttacttttaagcatgaataaaatacattacctttcaaattttctaggtaacataagttatcaaaagacatgccataacattaccacagagtaatcaggctctaaagtgttttaaacacatttacagaagtttgctgttcatgtttctgtgaatgtatgccttaatattgattttaatttacctttagcaaaacaccgaaggtctggttttctgaagcattatattacttctattcatgaggcttgtaattttacacagtacaacatgacttcttttcagtggtcatagagaataaattcttacattgcctgtacttacattctaagtaatccttttgcgcactatattcaactttaatatactttttaacatgtttgagctwtgattttgcaaagagcaaaatgcaatgaagaaaaagtgactggaaatgtacttcttgtaaaaacaatatgattgattcccaggcaagatggccaaataggaacagctccagtctatagctcccaatgagacc

SEQ ID NO: 655211 - DNA, 607 bp, Homo sapiens
gaaagttggcaaggagtaaaaattttctatgaaatagggaggtgaacaagttataaatgatgttaatatcttccagatggcacagttttacatgggaattgagtttattgtaattaaaggcatgtgaattttctacaaatactgaactttgcaagtctgacactagaagattccatcacttctggaacacagttgttttaagggaggcgttccttcccttccgtttaaaatgaatccttgggttttataatctgagctaaatcagagaaatattttcccatgtgaagggtggttttttaaaaaacaaaatcttcctggacaataaatcttaattatgaaatgaaactcctcagaaacaagaaatttagattccaaatatttttccattaacattgtatattttgatcaatatttaacaccatatgtcttgaattcttagatacatttatttttgagttaagctgttatcacttttctgtctctagacgtgtgttgggcaatcttggagmttctggttttgcttcaatcaggagagtgtggctcaatccattatcctgctttcctattcattgtgaacaatgcctataggctcagagctcccaaaccg

SEQ ID NO: 655212 - DNA, 404 bp, Homo sapiens
taatatccagaggtactttctgagtcatcaaggagagattaaattatgctcattcagggtctcccatcgaatgcagttattactttctcattcgttggaaattggttaactggatatttgatttaccagtatacctcagtttttccattaaagctgagtacagagatttactgtaaaataatatyactgaaaataacgacctcaatcctccattacaaaactcatttctcccttccatcctgaagtggtcttaagctttccaaacaaggctgccaagtgaaatacaaaatgtccagttaaatttgacgcagacaaacaagacataatttttcagaataagtatgtcccatgcaatatttgagacatatgtgtactaaaaaattattcattatttctctgaattc

SEQ ID NO: 655213 - DNA, 326 bp, Homo sapiens
ccacatgcttactttatcttatgtaacatgttaaaatgtagattaaccaagcaagagaagaatgcaaaattggcttttcctgtactcttctttgcacatgtaacatgtagattcactgagtgctaatcagagcctaccaagatggagccgcttgcctcactgcctrcctgtcctccttttctttttcttccccaaatgcttgctctttctttctttcttcttcttcttctttttttttttgagatggagtcttgctgtgtcttccaggctggagtgccgtggcgtgatctcagctcaagagctgggattacaggtgcctgccacca

SEQ ID NO: 655214 - DNA, 493 bp, Homo sapiens
catgtgtttgtggaattaaccttacaacctacttgaggaggctttcttatgttggtgtaaacagagtaggaaaatggagaaggagctattgaagggaagaggctggttggccttaagtaagttaagagtggggtatagacagaaagagctcatttgatttgtggtcatattaatagaggtataataccatgagtaaaggaggtgatcgtcttgtcctagacagtccagttcagtataggaagtcacatttccgaagtgcattaacctgatggactacatgaagtggacagtgactagaatgatgagaggtctgaaaactgaattgtrtgatggttgcaggtagctcctgggagaattcagcaggagatgaggttgggtgtggcaaagctaaggatcatttattctctaaaatagtggttttcggccctggctccttcttagaatcatctggggaatctttaggaaatactaatgcccaggcctcctcccccaa

SEQ ID NO: 655215 - DNA, 641 bp, Homo sapiens
atctgttaagttctaggaagctattatataaaaggagttgtttaaactggaaccagaaattgaacctatacttgaagaataatgtccaacctcctctaatttgcctgagaccctttatgaactggttacaccttacatttctaactctctcttttcttctcttagggagggacagtcttggctcaggcagtaaaattggtatgtggcggagaattaaagcagctgtgccaaagccttacacatgctaaaatcataaaatgtatggatcctagaaagaagccagataataaccaaagagcgaagtcttcatgggtagtcaaaaccaagtatccagaagcacataagtgaatcaaatttaggcagaaaacatgcatgttcatagatggtggagggatgtgggaggaagggcagattgcttacaaaaggacaggaatgaagcacagatcaactttactgctaccctacttctctgactcaatcccaccattcacctgtcatgcacatttcttcaactatgcataaaatgcttccatktgctcattctaaactccaattctagaataacttctagtctctgttcatgtaaaccatttttcaagacacacccaacccctttgccataaagccttctccaggaagaa

SEQ ID NO: 655216 - DNA, 641 bp, Homo sapiens
atctgttaagttctaggaagctattatataaaaggagttgtttaaactggaaccagaaattgaacctatacttgaagaataatgtccaacctcctctaatttgcctgagaccctttatgaactggttacaccttacatttctaactctctcttttcttctcttagggagggacagtcttggctcaggcagtaaaattggtatgtggcggagaattaaagcagctgtgccaaagccttacacatgctaaaatcataaaatgtatggatcctagaaagaagccagataataaccaaagagcgaagtcttcatgggtagtcaaaaccaagtatccagaagcacataagtgaatcaaatttaggcagaaaacatgcatgttcatagatggtggagggatgtgggaggaagggcagattgcttacaaaaggacaggaatgaagcacagatcaactttactgctaccctacttctctgactcaatcccaccattcacctgtcatgcacatttcttcaactatgcataaaatgcttccatgtgctcattctaaactccaattctagaataacttstagtctctgttcatgtaaaccatttttcaagacacacccaacccctttgccataaagccttctccaggaagaa

SEQ ID NO: 655217 - DNA, 573 bp, Homo sapiens
aacaaaccagtaatagagggaactttttcaacctgataaaggacgtctacaaaatatccacagctaatatcagacttaccgctttccttctgaggctgaggaacaagtcaaagctgttcactctccttacctttatttgataatgtcctggattctccaattaatgcgataagcctaggaaaagaatagaaataatagaaatcagtattgtctctattcgcagaagatatgacggtctttgtagaatatcctaagaactytccaaaacaaataataaaattagtaaggaaatttttaaaaggcacaagaaccaagagcattacacaaaatccattacatttctctatactaaaaacttaaattgccaaattaaatattgcttacaaaagctcccaaataataggttcctaagaataaacttaattttaaaagtataagacttgagtactgaaaatgacaagacatttttgagagaaatttgtaaaatgtgtcccattttttgtggattggcagatcaagtattgtcaaaatgtcaaaatgtcagttttgacaattgagttatagagtcagtgc

SEQ ID NO: 655218 - DNA, 537 bp, Homo sapiens
gtacatgataagatatttccgtcactaccagttgccttccagagtaactcatcttagcacaaatactcctttcaaagctttgtaatatggaactggtgcttcaaacctggtacccccatgaatattgatcttagagtatgtagtcaaaaaatcaagagaataaagccctagtgcagccttgtccagtggaaatttttgtgataatggaaattgtgtctaatctgtgctgtcctatakagtagttactggtgatatgtggctattaagaaattgaaatataactagtgtgattgaggaactaaattttttatttaatttcattttaattaatttaaatttaaatagccccacgtggctgatggttacatattgaacaacaaagctccagtcaacaagcaacacgaggacatgtctctactgctcactgttgcactcccatgtggtgccatttctggagtatagcagcacctaatgtttgttgttactgtatactgttgtatacaaatatcttttattcacatctaggttagatgtggg

SEQ ID NO: 655219 - DNA, 537 bp, Homo sapiens
gtacatgataagatatttccgtcactaccagttgccttccagagtaactcatcttagcacaaatactcctttcaaagctttgtaatatggaactggtgcttcaaacctggtacccccatgaatattgatcttagagtatgtagtcaaaaaatcaagagaataaagccctagtgcagccttgtccagtggaaatttttgtgataatggaaattgtgtctaatctgtgctgtcctatagagtagttactggtsatatgtggctattaagaaattgaaatataactagtgtgattgaggaactaaattttttatttaatttcattttaattaatttaaatttaaatagccccacgtggctgatggttacatattgaacaacaaagctccagtcaacaagcaacacgaggacatgtctctactgctcactgttgcactcccatgtggtgccatttctggagtatagcagcacctaatgtttgttgttactgtatactgttgtatacaaatatcttttattcacatctaggttagatgtggg

SEQ ID NO: 655220 - DNA, 625 bp, Homo sapiens
gtgaaatttacttccaggcatttacagattaagattttagctggtactataaagcaggcattgatctaactactatataaacagcattgcatttaattctcacaatakgttttaaaatggggattattcttatttatattttacaataaaaaataagcacagtaagggttagtaacttcctaagttcacagtttttaagtgatcaagccagattttacttagtcaatttggcttcacagctcatgctctaatataacgtaatgtctataagaaaacccttattttgggaaatttgtcgaaatttttcactattatacacaaataaattttgagcttcttatagtcaaatttatgggcatattttcctacatatctccttagaatgaatttctataaagagactaattagtcaaagagcatgcccattttaaaaactttgatgccaattgccaaattgccctcagtataggttttaccaattttctctccatttacactataagaaagagtctctttatttttgccctctcactttagattgttttctatcccacttgcacctccactgtatctaaaaatttaggccaacacaacatatattggaaataaaaattgtattagaatt

SEQ ID NO: 655221 - DNA, 598 bp, Homo sapiens
gtcactacagtagtcttctattaatctctaataaaacagtagtgcaacgtactttgtaaatcaagtggtttagtatgtaaactacaactttgtcataggacataattcaaagattacaggaattttcaaatggtgaagttgagttgttaaattttttatttaaaatattgttttttctctgtcacatgttgctatgaataaaataagtgctataaatataaacaacataatttcttgtgatacatattaaaggctatctttatgtcaaatgtgagcaacatttcttttgagctacacagaaaaattaaaaattaattaaaatctttctggcatgggagggaatcccacttaactcattacataaaacttacctatcattcctaaaatagagcaccatggcacatacattaaacatgactctttgagagtgatgactatgccttcagaccaataatcagtagagcawcttgagtttggttagctattcaaacttctcttctgcctcttctgcatttcccccttttcattgctaacatttattaccttaggttgggtgaaatgcatgcttttggtgtgctataaaaattccacccttttg

SEQ ID NO: 655222 - DNA, 625 bp, Homo sapiens
gtgaaatttacttccaggcatttacagattaagattttagctggtactataaagcaggcattgatctaactactatataaacagcattgcatttaattctcacaatatgttttaaaatggggattattcttatttatattttacaataaaaaataagcacagtaagggttagtaacttcctaagttcacagtttttaagtgatcaagccagattttacttagtcaatttggcttcacagctcatgctctaatataacgtaatgtctataagaaaacccttattttgggaaatttgtcgaaatttttcactattatacacaaataaattttgagcttcttatagtcaaatttmtgggcatattttcctacatatctccttagaatgaatttctataaagagactaattagtcaaagagcatgcccattttaaaaactttgatgccaattgccaaattgccctcagtataggttttaccaattttctctccatttacactataagaaagagtctctttatttttgccctctcactttagattgttttctatcccacttgcacctccactgtatctaaaaatttaggccaacacaacatatattggaaataaaaattgtattagaatt

SEQ ID NO: 655223 - DNA, 414 bp, Homo sapiens
cacttatcgtcaagggcatggtgctagaccattcatgagggactcgcccccatgatccaaacacctctcactgggccccaccgctaacactgaggattacatttcaatatgagatttggaggagacaaacatctaaaccatatcagccacttggctcatgagcccattggacaatgacaggaatggctgggggaaagccactcattgacatccacagaactggtcatcctattattaaaatcctcctctgcctaggtcaccatttkgtgagtgtccataagggacacacatatcttcacaattttccatgtcttaccttagaagccccatcaccctctctttcacatctcctccagtacttatcccccagatgataggaccatgtccagcaatacctcttctctctggtattga

SEQ ID NO: 655224 - DNA, 597 bp, Homo sapiens
tcttattctgcttcttgcttttgagcttgtttattataaggttgtattgttttcaagttcttcattatgatgaagttgttgagaattttctttagtttttattgggttatgtatccttccagaatgggttctttgccacttgtatgccctattcatttcttcattttgtgttctttcttgctttttattccctgtatgtgtgtatttctttttgtcaggctgtaatacatatgcatacawgtttcttcttgatatgggagaacttctatgtggtgctgatgggaaatatttttaatactccactctccttacccaagtttgtttttctcctgagccctagtttgaaagctgtatattgttggagtggagggaaagagaagggaaaagtggtgattcagagagccaaatggggcaatgtggcttttaggctctgctctcttgaagtaccaagtatttcactcttgggtctgcccaactgcttatgaataaaattcctttgccttgtatggggacatcattcgacctcagacctctcatttctctttgttctgagccctagaatgtgacctgaccttctccttcccaaagcatggagat

SEQ ID NO: 655225 - DNA, 597 bp, Homo sapiens
tttctctttccctttttcacctttttaaaaaccagtcgaaattttcttactttttcaaaagtaataatcattaagaaatttaagaattattaagctgggccccatcattgagctctaatatatgtggcgggtaactggttgaattccttagcataattaaactcattcttttgttatcagcatatattcagagattgcaaaatgaattggtagtttggaaacttaggcatatgttatgtaaaacatttatgagytggatttggatttggatttggtgagagatgttaggaatgataccttaagatgtctcattctttaggcaataatttaaatcttaagaaaagtcttgattttgattatgtgaaaataaactagaaataacctgtcttatgtacttatcacatttgactatgttatgaaatttgacttatattttggattgtaagctttttcagtgccaaggaaatcttattttcttatttatttaatttaaaatttttatttgttttatatcttctctagtgccttaaaatagtgctagccactcaggaaatgcattgacttattactggaatttaattaaatggcagcactggc

SEQ ID NO: 655226 - DNA, 622 bp, Homo sapiens
tagtattaagtgaagttattctatttctttgaaaattttggtaaatattacagtattttagtaggtaaactcttcttctttttaccatattggatatctgaattttatgcttttcttcacaaagaaaattatgagtttaaaatcatccttttgattgtaaactttttgagacttatctttgtagcrcaagagtagcaagtaacagaacttagtaaatactttgcaaatgggtaatgtgaaatctgaacttgcatagtaatgaatacaattcattcacattgaaaaattagcggattaggagtaaactgaatcactcctatagagcactatataatccttaactgatatattgatctacatgaggtgtttttatttatttttaatttgttaacatttctcttttgatgtattaatctgcatgcgtgtatattatttaaaatttcttaacatttctttttgtttgctattttaggcaagttgctttggcagatatcattctcattaataaaacagacttggttccagaagaagatgtaaagaaattaagaacgacaattaggtacaaaatgataagtgtgttaagtgcctacagatccatattgtatacacagaatatttttta

SEQ ID NO: 655227 - DNA, 532 bp, Homo sapiens
gaattctcaacttcactgtgtcagaacatatgaagtaaacaaatattcatctctacatttgccagtccctgtggacttagrccagatagtataaataatagtcacaaaaggagtatgaatgggataagaagccacttctagtctgagacaattaagagtagtagtgccttctctgcactctcaccgcctcattctgacagctgaagtgaaggactcccaacttctggaactgcccaatgaaagtagccttgtgtgagtgttagctggcctgctttggtctgggatgcaagtagaaataaactcctctcatattaagccactaagactttagggatatgttgctgtagcatagcctaatgtagcctgattactgaacgagccaccccatcaactgaatctatgtatatactaaaaacattttaagatacgcaaggtctcaaagagttcactcgatgcacactttttctcaggaagctactagaggatgtgctccacaaaaaataaaggtataaattgtgaaagaggaaaacat

SEQ ID NO: 655228 - DNA, 532 bp, Homo sapiens
gaattctcaacttcactgtgtcagaacatatgaagtaaacaaatattcatctctacatttgccagtccctgtggacttagaccagatagtataaataatagtcacaaaaggagtatgaatgggataagaagccacttctagtctgagacaattaagagtagtagtgccttctctgcactctcaccgcctcattctgacagctgaagtgaaggactcccaacttctggaactgcccaatgaaagtagccttgtgtgagtgttagctggcctgctttggtctgggatgcaagtagaaataaactcctctcatattaagccactaagactttagggatatgttgctgtagcatagcctaatgtagcctgattactgaacgagccaccccatcaactgaatctatgtatatactaaaaacattttaagataygcaaggtctcaaagagttcactcgatgcacactttttctcaggaagctactagaggatgtgctccacaaaaaataaaggtataaattgtgaaagaggaaaacat

SEQ ID NO: 655229 - DNA, 608 bp, Homo sapiens
aagttgagtaggaatgaaaaaagaatcagaggatactataaagctcatctgtggatattgtttacatagtcatgataatgaaaaagaaataatctaaccaaaattaaacgttggaagtgtgggragatagaaatggtagtgtattcgctatttatgtgttggggaaggatacctgtaactttaacattagtgagctttactttcctaaggctaaataacaaactcaagtgtcagaaaggctagagaaggagcttacaagaatgaagctattgtggtgtgattcaatagggaataggtggggccttggcaacatcaatttgtagtatccctgccaattgatactacaacatcaatttgtagtatccctgccaaaatttaactatggaaaatagttaaattttaatatgcacacatctgtggttgtggttatacagatatatatatatatatatatatatatatataataaaaatttatatataaataaatacataaacaaactcaagtgtccaacagggctagataaggagcttacaaaaatgaagcagttgtgatgtgattcaatagggaataggtggggccttggcaaaccaaagaacatattctat

SEQ ID NO: 655230 - DNA, 667 bp, Homo sapiens
gcttgagaaaactcagagaagtgccaggcccaagcccaaggccaaggcaagaaccacaacctctgctccaggtgcatggcaggaataacagcagtgtcgttcttagcaacgaccrctttcctaataaatgtgcttcctgcagacagagggatgctggcacccaagcctgacgagacccacaaaggatgttccctgaagcagaacccccacggaggggtggctaagtcaatctcacactgcagaaagttctacgcagcagatagaaacagtgaggtggaattctacagctgaactagaaaaatgtgtccaaatatcttactgaacgaaagaagcaagttgcagaacgatacatgactttaaaaaagaaatttaaacagaatcatattattctatggatatatacatgtgcatgaaagtgcaaggcagcactgagaaaaatgccctccaaatgcctcccacgcattggctagactctgctgccaggggcccaccccaactctgccccagccctagcccagccccgctcttcatacacaggaagatcatgacccaccgactctcacatcctgctgccaggagagtacacagccacagtctttgcagagagtgagtaggcaacatggatcaaaagttaaaaatccataaacgtccattttaaattcataga

SEQ ID NO: 655231 - DNA, 576 bp, Homo sapiens
tcatacatgtaaagtgcaaatatagtgcctggcacataagtactcagttaatgtcatttatttcattagtttttattactgtaaattatctttgtgtgcaggcaacaccagaatatgcaatcattaggggctctgtgttcagacataggggaaattacttccagctcaagccattcaggaaggcttcccagaagtagtaggatttgagttagtcttgaaggatggagagaattcaactaggcagagagaaacrtggacattgatccttgtgggatctcaatttaaaaaggtggaggagggggaatatccccttggaagagacctcacgaaggcaggggattcatgaagggggctagtaggtggcaagccaggcaaaggctcctgcctcctcttccctaaaggctcacaccatcagcaatgacatcctgcctcttcatgggccctcccaaaccatccccagaaagaaaattgggtgctattttctgaaaaacctctgagcatccttctgcatcctttaagtaccttttagtcattaggaaaattacttcatggtgtggtaattatagggagctacag

SEQ ID NO: 655232 - DNA, 611 bp, Homo sapiens
cttgctataatacagctttgtccacctacctcctttctgctgttatgatcaagtatattatatttctacatgttataggtctgcaatataattacacacatattgctttataccatatttttttaagtaagttaagagaaaggagaagaaatatgcatttatgctatctttcataattacataatcacctctcttagtgcttggtttctttatgtagatttaaattactgtggtcacttgctttcagcctgaagaacttcctttgctatttcttgtaaggccatttctgtattgtagcagctttagatagtgattttyctccgtttcctgtgcttgttcatgttacttgcttatttatttagtaacttgggtagggtattttattaagtccatttcccatgcagtgtgaagcctctgatgtcattcttatgagggttcagtcttgggcatgggcatagtcaccctgggatgaccggttttggcaggctctctttgtctctatttcttatctgtctcctaaactgtatgtctctgtagcaccacatccagctgttaagtttcattaattgctggctgatgactccattttttaaaaataatgtgctggtgca

SEQ ID NO: 655233 - DNA, 611 bp, Homo sapiens
cttgctataatacagctttgtccacctacctcctttctgctgttatgatcaagtatattatatttctacatgttataggtctgcaatataattacacacatattgctttataccatatttttttaagtaagttaagagaaaggagaagaaatatgcatttatgctatctttcataattacataatcacctctcttagtgcttggtttctttatgtagatttaaattactgtggtcacttgctttcagcctgaagaacttcctttgctatttcttgtaaggccatttctgtattgtagcagctttagatagtgattttcctccktttcctgtgcttgttcatgttacttgcttatttatttagtaacttgggtagggtattttattaagtccatttcccatgcagtgtgaagcctctgatgtcattcttatgagggttcagtcttgggcatgggcatagtcaccctgggatgaccggttttggcaggctctctttgtctctatttcttatctgtctcctaaactgtatgtctctgtagcaccacatccagctgttaagtttcattaattgctggctgatgactccattttttaaaaataatgtgctggtgca

SEQ ID NO: 655234 - DNA, 526 bp, Homo sapiens
attagatcaagtagatcaactattttagctgttatttttctaattttaaaataatcttttttgaggcatttatgttctttataatttttctctaaacagtaagttaattctcttgttgatggaaattttaatggtttctgatttttctctaaaactggttatgaatcacgtcatgtttcaaaacatttgacttgtcttcagcaaaatgatagccgtttatagcaaactggaagttgtacagcaaatgctttggtttctaaaaccaggctttttgagttstagattctcagaactcagttttacatttcaaaagctctgtctgatagtccagggttttcataaagtatcacagagtcattccagagcagtagtaaggcaagtacatgctgtattatgaaaaatgaaaattcctttctgtcactactgtccagggatgagaggagagtgggaaaaaggtgggagagagaaagaaaatagtgagaaaatgaaagagagggaaagaaccagagtgtttgattttgcaaat

SEQ ID NO: 655235 - DNA, 586 bp, Homo sapiens
tctttctctacttaaataattagaaattaaaagtacctcttctgcattctacagtttatgtaatattaaaagaaggaattttggcaaagtaactgaggttatcagttcagttcagtttataaatttagtgacatcaacttgtcccagcaaaataatcagtagatactccataatcaccactgtttctgttttcaagcrgagagaaaaaaaataaattaattgtattatatgttacaatcttgggtaaattcttttctaaattgttgggtatagcacagcaaatcaaaggttgataacataaaatagtggactaaacttcagctctaaaaagttaacaaatcttgaagtctgcttgctcagttgtaaaatggggataatattctcacctttgagtatctcacacagttgctgtaggatttatttgagaaaaaatatgcataaagatgctttggacattataaaactgcttcctaatacagagtaaaattataaaatttgatttgaatgataccaactagttggggataaaatcttttacataagaactccctgaaaaaggcaatcatgtgtcatgtcatgtttgtca

SEQ ID NO: 655236 - DNA, 588 bp, Homo sapiens
atacctcattctccatgatatgattattacacagtgcatgcctgtatcaaacacctcatgtaccccataaatataaacatctactatgtacccataaaatgtaaaattttttaaattttaaaagagaaaaaaaagaaagaactcaaaacagcatacagaataatagttacgtgaattgacactgactttttatcagatactgcaaaaaccagaagataaccagacagcatctttaaggtgatgaaaggaaaaacaacaaacaactatgagtctggaatatcatattatacaaaaatatccttcaaaaatgaaggcagaagcaaaactatattaagatactaaaactaaaaggttatgtcaccagcagacccatactaaattagtagcaagagatgatcttcaggytaaagggaaatgataccagagataatgcaagaacttcagacatgaataaaaagcattatgcatggtaaacttctgtgtaaatataaaaggctatttttcatttaacttcttaaaaatatatgatcgtttaaaggaaaatttataatgctgccaagtggagattgtgatatatgttgtttaata

SEQ ID NO: 655237 - DNA, 588 bp, Homo sapiens
atacctcattctccatgatatgattattacacagtgcatgcctgtatcaaacacctcatgtaccccataaatataaacatctactatgtacccataaaatgtaaaattttttaaattttaaaagagaaaaaaaagaaagaactcaaaacagcatacagaataatagttacgtgaattgacactgactttttatcagatactgcaaaaaccagaagataaccagacagcatctttaaggtgatgaaaggaaaaacaacaaacaactatgagtctggaatatcatattatacaaaaatatccttcaaaaatgaaggcagaagcaaaactatattaagatactaaaactaaaaggttatgtcaccagcagacccatactaaattagtagcaagagatgatcttcaggttaaagggaaatgataccagagataatgcaagaacttcagacatgaataaaaagcattatgcatggtaaacttctgtgtaaatataaaaggctatttttcwtttaacttcttaaaaatatatgatcgtttaaaggaaaatttataatgctgccaagtggagattgtgatatatgttgtttaata

SEQ ID NO: 655238 - DNA, 584 bp, Homo sapiens
catcccagatgaccataggaaggagaaatgtggtcttttatttggagggagtggtggaaagagttttacaggagtggaggagactgagcatcttctgcctagagaggggatgtatctgagtagcagacactggcctgggaaatgaaagtgtgctgccatgtctgtgtgcaatgagaagaaccactatgcaaagcatctcagtgccttatggagtagctgtgccttggatcaacgtttgtagtcaaaggactcagcatacagggggaaactacatccactgccatraaataaggacctgttctctactttattcctaaaagttactccaccctcaaggaatagagaggcagtactagaagggggaagctcacatattctataaatatttccatagacactgctcataaacccacaaaacaagcccattcactcatacacacaaattcacaatcatacgaactcagtaatatacacagcgcttctatcattcactcatttttttagtgaccgcaaatgtatgcatatatgggtgtgtgtgcatgtatgtatgtgcaagtacatgtatgcatctatgtgtgtgcatt

SEQ ID NO: 655239 - DNA, 577 bp, Homo sapiens
ctgagcagttagtggagctgagacttgaatgatgagaaataggtcataagcatgtgaaaaatatctggaaagaacacagttgttgtttaactcactggttgctattatacatagacgggtacaagataatcaaggagataagcaaggagatgaattggcagttattgtcaccttaaggcaacgttaataggtaagcattattactatctcagctttagagatgagtaaacagaggcatcaaagggttaaataatatgatgcaaatcacatagctagggtagctaggaagtgacagccccagaatttgaactcgagcagcrtaactctgcagccaagttccaaaccactaagttaatcagccaatccaagccctttaggtagacagattctccctagtgagaatgataggtttaggattagtcaattagggtatcacataaatttggagaagaggcacaggagtcaaaggagcccaccagaggcctgcatggctccctggggtcatcaggaggcttctccaaaaaggctctcttgtgagtagatgtttgttaagtggagaaggagtacggaatacaca

SEQ ID NO: 655240 - DNA, 613 bp, Homo sapiens
ccaagccagcaaaggatttgagaaagctaaaatgctcttcttccagttataagtatattttattgtcttatgaattgtgtagctgcattattttatccttaacttatatgtttattttttgaaattatattcatcacttcaaatagtatgtataataacaaacgtgtcatawtgagagaggagacagaggatggctaggaagatagaaggggagggtcttgggagagaaaaaacacctgtgggagcacacttgtactgaccctgtagctagcgagaagaaatgtggttaagatcttcctcttatgccaggatgtttgctcagaaagtactatcccaacttaggtgtaggcacaataaatcaactaaatgtccttaccttgacccagagctagctgtaatatcattagcattgcagttttagtcccccataagttttacttaggcactcatggataataaccaagatggagtagctatggccaaccctaggcatgcacagatacgacacctccagggggcaaatttacctgtcttatttgggtggaacccacagaagacttccttgcctcggccacataaaagacccagaacttagccccgtttttggcaacca

SEQ ID NO: 655241 - DNA, 598 bp, Homo sapiens
gctctgaggcggatgcgacccccacccccccgtcacgtcccgctaccctcccccrgctggcctttgccgggcgaccccaggggaaccgcgttgatgctgccttcggatcctccggcgaagacttccaccggatgccccgggtgggccggttgggatcagactggaccaccccggaccgtgctgttcttgggggtgggttgacgtacagggtggactggcagccccagcattgtaaagggtgcgtgggtatggaaatgtcacctaggatgccctccttcccttcggtctgccttcagctgcctcaggcgtgaagacaacttcccatcggaacctcttctcttccctttctccagcacacagatgagacgcacgagagggagaaacagctcaatagataccgctgaccttcatttgtggaatcctcagtcatcgacacacaagacaggtgactaggcagggacacagatcaaacactatttccgggtcctcgtggtgggattggtctctctctctctctctctctcgcacgcgcacgcgcgcacacacacacacaatttccatatctagttcacagagcacactcacttccccttttcac

SEQ ID NO: 655242 - DNA, 564 bp, Homo sapiens
tatctagcctcatctcccaagccccaggattctccatgcctctgcttatctcttcctcaggctgtctgtaccaaattggtccctttctaatctctgccaaactcacacctgtaagactcttcaccaagggtggcttctcactgacacattcttgtgcagagatgcctccctgttrtcattctcatcatggattaaagatcacctcagtgaggactttgggtccccccattcaatgactttgcagctcttcttctcaacattctactttatataatagtccttgctcttttcttttatatatacttgctttagtgcttttgtcgagctgacttcagactgttctgtccttggaggggtatgcaggcatgatgtaatcattttctgtgccacatgttggacccaccagggtagctggcaaagggtgagtgcaagggaaaaaagattggctaagtgggcaatgtggaaattgttgataataacatgaggtgtgtgactcttacttgctccagctgctccagcaaagctcaataggcaccagaaacacagcaggctgtaaccacctcc

SEQ ID NO: 655243 - DNA, 564 bp, Homo sapiens
tatctagcctcatctcccaagccccaggattctccatgcctctgcttatctcttcctcaggctgtctgtaccaaattggtccctttctaatctctgccaaactcacacctgtaagactcttcaccaagggtggcttctcactgacacattcttgtgcagagatgcctccctgttatcattctcatcatggattaaagatcacctcagtgaggactttgggtccccccatkcaatgactttgcagctcttcttctcaacattctactttatataatagtccttgctcttttcttttatatatacttgctttagtgcttttgtcgagctgacttcagactgttctgtccttggaggggtatgcaggcatgatgtaatcattttctgtgccacatgttggacccaccagggtagctggcaaagggtgagtgcaagggaaaaaagattggctaagtgggcaatgtggaaattgttgataataacatgaggtgtgtgactcttacttgctccagctgctccagcaaagctcaataggcaccagaaacacagcaggctgtaaccacctcc

SEQ ID NO: 655244 - DNA, 555 bp, Homo sapiens
taattgaatcatgggggtggtttcccccatactgttcttgtggtagtaaataagtctcacaaaatctgatggttttataagcatctggcatttcccctgctggcactcattctctctcctgctgccctgtgaagaggtgccatacaccatgattgtaagtttcccgaggcctcccaagccatgtggaactgttagtccattaaacctttttccttcataaattatccagtcttaggtatttcttcacagtagcatgagaatggactaatgtaattctcaattctacttctattttttttttttttgagaaccctgaaaaaatatatatttaggtaatttttctctctcrgtgttccaagcacatagtttagccaataaaataacagctggattaatacattgtttgtatcgtctaaatgtatggatataaaaattatcattagagttatttgaattgtggggccaagcattgaatttataaacaaatttcttagaactcagaaaatatttgaggaagaagttctgaggacaggatggcaatttactcacaatgta

SEQ ID NO: 655245 - DNA, 531 bp, Homo sapiens
ccagtcgcaccctacaactagatttgacaagcaaataagtctttaaacaaaattgcctccacttgagaatcattatatggatgaaataaaacctactattctaatgtgattgatttcaaatacagtatttttctttaaagaaaatatattattgcttgagaatgagtataacaaaaagtaacagaagcatrtatttatatcatttttacatatgtaaaaataaaatataaaacaatataaagggaaaatctgtgactcatgtttaataagtatgtatagaaaaatttaccagtttgtaacttttattacaggcagtgtcggtaaggaccaacttttagacaattttgttttatgtggataactttttttgcaggttgagatatacgactttgtcagattgtcagtgactgagaatctcattgaaatttacatatcttatgggtaaataaagatgtggaaaacaaaaataagtatgttgtgcttatttatagttactgatttgggcataatcttacaaattttcagttgttt

SEQ ID NO: 655246 - DNA, 515 bp, Homo sapiens
tctctgttactaacaaaactaatctaatttggtcattcactattgttggattcttttggcagrtatcaatagttttgaagagtaaaaggtaggtgagggcatggctccctttcctcacaactgagatggtgaattagcaaacctactattaaactttgtcacaaataaaagcaggtattgacaattttacacaggaaataattatgtcactttttcctatagccttgataaaactacagatttctaagaaataattttcagggtctacattatttgtaacaatattataggtaggtgtcaatactatattttaggactcagataatcttctatttgggtgatgaaatagaaattcttgttcacaggaaaatatggacttgatcagagttctagtcttatggcacaactaaaaaggataaaaatagttcagtgtttatattctgacattatcaatttttcaaattttacagttgtagttacatttatctgtctcagagagtagagaggtcaattaa

SEQ ID NO: 655247 - DNA, 522 bp, Homo sapiens
ttcactaaacaatatgttttgctgatacttacattcatatgtacagtaatagttgatttattttaatggctatatattattccattgttagaatacaccaggatttatttttacttattttttttgctggaaaattgggtgtcttttttattttttgatataacaaacaatgttgtaatcattttgtrtttacttcctagtccactcctgtaagtttctcttgagtacatactagcaatgaatatgctgagtcactgcatatacatactcacaactttattctataatgtaatattctataaagtagctgtatcagtttatactttaaccagtaatggacaagattttctgttacttcccatctttgttaattattacttttagactctaacttttatcaggctcatggatgtaaaaagcatctcagggtggttttaatttgcatttatctgctcatctatgaagatgagtttcttttcatataattatgagtcattatttttgttttgccttcttttgttt

SEQ ID NO: 655248 - DNA, 588 bp, Homo sapiens
ctgagtcactgcatatacatactcacaactttattctataatgtaatattctataaagtagctgtatcagtttatactttaaccagtaatggacaagattttctgttacttcccatctttgttaattattacttttagactctaacttttatcaggctcatggatgtaaaaagcatctcagggtggttttaatttgcatttatctgctcatctatgaagatgagtttcttttcatataattatgagtcattatttttgttttgccttcttttgtttatgcattttgcttgttctatgtcttatttttcctgttgatttttgggaattcatatatattctaaatgtatatttattcactcatatatatgttgyaaatattacagtttatgatttgtcaccttatgatatcatccaaatagagaagctttatattttgatgtagtcatatgttcatttttcctccttaatgtttgtttttcttggttctatgacctaccaaaagtaacaaaaattctcatttatttttaatctaaatgttttaagtattttcctggaattcaccttgaattgatttctattggagatagg

SEQ ID NO: 655249 - DNA, 479 bp, Homo sapiens
ggtggttttaatttgcatttatctgctcatctatgaagatgagtttcttttcatataattatgagtcattatttttgttttgccttcttttgtttatgcattttgcttgttctatgtcttatttttcctgttgatttttgggaattcatatatattctaaatgtatatttattcactcatatatatgttgtaaatattacagtttatgatttgtcaccttatgatatcwtccaaatagagaagctttatattttgatgtagtcatatgttcatttttcctccttaatgtttgtttttcttggttctatgacctaccaaaagtaacaaaaattctcatttatttttaatctaaatgttttaagtattttcctggaattcaccttgaattgatttctattggagataggtatccaatctaatttgcctcatatggataaccacttgttctattactgctgtaacaaatttctacaaactaa

SEQ ID NO: 655250 - DNA, 513 bp, Homo sapiens
cataggtgcatcccaagaggttgaggtaaggaaaatatrtaaagacaaaaagaagtctatgcaagctgttttgaaacaaacatcattggtcacagggtctgatgcaggagctggtgttaacttactggcagaaacagccattgctaggcaagtgttcttgtgagggtggcttatctgaaatgctgcagtcttgaggaattttttatgatagatcctattatagagacacctacaggatgagctggacaaacagagtgtgctgggtgggcagaaatttcttgtgagtttatagaaagtccttgtgatagtgcttatcgtggacacacacacaagatcccctttttcatgacccggctccactttgctttgggtctgatgtaagtgactttgccttgtcattggcaactttcactgtagtataatctgcacattaaagttatctaacaatagtacaaagaaaaaaattaaaggtatatctctttcaaaaatataaaccccaaaattgttaggaaa

SEQ ID NO: 655251 - DNA, 553 bp, Homo sapiens
agaaacaagtacctgggaccagcttatactataggaaagagattatataagggtataaataccaagaggtagagatcatcaagagccattctggtagcagccacaatatcttatccagaatatttcttattcaggccttcaaatgtgctgtcttttctggtctaatggaaatgaaccttccttccatacaatttcttctcctaaaytgtactctggctctcttatcacatacaaacgtctatgttaggtatttgtgtctgtcttgattcttggtaggcttttaaactctgtgaatgttggactgtgatgtagacatcatttcaccgcacactctgtaaccaccaaaccttagcagcttattcagtaagcacatacttggctcttaatgagtattgcttaaattgatgaattgaattagtactttaccttctctgttgcttagctaagcagaagaatttgtcatttttttaatgtagtgactggttctattaaaagttacctttgtctatatcattttgttatactaaagcacaaatgtataaggtcaaaaaac

SEQ ID NO: 655252 - DNA, 521 bp, Homo sapiens
atgttaggtatttgtgtctgtcttgattcttggtaggcttttaaactctgtgaatgttggactgtgatgtagacatcatttcaccgcacactctgtaaccaccaaaccttagcagcttattcagtaagcacatacttggctcttaatgagtattgcttaaattgatgaattgaattagtactttaccttctctgttgcttagctaagcagaagaatttgtcatttttttaatgtagtgactggttctattaaaagttacctttgtctatatcattttgttatactaaagcacaaatgtataaggtcaaaaaacattctcaagattttgtttaaaccacagccctcagctgtgtatatttatctcttgttttcatatgcaagatttctcctgaaatgggcaacaattwcaagagtttttttcctcttctgaactaagaaaataaatatttaattcacaagtttagaaaagtgaacctgaaaaatcacagggctaggtgggttatgaggcccactggtacatg

SEQ ID NO: 655253 - DNA, 619 bp, Homo sapiens
tcatatgcaagatttctcctgaaatgggcaacaattacaagagtttttttcctcttctgaactaagaaaataaatatttaattcacaagtttagaaaagtgaacctgaaaaatcacagggctaggtgggttatgaggcccactggtacatgatagtgttgaatgtggattagaatgaactccgtggattagaatctcagaccataggcaaacatttacttgttttagaataagcacatttgagtctgcaataagtattactrtttttaagttgaaaatgtaattggtttctaataataaccatattggctagcattatttctcatgtttaatgttttccaatgtcatttcatgtcagatatctctcttgattcttagtaacaatttggacaagacagcaaatgctattgtccaagttttctaaagaagaatctgaaatgaaatgacatcaagagacctatcaagacctgtatccagaaaaaggtaaatctgagctgaaactgtagcccttgtaaattacctatgtgacataccagatagtgttcatgatccattcagtactctgttctaaaaatgagacaatatccatttattcacttgttcatttatttagtgtttgt

SEQ ID NO: 655254 - DNA, 594 bp, Homo sapiens
gggctaggtgggttatgaggcccactggtacatgatagtgttgaatgtggattagaatgaactccgtggattagaatctcagaccataggcaaacatttacttgttttagaataagcacatttgagtctgcaataagtattactatttttaagttgaaaatgtaattggtttctaataataaccatattggctagcattatttctcatgtttaatgttttccaatgtcatttcatgtcagatatctctcttgattcttagtaacaatttggacaagacagcaaatgctattgtccaagttttctaaagaagaatctgaartgaaatgacatcaagagacctatcaagacctgtatccagaaaaaggtaaatctgagctgaaactgtagcccttgtaaattacctatgtgacataccagatagtgttcatgatccattcagtactctgttctaaaaatgagacaatatccatttattcacttgttcatttatttagtgtttgttcagcccttactgcatattccaggcactattctgactgtggcaggagtgaacaaacaggcatggttcttacttgcatgtaattacagtctta

SEQ ID NO: 655255 - DNA, 561 bp, Homo sapiens
tctcatcatttagctcccacttataactgagagtatgctgtatttggttttctgttcctgcattagtttgctaaggataatagaaggtccatccatattccagcaaaagacatgatatcattttttaatggcggcatagtattccatggtgtatatgtacagcctgcatataaactgtgggctaaagaccttcacccagagcagtctgacagaacctctctgaaagacttctcctaggctgtaatcctcagtctcttgttctcagacccctaaataaatctaactttaatttcttaaaagcttaatttttttctttagttgacaccaaaaatctccccagccagatccacaaactttttcggtatttttcctatwttttatatcattccaggcaagcgttttctaactctcccatcagaatatgactttggtgcgttttcctcagtctccactgatgattttttctcattatccttaaagccctttccagtagacttcttaagctctttcaagttttcagtctccttaaggaccattcagtgtttactgtcagttcccaga

SEQ ID NO: 655256 - DNA, 562 bp, Homo sapiens
attagtggattggatgaaatgttgtggtaaggtgggcctctcttgctctccgtgtagtttgagagcctgtctacatgatctattcagcagcaatatggtttggctgtgtccccacccaaatctcatcttgaattgtagctcccataatttccgtgtcttgtgggagggatccaacgggagataactgaatcacaggagtatttcccccatactgttctcgtggtcttgaataagtctcacaagagctgatgattttataagggggttcccctttcactyagctctcattctgtcttgtctgccatcatgtagagatgtgccttttgccttccaccatgattgtgaggcctccccatccacctggaaatgtgagtccattaagtgtctttttcttcataaatcactcagtctcaggtatgtctttatcagcagcatgaaaacagactaatacagtacattggtactggtagagtggggtgctgttgtaaagataacccaaaaatgtggaagcgactttggaactgggtaacaggcaggggttgaaacagtttggagggctcag

SEQ ID NO: 655257 - DNA, 580 bp, Homo sapiens
cacttgttaatgtttgatattaatctaattttatcataaattaaaagtataaaactacaaatttcttaaagataaaatatccaaatggattcagtcaaattaagcatgataatatcaaatatcagaataggttaccatgcaggaggtactgagtacttaaaaggatggggaatgcaatgaacataaaagctggtaccaaggggaggaggagacagtgatgaattaaaacattatcttaactaatccaagtgctggtcttcwatactttcatgtgtatagacaaagagaaactgcagagatttctcacaacctctgtggccattttatgcatcttagcaaaaactctggtgaaatccctccaaaacatatttattaggcatggaaaaagccttacatgacaggtggcataggctccttatgaaatcactgcaggatgggaagccatttagggcttcgtaattgtgaaagattgtatagaaactgaggcacttaaatagcagtgagcatgagaaaatgtggtagataatggtggtgattctatttcttgtgaaagtccacttactctgttctgctacagttg

SEQ ID NO: 655258 - DNA, 581 bp, Homo sapiens
tttaatccattttgaattgatttttgtgtatggtgtgagataaggatacacaccatacacattcatgttcttctgcatgtggatatctagttttcttaacaccatttattgaaacaaatgtctattcttcattacgttttctgggcacctttgtcaaaaatttattggtcataaatgcatgagtttatttctgggttccttattctgttcccctggtcaatgtgtctgtttttgtgcaagtgtcatgttgttttgattactatggttttgtgatacgtatttgttttggggggggatcaatttttatttgggtttctcacagtggttagagaacaaccacagcacaggaaatgcatcgccaagattgcccagaaaactgaccagctgcatcttattgcttaaaaatacacatattcacaataactgacaaatgktgatgtgcctcacacaggaatgtgttcacatttgcaatgctgtgtacagacttcacttcgttcaacatagattttggtttaatggaattcaaatgcggatgcttgttcacagccttggatttgtctgtttttggagagatacaacct

SEQ ID NO: 655259 - DNA, 391 bp, Homo sapiens
aatggaattcaaatgcggatgcttgttcacagccttggatttgtctgtttttggagagatacaacctccatgagtatatctgcatgaaaaccacagacaatgaaggtatttcttcattgatttatttattcttttgactgtagcaacaaaccctggatgacayccttccttttaattcacctggaaaccagactcaatcaaatctccctggtcccctcactattccttcaaattccctatttctatctcttcctgaggagggtaacctcctgtagcaggggtcagactgtgacttgggaatcaagcctaggtctgcaggttgccttttcatcttcttgtaaaatattgtaggacactgcagtgaatccaacagttaacactcagagcagtt

SEQ ID NO: 655260 - DNA, 682 bp, Homo sapiens
gggggtaaaactgcctactcaagccttggcaatgtggaagcccctccccccaccaagctctagtgtcctaggtcaayctcagactgctgtgcaagaatttcaagccagtggatcttagcttgctgggctctgtaggggtgggacccgccgagccagaccacttggctccctggcttcagccccctttccaggagagagaatggttctgtcttgttggcattccagttgccactgtggcatgaaaaaaaaaaaacctcctgcagctagctcggtgtctgcccaaacagctgcctagttttgtgcttgaaacctagggccttggtggcagaggcactggagggaatctcctggtctgtggattgtgaagaccatgagaaaagcatagtttctgggtggagtgcaccgttcctcatggtacagtccctcggggcttcccttggctaggggagggaattcccccaaccccttgcacttcctgggtgaggcaacgccccattctgctttggctcaccctccgtgggctgcacccactgtccaaccagtcccagtgagatgaaccaggtacctcagttggaaatgcagaaatcacctgcattctgcattgatctcactgggagctgcagactggagctgttcctatttggccatgttgccagcaaattctgagatttttttcaaaagt

SEQ ID NO: 655261 - DNA, 557 bp, Homo sapiens
gttttgtgcttgaaacctagggccttggtggcagaggcactggagggaatctcctggtctgtggattgtgaagaccatgagaaaagcatagtttctgggtggagtgcaccgttcctcatggtacagtccctcggggcttcccttggctaggggagggaattcccccaaccccttgcacttcctgggtgaggcaacgccccattctgctttggctcaccctccgtgggctgcacccactgtccaaccagtcccagtgagatgaaccaggtacctcagttggaaatgcagaaatcacctgcattctgcattgatctcactgggagctgcagactggagctgttcctatttggccatgttgccagcaaattctgagatttttttcaaaagtgcaaagaaagacatctgaggggtgctgacatattcrggtcacctcaagccacatgccagcttgcttgcccctgttggattcagcagagggagataggccttgccatacctgtggtgtctgccaaagcttcctcctggcaattcttgggagtgctgatacctgggccaca

SEQ ID NO: 655262 - DNA, 590 bp, Homo sapiens
attggctctagagtctgtgcttattattatcattattttttaaagagacaggtttttactcgggagtgcagtgccaataatagctcactacagccttgaactcctgggctcaagctatcttctggcctcagcctcctgagtatctaggactacaggtgtgcaccaccatgcccagctaatttttattattttttgtagagacaggatctctctatgttgcccaggctggccttgtattcctggcctcaagcaatattcccacctccgcctcccaaagtgctggtattacaggtgtgagccactatgcccatgctctgtgcttattactcttcaccctggtgtactatacagcctcagcaagaatgcagagcccaactccaagtgactttcaagaattccaattagatctgagctaaagcttagggtaaaagttgaaatgtgaaaaagaataaaaagaagaatttytgagccaaacatacaagtatataggcaacgatattgcagggccatagcaattaatgtgctaattgctaacaatcctcctcttaagttaacaaagatttagtgaatgtgttcttctgaaaaaaaaa

SEQ ID NO: 655263 - DNA, 486 bp, Homo sapiens
ggtcacctaatgttcctattttatgaataatgctctgagttcacaaaatgctgagtttagcagacaactgacaattctttaaccaactgattttcataccacctaacaaagatggcaaatatcccaattccatatggcagcatcctaacaactccctatggggggctgtcagtgggaacgttccacttccagcacccatttctctactagtcaaaactcctttgatgggaagtgacaaacacccatctgaaataagcttaggtaaagggatgacttattagaaggatataggagaccatatatacctgaagggggaaagcataagacctctgagggcagtgactcccagcttagtccattgctccatgcttgatgyctggaatccagcctgttcaatgttaaatgaatgagtgaccaaactgcagtaaaggcagggttgccacttagccttgataatagccaaaactagcactgaatgcctcaaga

SEQ ID NO: 655264 - DNA, 582 bp, Homo sapiens
gaattctggaagtaataagatctgcctgttgtcttaggctaagactaagatagtcttagcttgactgccactggaacaaaatagtttagactgggcaatttataaacaacagaaatttattgctcagagttctagaggaygggaactccaagatcaaggtacccgtcagtttggtgtctggtgggatcccatttcctggttcatagatggcaccttctatgtgttgtgacatggcggaaggggtgaggaagccacttcaggcctcttttataagagcactaatccctttcatgagggcagagccctcatgacctaattaagaggccctacctcttactgccatcaccataggggttaggttttaacatatggattttggggggacacaaacattcagaccatagcacctgttcattagaaaatggacaataaatgccacagtctttactgcactctcactccagagaagtacagcatattagaagtggttttggctacagataacagaatgtcaactaataaaatcttaagaaacagagaatttaagtattgaatttaggagtggggaggcagagagctccc

SEQ ID NO: 655265 - DNA, 493 bp, Homo sapiens
cctgagtcatgctgcccttgctattactatatttcactgtgttttggctgcattggatgacrgtgtcataggaagggcatagcctttggatctagctctgtctcttcagtagctgcataatcttagacaagttacccagcacttccaagcctcagtatccttttctgttaaatgtgaacactggtatcttgatggttgttgtgaggatcagggattagataaatacagtgcaaaagcattgaatcttaagagatatctactgatgtatttacaggtgaattgacatgatgtttgggatttgcttcaaagtaattggtggagatagacaattgattttccttctgttttgttttgtttttttaatttaacttcttttttaacttcagaggtacatgtacagatgtgttacacagaaacgtgtgtcatgggggtttgttgtacagattatttcatcacccaggtattaaactagttatttctcctgatcctttcc

SEQ ID NO: 655266 - DNA, 493 bp, Homo sapiens
cctgagtcatgctgcccttgctattactatatttcactgtgttttggctgcattggatgacggtgtcataggaagggcatagcctttggatctrgctctgtctcttcagtagctgcataatcttagacaagttacccagcacttccaagcctcagtatccttttctgttaaatgtgaacactggtatcttgatggttgttgtgaggatcagggattagataaatacagtgcaaaagcattgaatcttaagagatatctactgatgtatttacaggtgaattgacatgatgtttgggatttgcttcaaagtaattggtggagatagacaattgattttccttctgttttgttttgtttttttaatttaacttcttttttaacttcagaggtacatgtacagatgtgttacacagaaacgtgtgtcatgggggtttgttgtacagattatttcatcacccaggtattaaactagttatttctcctgatcctttcc

SEQ ID NO: 655267 - DNA, 568 bp, Homo sapiens
atggtcttgatttaagaccaccacacttcgcaacatgagaatgaactggcagctctgtaatgagttacctgtcctcygctttgaaggagtcagaggcttccaatatgtgtcaggttaaagatcaaaatcctcagcatggccaacaaggtcatgcatgctctgccccttgcatgctcttagtctcaaacaaggtctttcctcactttctatcaacacttggactacttttatttatcctaaaatgccacgcttttccctgcctgaaggcctctgcagagatgtttgcttggccctctgtgtcctctcttgacttccttttgccttgttaacattcacacatccttcagatcctgtcagaggctttcataaatctttggattgttctaataatatttttttcatttacagttaggtataggtgtgatcatttgacccatttgtttttcctactagtttttagtctgtattgagactgcatctattttttactcactgttatatcctcaggattttgaatactgctgagcacataatgtatattcaatcaactaaaaatgtgttgaatgaa

SEQ ID NO: 655268 - DNA, 611 bp, Homo sapiens
agggagaacacctatgaggagacaccgatcctagtggggaacatgaaccttgattgactaaatttaagtcctgatttcactaatgattgagtaaacttgaagaggcaagatcatgtgttttctagaactgattggtggctgatgagtaagttagacccatttataggaaactgcttctatttctacacacgagtcagtgtgtacatggtgcgcacaacacaaaagatacacaccaaatatggggacactgaaggaaggagacactgtattaagttgggggagcagagcrattgggccgccactggatgttttggactatgccttagtgaatttatgggattctgacacacagaaatgaggtggaggcattccatgtggcagaaaaatgtctatcaaagtctaggaaattggagtaggtaggaaatgataaggaaaaaaataatggtccaatttggctggaaactacagtcctcataaaattatatgtatgctctgccagagcctgtgctttgtccctaagtgctgggaagagttttataaacatttacggtataaaatatattctgagcagagtgatgcctggaaacttatgcccattacttaaaaacact

SEQ ID NO: 655269 - DNA, 411 bp, Homo sapiens
aatgaatcagcaaaatttcattgttatcaagagtgcccttagcttgatcttcctcmcaccttgtttgaaacagtcaattcacttgaagagagcttcagagccttctgcttttacagctccactgtattccagagagcaagactctgtttcaaaataaaaataaataaaagtatacaggagaatgggcatagtttatttgccaatattatgccattttctataagggaattgaacatcctcagattttggcatctgaaggaggtcctggaaccagtcattcatggatgccaagggacaactctgtgtggtatggtgtcgggtgtgtgtgtgtgtgtgtgtgtgtgtgtgtgtgcgtgtgtgcgtgtgtgtgtgttatttaaccagataatggctgtttctctggggagagtg

SEQ ID NO: 655270 - DNA, 633 bp, Homo sapiens
acaggtaacctaaaaagcaagtaagcctaagcaagcaattcatttagaaaaaaccatatgtgactctagacagctttaataaactcatttccatgaagcatatatgatcctctagtgaaagtcggaaatagttggaggcttaaggttatggaacaatctgtgatcctccaaagtataatcaaactttaaatttttaagaacttaagtcgttaaatgaaattattaaacactaaataaaaaactctcagttcaggtcaatgataatcaagctttgttttgaaaacgatactgccttaaattgacaagtacagcaagattaacaagtactcagaactctcattaccaatgactcatgaaagaaattgggagtgtgctatgatagggaaaatgcagcaagataatgatttggatccaagaacaacaacgagagtattttgttgtttctctcctctccttgaaccattaggcatttggatatcactgtataattttgaggggattggtgggatggaaggtggtatattaatagaaggaattgrgagtaaaagaatattggcctggaatgattcaagcttacttacctctcactaaaaaaatagtaggaagggtttaaactattaagatgacaagtgt

SEQ ID NO: 655271 - DNA, 565 bp, Homo sapiens
agctgttcctattcgtccatcttgtctccaccccccattctctttacttcagtcaaaattagacaaagttgtcatggtcaactgtcagaggctggcgcctgggtagtaaaggaatttacccaagacagtaacaagtttagaaagacagatttattagagaaaagggaacagtacgttgcaagggagcaacaggcaagatagtaaaaagaaggctctctgctgtctgcaaagaggcaggagctagagggaaattttataaggtcatgctgcttagtctgaatgcttacagacaagatgcttgggtgcatgtgagctggtgagctcagggcctgtggcaggatactyggggggtgccagtaagctgtttgcagttgaccccatttcttggaacattcactcccacctacccatttgtctgtttctgcaagctaaacctatttgtcaattttattttaactccttagtgccccacaaaagtgaaagggactaacaaactgaaatctaattctgggaatgatctgtggagaaaaaaaatcattctcatacatgatgcattgttgctggt

SEQ ID NO: 655272 - DNA, 591 bp, Homo sapiens
ttgttattccttttccagcttcttgaggtatagagttaattgtttaagatctttcttcttttatagtgtaggcttttataactataaacttccctcaatattgcttttgctgcatgccttaagtttttctgttggtttaatttttttaagaaaaaaatctattttgagatagtttctaatttctattttgatttcttttttgaccattgtaggttcaagattgtatcatttacttaccttttctttttaatttttcagtttgtcttctgttattctcagtttcatttctttgtggttggaaataatacttggtaagacttcaatcttcttaaatttactaagacttgtattgtggcctcaattgtgatctgttccaaagattattctgtgcatgtttaraaacaatgtttatcctgctgctattgtatggaatctttcatatgtgtctgttaggtcccgttggtctatagtattgttttagtcctcggtttgctttttttttttttttttttcgttaagatatcccattcattattgaagtggagtattaaaatctcctgctgtgatttttttctgtctgtttctcccttc

SEQ ID NO: 655273 - DNA, 338 bp, Homo sapiens
agaaacttctttgcgatgtttgcattcaactcacagtgttaacctttattttcatagaacagttttgaaacactgtttttgtagcatctgcaagtggtcatttggagagctttgaggcctatggtggaaaaggaaatatctccacataaaaactggacagaagcattctcagaatctcctctgtgatgtttgcattcaactcacagagttgaacataccttttcatagagcagtttkgaaacactcttttcgtagaatccacaagtggatatttggactgatttgaggcctttgttggaaacgggaataccttcacataaaatctagaaagaagaatt

SEQ ID NO: 655274 - DNA, 506 bp, Homo sapiens
ctgcactcctaggacatttatacattttttcaggctttgtggaagatgtcttgtatgaccacaaatattctgcaattgtaatttgtggccatttaaaaaatgtgaytattttcagaccatgaacattaaccttctagatgccttgtgagtacctagctactcatattaagatagaatattctagtcatgtttattaaactagaagctaggtaaccatgagttcctctaacacaacaagtctactccttcaaggagaaaatgtatttctaggaaattttgtgcattttgtttgatggcatttggtatgtttaccaaaatggcagaaaagagtgaaattagtcctcaaagatttctcaagattggatataaagtaaacaaaatgattatagttaatatgcaagttgatacagttgatattcaaaagaaattttgtttgaaacacaatgagatttttatttttacttattttttattattattattattattactattattttgagaca

SEQ ID NO: 655275 - DNA, 526 bp, Homo sapiens
ttcacacacgatttcagggagaaaccaccctggaagggtggagtgtggaactgaacctccatgatagtcttcattttccaggccctgtccgtgaagccggcaatgcctgtgggtgtcgccrttgccgtgatagtcacacacgcaggtgtgtggatctcattcatttttttattttcattttttatttctacctcttaaagtcaatgataaagtcatgagtgtaaaatgaatgcatttaaaaacataaaagatacatttcaatgacaagaaatatgcaatgatcatgaaaatctactgtacactttgccaaggtcaaagaatgaaagacaatatggaaaagccaatcctcaaatatatccttaacaaaaactctctcctacatagtaaaagcatcatctaaacagcagctccaaccgagaaaaaaaatacaacaaaaaacaaaacaaaacaaaaaaacagcagggtagatgggacagataactttccccaggttttccagataaaaacatgtggtcaccaggaattc

SEQ ID NO: 655276 - DNA, 519 bp, Homo sapiens
aagtttctctctgggttcacacacgatttcagggagaaaccaccctggaagggtggagtgtggaactgaacctccatgatagtcttcattttccaggccctgtccgtgaagccggcaatgcctgtgggtgtcgccgttgccgtgatagtcacacacgcaggtgtgtggatctcattcatttttttattttcattttttatttctacctcttaaagtcaatgataaagtcatgagtgtaaaatgaatgcatttaaaaacataaaagatacatttcaatgacaagaaatatgcaatgatcatgaaaatctactgtacactttgccaaggtcaaagaatgaaagacaatatggaaaagccaatcytcaaatatatccttaacaaaaactctctcctacatagtaaaagcatcatctaaacagcagctccaaccgagaaaaaaaatacaacaaaaaacaaaacaaaacaaaaaaacagcagggtagatgggacagataactttccccaggttttccagataaa

SEQ ID NO: 655277 - DNA, 612 bp, Homo sapiens
ctcattttttaaaatactgaaaatgtaaagkgtccatataaagagttgtattaagtacatacttcctattttaataattcacttgctgtgctcttaaaatctctatgagagaagcagatattttactcgtgtcttttggcaagagattcaaaagcaaaagtagcagggctgtaaaatttcataaaatttgtgggatttttaaaagctaaattattcaatattttgtattgttattgcactcatatattgcccggaatatatatacagcaacccagcaacagtgatttcaacaaaagtaaggtaaataggtctacaaagcatttgatttccttattagataagtgaagttttcatagaggaagtgcaaattcagatcaggttacataagcttaacaattattcaaaccttatataaaattaaatctaaccctcaccactactaatctgtaaggaatcactgtcaggaatctacaggacttggctcatatttacattcgacgcacacttagaaatttcataaatgatgagatgcaggccaaggggattcctcaaagggctccacccaaaaggtaaagaaagagagttaaacagagaattaccacttatgtattt

SEQ ID NO: 655278 - DNA, 612 bp, Homo sapiens
ctcattttttaaaatactgaaaatgtaaagggtccatataaagagttgtattaagtacatacttcctattttaataattcacttgctgtgctcttaaaatctctmtgagagaagcagatattttactcgtgtcttttggcaagagattcaaaagcaaaagtagcagggctgtaaaatttcataaaatttgtgggatttttaaaagctaaattattcaatattttgtattgttattgcactcatatattgcccggaatatatatacagcaacccagcaacagtgatttcaacaaaagtaaggtaaataggtctacaaagcatttgatttccttattagataagtgaagttttcatagaggaagtgcaaattcagatcaggttacataagcttaacaattattcaaaccttatataaaattaaatctaaccctcaccactactaatctgtaaggaatcactgtcaggaatctacaggacttggctcatatttacattcgacgcacacttagaaatttcataaatgatgagatgcaggccaaggggattcctcaaagggctccacccaaaaggtaaagaaagagagttaaacagagaattaccacttatgtattt

SEQ ID NO: 655279 - DNA, 621 bp, Homo sapiens
ctcattttttaaaatactgaaaatgtaaagggtccatataaagagttgtattaagtacatacttcctattttaataattcacttgctgtgctcttaaaatctctatgagagaagcagatattttactcgtgtcttttggcaagagattcaaaagcaaaagtagcagggctgtaaaatttcataaaatttgtgggattttwaaaagctaaattattcaatattttgtattgttattgcactcatatattgcccggaatatatatacagcaacccagcaacagtgatttcaacaaaagtaaggtaaataggtctacaaagcatttgatttccttattagataagtgaagttttcatagaggaagtgcaaattcagatcaggttacataagcttaacaattattcaaaccttatataaaattaaatctaaccctcaccactactaatctgtaaggaatcactgtcaggaatctacaggacttggctcatatttacattcgacgcacacttagaaatttcataaatgatgagatgcaggccaaggggattcctcaaagggctccacccaaaaggtaaagaaagagagttaaacagagaattaccacttatgtatttgtgggtaat

SEQ ID NO: 655280 - DNA, 621 bp, Homo sapiens
ctcattttttaaaatactgaaaatgtaaagggtccatataaagagttgtattaagtacatacttcctattttaataattcacttgctgtgctcttaaaatctctatgagagaagcagatattttactcgtgtcttttggcaagagattcaaaagcaaaagtagcagggctgtaaaatttcataaaatttgtgggatttttaaaagctaaattaytcaatattttgtattgttattgcactcatatattgcccggaatatatatacagcaacccagcaacagtgatttcaacaaaagtaaggtaaataggtctacaaagcatttgatttccttattagataagtgaagttttcatagaggaagtgcaaattcagatcaggttacataagcttaacaattattcaaaccttatataaaattaaatctaaccctcaccactactaatctgtaaggaatcactgtcaggaatctacaggacttggctcatatttacattcgacgcacacttagaaatttcataaatgatgagatgcaggccaaggggattcctcaaagggctccacccaaaaggtaaagaaagagagttaaacagagaattaccacttatgtatttgtgggtaat

SEQ ID NO: 655281 - DNA, 530 bp, Homo sapiens
aaatctctatgagagaagcagatattttactcgtgtcttttggcaagagattcaaaagcaaaagtagcagggctgtaaaatttcataaaatttgtgggatttttaaaagctaaattattcaatattttgtattgttattgcactcatatattgcccggaatatatatacagcaacccagcaacagtgatttcaacaaaagtaaggtaaataggtctacaaagcatttgatttccttattagataartgaagttttcatagaggaagtgcaaattcagatcaggttacataagcttaacaattattcaaaccttatataaaattaaatctaaccctcaccactactaatctgtaaggaatcactgtcaggaatctacaggacttggctcatatttacattcgacgcacacttagaaatttcataaatgatgagatgcaggccaaggggattcctcaaagggctccacccaaaaggtaaagaaagagagttaaacagagaattaccacttatgtatttgtgggtaatcagct

SEQ ID NO: 655282 - DNA, 530 bp, Homo sapiens
aaatctctatgagagaagcagatattttactcgtgtcttttggcaagagattcaaaagcaaaagtagcagggctgtaaaatttcataaaatttgtgggatttttaaaagctaaattattcaatattttgtattgttattgcactcatatattgcccggaatatatatacagcaacccagcaacagtgatttcaacaaaagtaaggtaaataggtctacaaagcatttgatttccttattagataagtgaagttttcatagaggaagtgcaaattcagatcaggttacataagcttaacaattattcaaaccttatataaaaytaaatctaaccctcaccactactaatctgtaaggaatcactgtcaggaatctacaggacttggctcatatttacattcgacgcacacttagaaatttcataaatgatgagatgcaggccaaggggattcctcaaagggctccacccaaaaggtaaagaaagagagttaaacagagaattaccacttatgtatttgtgggtaatcagct

SEQ ID NO: 655283 - DNA, 579 bp, Homo sapiens
tattaagtacatacttcctattttaataattcacttgctgtgctcttaaaatctctatgagagaagcagatattttactcgtgtcttttggcaagagattcaaaagcaaaagtagcagggctgtaaaatttcataaaatttgtgggatttttaaaagctaaattattcaatattttgtattgttattgcactcatatattgcccggaatatatatacagcaacccagcaacagtgatttcaacaaaagtaaggtaaataggtctacaaagcatttgatttccttattagataagtgaagttttcatagaggaagtgcaaattcagatcaggttacataagcttaacaattattcaaaccttatataaaattaaatctaaccctcaccactactaatctgtaaggaatcactgtcaggaatctacaggacttggctcatatttacattcgacgcacacttagaaatttcataaatgatgagatgcaggccaaggggattcctcaaagggctccacccaaaaggwaaagaaagagagttaaacagagaattaccacttatgtatttgtgggtaatcagctt

SEQ ID NO: 655284 - DNA, 579 bp, Homo sapiens
caaagcagcattctaacaagctcaaaatctcaatgatgttgtatggaaaagtccttggggatcaggagtccctactcattccaaattgcagcataagcatgaagcactaaaaagtcatacttggaatcagtgtaaatgttaacttttaaatcctttgccaactggaggggctgagtaagttcaattaactcagcattttgagctgaggtcgaggccagcaagacttgtgccttgattctcttgtgctgactactaatagcatatctagccctcctgttttcctgatgcataaaacaacttacatctgttaaccactcttccttgggatggtcaagggtctcatccttcttacgtctggtctgctagaataaatttgtttcataacctgtgacatgctttggctgtgtccccagtcaaatcttatcttgaattgtagctcccataattcctatatatcgtgggagggatccagtgggaggtaatcgaatcggrggatgggtctttcccaagctgttcttgtgacagtgaataagcctcatgagatctgatggcttatttatttatttatttatttttgag

SEQ ID NO: 655285 - DNA, 613 bp, Homo sapiens
  misc_feature 96: n = A,T,C or G
tcctgccattgccatgagaagaaggcaccctgtcaggccccgaccccaggaggatcagagacacttggagcagatscagctcaaccaccacatttngagctggaacctcccaagcaacccatgctcatgagtgagaaatggtggcctatggtcgtaggcctctgaggtgtgggattacttgttacaaagctagagttaattaatagagatttctacctcacatccctacaaatcaaataacaaaggaaataaaatatgaaaagcagatttccaatttttagaagaaaacagaggacatattttatgacactaagcagagagaaaaattttatatgacacaaaacacagacaccgtaaaataaattactgataaattcattcagttgtattaaatgtagaagctttgatctgacaaaagaggcgatgaataaagttaaaagacaaagacagtgcatgatatgatttggctgtgtgtccccacctaaatctcatcttgaattgtcttcccataattctcctgtgtcctgggagggacctagtgggagataattggaatcatgggggccgttcccccatactgttctcctggtagtgaataagtctcacgagatct

SEQ ID NO: 655286 - DNA, 613 bp, Homo sapiens
  misc_feature 96: n = A,T,C or G
tcctgccattgccatgagaagaaggcaccctgtcaggccccgaccccaggaggatcagagacacttggagcagatgcagctcaaccaccacatttngagctggaacctcccaagcaacccatgctcatgagtgagaaatggtggcctatggtcgtaggcctctgaggtgtgggrttacttgttacaaagctagagttaattaatagagatttctacctcacatccctacaaatcaaataacaaaggaaataaaatatgaaaagcagatttccaatttttagaagaaaacagaggacatattttatgacactaagcagagagaaaaattttatatgacacaaaacacagacaccgtaaaataaattactgataaattcattcagttgtattaaatgtagaagctttgatctgacaaaagaggcgatgaataaagttaaaagacaaagacagtgcatgatatgatttggctgtgtgtccccacctaaatctcatcttgaattgtcttcccataattctcctgtgtcctgggagggacctagtgggagataattggaatcatgggggccgttcccccatactgttctcctggtagtgaataagtctcacgagatct

SEQ ID NO: 655287 - DNA, 613 bp, Homo sapiens
  misc_feature 96: n = A,T,C or G
tcctgccattgccatgagaagaaggcaccctgtcaggccccgaccccaggaggatcagagacacttggagcagatgcagctcaaccaccacatttngagctggaacctcccaagcaacccatgctcatgagtgagaaatggtggcctatggtcgtaggcctctgaggtgtgggattacttgttacaaagctagagttaattaatagagatttctacctcacatccctacaaatcaaataacaaaggaaataaaatatgaaaagcagatttccaatttttagaagaaaacagaggacatattttatgacactaagcagagagaaaaattttatatgacacaaaacacagacaccgtaaaataaattactgataaattcattcagttgtattaaatgtagaagctttgatctgacaaaagaggcgatgaataaagttaaaagacaaagacagtgcatgatatgatttggctgtgtgtccccamctaaatctcatcttgaattgtcttcccataattctcctgtgtcctgggagggacctagtgggagataattggaatcatgggggccgttcccccatactgttctcctggtagtgaataagtctcacgagatct

SEQ ID NO: 655288 - DNA, 608 bp, Homo sapiens
atctatggctctacagatgtatatggcagttaattctatgcataaaactttcctttccttgacccaaagggtacaataatgcagtgcaaagaatctaatgtgttgaaataaacatttttaaaagcttgtgcaacatcatgtggtgcatttggaacagtcatacttgattaatctgaatcagtttgcaagttttatttttgtgcattaaattgtgtctgaaaatttgaaatttaatggcatattctggctggttgctatttaaacacagcaggtaaaatacaaattatgaaaatagaccattcatacttagaccaaaagaatattttcttataaatacttcattcactattttcagatgaaattttgctcagaaatgatactatgtgaaattatttatcatgatttttagtaacaggatctacattttatatcccctgctaaaagaagmctataatcaatgaaacattacagataaagtaaagtttatctgaaggtcactgtgccccttgatagactgcttattgctggcagcagatcagtgactcagaaaagtgctgtgctggtgttcacttgatactctaatggtgatgcttctaccttgttttcat

SEQ ID NO: 655289 - DNA, 616 bp, Homo sapiens
tgcttataatataaaaggcaagaggagagagacaattggagaaaatactgctagggtaaaaaggaatcagatcttgaagatttggaaaatttatggcctatctacattgaaaaaatgagaaatcttgttcttaaaagaacactagggttgtgactgaacaatcatttgatgaatagatcatgggttcacctcatgggcttaatcagccatctcagaagaatccaggaatagagagaggattataccagcagagacactgacagtttcaattacagggaagagaaaaaacaaaactgaatgaaaggttgccagatttcttggattctacaagactgaaccatatagttatttggctatgatatggtttggctgtgtccccaccyaaatctcatcttgaattgtagctcccataattcccacatgtcatggaagggacctgggggctggtaattcaatcaaggggcgggtctttcccttgctgttctcaagatagtgaataagtctcatgagttctgttggctttataaaagggagttcccctacacaagctctcttgcctactgccatgtaagacgtgactttgctcctcattagccttcagccatgattgtggggc

SEQ ID NO: 655290 - DNA, 616 bp, Homo sapiens
tgcttataatataaaaggcaagaggagagagacaattggagaaaatactgctagggtaaaaaggaatcagatcttgaagatttggaaaatttatggcctatctacattgaaaaaatgagaaatcttgttcttaaaagaacactagggttgtgactgaacaatcatttgatgaatagatcatgggttcacctcatgggcttaatcagccatctcagaagaatccaggaatagagagaggattataccagcagagacactgacagtttcaattacagggaagagaaaaaacaaaactgaatgaaaggttgccagatttcttggattctacaagactgaaccatatagttatttggctatgatatggtttggctgtgtccccacctaaatctcatcttgaattgtagctcccataattcccacatgtcatggaagggacctgggggctggtaattcaatcaaggggcgggtctttcccttgctgttctcaagatagtgaataagtctcatgagttctgttggctttataaaagggagttcccctacacaagctctcttgcctactgccatgtaagamgtgactttgctcctcattagccttcagccatgattgtggggc

SEQ ID NO: 655291 - DNA, 643 bp, Homo sapiens
gaagcaaaaatattttccaaagcctgctccaggggaagtctgaagtattcaggatgcttttcaaaaccaccttaccccagtgctcctagcaaaatttctgaactttataacgaaacctgggcaactggaatcgtaataaccttaacttctatttatatggaaacttcctcagaattggatggcaatcatgaaaagcacgttatcaatyattttcccaatttaatttgatgggaagggagtgtagcatttttttttaacaaatgtatggaaggagaggtgataacatttgccaatgtcatttgatgaaatggccaagggcatattttatcacattggtaagttgtccttctgctcacgcactccttgacccagctgtgtgtgccccttacctcctctctgttgctagggatgcttctggcaaggtcggggggtaaagcatggtcctcagtgggcctgggtttctagatggcttcctgaccgccccataggcagattcccttgcccatgctccacatactctccaagtttaatatctgttcttcctgtcctttccactccttcctcaaccaaagtgacttccagatttcctagtgaaatggagagtgcagttgagatttgaaataaaaagcaaagagatggaagg

SEQ ID NO: 655292 - DNA, 643 bp, Homo sapiens
gaagcaaaaatattttccaaagcctgctccaggggaagtctgaagtattcaggatgcttttcaaaaccaccttaccccagtgctcctagcaaaatttctgaactttataacgaaacctgggcaactggaatcgtaataaccttaacttctatttatatggaaacttcctcagaattggatggcaatcatgaaaagcacgttatcaattattttcccaatttaatttgatgggaagggagtgtagcatttttttttaacaaaygtatggaaggagaggtgataacatttgccaatgtcatttgatgaaatggccaagggcatattttatcacattggtaagttgtccttctgctcacgcactccttgacccagctgtgtgtgccccttacctcctctctgttgctagggatgcttctggcaaggtcggggggtaaagcatggtcctcagtgggcctgggtttctagatggcttcctgaccgccccataggcagattcccttgcccatgctccacatactctccaagtttaatatctgttcttcctgtcctttccactccttcctcaaccaaagtgacttccagatttcctagtgaaatggagagtgcagttgagatttgaaataaaaagcaaagagatggaagg

SEQ ID NO: 655293 - DNA, 437 bp, Homo sapiens
cccaacattccttcatttattcctttatttattgaataaataattattaaatgcttgtcatgtatgttccaggctttgctctagtaatttcggatatatcaatgaacaaagcaggaaagaaaaaaaaaaaggcaaaatctctgccttccgggagctcacattcccacaggagtcacaggaaacagccaatgaccagtaagcatcacaaagaagtcatgccaaagaaccagacaaatagctggaaggaagaggggaactcctttgtgacgccaaatgggccaaagggtcgctgggaaaactaagccttactgtccatcttgccttcaggataatgtgaamtatggcctaatttttgaagtttttttcttagaaattttactgaatccaaaataaaacaagaagatcatggtggatatagcttccaaatttattctgca

SEQ ID NO: 655294 - DNA, 585 bp, Homo sapiens
atatctgcaaaaacctggagctaatattatacttgatgaaagtctgaatgctttcttattaagatcaggaaaaggcaaggatgtcagctcccatcacttctgttcaacattgtagtggaggttctatccagttcagtacggcaagaaataaaaggcatccaaattagaaagaaaaatgttaaaactgcctttatttgcagatgattgtctaagtaaaaatctattggaatctacacaaaaagtaccagaactgattaatatgtggatttagtaaggctacagmatagaaaaattacatacaaaaaccaattgtatttttatagtctagcaacaaaacattagacattgaaatttacacaaaaaagttcccaataatataaaattaaatgaaatacatggggatgactctttcacaacgtacatacaagatctgtacactgagagctataaaacattgctcagaaaaattagaatccgtatgtaatttctttaaaaaattctgttgggattgtgattagtcagtttggggtaaattgacatcaacaataatgggttttctaacccatgaatgtggcgttcattcat

SEQ ID NO: 655295 - DNA, 557 bp, Homo sapiens
cattgcttcagagagtgccagccccaaactttggaggcttacatgtggtattgagcctatgggtgcacagaggtcaagaattgaggtttgggaacatccacctagatttcagaggatgtatggaaatgcctgggtgtctaggcagaagtttgctgcaggggtggggccctcatggagcacctctgttagagaagtgcagaagggaaatgtggggtaaaacttcccacacagagtccccactggggtactgcctggtggagctatgagaagacagccactatcstccagaccccagaatggtatatccactgacagcatgtaccatgcacctggaaaagccacagaaactcaatgccagcctatgaaagaaccgagaaggggagatgtacctggcaaagccacaggaacagagctgcccaaggccatgggcacctcatgcaagcccacctcttgcatcattgtgtcctggatgtgagacaggagtcaaaggagtttagttttgacctttaatatttgactgtcctgctggatttcagacttgcatggggcttgtagcc

SEQ ID NO: 655296 - DNA, 473 bp, Homo sapiens
ttagaccaatatccttgatgaacattggtgcaaaaatcctcaataaaatactggcaaaacgaatccagcagcacatcaagaagcttatccaccatgatcaagtgggcttcatccctgggatgcaaggctggttcaatatatgcaaatcaataaatgtaatccagcatataaacagagccaaagacaaaaaccacatgattatctcaatagatgcagaaaaagcctttgacaaaattcaacaacccttcatgctaaaaactctcaataaattaggtattgctgggatgtatttcaaaataataagagctatctatgacaaacccacagccaatatcatactgaatgggcaaaaactggaagcattccctttgaaaactggcacamgacagggatgccctctctcaccactcctattcaacatagtgttggaagttctggccagggctattaggcaggagaaggaaataaagggt

SEQ ID NO: 655297 - DNA, 631 bp, Homo sapiens
ctataatcttggatttaaaaggaaatattcaccctctgcccctaccttaaccaattttgtctgatggaagtgtttagcttggagaaaggtggtcttgtactgacactgaaaacattgacccagatggtcatttatgtcgcacttctaacccgacactacaatttggggaagatttttggccaaatcattagaatgctgccctgtgagtcaataggcttaggccaccatttacattttgtttcttcagtttttttctttttctttttatatatccatggattcctgtacacttttaatagcagcatattacaatcaggatattacagtgtaaagagccaagtctttggatacagatggacctaggttggatcccagcactactacttattaacagggaaatattgagctagttctctactttctctgagcctctgtttccttctctattaaatggggataataatacttgcctcaaggtttgttttgagaattagtgaggtaayagatagtacttggcatttattagacacaaaataaatattcattccatttcttctttaatactctttgtgattattaagctatctcagctggctgcatttatatttatgacattcaaaatatgaaagca

SEQ ID NO: 655298 - DNA, 630 bp, Homo sapiens
gtgtaggcctagggtaatacgtgtgtttgtgtcttagcttttaacaaaggagtttaaaaagtaaaaaaaaaaaaaaaaagtgaaatattaatttttttaaatcaggaaaagcttatagaattatgatataaagaaagaatatttgtgtacagctatacaatttatttgtgttttaagctgagtgttattaagagtcaaaaggttaagaaattaaaaagtttataatgtaaaaatgttacagcaagttaaagtttcattattgaggaaagaaaaatctttctttgttgaaaaaaaattgttttataagtttagtgtracctaagtgtccaatgtttataaagtctacagtactgtatagtaatgtcccaggcctttgcactgacttaccactcactcactgacttaccactcactcactgacttacccagagcaacttccattccattcctgcaagctcctttcatggtaactgattatacaggtgtaccatttttattgtttataccatattttaactgtacactttctattttagatacaccaatacttaccattgtgttccgattacctacagcatacagtacagtaatatgttgtgcaagtttgtagcctaggagtactaggctata

SEQ ID NO: 655299 - DNA, 630 bp, Homo sapiens
gtgtaggcctagggtaatacgtgtgtttgtgtcttagcttttaacaaaggagtttaaaaagtaaaaaaaaaaaaaaaaagtgaaatattaatttttttaaatcaggaaaagcttatagaattatgatataaagaaagaatatttgtgtacagctatacaatttatttgtgttttaagctgagtgttattaagagtcaaaaggttaagaaattaaaaagtttataatgtaaaaatgttacagcaagttaaagtttcattattgaggaaagaaaaatctttctttgttgaaaaaaaattgttttataagtttagtgtgrcctaagtgtccaatgtttataaagtctacagtactgtatagtaatgtcccaggcctttgcactgacttaccactcactcactgacttaccactcactcactgacttacccagagcaacttccattccattcctgcaagctcctttcatggtaactgattatacaggtgtaccatttttattgtttataccatattttaactgtacactttctattttagatacaccaatacttaccattgtgttccgattacctacagcatacagtacagtaatatgttgtgcaagtttgtagcctaggagtactaggctata

SEQ ID NO: 655300 - DNA, 671 bp, Homo sapiens
tgtgtgtctattgtcttatctttctgtccaggtccccatactattttttttcttccacttcctttctcttcaaaacatttaatcaaatagaatgtagctaaattttttttactcttttttccattgacctagaaagtgtaggcaaaaatacgtgtttggggtttttgttgtcattgctgtctattrccctttgttttttttccaactctagagggtcacagaagtttttctggcaagaggagacttcatccttagtagaagggtaactgtcaaatgactaggcgtccagccagcagatggaataggaaaaggaaccgtggtactggtgaccctccaaagcaagtgaagtaatctgttagaggaaaagacagttttaaatgtattctatttctagagaaaattgaagccaaatttccatgttatccatcattgagaaaatttttaactaatacctttactcctctttttccctttccttgtatattttctgaagataagagaaaaaggccaattataaatccctcttccaaatggaagagaagggggagttttaactttaaacaaagattgaagcttcgactattacatgggacaggacatattaatgactaaattgtggctgacctgttagccttcaaatgacctgagaacatttgatagtgtgtaaaagt

SEQ ID NO: 655301 - DNA, 644 bp, Homo sapiens
gggggagggataggaaggaactgactgttactgagaaatatatatatttttaacttcaaggcccacaacagagtcttttccaaagactgtgttccaaccgtacctatattatgttacaaaaatccttacaaaatcttatgagatgagcagtattagccacagtttaaagaaraaactaagcttcaaagttcatacctaccactctaggactttcagactataaacacaaaatcaaaaacacgaattcaaatatctacagtgttaatgatcatactaaatcttccattaccacttactttccttcactgatccaaggacattatatctgtcactgtactgaattattagataatgttacatttaattgtatttaaatgcaatgcaacaaaataaactttcaaaaatcaaatacatattttttctctagaagaaatattcttcctaagaagtgtctgtaaagatgtaataaaactattaagatattaatgacatgcttctaaactacatgattcatttttattcaatgacaattgataaattaactcttttctgtgaaagacagcgagtttaggtgttttgtttgtttgtttgtttgttttccccacagtgtcttgctctgtggcccaggctggagtgcagcggca

SEQ ID NO: 655302 - DNA, 644 bp, Homo sapiens
gggggagggataggaaggaactgactgttactgagaaatatatatatttttaacttcaaggcccacaacagagtcttttccaaagactgtgttccaaccgtacctatattatgttacaaaaatccttacaaaatcttatgagatgagcagtattagccacagtttaaagaaaaaactaagcttcaaagttcatacctaccactctaggactttcagactataaacacaaaatcaaaaacacgaattcaaatatctacagtgttaatgatcatactaaatcttccattaccacttactttccttcactgatccaaggacattatatctgtcactgtactgaattattagataatgttacatttaattgtatttaaatgcaatgcaacaaaataaactttcaaaaatcaaatacatattttttctctagaagaaatattcttcctaagaagtgtctgtaaagatgtaataaaactattaagatattaatgacatgcttctaaactacatgattcatttttattcaatgacaattgataaattaactcttttctgtgaaagacagcragtttaggtgttttgtttgtttgtttgtttgttttccccacagtgtcttgctctgtggcccaggctggagtgcagcggca

SEQ ID NO: 655303 - DNA, 523 bp, Homo sapiens
ccagacttagagctaaaggagccagcaacccagaaatgccagcagatgaaaaaaaaaaaaaagccccaacaaatgtttgctctccttagctaaaggactaggaatagggtagtcttgcaagaaacaaaactccagccaagcatcatagaaaaacatgtggccccacatccatatgtcacttatgagccaagaagccaccctattcactttagagctaggcaccctaagaccccagaccttaccagtgggtgtcagagatgaccaagtagagaagttagagagccaggatctcatccccatcagcagttaggagcaccaccaccaccaccaccaccaccagaacaacaacgacagtagaaaccctgcgggcagactgtgactccagaaaaaaaaaaaaaaaaaaaaagagartcttacttaagatattaattaatttcaaaacagaagaaaaagaaaaataagtgaacgaacatcctactttgggcaagaatgagaaattttggtgaagagctgaaaatgcgac

SEQ ID NO: 655304 - DNA, 523 bp, Homo sapiens
ccagacttagagctaaaggagccagcaacccagaaatgccagcagatgaaaaaaaaaaaaaagccccaacaaatgtttgctctccttagctaaaggactaggaatagggtagtcttgcaagaaacaaaactccagccaagcatcatagaaaaacatgtggccccacatccatatgtcacttatgagccaagaagccaccctattcactttagagctaggcaccctaagaccccagaccttaccagtgggtgtcagagatgaccaagtagagaagttagagagccaggatctcatccccatcagcagttaggagcaccaccaccaccaccaccaccaccagaacaacaacgacagtagaaaccctgcgggcagactgtgactccagaaaaaaaaaaaaaaaaaaaaagagagtcttacttaagatattaattaatttcaaaacagaagaaaaagaaaaataagtgaacgaacatcctackttgggcaagaatgagaaattttggtgaagagctgaaaatgcgac

SEQ ID NO: 655305 - DNA, 549 bp, Homo sapiens
aagtgggggacaatgagctcccccatatatcagaatgttcatcaaattcagggtacattctgggctctatcagcmccaaaactaaaactacatatcaaatgaccaaatgaataactccaaaattgctccctacacatctttttttttttttttttttttttttttttttttttttcagacagagtttcactctgttgcccaggctggagtacagtagtatggtcatagctcactgcagccttgaccacctggactcaagcaattctcctacctcagccttccaagtagctgggactccaggcaagtaccaccatgcctgactaatttccttatttttatagagatggagtcttgctatgctgcccaggctggtgttgaactcctagtctcaagcaatccccccacctcagcctcccaaagtgctgggaatacaggcatgagccaccatatccaggttttaataaatgtcccaaaaataactagaaaaggaatcactatttaatcaagtgattatttattaaataatcactgggatgacatgatatgaat

SEQ ID NO: 655306 - DNA, 584 bp, Homo sapiens
tgtgtgcccaggcagaagcctgtcacagggacagaacccccacagagagactttactaggacagtgccaaggggaaatgtgggattggagcccccacacagagtttgcattagggcactggctagtggagctgtgggaaggaggccgctgtcctctagacccatgaatgggagagccactggcagcatgcaccctgaatctgaaaaagccacagacacttaactccaacctgtgagagcagccacaggggctgcaccctgtaaaaccacaggggtggagctgtccaaggccttgagagcccacttcttgcatcaatgtgcacaggatgcaggacatggagtcaaagattgttttggagctttaagaggtaaggattgccctgctgggtttcagactccatggtgcctgttgtccctttcttttggctggtatctccctttcagagtggaatgtttacccaatactggtatcaccattgtatcttggaagtaaataggttgtttttkgttttacagactcataaatagaaggaacctgccttgagtctcagatgagactttggacttttgattgagtggatgcta

SEQ ID NO: 655307 - DNA, 592 bp, Homo sapiens
gcacacttaacagactacagtataatgtaaacataatgtatatgcactggaagaccaaaaaaatagtgtgacttgctttattttgatatttgttttattatgtggtctcaaattgaacctgcactttttccaaggtatgcctgtattctgtttcttagaggaactccacatatttgtataagattggctccaccttattctcactgtgtgtgactatgctggtcataaatgtgttcatacccactatgtgtctataagacaaaacctattctgacttgtcttttcccatgctttttcatctttctactctaggctaagagtagaggtagatcttggagaagagggacctgacaaaattttaatgtagttgtctttttctttgacaaaggaaggaaagcccatctcaagaggtcctttctttttctgtgttttgctttctccatcatttcttaagaggtcaaagtgttcctgcarccctctgcctgtccaaaatctcccattgccaccctgagtctccaagacctgctttaccctcataattctcaaattccaaatttgtgtcccacattctcattcacttcaaaaattctgt

SEQ ID NO: 655308 - DNA, 597 bp, Homo sapiens
tttacagagttataaaatcatctaagatttctatgggcctatgttttttgactaggaagaaagcaaaaatctgggctttttttttagggtctaattttgaattatattgtgtgggtcatgggatgggaaagaaaggacgtgaaataatggcaagaatgaawattgaagattcagaagaacttagttacctcaaaatgcatcacttactactttaggattatgatttagtggaatcaaaagattcatatctcacatttggcttaagtcacatatgatatatgtgtaaaaatttgaaaggtcagtactgttaggactttcaggacttaaaattttgtttcaatacattattatagataatcatatttatatgtatatttataaacagtacgtaaacattttaaagttttattttgtttgttttttaagccatagtttcatgtaactgtgacatacatgctcatacttcagatggcacaattgatcatgatactaacttttctaattagcccattactaacttttcacttttccacagttcagtaaaatatgaatccttctttagtccttccctttttaatcccaagagcaatacagttg

SEQ ID NO: 655309 - DNA, 536 bp, Homo sapiens
agcgtaaattgaattaagatcaaataagcctctgccctgcggatgcctctgatgtgactaatttaggaatgcagataagtgcacccagtctcagattctgggagggctcagtaagtttattgttcaatatgattctttgtatttttgagtctgaatgccaaattactgacaaattctttacatttaagattcattttattctcacctgtccaaactctcctgaaagttgcttgacttctcttcaatccaaacacttaaaccaacaattgaaagataggcgttggcatgaagacactttcatctttatsctgggcacttagtggacccttccaatctggcaaattatgattcaattctggaaattcttcttagggtatctggcagaagaaatttttcttaaatgactgatttcatgattttctctaccctcctctcttttctttcttctgtccttttggaaggtctggtattcagatattaaaacaccctcaccctggttcttgaatacgcccttggtttcatcctatttttcatgt

SEQ ID NO: 655310 - DNA, 526 bp, Homo sapiens
ttcactatcatgttaatttggtaaatgtctgataatgtcttctggagtattaaaaagaattatgtttttagcttataacaaatatggttgcaattttgtagaccttttgtatttattttataatactttatattttgtcgtatttttctaaagaaattgccaacaaaaaatatatacagattaattatcaattcatctcatatggcaaaaaaaacctttgctataaataggcaatactctagaatgattttatttatataaatagtataattcttttatgactgaagttgtgatttcytctaattcttccctgaaccactgcttcagatatttgcaatctgataaaaattattgcctttagttctcctgtttgatcttagagtgaaggattaatcctagtaaatacattgtcatgtaaacttttctgacattaggttccatttaactactttggagcagaatcaagcagaataataactatgaattcagtagcttttgtttataaagcaaaagtgtctgacaatca

SEQ ID NO: 655311 - DNA, 518 bp, Homo sapiens
ttctgggtagttttttgttatgaaagtatgttagattttgtcagatgttttcaatgcactaatttttcctgattctattaatgtgatgtattacattgattgaaattcttatgtggaaacacccttgtgttcctcagataagtctcacttctttgttgttgtataattcttttaatatgctgttgaattcwatttactagtatgatactgaggatttttgcatcaacattcatagtggatatttatcaatagtttttgtggtatattaatcttattttgatttgagggtaagtctggcctcataggataaatcaggatttttttccctcctcttcaatgttttgaaacagtttgagatggattagtgttgattctctttaaatgtttactagaattcagtggtaaagccatttggtcctagactgttctctgtttagaagttttaaattactaattcaagctccttactggttatagatgtatgcagattttgccatttcgtcgtgatctagtcttga

SEQ ID NO: 655312 - DNA, 518 bp, Homo sapiens
ttctgggtagttttttgttatgaaagtatgttagattttgtcagatgttttcaatgcactaatttttcctgattctattaatgtgatgtattacattgattgaaattcttatgtggaaacacccttgtgttcctcagataagtctcacttctttgttgttgtataattcttttaatatgctgttgaattcaatttactagtatgatactgaggatttttgcatcaacattcatagtggatatttatcaatagtttttgtggtatattaatcttattttgatttgagggtaagtctggcctcrtaggataaatcaggatttttttccctcctcttcaatgttttgaaacagtttgagatggattagtgttgattctctttaaatgtttactagaattcagtggtaaagccatttggtcctagactgttctctgtttagaagttttaaattactaattcaagctccttactggttatagatgtatgcagattttgccatttcgtcgtgatctagtcttga

SEQ ID NO: 655313 - DNA, 322 bp, Homo sapiens
atttttagctcctgtttttgtttttttgttttgagatggagttttgctcttgtacaatggcacaatctcagctcaccacaaactctgcctcctgggttcaagcgattctcctgcctcagcctcccgagtagctgcgattacaggcatgcaccaccatgccccgctaattttgtatttttactggagatggggtttctccatgttrgtcaggctggtctctatctcccaacctcaggtgatctgcccgccttggcctcccaaagtgctgggattacaggcatgggccactatgcctggccttagctcctgtttatatacagaa

SEQ ID NO: 655314 - DNA, 603 bp, Homo sapiens
taggataagagtccgggatgtagaagatattttgttttcccaagaacataggtggaaatgaataaggaaagccgagttttgtccagacaggtatgtttttgttgcagtgtttatagaaacatcatgaattatgagatatgaaaatatctatagcttccttgaaatttcacatttcataaaattgtacaatgttagaacccaaaaaaawtcatgttttatacattcacgtctttattgtgtgtctaacacgtttcagacattgtgctaaacagatacgtgtatgattaccagttacgttcaatgctattaaggaaagagcaaagtactttgacagagtctagcaggaacaatgtatgttaggcttgggaataggtaaaggtcaggcaaggtttctctgagggaaggacatttaagctgagttgtgaaaggaagaaaatatgccaggcaggaaaaatgttctatgaccaatggccagtggtgtgtggtcctttcaagtgagtgaataggccactgaggtttggagatatattccataagtgttgatcccatcaacatgaataacaagatttttccacctgcctggcagatttactgattgaaatt

SEQ ID NO: 655315 - DNA, 603 bp, Homo sapiens
taggataagagtccgggatgtagaagatattttgttttcccaagaacataggtggaaatgaataaggaaagccgagttttgtccagacaggtatgtttttgttgcagtgtttatagaaacatcatgaattatgagatatgaaaatatctatagcttccttgaaatttcacatttcataaaattgtacaatgttagaacccaaaaaaattcatgttttatacattcacgtctttattgtgtgtctaacacgtttcagacattgtgctaaacagatacgtgtatgattaccagttacgttcaatgctattaaggaaagagcaaagtactttgacagagtctagcaggaacaatgtatgttaggcttgggaataggtaaaggtcaggcaaggtttctctgagggaaggacatttaagctgagttgtgaaaggaagaaaatatgccaggcaggaaaaatgttctatgaccaatggccagtggtgtgtggtcctttcaagtgagtgaataggccactgaggtttggagatatattccrtaagtgttgatcccatcaacatgaataacaagatttttccacctgcctggcagatttactgattgaaatt

SEQ ID NO: 655316 - DNA, 478 bp, Homo sapiens
aagagttcactttcatgatatgtagaagttcttcctagtaacttttccccatatatatttcattatttgcatctccaagtgattaaaaggatgcagtacattttaaaggatagatttggacaaatgtggacgttattcagaaaataataatataattgtttatcattttgtgcacatcctcaagttattgtacctttacttagaaatataacaaatatttgtagtttttttattaagaacagccattggaatcaagattaamtaaataatttttgtttggtaatatatattaaattttatgttttgttactaaggaacagtttaagacttttgccccatttcacatattcagactttcatgatcaccctttcaaaatgataagtcaggtctaaaatggattaaccttcctgtttctcagtgtgagaagtaatgagtgaggcaaatgtaaattacttttattgtttttattggcacaag

SEQ ID NO: 655317 - DNA, 478 bp, Homo sapiens
aagagttcactttcatgatatgtagaagttcttcctagtaacttttccccatatatatttcattatttgcatctccaagtgattaaaaggatgcagtacattttaaaggatagatttggacaaatgtggacgttattcagaaaataataatataattgtttatcattttgtgcacatcctcaagttattgtacctttacttagaaatataacaaatatttgtagtttttttattaagaacagccattggaatcaagattaaataaataatttttgtttggtaatatataytaaattttatgttttgttactaaggaacagtttaagacttttgccccatttcacatattcagactttcatgatcaccctttcaaaatgataagtcaggtctaaaatggattaaccttcctgtttctcagtgtgagaagtaatgagtgaggcaaatgtaaattacttttattgtttttattggcacaag

SEQ ID NO: 655318 - DNA, 529 bp, Homo sapiens
cctaaaccccctagacctgggagtataacctatgtccaggttccaggactataggtagtaattggcctgattttttatgttcctttttttttttcagagtcccagacgggaaccaattccttgtcactttcttgctctaacaataagagatttttctattttcctttcagtaaggggcatcattccagtgcccacctttatgcgggagacttagttatacctctctacttcctatacgcccaagatatgaattctgcctccaggtgaaattaaattatttttctagtttktagaggctatatccatgaccattatccctggaaccaccatagcatcatattacaagcttataactagagccctaggttcctacttacatctggcacctgggaaattatcttttttatttaatgtcatctatgtgtccatagcaggaaaagggtctccattatcttatttcactgtgcaaaaggcatgaatcctccatctttacaataatatgaataaatctattaagtacaacatgcat

SEQ ID NO: 655319 - DNA, 360 bp, Homo sapiens
ggcaatgacaggacaagctagttttcctctgaagatattcctgctctaccaattcactctttgctagataacagacatttgtggcagaataatttaccaagcagtttttgctctgcctacctcttaccagaggaaacaaaaagaaagatgaaaaaataactttgtccttacctttccaaaagttcccagcttctggtatttctctcaggggttaacagcttttgtgcaacctggcccagcacagaggctgstagatatctgttgtccaacatcatcagggctcattaatcaaagggaatttagctgtgtacttcttagggggaggatagagggactgggttgaaagagggggttgcccaa

SEQ ID NO: 655320 - DNA, 360 bp, Homo sapiens
ggcaatgacaggacaagctagttttcctctgaagatattcctgctctaccaattcactctttgctagataacagacatttgtggcagaataatttaccaagcagtttttgctctgcctacctcttaccagaggaaacaaaaagaaagatgaaaaaataactttgtccttacctttccaaaagttcccagcttctggtatttctctcaggggttaacagcttttgtgcaacctggcccagcacagaggctgctagatayctgttgtccaacatcatcagggctcattaatcaaagggaatttagctgtgtacttcttagggggaggatagagggactgggttgaaagagggggttgcccaa

SEQ ID NO: 655321 - DNA, 360 bp, Homo sapiens
ggcaatgacaggacaagctagttttcctctgaagatattcctgctctaccaattcactctttgctagataacagacatttgtggcagaataatttaccaagcagtttttgctctgcctacctcttaccagaggaaacaaaaagaaagatgaaaaaataactttgtccttacctttccaaaagttcccagcttctggtatttctctcaggggttaacagcttttgtgcaacctggcccagcacagaggctgctagatatctgttgtccaacatcatcagggctcattaatcaaagggaatttasctgtgtacttcttagggggaggatagagggactgggttgaaagagggggttgcccaa

SEQ ID NO: 655322 - DNA, 593 bp, Homo sapiens
tggcgttcaagcccagccccttggttgggacagtggagagcaggcaggacactaaaagggggactgcactctggggtggataaatccctttcaggctccaaggctagtcttgtgaggtcttgaggagaatttgatgatttgcaatgaggctgtgtgcccacaccgccttcctgccatgtctgcttagacctcaagcccyatctcgtcaccagccttccctcattctatctgaagtttgtgctcaaggaaaacaatggcgtggcagacacctgagccccacccatgctgtccccaccaactctcttcaacaaggcaagtgcacaggtggctcccagacactcctctccttcattccagaatgtcccagcctacaagctcactctaggatcctcatcaccctcatgagggcaccgcctttggggtcattttctccagtcgtaggtcacctttgtgaatggcccacagcatcaggcggccgacttggctggtagctatattacgtatagacaattgatattaaaagcataattttcaaatcccatagcccttcgaggtgctattcacctgtcagctgatctgatttcagcttattt

SEQ ID NO: 655323 - DNA, 593 bp, Homo sapiens
tggcgttcaagcccagccccttggttgggacagtggagagcaggcaggacactaaaagggggactgcactctggggtggataaatccctttcaggctccaaggctagtcttgtgaggtcttgaggagaatttgatgatttgcaatgaggctgtgtgcccacaccgccttcctgccatgtctgcttagacctcaagccccatctcgtcaccagccttccctcattctatctgaagtttgtgctcaaggaaaacaatggcgyggcagacacctgagccccacccatgctgtccccaccaactctcttcaacaaggcaagtgcacaggtggctcccagacactcctctccttcattccagaatgtcccagcctacaagctcactctaggatcctcatcaccctcatgagggcaccgcctttggggtcattttctccagtcgtaggtcacctttgtgaatggcccacagcatcaggcggccgacttggctggtagctatattacgtatagacaattgatattaaaagcataattttcaaatcccatagcccttcgaggtgctattcacctgtcagctgatctgatttcagcttattt

SEQ ID NO: 655324 - DNA, 522 bp, Homo sapiens
aatgcacaattcattaagttaaaccacattctaggccacagaacactttaccaaatttaaaagaatagaaatcacaaaaggcatgttcttgaattagaatggaattaaactaataatagcagaaagagagctgaaatatcctcaaataccaaaaaatttaaaaacacatttctaaataataaaacatggtgaaagagaaagtctcgagagaaacaaaattttttaactaagccagtaattaataaccttcccaaacagaaggtaccaagcccagatgattcactggtgagttctatcaacaytggagaaataaatgataccaattttccacaatctgttgcagaaaatagaagcagagtgactatttcttaactcattccatgggccagcattaccctaatacccaaaccagcaaaaccttacaaaaaagtaaactgcaaacaaatatctctcttgaacatggatgaagcaatccttaaaaaatattagcaaattgaaccaaacaatttttaaaaatgaaca

SEQ ID NO: 655325 - DNA, 569 bp, Homo sapiens
gtcagccagcacaggaactatgatgcaggtcctcaggaggtagcctccactgcaccccgctgtgaagctgcactgcaagcaggtgtggccaggctggggccccaggaggggcgagcagactgaaggatgctcaggtcagactggccctgtctcaggggcaagaatgccctgcagagttcaggtctgacagttcccctagggctgaagtctcctatgagaacaagtttagcctagggcaatgggtgtccctgaccattctccactacagatgctcccacacaaaaccttctgggctttgcacagtctggaattctaccattaacactttataagcaggtcttcctgacaactcaagtgtccctggtggttgtagggtctcctcctgtcaggaattcaggggcctgcgacaagaggaggttgccccttgcctgttcaactcacctctcctccaggagattttggggacctggaatgagtcctggtgcacgrttgccccttgcagggttcccgccttcctcccccttcagcccaacatctgtgtcttccctctgtctgctctcaaagccttc

SEQ ID NO: 655326 - DNA, 186 bp, Homo sapiens
tcccaatgtcctggtcccttggtgggagctgttcctcctggctgtgtctagtcagccatcttccctcatattttcttcacacaagttaacaatggttattttcacattgyaatttcatctattaattgacatttaagagaaaacaaatcagagtgtgtgataatttgctaatatttctcccaatga

SEQ ID NO: 655327 - DNA, 624 bp, Homo sapiens
cggtaattcatttttcataattgttgcttaaagattctaaccccagttcccattacccatcctgtctcacacacaataaagtgtcatgtctgagtcactaaatgtctgckttggagtgagtttgaattgtctttaatgtcagactcacttcagaggaggtgtggttttcttgcttttttgttttttttgttttttcacctctgtaggacatttccaagtggctccgggtcagtgaaaagttattaagagcagcttctacttctgtcctaattaaaaattgtgcaaaacaaaaaaatacatctttttgacacatttttttctgaagtaacctcatatttttttccttcaaaaattgaaatcaaaaggtaaaataagtatacaattttaatttctgatactggcatagtgtttgtatctgactatcttcatggagcaaaagtcatggagataaaagataaaaacttcacaattattcagttattttgtttattgttaagtttaaatcctatttgatttagcattttattttctataaatgtttaaataaacattttatagaaaagcccaatcactaccacctcctcaaatcactgaggttgcctctaacctgagtgtaaatggaaa

SEQ ID NO: 655328 - DNA, 624 bp, Homo sapiens
cggtaattcatttttcataattgttgcttaaagattctaaccccagttcccattacccatcctgtctcacacacaataaagtgtcatgtctgagtcactaaatgtctgctttggagtgagtttgaattgtctttaatgwcagactcacttcagaggaggtgtggttttcttgcttttttgttttttttgttttttcacctctgtaggacatttccaagtggctccgggtcagtgaaaagttattaagagcagcttctacttctgtcctaattaaaaattgtgcaaaacaaaaaaatacatctttttgacacatttttttctgaagtaacctcatatttttttccttcaaaaattgaaatcaaaaggtaaaataagtatacaattttaatttctgatactggcatagtgtttgtatctgactatcttcatggagcaaaagtcatggagataaaagataaaaacttcacaattattcagttattttgtttattgttaagtttaaatcctatttgatttagcattttattttctataaatgtttaaataaacattttatagaaaagcccaatcactaccacctcctcaaatcactgaggttgcctctaacctgagtgtaaatggaaa

SEQ ID NO: 655329 - DNA, 624 bp, Homo sapiens
cggtaattcatttttcataattgttgcttaaagattctaaccccagttcccattacccatcctgtctcacacacaataaagtgtcatgtctgagtcactaaatgtctgctttggagtgagtttgaattgtctttaatgtcagactcacttcagaggaggtgtggttttcttgcttttttgttttttttgttttttcacctctgtaggacwtttccaagtggctccgggtcagtgaaaagttattaagagcagcttctacttctgtcctaattaaaaattgtgcaaaacaaaaaaatacatctttttgacacatttttttctgaagtaacctcatatttttttccttcaaaaattgaaatcaaaaggtaaaataagtatacaattttaatttctgatactggcatagtgtttgtatctgactatcttcatggagcaaaagtcatggagataaaagataaaaacttcacaattattcagttattttgtttattgttaagtttaaatcctatttgatttagcattttattttctataaatgtttaaataaacattttatagaaaagcccaatcactaccacctcctcaaatcactgaggttgcctctaacctgagtgtaaatggaaa

SEQ ID NO: 655330 - DNA, 597 bp, Homo sapiens
aaagtgtgaaagcagccacagacacaggcatggctgggttgcaataaaaatttatggatatgaaatctgaatttcatacaagttttataagacatgaaatattctttttatttttcaaccttttaaaaatgtaaagaaaacattcttagctcactgccatgcaaaaatagactagtggtctggatttcacccaaagcaagaggttatcaaytcctgacccgtttgccaattcctgatctaaatgattacagagaaggggaaaaatcaagaaggtaacttcccttctaaaattgtcttagaataatatctaagtgattattcattacaaaaaaaaatagtacactgggatttagatattcattttgcagaatattaatttatcattattttttaaagtccttttatgatactgggtatttctttccttgttaacttggtaaatgcaaaatgaatcccacagattcaaaaccaaatacatactccacccttataagtaatacatagactaatgagtgtgaaagtggtctgtgaaacactgctcccagtagttcaggcaacaaacacaggccgggcacagtggctcatgcctgtaatccc

SEQ ID NO: 655331 - DNA, 555 bp, Homo sapiens
ctagcctgagtaatttggtgtcataaagctttgcatggcagaacaaaagtggcttccaatatcctgtttattgttagtttccaggacaaaacgtttatcatttccaaggaaaagaaaatcacttttggaagttggaaatttttaatgaaaacataagtaaaagagtatcttgctatttcttctataaaatcccacaaaggcccaggtgtcgaaacatatttacaaaacatgccataggcagaaacagaacaagtgttgtgatggacaactgaggcagcaggtattgcagggcaggactgaaaaacatttctgcgaaactatgtkgcaccataccacacctgctactattaattagaaaactgaattctctccctgagccaatatttatatttctctttgtatctattacacattacgtttctcatccattacaagttaaaatagttttgaaaaagacactgtagaataatggaaaagctcaggattgggaataaagacataggggtaggaagagggaatagggactaacatttcttcaataatgcaccacatgag

SEQ ID NO: 655332 - DNA, 555 bp, Homo sapiens
ctagcctgagtaatttggtgtcataaagctttgcatggcagaacaaaagtggcttccaatatcctgtttattgttagtttccaggacaaaacgtttatcatttccaaggaaaagaaaatcacttttggaagttggaaatttttaatgaaaacataagtaaaagagtatcttgctatttcttctataaaatcccacaaaggcccaggtgtcgaaacatatttacaaaacatgccataggcagaaacagaacaagtgttgtgatggacaactgaggcagcaggtattgcagggcaggactgaaaaacatttctgcgaaactatgtggcaccayaccacacctgctactattaattagaaaactgaattctctccctgagccaatatttatatttctctttgtatctattacacattacgtttctcatccattacaagttaaaatagttttgaaaaagacactgtagaataatggaaaagctcaggattgggaataaagacataggggtaggaagagggaatagggactaacatttcttcaataatgcaccacatgag

SEQ ID NO: 655333 - DNA, 330 bp, Homo sapiens
tcaggttggatgagaacaaaggttatctgccttctatccagaactctgctttttttctcacatttaagttagacaaaaacaacataaaacaataaaacactgaaataaatttaaatacaattactaaaaaaamccaactttttttataaattgtcttccaatttgcttacatagttttcacagctgtattttgcttttccctcttttctaatacaccatataatctcttctactattacccccaatttacaaataagaaaacagattaaacgatctgccccaactcatgtacatggttacaaaatggcagaaatgggactaggacccaga

SEQ ID NO: 655334 - DNA, 330 bp, Homo sapiens
tcaggttggatgagaacaaaggttatctgccttctatccagaactctgctttttttctcacatttaagttagacaaaaacaacataaaacaataaaacactgaaataaatttaaatacaattactaaaaaaacmcaactttttttataaattgtcttccaatttgcttacatagttttcacagctgtattttgcttttccctcttttctaatacaccatataatctcttctactattacccccaatttacaaataagaaaacagattaaacgatctgccccaactcatgtacatggttacaaaatggcagaaatgggactaggacccaga

SEQ ID NO: 655335 - DNA, 514 bp, Homo sapiens
atcagtgtctgtgatggttaatactgagtgtcaacttgattggattgaaggatgcaaagtattggtcctgcgtgtgtctgtgagggtattgccaaacgaaattaacatttgaatcagtgrgctgggaaaggcagacccacccttaatctgggtgggcaccatctaatcagctaccagaatggccagtatataaagtaggcagaaaaacaccaaaaggctagactggcctagcttcccagcctacatctttctcgtgtgcagtatgcttcctgccctgaaacatcggactccaagttcttcagttttgagactcggactcactttccttgctcttcagcttgtggatggtctattatgggaccttgtgatagtgtgagttaataataaactcccatgtatataagtatatgtatctcctattagttctgtccctctagagaaccctaatacagtgctccatgctgagctcacatggaactcatcttcctcctgtgtttggcagagcaccttcctt

SEQ ID NO: 655336 - DNA, 588 bp, Homo sapiens
gcttctgcatgtcttagcagcccttgactttgcacaaggatagagaaacctgatattgggagccaacaatgtccccattaggacacactgttttttctcattaagccatggggaacctgtgaagttgatcacttcaccwcttatcccttgacttttagtcacaattattccctaagcagccaaaccatgtttgaaatcagcagatcaaggtacagaggaggaattttaggtccttttatgtatggtcctgtatgatctttctgttccctataaagaacacttgaatgcatgtacagaatgctcgagagaaacagaaaagacacttaaaacactatattaataagtatgcaaattcctaagagaaatgagcttccatgaaactttcacatctgatgtttttttctaagagtacaatagtataagaaataaatgattctgttgagttggaagactggccagaatttaaagcaataagacccagaagaccaaaacatattgcataatgagaagtgtgaacatgtagttccatcctcaaataaggcttttgggactgtagaatttcagttgttctatggaatggtgtgagcc

SEQ ID NO: 655337 - DNA, 577 bp, Homo sapiens
gacatataaaaagaaatttattaggtggaaaagtcagaaatattaatcacagtagcaaatgtcatgcacgtccatgtgaagagaccaccaaacatgctttgtgtgagcaacaaggctgtttatttcatgtgggtgcaggcaagctgagtccgaaaaatgagtcagtgaagggagayaggggtggggctgttttataggatttgggtgggtagtggaaaattacagtcaaaggggatttttctcttgcaggcaggggcgggggtcacaaggtgctcagtgggggagcttctgagccaggagaaggaatttcacaaggttaatcactcagttaaggtggggataactaaaaaggagtgcataaaaataatgttgtccaagttggcatcagagctggagagttttaagaggtttagaagcctggccgtcaatacctacaacagttatggaggcaaatgaaacaggcctttgaaaagaaggtaatgtggagttggtagcctccatattgattaagaaggggacctacttaccctctactgtaagagttacccgaagcatctgtgatggtccaggaggcttc

SEQ ID NO: 655338 - DNA, 577 bp, Homo sapiens
gacatataaaaagaaatttattaggtggaaaagtcagaaatattaatcacagtagcaaatgtcatgcacgtccatgtgaagagaccaccaaacatgctttgtgtgagcaacaaggctgtttatttcatgtgggtgcaggcaagctgagtccgaaaaatgagtcagtgaagggagacaggggtggggctgttttataggattygggtgggtagtggaaaattacagtcaaaggggatttttctcttgcaggcaggggcgggggtcacaaggtgctcagtgggggagcttctgagccaggagaaggaatttcacaaggttaatcactcagttaaggtggggataactaaaaaggagtgcataaaaataatgttgtccaagttggcatcagagctggagagttttaagaggtttagaagcctggccgtcaatacctacaacagttatggaggcaaatgaaacaggcctttgaaaagaaggtaatgtggagttggtagcctccatattgattaagaaggggacctacttaccctctactgtaagagttacccgaagcatctgtgatggtccaggaggcttc

SEQ ID NO: 655339 - DNA, 577 bp, Homo sapiens
gacatataaaaagaaatttattaggtggaaaagtcagaaatattaatcacagtagcaaatgtcatgcacgtccatgtgaagagaccaccaaacatgctttgtgtgagcaacaaggctgtttatttcatgtgggtgcaggcaagctgagtccgaaaaatgagtcagtgaagggagacaggggtggggctgttttataggatttgggtgggtagtggaaaattacagtcaaaggggatttttctcttgcaggcaggggcgggggtcacaaggtgctcagtgggggagcttctgagccaggagaaggaatttcacaaggttaatcactcagttaaggtggggataactaaaaaggagtgcataaaaataatgttgtccaagttggcatcagagcwggagagttttaagaggtttagaagcctggccgtcaatacctacaacagttatggaggcaaatgaaacaggcctttgaaaagaaggtaatgtggagttggtagcctccatattgattaagaaggggacctacttaccctctactgtaagagttacccgaagcatctgtgatggtccaggaggcttc

SEQ ID NO: 655340 - DNA, 538 bp, Homo sapiens
ttttgtaaatattctgagtcaaacttaaatttcagcagtagatgacagcacaatgacctaaatttaacagcctagttcaagacccaatgagttcaggaggaaatggtctgaaaaagggagagtcagactgggtccaggtagtctgggtgacttgaaacatgtctcacctcccgcaggatgtcttctctctccacttcatccccaagtgcctatggtcttttctctcttggrgtttaaccactctgtcaattgtcctcacaagatcttgaggtttggtagcagtggatagctacaatggatgaaattatttcactgggaactaatgaaatgtaaactttggtctctaaatttctatttgcatttataaaattgtgcttaaattgcacagtctgtttgggcaaggtggctcatgcctgtaaacccggcacttgggaggccaaggtgagaggattgcttgagcccaggagtttgagaacagcctgggctctatagtgagaccttgttaccacataaaaattaaaacattagctgagcgtga

SEQ ID NO: 655341 - DNA, 546 bp, Homo sapiens
ctagttgcattacaattacaaaagatgactaaaaggaaagaaaacaaaaggtaaagtcctgaaaatctatgtgtataaaatacatccaaatgatctaaatgtatacaagaataaatttacaagaatatgaagaagctttatcctctaagtacctaaaatttgaaccaatccctaccatctcctttttccacaaaatacaatatactatacaattcctgttatagggaccactaggaaggaacatgtagtttaaaacacatagttaaaaaaattttggattcaagttcatcagagtaccaattttcctaaccatgtttycataaaggccatcggaagatgtcacactattcaaatgcccaatgataagacttctgattgagtcccaatcagttcaaccattatatccaattagaatatctttaggatataataccctatatgtacttaaattccccaaacaataattcacatgaagtaccaacatgtgccaataccaaaccctacctttaataaataaaagaaacacagggtagctgcactcaggga

SEQ ID NO: 655342 - DNA, 381 bp, Homo sapiens
tacctggctacgttcctttacagaaataatcacaaactataaaacatgcaaagattgaaacagagtacatgacattcacataaagacagttgtgatttaagaggcaggaaatgtaattatgtgctgctgacagtcttgtccttgcttatgaaagggcttagcaaacaaaaaattcccgtatcytgggcgctaccaagtgttgctatggcttgttggagagatcccaagaatcaacactgaaaatcacctctcctgacatagtgctttgtgaattgcgataagtagatttatatttaatttaggtgtgtgttgctgaattgatgaataaatgaactagatgctagaagtgtctatctctagaactcatccagaggtaatatg

SEQ ID NO: 655343 - DNA, 561 bp, Homo sapiens
gggtgccaaataagatacagaagactactttagaggctgcagcaaaagtgtgagaagaaaaaggtggtagcttggtggcaatgaagacggggaggagcgtatagaattcaagagattttcagaaggtaactgaagasatagaaatagatatatttacccaagaaggagtacagactaagaatcaaagaagggctaagtttgagccttgagggaacttaaacatttaatactggaatggaaaaggataaacctgtaaagagggctgataagaagatcatagaaagttagaaggaaaccagaagagtcttgtcatggaagctaagggaagaaagtatttctggcaatgggtgttgtcaatagcataaaatgctagtgagaggtaaaataagagcagcactgaaaaatctccctttgattttgtattcaggagacattggtgatccttagcaagagctgctttggtggatgactgtgagtgaaagaaagactgggaagtgagcaacagagacagagacatggtgacaaattatttgaaaaattcttctgttacaaaaaggaggg

SEQ ID NO: 655344 - DNA, 561 bp, Homo sapiens
gggtgccaaataagatacagaagactactttagaggctgcagcaaaagtgtgagaagaaaaaggtggtagcttggtggcaatgaagacggggaggagcgtatagaattcaagagattttcagaaggtaactgaagagatagaaatagatatatttacccaagaaggagtacagactaagaatcaaagaagggctaagtttgagccttgagggaacttaaacatttaatactggaatggaaaaggataaacctgtaaagagggctgataagaagatcatagaaagttagaaggaaaccagaagagtcttgtcatggaagctaagggaagaaagtatttctggcaatgggtgttgtcaatagcataaaatgctagtgagaggtaaaataagagcagcactgaaaaatctccctttgattttgtattcaggagacattggtgatccttagcaagagctrctttggtggatgactgtgagtgaaagaaagactgggaagtgagcaacagagacagagacatggtgacaaattatttgaaaaattcttctgttacaaaaaggaggg

SEQ ID NO: 655345 - DNA, 561 bp, Homo sapiens
gggtgccaaataagatacagaagactactttagaggctgcagcaaaagtgtgagaagaaaaaggtggtagcttggtggcaatgaagacggggaggagcgtatagaattcaagagattttcagaaggtaactgaagagatagaaatagatatatttacccaagaaggagtacagactaagaatcaaagaagggctaagtttgagccttgagggaacttaaacatttaatactggaatggaaaaggataaacctgtaaagagggctgataagaagatcatagaaagttagaaggaaaccagaagagtcttgtcatggaagctaagggaagaaagtatttctggcaatgggtgttgtcaatagcataaaatgctagtgagaggtaaaataagagcagcactgaaaaatctccctttgattttgtattcaggagacattggtgatccttagcaagagctgctttggtggatgamtgtgagtgaaagaaagactgggaagtgagcaacagagacagagacatggtgacaaattatttgaaaaattcttctgttacaaaaaggaggg

SEQ ID NO: 655346 - DNA, 556 bp, Homo sapiens
gcagagagcaaccgagctgaggcctrgatttttttccacagattatatttcccctggctcccctgacttaaaaaacagaacacagacattcaccagttcctttctttacaccctgaaaagcactaaagagactattagtagcaaacctctgcaaaagaacctaaagggtttgcaatttgctatcttcatatgtaattccaactatttttgaaacaagtaacaagaggaatcatagtccttcatgagaaaacaatgcaaggtaataagcgaagccctcagaaccaattgtattgtattactcttaaaagtaacaaaataccagactcttccatgcaataagatgctcagtggttaaatcagaaagataaatcattatcctgtgtggaatgatgaaagcagcccggggctgaggcatgggggtggcagggaaggcagataaaaagactactgtatttccctaaactcttatcaagtgatctatgttttcctggatcatgtagcaaacatgccttaaagaatgcatttacttctatggtgcccttttagaagacacctc

SEQ ID NO: 655347 - DNA, 556 bp, Homo sapiens
gcagagagcaaccgagctgaggcctggatttttttccacagattatatttcccctggctcccctgacttaaaaaacagaacacagacattcaccagttcctttctttacaccctgaaaagcactaaagagactattagtagcaarcctctgcaaaagaacctaaagggtttgcaatttgctatcttcatatgtaattccaactatttttgaaacaagtaacaagaggaatcatagtccttcatgagaaaacaatgcaaggtaataagcgaagccctcagaaccaattgtattgtattactcttaaaagtaacaaaataccagactcttccatgcaataagatgctcagtggttaaatcagaaagataaatcattatcctgtgtggaatgatgaaagcagcccggggctgaggcatgggggtggcagggaaggcagataaaaagactactgtatttccctaaactcttatcaagtgatctatgttttcctggatcatgtagcaaacatgccttaaagaatgcatttacttctatggtgcccttttagaagacacctc

SEQ ID NO: 655348 - DNA, 556 bp, Homo sapiens
gcagagagcaaccgagctgaggcctggatttttttccacagattatatttcccctggctcccctgacttaaaaaacagaacacagacattcaccagttcctttctttacaccctgaaaagcactaaagagactattagtagcaaacctctgcaaaagaacctaaagggtttgcaatttgctatcttcatatgtaattccaactatttttgaaacaagtaacaagaggaatcatagtccttcatgagaaaacaaygcaaggtaataagcgaagccctcagaaccaattgtattgtattactcttaaaagtaacaaaataccagactcttccatgcaataagatgctcagtggttaaatcagaaagataaatcattatcctgtgtggaatgatgaaagcagcccggggctgaggcatgggggtggcagggaaggcagataaaaagactactgtatttccctaaactcttatcaagtgatctatgttttcctggatcatgtagcaaacatgccttaaagaatgcatttacttctatggtgcccttttagaagacacctc

SEQ ID NO: 655349 - DNA, 610 bp, Homo sapiens
aggtctaatctagattcatgtgctacatttagctgatatgattcagtctctttttcttgtagaatatcccacattctggctttgtctgattgtgtctttatgrtgtcatttaacttgcttccctattctctgcatttcctctaaattgtacccaaagaattgattacagatggtctctgacttaggatgtttcaccttacaatttttcaaatttatgatggtgcaaaaggagtacacatttagaagccctactttgagtacccatacaaccactgttttttattttcaaagaaaaattcaataaattacatgagatatccaacacttcattataaaataagctttgtgttagatgattctgcgcaactgtggactaacgtaagtgttctgaacatgtttcaaataggctagggtaagctatgatgtttggtaggttagatgtattaaatgcatttttgacttacaatattttcaacttatgatgcatttatcaagacataaccccatatgaagtccaggagcattcatatattcaggtaaaatattttttcataaaatctttgtaggttaagttgtatacttcatattgtatcacacaagagtgcacatt

SEQ ID NO: 655350 - DNA, 610 bp, Homo sapiens
aggtctaatctagattcatgtgctacatttagctgatatgattcagtctctttttcttgtagaatatcccacattctggctttgtctgattgtgtctttatggtgtcatttaacttgcttccctattctctgcatttcctctaaattgtacccaaagaattgattacagatggtctctgacttaggatgtttcamcttacaatttttcaaatttatgatggtgcaaaaggagtacacatttagaagccctactttgagtacccatacaaccactgttttttattttcaaagaaaaattcaataaattacatgagatatccaacacttcattataaaataagctttgtgttagatgattctgcgcaactgtggactaacgtaagtgttctgaacatgtttcaaataggctagggtaagctatgatgtttggtaggttagatgtattaaatgcatttttgacttacaatattttcaacttatgatgcatttatcaagacataaccccatatgaagtccaggagcattcatatattcaggtaaaatattttttcataaaatctttgtaggttaagttgtatacttcatattgtatcacacaagagtgcacatt

SEQ ID NO: 655351 - DNA, 610 bp, Homo sapiens
aggtctaatctagattcatgtgctacatttagctgatatgattcagtctctttttcttgtagaatatcccacattctggctttgtctgattgtgtctttatggtgtcatttaacttgcttccctattctctgcatttcctctaaattgtacccaaagaattgattacagatggtctctgacttaggatgtttcaccttacaatttttcaaatttatgatggtgcaaaaggagtacacatttagaagccctactttgagtacccatacaaccactgttttttattttcaaagaaaaattcaataaattacatgagatatccaacacttcattataaaataagctttgtgttagatgattctgcgcaactgtggactaacgtaagtgttctgaacatgtttcaaataggctagggtaagctatgatgtttggtaggttagatgtattaaatgcatttttgacttacaatattttcaacttatgatgsatttatcaagacataaccccatatgaagtccaggagcattcatatattcaggtaaaatattttttcataaaatctttgtaggttaagttgtatacttcatattgtatcacacaagagtgcacatt

SEQ ID NO: 655352 - DNA, 630 bp, Homo sapiens
  misc_feature 98, 128: n = A,T,C or G
tggataaagaaaatatggcacatatacaccatggaatactttgcagccattaaaaagaatgagttcatgtcgtttgcagtgacatggatgaaagctgnaaccatcattctcagcaaactcacacaggnaacagaaaaccaaacaccgcatgttctcactcatgaatgggattgaacagtgagaatgcatggacacagggagagaaacatcacacaccggagcctgtcagagggttggggggcaaggggagggagagtattaggacaaatacctaatgcaygcgaggcttaaaacctggatgatgggttgataggtgcagcaaaccaccatggtacatgtatatctgtgtaacaaacctgcacattctgcacatgtatcctataacttaaagtaaaaataaaatttaaaaaagagttcccttctggtcttggagccaccactggtagaaaaaatctagagcagcacatgcaatagaactttttgcaatgatggagataaatgcttatatctatgctgcccaatatggtagccactaagcacatgtggctgctaaatttattatttttctctttcacaggtaaggaaacagtgcccacaaccatagttggtgaatggcagaagtgagatgtg

SEQ ID NO: 655353 - DNA, 630 bp, Homo sapiens
  misc_feature 98, 128: n = A,T,C or G
tggataaagaaaatatggcacatatacaccatggaatactttgcagccattaaaaagaatgagttcatgtcgtttgcagtgacatggatgaaagctgnaaccatcattctcagcaaactcacacaggnaacagaaaaccaaacaccgcatgttctcactcatgaatgggattgaacagtgagaatgcatggacacagggagagaaacatcacacaccggagcctgtcagagggttggggggcaaggggagggagagtattaggacaaatacctaatgcatgcgaggcttaaaacctggatgatgggttgataggtgcagcaaaccaccatggtacatgtatayctgtgtaacaaacctgcacattctgcacatgtatcctataacttaaagtaaaaataaaatttaaaaaagagttcccttctggtcttggagccaccactggtagaaaaaatctagagcagcacatgcaatagaactttttgcaatgatggagataaatgcttatatctatgctgcccaatatggtagccactaagcacatgtggctgctaaatttattatttttctctttcacaggtaaggaaacagtgcccacaaccatagttggtgaatggcagaagtgagatgtg

SEQ ID NO: 655354 - DNA, 617 bp, Homo sapiens
aatccatttacattcaatattattattgataagtaaggatttactcctgccctgccattttgtcatttgttttctgattgttttatgatattctctttcttctttctttccttcttgtcttcttctagtgaaggtgrttttctctgataataaaatttagtttcctgctttttattttttgtggatccattgtatgttttttgttttgaggtcaccatgaggcttgcaaatactattatcttataacccattattttaacctgataacaacttaacactatttgcataaacaaacaagcagaaagaaaactaataaaaacttatgctttaactatgtccccctgcttattaactttttgttgtttctatttatatcttattgcactatgtcttgaaaagttattgtagttgttacctttgattggttcttcatttagtctttctacttaggatgagtagtttatacactgcagttagagtgttataatattctgtttttcggtgtacttactattaccagtgagttttgtaccattgggtgattctttattgttcattaaatcattttctttctgattgaagtacctcctttatcattcttgtagagcaggtcttac

SEQ ID NO: 655355 - DNA, 618 bp, Homo sapiens
atggttattcagtgacttgtctggtattccctgtcagactgcamacccatccacacaggaattctttggagcatgccacagggggctatggaaggaataggttcatgcaggatgtgtgtagggccttttggtgatctaccctggaggccgtcttgctgtagctcaggggttataggagaacccaccctgttgagaacaactgtggaattctctagagccaaatccaaagaggacttatctctcaatgtgtgtcccccaccctaccccattgagagtggcacaacaatttaaggcctttattaagaaaaggtctaccagggtgagtgggggaagaagctgactttgggggaaatgcagtttgtcaagtggcaatggtatcttcttcctctttttgccttggggaagagaaggtatttgttttgttccttctactttctacaagattgaggggtttagtcttttctctccatagttagaaacacagtttattctctgaaagttactatgctcctaaacctgaaaccatcagaatgtgcagcactgcccatgaggggaaggagctagagagagatggcggaagaaagagggtgctggtgtggggcaggaggcagtctgctt

SEQ ID NO: 655356 - DNA, 530 bp, Homo sapiens
cacttcaggcaggatatggaagcagagaaagagacccaacctaagcacacacaccatgtaaatcctactttactgtcagttcacatctgaaggtcagttccaaatgcattttgcaaatagcataaagtggaaaaaaaaaagaaggcaaaaaataaaaagagttggcagtgtgtttattggagtggtcaatgttatctgtaagcaaatgggtcagcagggtgtccaagaattaccaatgcattaaggcagatataagcagccggctcacccttgtactgggtgaagrtaattttctagaacatgggcaatacacccttagttctgctcttagctgaacatgtaggggggtgaggctgggtttggaaaaaatgtactaaattggttcttttatggcttcaagactggccatctatgagacacaatgaaaattaatttgtaaccctggagaactgtttttttaggatgtatttttggattgcagcttgtctagctctgaatggaaaacacaaaattacattaagataacataa

SEQ ID NO: 655357 - DNA, 412 bp, Homo sapiens
agaaaatctttagaggaaatattcaagtatgtttgatttctagcaaatccagatagatagttttggcaacaaccaagtcataatttgaagtcttgttataggagctaraattttattcaagggacaactgacttgattagataagatgctgtgcactgcatgtttgcatcaacaaatgcacatgttgaaactctaacaatagaatggcattagaaggaggacctttgggaagtaatttggttttgatgaggatggagttcccacaatggggttagcatcctaataagaagagtaggagactagagccctcttctctcagccatgtgaacatacaacaagaacacctgcaaaccagtaagagggccttcaccagacactggttctgctggcccagattttaatctttgaattc

SEQ ID NO: 655358 - DNA, 424 bp, Homo sapiens
agggtaggaatgagaaaatctttagaggaaatattcaagtatgtttgatttctagcaaatccagatagatagttttggcaacaaccaagtcataatttgaagtcttgttataggagctaaaattttattcaagggacaactgacttgattagataagatgctgtgcactgcatgtttgcatcaacaaatgcacatgttgaaactctaacaatagaatggcattagaaggaggacctttgggaagtaatttggttttgatgaggatggagttcccacaatggggttagcatcctaataagaagagtaggagactagagccctcttctctcagccatgtgaacatacaacaagaacacctgcaaaccartaagagggccttcaccagacactggttctgctggcccagattttaatctttgaattc

SEQ ID NO: 655359 - DNA, 424 bp, Homo sapiens
agggtaggaatgagaaaatctttagaggaaatattcaagtatgtttgatttctagcaaatccagatagatagttttggcaacaaccaagtcataatttgaagtcttgttataggagctaaaattttattcaagggacaactgacttgattagataagatgctgtgcactgcatgtttgcatcaacaaatgcacatgttgaaactctaacaatagaatggcattagaaggaggacctttgggaagtaatttggttttgatgaggatggagttcccacaatggggttagcatcctaataagaagagtaggagactagagccctcttctctcagccatgtgaacatacaacaagaacacctgcaaaccagtaagagggccttcacmagacactggttctgctggcccagattttaatctttgaattc

SEQ ID NO: 655360 - DNA, 435 bp, Homo sapiens
atgtaaactcagagcgagaacacacttatcgtcaagggcatggtgctagaccattcatgagggactcgcccccatgatccaaacacctctcactgggccccaccgctaacactgaggattacatttcaatatgagatttggaggagacaaacatctaaaccatatcagccacttggctcatgagcccattggacaatgacaggaatggctgggggaaagccactcattgacatccacagaactggtcatcctattattaaaatcctcctctgcctaggtcaccattttgtgagtgtccataagggacacamatatcttcacaattttccatgtcttaccttagaagccccatcaccctctctttcacatctcctccagtacttatcccccagatgataggaccatgtccagcaatacctcttctctctggtattg

SEQ ID NO: 655361 - DNA, 408 bp, Homo sapiens
ctgaatgtttgaccataacataggattccagaacattccygctcttgtttgaatgtttgtccctcacatagcattgcagaacactgctgctggggtctgaatgtttgtctctcacataggattccagtacactgctacgattgtcagaatgtttatccctcacctaggattacagaacactgctatgatgctctgaaagtttgtccctcacataggattccagaacactgctgctgaggtataaatgtttgtccatcacatgggattccagaacaaagctacgagtgtctgaatgttcctcacagcagattccataacactcctgctgtggtctcaatgtgtgtccctcacaaaggatttcagaacacggctaagagggtatgaatgtttgtccctcatacagaattc

SEQ ID NO: 655362 - DNA, 412 bp, Homo sapiens
tattctgaatgtttgaccataacataggattccagaacattcccgctcttgtttgaatgtttgtccctcacatagcattgcagaacactgctgctggggtctgaatgtttgtctctcacataggattccagtacactgctacgattgtcagaatgtttatccctcacctaggattacagaacactgctatgatgctctgaaagtttgtccctcacataggattccagaacactgctgctgaggtataaatgtttgtccatcacatgggattccagaacaaagctacgagtgtctgaatgttcctcacagcagattccataacactcctgcygtggtctcaatgtgtgtccctcacaaaggatttcagaacacggctaagagggtatgaatgtttgtccctcatacagaattc

SEQ ID NO: 655363 - DNA, 447 bp, Homo sapiens
accaccttgccagccaagtgactgagccatcttgcagtggatcctccagcccccatcaagccccaactaagccactaagtttcatggtaatttcttacactgcaataaataactaatactggaccagtgagaaaaggagtcaagaataatctcagctttctacctttaataacttaatggatagtggtgctattaatcaagtcaggaaagagaaaggacaataattacacctatagtattacccaaagtcatgataaattattttccatatgctcttgctaaaatttatgtagtcattcaactcattttattgartatctaccatgaaaccggcaatatggaagaaccttctgatatagaactgaatataatttagtcactgccctcaagtaataagtctggagaatcaagaatctgaaaaatgtttgtagcttttgttcaaaattt

SEQ ID NO: 655364 - DNA, 645 bp, Homo sapiens
caaatattcccttactacattaaattaggaaacggaagtcccagaaaataactaggcagaaagataatggaaaggcatttcgtttatggacctcagtcacttatgaaaacattataaacttgctacagacaggaaaaggattgggaagactatatgctggcaagcattgtgtttcatatgcaaaattcttcctagaaaatctgccactcaaaacaggagaatagttttataaaaaccagctactctgaactaaatgaatgcctattgtgaggtataaattgaaagagaaagtttttaggaaatcytgaactttacatactcaaaaagaaccttgccagaacctacgtgtatggcgaggggtacaaagaaaatcctgcaaatttgtttattttaaaactttctacctagtgaatatatcttcagacaaaaatcagtacaaagaaaaaatatatcaataatcaagctgaaggaattattgtagcaaaaagaacgaaaaacatcatttttaaatagaattaaactgtgtatgtctacaaatagcattgcccaaacaatatatttgatgttatttgttgttttccaaacagaaatgtaatatgataacatttgtatgaaatagaagtaacagagaattttaaaagtaaa

SEQ ID NO: 655365 - DNA, 550 bp, Homo sapiens
ctggaagttgcaatgcgtctggtatgttagaggaacagtgcatggataagtagatttaatatatgtgcatatatatattcacttagaatgatttttaacacatgatggtgctcaaaaaatgtccaccagagtccatcatgtcccctttataagatgcytgaaggatattaggttgaaccacagaaagtttcctattttggaccatttttaacttatgaaatagcaatttcatatggttcagcttagtaactaaattagaactctacaaaaagggcaggtctttactagtccattctttcatattaagatttctaattgcacatttcccatctaataaaattctccaggaggaaacaagcccagtaatagtttctaaactgctctctaattctgcctttgttgtgtattcactttcatattggtgccacatcgagtacaagggcctagggtcatccctacagatcacttagtgttcagagcacagatgtataactcacaaatcaaaagcttccagtggaactcttctgattacttcctgaatgattgcagt

SEQ ID NO: 655366 - DNA, 550 bp, Homo sapiens
ctggaagttgcaatgcgtctggtatgttagaggaacagtgcatggataagtagatttaatatatgtgcatatatatattcacttagaatgatttttaacacatgatggtgctcaaaaaatgtccaccagagtccatcatgtcccctttataagatgcctgaaggatattaggttgaaccacagaaagtttcctattttggaccatttttaacttatgaaatagcaatttcatatggttcagcttagtaactaaattagaactctacaaaaagggcaggtctttactagtccattctttcatattaagatttctaattgcacatttcccatctaataaaattctccaggaggaaacaagcccagtaatagtttytaaactgctctctaattctgcctttgttgtgtattcactttcatattggtgccacatcgagtacaagggcctagggtcatccctacagatcacttagtgttcagagcacagatgtataactcacaaatcaaaagcttccagtggaactcttctgattacttcctgaatgattgcagt

SEQ ID NO: 655367 - DNA, 550 bp, Homo sapiens
ctggaagttgcaatgcgtctggtatgttagaggaacagtgcatggataagtagatttaatatatgtgcatatatatattcacttagaatgatttttaacacatgatggtgctcaaaaaatgtccaccagagtccatcatgtcccctttataagatgcctgaaggatattaggttgaaccacagaaagtttcctattttggaccatttttaacttatgaaatagcaatttcatatggttcagcttagtaactaaattagaactctacaaaaagggcaggtctttactagtccattctttcatattaagatttctaattgcacatttcccatctaataaaattctccaggaggaaacaagcccagtaatagtttctaaactgctctctaattctgcctttgttgtgtattcactttcatattggtgccacatcgagtacaagggcytagggtcatccctacagatcacttagtgttcagagcacagatgtataactcacaaatcaaaagcttccagtggaactcttctgattacttcctgaatgattgcagt

SEQ ID NO: 655368 - DNA, 533 bp, Homo sapiens
atgtgtcatcattggatctaatctggctgccatttatttctcttcagagaagcagacttgtttcttgttctcgatgaaatatgtcttaaattctgaatgcactgtgctgtgttgcattcgtcattacatagctacagggaatgaaaatgaaaacaaccaattttcttaattaaagagttctagtaagacaagcattgctctatgcaccacttttcatttgtcttggcaaatagtaacgacaataataacaatactatgaatttagacagttcctttcttccaagaagttcaaagctctaatgcgtcatgagaacagacacacaggtagtagtaaacttggaaaggagaaataaatgttatgtgtgccatattaaaacacaaaaacaaaaccacaatttatttgatgaatattttttcttcagatggatgcagtatggtgtgagaaagaaaaagaaaaacacacaraacttaagacgcagatgtgtgtgaacctcagccctgccacaaactagctgggggtccagccttaaaca

SEQ ID NO: 655369 - DNA, 587 bp, Homo sapiens
ttattaataggcatactggttttagggcttatgtctcaagtttctataaatttggttagtgtgacttggcctacccaagactgactgcctttaggacaatatcaagattgagtttcagagactgcagggctgggaggcagatacaagtatgttttgcgtacactgggatgatgctgctctgtggaaaatcttggaagaaggagagcaagttcacctttccctgcagacagcctcatatctttgtgtrctttcagtcctagcactgggcaccaaagggagattcagtgaggctgatatgccagtccttggtttgtttgttcttagatctacccctcgcccctccctgctttacttcatagcacagggaggatgacctgcagtctgtgtttcctaggcccccatgctagttggcttctgtctggatttgtttggccaatgggaagtactggcaagaaattggaaggtggacagaaaggaaaagccaggggatttctctctgcctctcgcagccttggacaacatctccaggagtggtaacatttcctctatggttcatggtggatccaggttttatgactcatagctta

SEQ ID NO: 655370 - DNA, 519 bp, Homo sapiens
agcaggaagtcacaagtgacttgatgaagatattattatttaggtccatgaatgacagtgttcgaygagaccaaaatggaagaaaacattagttccttttgtaacttgttttcttagttctaattatttcagaacatgcattattcccacagtgtcccatcctctcctcttcttcccattgctctttttaatcttcacatcccacttctgcctcttatgtggaaagcccaaagtggaaagatcaatgaggaaaatgagtactgtatggactatcatcagcattcatccaccctgagttcaagaggcatccccctgtggagagctcagtaagaactcagtcaaacctagactgtccatgaagcaccacgggttaataaataaagaacagaggaataagagattaagacactaaaggaatataagataaagttagagaaacccaagtagctgcccaggacactagctgtattaggatgccaaataggtcccccaaatctcaaggacttaatactacaaaaa

SEQ ID NO: 655371 - DNA, 619 bp, Homo sapiens
tccagactatgacagaataaattmttttgctttaagtcagccagtttatggtcatttctcacaagggccataggaaatgaacacactgtttatatggaattacatattggatattttagggcaaatgcaggagagttccactgaaaatacgattaacatccttttgaatcgcacagatactcaattccttctgagaagggcttcatgatgctaagccactctgccaggctgtggctctccccatgcttgcggctgcacttgctcctcactgtgaaaggagctaagcactgtgtcggcggaacctaacgatggaaggagaggggaaggggccaccgaattgctaatatgaggggacggcaccttaacaagcttcgaattatcagaaaaacacaaagcctattattaaagagttcaacagatggttactgtgttatcacagatgtacagaaaacctctttgttctaaaaaaagaaaaaagaaaaaaaaaaagattcctgtcctttctcagactgtctcgattaggtcaaattcactaactccacagcaggcttctctctggttccacatattgagtcagcagggagcacagcctcgggaatcgaatcacaaacagggaagg

SEQ ID NO: 655372 - DNA, 534 bp, Homo sapiens
gcaaccatcgtacctaggatggatgtgttcttcctctcactttcaggaatgtcctactctgtctatggagtagctgttctttcaccacttgcttttactttgcactgtggactcgccctgaattctttatcgtgtaagctctaagaaccctctcttggggtctgtatcgggactcctttctggtaacataaggatcaaaaatttcccaaatttttaagacatgtatatgcaaatccaagaatctcaatgaacwccaagtatgataaaacaaaaggagtgtaggcagaggaacaaaattgtcaactggaaattttataattagcaaaactgtccttcaaacatgagaggaaaaccttctggttctaaaccagtatgtaaggagcttgatagtcatactttatcctaacaactagtaaaaagttgaacaaacaaaaaactcaacacctcttctcagatctgtcatggaaatgagatcagagagcaaaccaaggacccccaaattggagagacagacaggcagatacatagaagcaa

SEQ ID NO: 655373 - DNA, 534 bp, Homo sapiens
gcaaccatcgtacctaggatggatgtgttcttcctctcactttcaggaatgtcctactctgtctatggagtagctgttctttcaccacttgcttttactttgcactgtggactcgccctgaattctttatcgtgtaagctctaagaaccctctcttggggtctgtatcgggactcctttctggtaacataaggatcaaaaatttcccaaatttttaagacatgtatatgcaaatccaagaatctcaatgaactccaagtatgataaaacaaaaggagtgtaggcagaggaacaaaattgtcaactggaaattttataattwgcaaaactgtccttcaaacatgagaggaaaaccttctggttctaaaccagtatgtaaggagcttgatagtcatactttatcctaacaactagtaaaaagttgaacaaacaaaaaactcaacacctcttctcagatctgtcatggaaatgagatcagagagcaaaccaaggacccccaaattggagagacagacaggcagatacatagaagcaa

SEQ ID NO: 655374 - DNA, 358 bp, Homo sapiens
atttcatagcaatgtagggtaacaatgtattatattttcaaaatagctagaagaggactygaagtgtttccaacacatagaaatggtaagtacttggccaggcatggtggctcatgcttaaaatcccagtgctttgtgtggccgaagtggggggattgtttgaggccaggagttcaagaacagtctgggcagcagagtgagccctgtctctacaaatttttttttttttttaaataagcaaggtgcgttgtgtacctgtagtcctagctactcaggaggcaaaggcaggaggatcatttgagcctaggagtctgaggtcacagtgagctctgatcacactactgcactgcagcctggg

SEQ ID NO: 655375 - DNA, 358 bp, Homo sapiens
atttcatagcaatgtagggtaacaatgtattatattttcaaaatagctagaagaggacttgaagtgtttccaacacatagaaatggtaagtacttggccaggcatggtggctcatgcttaaaatcccagtgctttgtgtggccgaagtggggggattgtttgaggccaggagttcaagaacagtctgggcarcagagtgagccctgtctctacaaatttttttttttttttaaataagcaaggtgcgttgtgtacctgtagtcctagctactcaggaggcaaaggcaggaggatcatttgagcctaggagtctgaggtcacagtgagctctgatcacactactgcactgcagcctggg

SEQ ID NO: 655376 - DNA, 597 bp, Homo sapiens
agggacatagcaggaaaagatctcatcacctgccattatcaggctgatgaataattcagagctctccatcagagccgagaatttcaggctacgctgtgctctacacttgcagggagggggaagcatgaaggtgctcattgctgggattaaatgggggcccaggaaattcacttctgctccagactgtgtgggcatcayaacgggtgggggaagcaggcatgaaagaagatttgcctctttggaaggtggccaggcaggttcaggggccaagagccagcaggaacctcctcaaagattcctgactgttatgaaattttggtggccagtgcagaccccctggcacttatgtgtccaccactgtagtcagaaaaagaggccgcagctcttgtttccttgcctgctggtgggttccagaagagcaagtaggtcagtctcctggatatgctcctcactcgttgagcacttcatcatacccccatttctgctctctccctgtgtatgagaaaatatttgcactgtgatcctcgtgtaacagatttagggtcagctggcttctatggggaatctcaagacagtgtctaactaccagctgtgtga

SEQ ID NO: 655377 - DNA, 400 bp, Homo sapiens
tggtgtttcaccccaacaccatgactatgattccctttgaacatccaaggagcctacatgataacccaatgcaataataataataataataataataataataataatgttatagaaattttgaggctatctcaatgtttatccataaaatgccatactgtataatactataaagtcaaaaaataatgattgaagttcttttcattttttaaaactaatgagaacaggaagaggctgggagaaagtaataaaggtttaattatctataaattcaatagtctgagtgatcagactatttgttgyctattagaatcatagtatcatatataatcctagagttgaagaaaacagaaatgagtcattttttccaatttctcatccagtgcttctttttgctaaa

SEQ ID NO: 655378 - DNA, 596 bp, Homo sapiens
actagggtgatggtagaaccattcatggaaatggggaacacctgtaaaagtgggtctggctgacacatataattcaattttgaattcattgtgattgagaggttgtggagatgtctagatgaccccaagacacacaggttttgattggagactagatacacactagagatagggtttggatgttgtcatcacatggggatacatcacctagagaaaaagggtagcttaaactgagaggatccttaaaagagctcttatcaccatcaacatataaggtgaggcagaagaaaaggcatgagggccagaagaaatatgtagtgaggcagggagatcaggagacagtaatatccytgacagcaatgctacgtaagagggaatagttaactattatacccacatattctttgctgcttctcattctcaggcatctgaaattcaaaagtatgtcttccagcaagacccgaggacaggtaaactggctccatattgcacagaaaaccttttttccttctttaacataccatttcccatgtactatttaagtggacaatattatttactttaatcatgaaataaccaaagtgtatttctagtat

SEQ ID NO: 655379 - DNA, 586 bp, Homo sapiens
tatcatgtatttgttttttgtatttcaatagataataaaatgaatcaatccataaaatgcaacataagatatacatatactaggcttatatgcatataagcatgtggaagggtatgtgtatatttgtaaaaatgaaaatgaaatgtttaatcaacaaggtaaaatgagcaaagcattagcacaacacctcttttgggatacaatatttacataccaaaacttattttcactgaggaatttacagatggygtagaagacaggaatgtaaataatcacaaaacacatgatcacttcaatgaggggtgtgtatgaattgctgccggagctcagagttgagtcatggcttagtggacagagaacactgcaaaggaagtgacattgtagttgtctcagatgatgagcaatagttccacatgtgggtaggagatgaaagggcatttcaggcagaagaaacagcatttgcaaagatctgacatagtgaaatatcaaggcatgcatagagaatgaaagccactatgcatgccacctttgatgctttctggagtggtaggggggtcgggaggtagtgatgatgagaggatgtaaa

SEQ ID NO: 655380 - DNA, 616 bp, Homo sapiens
gttaacttggagagccaggtactggaatgcttttcatttatataaggaattaataagcccaattattctgaaaggaagggaggctgcagggacattaagagggcccatgaggacgtgggagttgtccttatgtgcccctgtgccggcgctgctgctgtggagcctatggaataaacaggtagcacaggcttggagatacgtaataccctcaagagctgccttaggaagctggcgtctgtgtctcccatgccactgtgcttcccacctttcttgcacattctaggaaacggtctgggtgatatcattcctagatttcctcatctctgctgctttccttatgctgttccaacagcttagaaactcttctattgctttttttttttttttttttttttttttttgagagggagtttttctcttgttgcccagactggagtgcaatggtacaatcttggcttaacgcaacctctgcctcccgggttcaagtgattctcctgcctcagcctygtgagtagctgagattagaggcatgtgccaccacgcccagctaattttgtatttttagtagagacggtttctccatgtttgtcaggctggtcttgaacgcctgacaggt

SEQ ID NO: 655381 - DNA, 502 bp, Homo sapiens
gcattggacagtgcaggcataaaatagttccatgatgacagtaagttcttttgggggcaatgtctctagacctaccataacctaaagctgcaaggatgagaagcatgaattctccaagtgggtcactgggagtgatcctgagtggagccattccgacctctagcccttggttcccagacccatgtattctacctgttgggccacagcaccatgtaatgatcgttcatttagattrttcctttgggttcgttaggttccttcctggaacatggtaccctgtcctgcaggggatcatctccaggctggccccctcacctgagccttcagaaggccattccattgctccatcaggctggtagcttctgagtgattcggtctgtgagaggctccatagtcatgtgaccactgctacctttcctttgctctcatgcagtttccttggtttgaggtgatgttatgtaggatctgcgttagtggatcaaacactctgtaaaccccagac

SEQ ID NO: 655382 - DNA, 593 bp, Homo sapiens
ctcagttaagctcctgttttactaaggaaatttaagtaagattctgtctcttgcaagaaaataacatctaagacatcttcgaatttaatgctgctttaattttgtttataccagtggtccccaacctctttggtaccagggattcattttgcggaatataatattttcatggacagggttggggggaaggtttcrggatgaaactgttccaccactcagatcatcaagcattacactctcataaggagcgtgcaacctagatcacttgcatgcacagttcacagtagagctggtgcttctatgataatcaaatgctgccagtgatctgacaggaggcagagcttaggagtaatgctcactcatccacctctcccatcctgctgtgtggcccagttcctaacaggccacggaacggtaccagtttgtggcctgggggttgggacccctgttttacactataacatttgcacacgtctctcatggcctgtctttcagatctgctgtttgtctcgactcaagtctagctacctgaaaattagattttttttttaaattgaatttgaatatcttaaagttgaatacacagtctccac

SEQ ID NO: 655383 - DNA, 622 bp, Homo sapiens
gcctccagttctgtccaagttgctgcaaaagatattattttgttcttatatggctgttctttttattccattgtgtgtgtgtgtgtgtgtgygcgtgtgtgtataggttgatcccatatttttgcaattgtgaattatgctgtgataacatatgagtgctagtgtcttttttatataatgactcttttccttttggtaaatacccagtagtgggattgctggattgaatgatagatcttcttttagttttctgagaaatctccatactgttttctacagaggttgtaccaatttcccaccaacagtgtataaatgttcccttttcactgtatctgtgccagcatccattgttttttgactttaaacaatggccattctccctggggcaaggtggtatctcattgtggtggttttgatttgcatttccctgatgattagtgatgttgagcattttttccatatgtttcttggccatttgtatatcttcttttgagaaatatctattcatatcctttgctcactttttaacggagttatttttttttcttgctgatttgtttgagttccttgtagattatggagattattcctctgtcaggtgtatagtttgcaaatattttct

SEQ ID NO: 655384 - DNA, 622 bp, Homo sapiens
gcctccagttctgtccaagttgctgcaaaagatattattttgttcttatatggctgttctttttattccattgtgtgtgtgtgtgtgtgtgcgcgtgtgtgtataggttgatcccatatttttgcaattgtgaattatgctgtgataacatatgagtgctagtgtcttttttatataatgactcttttccttttggtaaatasccagtagtgggattgctggattgaatgatagatcttcttttagttttctgagaaatctccatactgttttctacagaggttgtaccaatttcccaccaacagtgtataaatgttcccttttcactgtatctgtgccagcatccattgttttttgactttaaacaatggccattctccctggggcaaggtggtatctcattgtggtggttttgatttgcatttccctgatgattagtgatgttgagcattttttccatatgtttcttggccatttgtatatcttcttttgagaaatatctattcatatcctttgctcactttttaacggagttatttttttttcttgctgatttgtttgagttccttgtagattatggagattattcctctgtcaggtgtatagtttgcaaatattttct

SEQ ID NO: 655385 - DNA, 514 bp, Homo sapiens
ggtaggagaaaagtgtggagttatacaraaattagactgaaggggtaaactgaggcagaccatattaattttgtcagtcaatttatttataccctatattattgcacagatttaaggtatctcatcaaatatattcaataaaacagggttacaaattaggaattcaaacaaagaacaaatgtgggttggatatttgtgaaataaggttgaaattatgaataatagttaaagacagatcacctgttttgttttgagcttcctagctgccaactcaggggaaaaaaaaaaaccaaccaccatgatatctattaaataaaacgaatctaggtgcttagaagaagtaatggcccctggaatgcagtaagtgctccttcagtttcactggtaagtcactttgcagataggaggcttcagacatggtaagtagagatctggggagatctgtccttgaaaagcatgagcttgatgaagagggtaagggtggctgaaggtgaagtatagggagcatggcctc

SEQ ID NO: 655386 - DNA, 527 bp, Homo sapiens
acaatttaaaaagcaaaaacaaaaatgaaaaacaaggtatacaggcaacaaataacatgatgaatggaatggtacctcacatctcaatactaatattgaatataaatgacctaaatgctccacttaaaagatacagaactgcagaatggataagaattcaccaacaaactacctgctgccttcaagagactcacctaatacataaggactcacataaacttaaaggggtggaaaaaggcattttatgcaaatgggcaccaaaagtgagcaggagtggctattcttacatcagaaaaaacaaattttaaagcaacagcagttaaagaggacaaagggacattacaaaatggttaaaggccttgtccaacaggaaaatatcacaatcctatacatatatgtatccaacactggagctcccaaatytataaaacaattactaatagacctaagaaatgagatagggagcaacacaataatagtgggtgacttcaatactccactgacagcactaaacaggtcatcaagac

SEQ ID NO: 655387 - DNA, 550 bp, Homo sapiens
tgagttccgttgttttgatttttagatcccacaaataaatgagaacatggcaatgtttgtctttctatgcctggcctatttcacttaacatartgacctccagttccatccatgctgtcgcaagtgacaggatctcattctcttttatggctgaagagtactccattttgtatgtgaaccacattttcttcattcatctgttgatgaacacttagggtgtttccaaatcttagctgttataaacagtattgcaacaaataaaagagtgcagatggaaaattgattttgatggcttttttctttaataagacattaatttcttcatgtataactggaaggcaaacaaatgatccatttgcttagtttattcttgaatccataatataagtgacagaaatggattattaaaatatacttgaatttggggaagaatgatatggacacattttaaatcaaaacatgatgaattggctgtttaacctactacctcattggccaatctggggcaagatgaaagtatttgtaaacactgttttggcaattatgtgta

SEQ ID NO: 655388 - DNA, 420 bp, Homo sapiens
tctttgggtcttcatttctgaagactccatgtcatgtaaaactttgattaaatraatgtatcatgcattacttttgctaacctgtcttttgttatagtagtgtcgcctgtgacctttatgatgggtaaggaaagatttcacatcttttctacccctacattatcatactgtgaaattttattatatgctgtcttgccctcatagaaagagaattttggagtttgaaagaatcctgctaatcatgaaatctggtcctttatttaacagaaaaattcccagagacatgaaatgattagtactgtttcacagagaagcagagggagagccagaccctcagtcagtccaggctctgctgtctttggaggtggggtttcaggtctccccagcagggttgtgaggtcccaaagaacgggaggcagg

SEQ ID NO: 655389 - DNA, 420 bp, Homo sapiens
tctttgggtcttcatttctgaagactccatgtcatgtaaaactttgattaaatgaatgtatcatgcattacttttgctaacctgtcttttgttatagkagtgtcgcctgtgacctttatgatgggtaaggaaagatttcacatcttttctacccctacattatcatactgtgaaattttattatatgctgtcttgccctcatagaaagagaattttggagtttgaaagaatcctgctaatcatgaaatctggtcctttatttaacagaaaaattcccagagacatgaaatgattagtactgtttcacagagaagcagagggagagccagaccctcagtcagtccaggctctgctgtctttggaggtggggtttcaggtctccccagcagggttgtgaggtcccaaagaacgggaggcagg

SEQ ID NO: 655390 - DNA, 614 bp, Homo sapiens
cggtaattcatttttcataattgttgcttagagattctaaccccagttcccattacccatcctgtctcacacacaataaagtgtcatgtctgagtcactaaatgtctgcgttggagtgagtttgaattgtctttaatgacagactcacttcagaggaggtgtggttttcttgcttttttgtttttttgttttttcacctctgtaggacttttccaagtggctccgggtcagtgaaaagttattaagagcagcttctacttctgtcctaattaaaaattgtgcaaaacaaaaaaatacatctttttgacacatttttttctgaagtaacctcatatttttttccttcaaaaattgaaatcaaaaggtaaaataagtatacaattttaatttctgatactggcatagtgtttgtatctgactatcttcatggagcaaaagtcatggagataaaagataaaaacttcacaattattcagttattttgtttattgttaagtttaaatcctatttgatttagcattttattttctataaatgtttaaataaacattttatagaaaagcccaatcactaycacctcctcaaatcactgaggttgcctctaacctgagtgt

SEQ ID NO: 655391 - DNA, 576 bp, Homo sapiens
aacagtacaagtaaagttattaccagaaatatacagaaagcatcaaggtaaaatataagaattattccrtttgaaaggggtatgatatgcacaaagatgaaaattgagctcctataaaataacataaggatttgaaataaagacacaaaacttactgtttagagttagtatcattgactataaaaaccaagacaatcttaattataacaatgaggaagataacagaaattcagaatatcaaaaatatttttatgtagaaataaaaacaaaacatttaattttagaaatatattatttaatgcatttttgttacatgtgtagtgataaaataataaaataaatttagaaagatatattatttaataagatataaaaatctgaggaccaatacagtattgtggttaaaaccatggattttgacaggaactcctttggttaaaattgtgactcatcactaagagtataatggtgaataagttacttaacgttcctttgcaccccttttcttatctaaaacaaatatgaaagggatctgactcatagcagcgttctgagtaatataacagacatacataa

SEQ ID NO: 655392 - DNA, 469 bp, Homo sapiens
tcattatcccaataaccaaaaataatatctctatcacaggcaatagtgcatattggctaagagattgggcgctggagtcagacaagagccagactgcctgagttcaaattccagctcagtcatttattaagtgaatgtgtaaccacacaaaaccagtctggttcttcaacttttatgtaaaaaagttatgaatagtttttcagttgccatggactcccaggctgaaggtcccataacctgaacatgcccaaatgaaccaaacttgcaatgatgggcgggacttaagtgctcagcccaagaagtgggactgrattaaaaaggggacactgcatggcaagatccaggatccaatcaaatggagcccttgtggtaccccatggcaggattcagtcagatcatgcctcccagcatcatctcatcacaagacccaatcagataacacttcattaccctattcctataaaaccca

SEQ ID NO: 655393 - DNA, 548 bp, Homo sapiens
ttatacatgtggcaaataaacatttataagttgctcaacatcatatgtcattagttaattacaaattaaaacagtatyaagaagctatacacctattagaatgggtataataaaaaaaaaacctgacaataccaatttctgacaaggatatggagcaccagaagctgtcattcattcctggtgggaatgcaaaatgatgcaaccactttggaacacagtttgagtcttgccaaatgattcaacgatttcactcctaggtatttacctaaatgggttgaaaatacatgtccacacaaaagctgcatataaatgcttattgcagcttgattcataattgccaaaaattggaaggaaccaatcatcattcaaattgtgtaagggtaaacaaacttggtatgtacacactgaaatattagtcagcaataaaaaagttaatcatcaagccatgaaaatacatggcaaaaccttaaatgcacactgctcagtgaaggaagccagtctgaaagatgatatactgtatgattttaatgataagggattctggaaaa

SEQ ID NO: 655394 - DNA, 523 bp, Homo sapiens
gtgtaagggtaaacaaacttggtatgtacacactgaaatattagtcagcaataaaaaagttaatcatcaagccatgaaaatacatggcaaaaccttaaatgcacactgctcagtgaargaagccagtctgaaagatgatatactgtatgattttaatgataagggattctggaaaaggccaaattctagaaacattaaaaaatcagtcattgtcaagttgtaggtgcagaggaggaaaggtattgatttaaaattgtaatataaaatttatacaaataactagtgtggactattgcatcctaccctagttaccaccactgttaacattattcagctgctctttttccctgtccaggtcccatgcccgtatctactgtgacagtcacagtagaacctcttgaagtaggccagcttcagcatgacctgtttctctaggatgtctgcatgcagctctgtctattacaatggtgtaatacctacatggcaggcatttggcatgaggaaagtgtcccaacttaaacaa

SEQ ID NO: 655395 - DNA, 586 bp, Homo sapiens
atgttctaagctcatgagtctgtctcccatccaaatgacagtttgtctaagatcattaatttgatttgccaatttttgatcaatactagattgtgaattccacaatcttgtagaattyttttgccaatcattaacaaagtttactgactgaacagaagagtgcaatgcaactcctgctacagcagccgtagctgtgactgcaattaatcccataatcactgcaattaaagtaaaaatgaatcttttggatctatttaaaacaccttttaatacttcagtcaaaatatggacggatggtgaggcctcccatggtcggtccatggacacagggatccacacgccctctcttgctctcaccagcagaatacggtgttgccaattaaaagttgaatcaatgcaagtaagcaatctacaattttcacaggttatagtctgggagtctggtttaataactatatttcctacaactagcatataagggggctttacgcaactttgtaaaggaactgttagactggaatttaggtcgatagtataaaatggcttacaatctcttgtttctaaagtttgatttccagaccaaatt

SEQ ID NO: 655396 - DNA, 645 bp, Homo sapiens
taagtctttacataaaataacactgcttattgatttttattttaaatatttgttatgcttaatttatatggttggttttgttgatattttctttattaaggaaacaaaatacatctctcgtactgtcttgcttttttgagatagagcatagcctttaattaatataatctaaaaatattatatacttgattaattcaggttcataaggattagagtaaggacagagacgtaggaagtgaataaaatcattyagttaagacttggttttcttattagtgctttgggccattttgctgggtgacttaactactggcaaaatttgttttcttactcattctttttttctttgaactttgtattattcctcatactctttgtcattaatgatgaagaccctaattaccaacctgtctatgctaattgtatttcactattcctagcttatttctcacacacacattttcagaagctgttaccagatcatctttttttaagttcatagtataagaatttttcttcagctcccagagttgatgaattattgaatcaatgatggttttaaagatggtttaggaaggcacactagtgtgagaggaatttttggatgaagcccatgggtagaagcagggcttaacatatacagtt

SEQ ID NO: 655397 - DNA, 513 bp, Homo sapiens
ggtctcatatttttataaatgtttttgatattaagtttttgatgctttggttgatattgcattgagtggagatatagtaatctctaaggacaaagactagattaaaatatttatggcaaagctggtaatgaaacaagctcataaggaaataacaacatttaaggaaatacatcattctatatctggaacaactgcctcaagagagttaggtttggtcctaatgaatcaaagcaaataccaaatgaagattaatcattgttatcagggcaagagaaaggggctttgtatatcttggtaactattgaaactggaaaggctatcagtacaaattcacaacagtatgataaagcatagaattttctctgtaggaattattattccagacattaagagtctctctaacctctccatactctcttccctgctctaatcactccagtctttctggtctccttactyttccacaaacaagccaagaatgctctcacttcagggcctttgcactggttgttc

SEQ ID NO: 655398 - DNA, 608 bp, Homo sapiens
aatgtcatattgacaagctgcactagagggcaagagagagaagaattccagcttcagctacagttcaacagaaaatagagaaggtaaacttgaacaatcacccttgggaagttagtagaatctgtttaaaagttgctttcagatatccagaatttatttaggaagaaaatgactccataaagtcggtaaaaaatattttcatatctcttcctgaagataattcattggtttgcatgaagaaaccttttttatttttttaaaaaggaaaaacaaaatttatttttgtgagaacaaatacacaaggaaaatattatgtagcttcaatagggtaataattttgcaaaaaaaaaaaaacacacaagctagacaatttcttgacctttcatttctgcaatcagtcagttggatgtctccctcttcctctgatgagatttagagctggggactcaatgtgttggcagtgcctttgagccaagtactgtcatgttctggtaaccatatctcttattagaacaaatatgaattcaagtrgatagcaagacgacatcccagtggaaattgtcgcacttggttatttatctgtcatcagtctactgaactagcaacga

SEQ ID NO: 655399 - DNA, 608 bp, Homo sapiens
aatgtcatattgacaagctgcactagagggcaagagagagaagaattccagcttcagctacagttcaacagaaaatagagaaggtaaacttgaacaatcacccttgggaagttagtagaatctgtttaaaagttgctttcagatatccagaatttatttaggaagaaaatgactccataaagtcggtaaaaaatattttcatatctcttcctgaagataattcattggtttgcatgaagaaaccttttttatttttttaaaaaggaaaaacaaaatttatttttgtgagaacaaatacacaaggaaaatattatgtagcttcaatagggtaataattttgcaaaaaaaaaaaaacacacaagctagacaatttcttgacctttcatttctgcaatcagtcagttggatgtctccctcttcctctgatgagatttagagctggggactcaatgtgttggcagtgcctttgagccaagtactgtcatgttctggtaaccatatctcttattagaacaaatatgaattcaagtagatagcaagacgacatcccagtggaaattgtmgcacttggttatttatctgtcatcagtctactgaactagcaacga

SEQ ID NO: 655400 - DNA, 596 bp, Homo sapiens
agacagttactaaacacactttcaaatgacccttctcagcttaaatagatcaggtggatggtttgtctctcattgcattaggatgatgaattacaaagatttgctcttcgtgtattactgctgtggttcatgaaactcacagttcccatgagtatgtagatattatggagcaaagcaaatttattttcatgtctctcttccaaatagagctgagtttataattttctgytaaaaggttgtgttgcgaaatttggctggtcagatgacatttggaggccatcaaattataattgacgaataaacacaggagactatttttttcccagacttaaattatggagctgtctttgtcataagagatggaagtattatacaacttttgctttagtctgtactccatttggctattctcatcccaaggccacatccttttaaatcttgttaaaatacattagggcttaatgtatttaaatcttgttaaaatataccccttgtttatattagggattcactaagagaaggtgtcaatgatgtaaacattacataaaagtaaagactgcagagatgaaaacagtgcttaatggagctgctttgct

SEQ ID NO: 655401 - DNA, 596 bp, Homo sapiens
agacagttactaaacacactttcaaatgacccttctcagcttaaatagatcaggtggatggtttgtctctcattgcattaggatgatgaattacaaagatttgctcttcgtgtattactgctgtggttcatgaaactcacagttcccatgagtatgtagatattatggagcaaagcaaatttattttcatgtctctcttccaaatagagctgagtttataattttctgttaaaaggttgtgttgcgaaatttggctggtcagatgacatttggaggccatcaaattataattgacgaawaaacacaggagactatttttttcccagacttaaattatggagctgtctttgtcataagagatggaagtattatacaacttttgctttagtctgtactccatttggctattctcatcccaaggccacatccttttaaatcttgttaaaatacattagggcttaatgtatttaaatcttgttaaaatataccccttgtttatattagggattcactaagagaaggtgtcaatgatgtaaacattacataaaagtaaagactgcagagatgaaaacagtgcttaatggagctgctttgct

SEQ ID NO: 655402 - DNA, 606 bp, Homo sapiens
aatccacattcaggaaataatactgaagttattttgatgctcttcagcttgtattgcatgtctttcagttccttatctagagtcagaattttgaaatgtttcttcagttgcttttccagctttttgasccatttcatagcatcccacaataatacaagcaggggaagatggaaatttgcagatgagtggaggtgtgatgctgatcacaggagtctccctttatttgtgggagatacatttcaatatgcccagcaggtgccagaaactgcagatagtaccaaacactatatacactacattttttcatatacctatatgcctatgatagagtttgatttataaattaggtacagcaagagattaacaaacaataactaatgataaaatagaacaattaaataaaataagaattatttaaacataagcactgtgatactaagacagtcaatccataacttagactgctactaagtgactaacgagtgagtagatatacagcacatatatgctggacaaaggaatgattcatctttcagtgggacaaagtggaccagccagaaattttatcatgcctcttagaataataagcaatttaaaacttataag

SEQ ID NO: 655403 - DNA, 606 bp, Homo sapiens
aatccacattcaggaaataatactgaagttattttgatgctcttcagcttgtattgcatgtctttcagttccttatctagagtcagaattttgaaatgtttcttcagttgcttttccagctttttgacccatttcatagcatcccacaataatacaagcaggggaagatggaaatttgcagatgagtggaggtgtgatgctgatcacaggagtctccctttatttgtgggagatacatttcartatgcccagcaggtgccagaaactgcagatagtaccaaacactatatacactacattttttcatatacctatatgcctatgatagagtttgatttataaattaggtacagcaagagattaacaaacaataactaatgataaaatagaacaattaaataaaataagaattatttaaacataagcactgtgatactaagacagtcaatccataacttagactgctactaagtgactaacgagtgagtagatatacagcacatatatgctggacaaaggaatgattcatctttcagtgggacaaagtggaccagccagaaattttatcatgcctcttagaataataagcaatttaaaacttataag

SEQ ID NO: 655404 - DNA, 599 bp, Homo sapiens
ttgacaagcagaccagcttttcatgctgtttttgagatttctgttggcagtggcagtccatacgtgtaggcccagtytaaggtggttcctgaatatttatgggccatcctcttgtggatcaaggaggtgatccgccacacatcagcttgctgtggggaagaggacagtttgggctctgtgtttaattggcaagtgcagtctgctcattggtcatgtgatccttgttagcataggggcctttctggtcagcatccacgtgggtaacaaaaagtaggaacggaactgatttctatctaaatgtcttgtcctcacagtggggcttctatatgtcagtactaggcttcccagtggctccaacaaatggccaggctaatagctaatgtccatgtatcaggtaggtttatagttttccatatgccttggtaaaatggcctaaactgcagcaatttcagagcatgggggcaaaggcttgcagaggtatacatagactacacattcgtactgataatatatttaacagtagggattataacagtgaagatttataggggcctgatggaacccactcatagttgagcctgggcaagggtaccagtggt

SEQ ID NO: 655405 - DNA, 599 bp, Homo sapiens
ttgacaagcagaccagcttttcatgctgtttttgagatttctgttggcagtggcagtccatacgtgtaggcccagtctaaggtggttcctgaatatttatgggccatcctcttgtggatcaaggaggtgatccgccacacatcagcttgctgtggrgaagaggacagtttgggctctgtgtttaattggcaagtgcagtctgctcattggtcatgtgatccttgttagcataggggcctttctggtcagcatccacgtgggtaacaaaaagtaggaacggaactgatttctatctaaatgtcttgtcctcacagtggggcttctatatgtcagtactaggcttcccagtggctccaacaaatggccaggctaatagctaatgtccatgtatcaggtaggtttatagttttccatatgccttggtaaaatggcctaaactgcagcaatttcagagcatgggggcaaaggcttgcagaggtatacatagactacacattcgtactgataatatatttaacagtagggattataacagtgaagatttataggggcctgatggaacccactcatagttgagcctgggcaagggtaccagtggt

SEQ ID NO: 655406 - DNA, 578 bp, Homo sapiens
tggctgtctaactgggacttttctttttaaatttattttttactttttccttctcttttcttactacaagggactctacttttaaatactaaaataggtaaaaatcctagtgtgattcaggaaaaatgaataaatatctcagtggctagatataataaatttcttttgaaattaaaaacatgtgactttataccaagaacgttggttttcccttttgggaatttctaaatttggacacaaaagtgttggttgaatgtcattgttcactctygattttactattagaccattaaatctgagtgagaaaacagcttcctgggggtttgattctgcactgtctgatggaagagcagatctattttctggagtctattctatctaattttcttaggtcatcacttctcattttctcttagaattcagaagggttgctttgattccaggtatgcaaaagagttcaatgaatttcatggcaatttctgaagtatcttaacctcagagtagcgtacttacattttcggaagcagctgtcccttagacctttcctactgctaagtcttaattttctcagctttgtc

SEQ ID NO: 655407 - DNA, 643 bp, Homo sapiens
caatctagtctgcccccttggctcatctttaattagaggtaccttgagaaggacagctgtaagcctcttgataaaatggaatcagatgctcagatcaggcctacaactgcaagattttcccaaaactaagttaattgatgtcctagaaatatttctacaagtgcctgtgaggcagtttgaggaatgaaggctggaggaaggagatttagtgcagttgctttcccctgatgacaacaacgtgatttcctccctgcaatattcctttaatgtgccctgtrtttttcggtgggatcccctctgttctggggcaagggagtgaagcctggcctactccagaagaaagtctccacagacttcatttgagaatcactgggcatttaattgaacaccaaggttttccagttgttgatattctttgcaatagagaactacaagtagaccccctctacaataatgtaatacaagtactttaggtacttgagtgcctccagagaccttaaaattgttttaacccagagccccatccaagcactccatttttctgctgaggaatctctgccaaaaccaaacgttcttgtcaagttttggaacccattagccttagtccatccatctttcttcgtgcaacataacagacagttgt

SEQ ID NO: 655408 - DNA, 569 bp, Homo sapiens
ctggtagggttcccttccacggtgcggaaggtttgttctgttgctctttgggtccacactgcctttataaagtgtaatactcaccgcgaaggtctgcagcttcactcgtgaagccagcgagaccacaaacccaccaggaggaaggagcaactccagacgcgccgccttaagagctgtaacactcaccgccaaggtcctcagcttcactcctgagccagcaagaccatgaacccaccagaaggaagaaactccgaacacatccgaacatcagaaggaacaaacttaagacacgccacttttaagagctgtaatactcaccrcaagggtccgcggcttcattcttgaagtcagtgagaccaagaacccaccaattccggacacaatagctacatctcgaattatttagcaaaataccataacttctagtcttgtggctttaggcagtctagttcacaggggtgaaggaggtttgttttgttatcatctttgtttcaaagctaaactataaactaccttaataagaatagcttggaggtcagaagcaagaagtctttttcactgtctcagta

SEQ ID NO: 655409 - DNA, 570 bp, Homo sapiens
ttaaatgaatattaaaccaataaggaatctataaataaaggtagtaattatatttcccagaaataaaaaaaatatcatgaagggatactaacaataattgtatgacaaaaattagataaagttgttagtagaaaaatttctagaaatacatgaactatgaaaactgactcaagaagaaataaaaatttagataaacctgtaacaattaagagaatgacttagtcatcaaaatactcccacaaagtaaaaacagaatggctttactgtrgtactacaccaaatgtataattaaaaacgaccaatccttcacaaattcttgcagaaaatagaaaagaaagtgatatttgcaacgcattctatcaagctagaattacactgataccacaaccacacaaagatatcaaaagtaaacaaaagccaatatctcttacatgcaaaaattctcaacaaaatactagcaaactaaatccaccaatatataaaaaggattatacaacacaaccaagtgggatttatctcaagcatacagaatggttcaacatacaaaaattaatcaacttaatagaagat

SEQ ID NO: 655410 - DNA, 570 bp, Homo sapiens
ttaaatgaatattaaaccaataaggaatctataaataaaggtagtaattatatttcccagaaataaaaaaaatatcatgaagggatactaacaataattgtatgacaaaaattagataaagttgttagtagaaaaatttctagaaatacatgaactatgaaaactgactcaagaagaaataaaaatttagataaacctgtaacaattaagagaatgacttagtcatcaaaatactcccacaaagtaaaaacagaatggctttactgtggtactacaccaaatgtataattaaaaacgaccaatccttcacaaattcttgcagaaaatagaaaagaaagtgatatttgcaaygcattctatcaagctagaattacactgataccacaaccacacaaagatatcaaaagtaaacaaaagccaatatctcttacatgcaaaaattctcaacaaaatactagcaaactaaatccaccaatatataaaaaggattatacaacacaaccaagtgggatttatctcaagcatacagaatggttcaacatacaaaaattaatcaacttaatagaagat

SEQ ID NO: 655411 - DNA, 570 bp, Homo sapiens
ttaaatgaatattaaaccaataaggaatctataaataaaggtagtaattatatttcccagaaataaaaaaaatatcatgaagggatactaacaataattgtatgacaaaaattagataaagttgttagtagaaaaatttctagaaatacatgaactatgaaaactgactcaagaagaaataaaaatttagataaacctgtaacaattaagagaatgacttagtcatcaaaatactcccacaaagtaaaaacagaatggctttactgtggtactacaccaaatgtataattaaaaacgaccaatccttcacaaattcttgcagaaaatagaaaagaaagtgatatttgcaacgcattctatcaagctagaattacactgataccacaaccacacaaagatatcaaaagtaaacaaaagccaatatctcttacatrcaaaaattctcaacaaaatactagcaaactaaatccaccaatatataaaaaggattatacaacacaaccaagtgggatttatctcaagcatacagaatggttcaacatacaaaaattaatcaacttaatagaagat

SEQ ID NO: 655412 - DNA, 598 bp, Homo sapiens
catcttctcccttgtttccatctcttagagtctctgtcattgctcaactccagacttatcttctacaggttcacagaccacattttctcacccacagttatggaccttaaactttcaagcccattacagggatttagttagttttgagaaaagaatcaaagttgtttggactaggatgatttatttttattcattttagaaatcatctttcttccttttgcttcttctctyccaatgctttttagtctctttctcggttttccttccacccacctcttccccccatatttattttcaagcctttcaatctttgccgctttccactaccttgccaatcattgtattgtgtaactaacagtctccacttacaggattcttgctgttgatcccctgcctatttctattaaggtctagttcatgtctggccttcgctcagtgcaattcgccctgtagccactgacctcctttaccactaatcccatctacatcctaatgggaaaacaatcaggtggcatggacacacaccaatagccaagaatgtggcctgaatttctggagaccaacagctgttgtctgctgatgtctggccttgccacaa

SEQ ID NO: 655413 - DNA, 598 bp, Homo sapiens
catcttctcccttgtttccatctcttagagtctctgtcattgctcaactccagacttatcttctacaggttcacagaccacattttctcacccacagttatggaccttaaactttcaagcccattacagggatttagttagttttgagaaaagaatcaaagttgtttggactaggatgatttatttttattcattttagaaatcatctttcttccttttgcttcttctctcccaatgctttttagtctctttctcggttttccttccacccacctcttccccccatatttattttcaagcctttcaatctttgccgctttccactaccttgccaatcattgtattgtgtaactaacagtctccacttacaggattcttgctgttgatcccctgcctatttctattaaggtctagttcatgtctggccttcgctcagtgcaattcgccctgtagccactgacctcctttaccactaatcccatctacaycctaatgggaaaacaatcaggtggcatggacacacaccaatagccaagaatgtggcctgaatttctggagaccaacagctgttgtctgctgatgtctggccttgccacaa

SEQ ID NO: 655414 - DNA, 613 bp, Homo sapiens
gaaataaccaaaatcagagctgaaatgtaactgactgagacacaaaaaaccattgaaaatattcatgaatccagaagctgttttttttttttttttttgcaaaattaacaaaataaataggccactagctrgactaataagaagaaaagagagaagatacaaacacaatcagaaacaatgggaatattaaccactgacacaaagaagtacaaccaaatataaaagaacattatgaacaactttatgcacataaaataaaaaatctagagtaaatgaataaatttttgaacacatacaccctcccaagactgaaacaaatagaaattgaatccctgaacagaacaataatgagctctgaatttgaggaagtaataaatagcctaccaataattaaaaaaaaaacccaacatcagatagattcatagctgaattatatcagatataaaaggaggagctggtgccattcctactgaagctattccaagaaataaaggagaagctcctccctaaatcattctatgagaccagcattatcctgataccaaaaactggcaaagatacaacaaaaatagaaaactttagacccatatccttgatgaatattgattcaaaa

SEQ ID NO: 655415 - DNA, 549 bp, Homo sapiens
catttgtgtagtacactctctgatgttcacacaatgatgacattgcttaacacatttctcagaatgtgtcatggccgggcctggtggctcatgtctgtaatctagcactttgggaggccaagatgggaggatcatttgagcccaggagttagagaccagcctgggcaacgaagtgagacctcattgctatttaaaaataagaacatgtcgctattattaagcaacagatgactgtgttcctaggatgtcaggtaaccccaccgagagccactgtgctgcactgctgttcccgacctcttgccctaccatcacatgaagcccagcttttggagcgaactgttttaatagacagattctgcatcttcttcatgcgtctgcccacagggagtgtgttctggctgctgtttccagcctggcctgtgcctgggtggctyaatctcctcatgtcacggatctgatctcagaagtattttatttacacacaggaggggaaggaaggggcttttagctttccctaaacatctgcaacaataactcaatcttagaaat

SEQ ID NO: 655416 - DNA, 588 bp, Homo sapiens
tccttttttatgctgtgattttatgatgttgtgtctatgtttaatttttttggaagttgactagcgtaatataatatttcttttaaaaaatcactcatgtcatgtggaatcaagagaaaaggaaatggaaaatattggaaaggagagggatggaaactgtttcttgccgtaggcatcttttagcttgttattsaatttctgttcattgagtaactaagaaaaataaacacttttatgtttcacttggccttataggtggtctcttataatacagaagtgccattgctggtgcattttctgcttcttatttcataaaaaagttacatgtgggctttagattgcagaggatttgggcaccacttttcttcatgcacttcattttcttattgttgatttcagatggttgcactgtagaactcccagagtcctaattaattccgagtcttggacttctcctgtttctccatgaagatacttttaaattcctgttttactgctgtaaaaagtacagtggcaaaatgctcaccccattctaatgagacactctaaagcaccttcacaccttttctctaacacgcatccaaagct

SEQ ID NO: 655417 - DNA, 588 bp, Homo sapiens
tccttttttatgctgtgattttatgatgttgtgtctatgtttaatttttttggaagttgactagcgtaatataatatttcttttaaaaaatcactcatgtcatgtggaatcaagagaaaaggaaatggaaaatattggaaaggagagggatggaaactgtttcttgccgtaggcatcttttagcttgttattcaatttctgttcattgagtaactaagaaaaataaacacttttatgtttcacttggccttataggtggtctcttataatacagaagtgccattgctggtgcattttctgcttcttatttcataaaaaagttacatgtgggctttagattgcagaggatttgggcaccacttttcttcatgcacttcattttcttattgttgatttcagatggttgcactgtagaackcccagagtcctaattaattccgagtcttggacttctcctgtttctccatgaagatacttttaaattcctgttttactgctgtaaaaagtacagtggcaaaatgctcaccccattctaatgagacactctaaagcaccttcacaccttttctctaacacgcatccaaagct

SEQ ID NO: 655418 - DNA, 588 bp, Homo sapiens
tccttttttatgctgtgattttatgatgttgtgtctatgtttaatttttttggaagttgactagcgtaatataatatttcttttaaaaaatcactcatgtcatgtggaatcaagagaaaaggaaatggaaaatattggaaaggagagggatggaaactgtttcttgccgtaggcatcttttagcttgttattcaatttctgttcattgagtaactaagaaaaataaacacttttatgtttcacttggccttataggtggtctcttataatacagaagtgccattgctggtgcattttctgcttcttatttcataaaaaagttacatgtgggctttagattgcagaggatttgggcaccacttttcttcatgcacttcattttcttattgttgatttcagatggttgcactgtagaactcccagagtcctaattaattccgagtcttggacttctcctgtttctccatgaagatacttttaaattcctgttttactrctgtaaaaagtacagtggcaaaatgctcaccccattctaatgagacactctaaagcaccttcacaccttttctctaacacgcatccaaagct

SEQ ID NO: 655419 - DNA, 607 bp, Homo sapiens
atttcaaataatattggtttatgcttaaagaacctttgggtgaaaataatggcaagttataaatagacttgtggcctttggtgtatattgctccccatttctgaggcttatagaaatattctttctttcccacctacaggccaaagtgctacaaacrcaaatatactctttcatttaccgctaatgagatgctctcaataaatgccctccacagaaatattgacataacaatagtaacaataagaattcacatttaatgaggcaaacagagatcaagtacacaaaggtacatctttagaaagtagcactaccaggatttaagcccaagtggtgaaattccatagcccttcctcttatctcataaactgtgcctctggcacaagcatcgcctaatattttgaaatcgcatatgaaatttaagaatgaatttcaaaaatcacatgtcaccgtgaaaatcactaagacatgagagatggtttcacgggttaatagggtctattaagggcttactattagaacaaaaaggagaaagagaaagaggagtgatataaaatatacatgattttaaattagagtacataatttttgttattaagggcagtgggag

SEQ ID NO: 655420 - DNA, 542 bp, Homo sapiens
agcatcaagatttagattagttgtgttaatttagaaacagcataagattagtttgtgttaatttagaaacatcagaatgaagaactaatagatagtgtttacactgtgccaattaatgttcaaggagattgacaggaaatacctcatgtaattcattgcagcaatttacagaggtaggtattattgtagtaccctctgaacagatgaggaaactgagggacagacaagacaagcaacttggatggagcccaggagacaggctgagggtccctgctttgcacactgcactgctgcttccacacattctcgggtgtgatctttcttcctctttaggaacaagagcctgtgyaccaggaagcaggacttcactctcaccaaggtactctctgctttttatttttatttttgtttgatttatctttttgtttgtttgttttttgacgagtcttgccctgtcacccatgctggagtgcaatagtgcaatcttggctcactgcaacatctgcctgctgggttcaaaggattcttctgcctcagcctcc

SEQ ID NO: 655421 - DNA, 463 bp, Homo sapiens
attttgggcaaacaccttatatccagtaatgcgatccatgtatcaagaccacgaggaagattattaaacatgctaaactcagcgagacctgattccctcatgaggactctgttaaggatgagtaccactcagcaagtgatgactgtgacattcacttttgaacagctcatgagcattaatatatttaattgtggatctaaaccaaaaaccaaggggtgggcaagatgacaaccacagaatgtcactggcatatgtttaggttcaaataccattatgagaagtggcaggtaaaggaggtaggaaaaagaaaacacatcatgtaactgactgtcatatggaaatatttgacgytgaaagtcataatttaaaatgtataaaccaaatattagaagtgtgtctagttcaaaggggggaaaactatgaaacatttttaatcaatatcaaacatgagctacacaaccct

SEQ ID NO: 655422 - DNA, 551 bp, Homo sapiens
acaacattgtaaatcagcacaatttgtagctgggtgaatggaagaaatagttctattcatcacttcctcattttccctatatctacaatctccagatgtcactactgaattaacagccaacaattccacaacattacctgggagacactggccctttttcttcctcttcytcatcatcactttcattttctgtaaataaattcagagaagcaggtcacattaagcaattcatacttcacatatgaccaaatcactgtccagtcatagcacaaggacataactattctcagtgcaagaataaggattctgacaggaatattctagggtgccctagattaactttggtgagaattagatgaccctgctttccagacccataggccaaaatctccctctacgtgtacaccataatgccatattccctgcctgagtcaaagttaaacaaaattttttccccaaaaaaatctccaaaaattggtccattttctaagagtgttgctgcaatacggacttatatcaccagataacatggacattaaatgtttagaggc

SEQ ID NO: 655423 - DNA, 551 bp, Homo sapiens
acaacattgtaaatcagcacaatttgtagctgggtgaatggaagaaatagttctattcatcacttcctcattttccctatatctacaatctccagatgtcactactgaattaacagccaacaattccacaacattacctgggagacactggccctttttcttcctcttcttcatcatcactttcattttctgtaaataaattcagagaagcaggtcacattaagcaattcatacttcacatatgaccaaatcactgtccagtcatagcacaaggacataactattctcagtgcaagaataaggattctgacaggaatattctagggtgccctagattaactttggtgagaattagatgaccctgctttccagacccataggccaaaatctccctctacgtgtasaccataatgccatattccctgcctgagtcaaagttaaacaaaattttttccccaaaaaaatctccaaaaattggtccattttctaagagtgttgctgcaatacggacttatatcaccagataacatggacattaaatgtttagaggc

SEQ ID NO: 655424 - DNA, 630 bp, Homo sapiens
ggcttctgctgtgttattcagggacattctatccatggggagtgctccagtctgaagcacttcctaccacgaaacaccaccacataaagtgccttctccaacatcacacggcgaggggcttcatctcattttggaaagcagttttaagtgttcccacatttgaatgcttcagacccttgcaagagacaatttgccatggagagagagaaactcaggaaggacaagtcattcactcactgacagttactaagaacattgccgaaaagacagcctgggaaccttcattcttagtccagagctcttttcactctaacaagcctgctcctatcgcagcctccttcctgtcctttaaaactagacagatgctgcctcttactccaaagaccaccttccatcaagggaggagggacacttgcaatactgtgacctccaamcccatgggtttcccaactccgttcttacccaggaagtcctggtcatgtcatggccacataagcttagtggaaaaaaacaccattgatacaactgtcattgtgaaagtatggaggtctggagtctctcataagcctgcggttttgggtcatcagggcctatggccaccttacctgggctgagcttttggacaaggtg

SEQ ID NO: 655425 - DNA, 581 bp, Homo sapiens
catttccttaagggcaaattgtattccttcgtgaaggtaaatctatctcttgctatgaaaaaaaaatgtggcataagtacaagttaaagtagaaaatacagaatgtatagcttaaagttaagcagcagctttgatctttggctgagtatataaaaaagattaagagttattaaaaataagatctaaaggtctgtctaacaagattcttaaaagaggaacccagaatatgtttgaatctacacatgttcctcaaggctgcaaatacattgtactatatggacagtcactgacagaggcatttatctgatcttgtgaacatgttacagggaattctgtgtccagagcctctgccctttgactgtggattgcttcttgtttattaagtatgaaaactggagaacgacagacttagaggacattttctcttatgcatacatacagcattattaacatactctygcctatagcagattgttttagaattttagatttgtttgcgcatctgtaaaaaataacaataataattatcttacagactgaggtaaggattaaattggcacagtgcctgagaagtagtacat

SEQ ID NO: 655426 - DNA, 581 bp, Homo sapiens
catttccttaagggcaaattgtattccttcgtgaaggtaaatctatctcttgctatgaaaaaaaaatgtggcataagtacaagttaaagtagaaaatacagaatgtatagcttaaagttaagcagcagctttgatctttggctgagtatataaaaaagattaagagttattaaaaataagatctaaaggtctgtctaacaagattcttaaaagaggaacccagaatatgtttgaatctacacatgttcctcaaggctgcaaatacattgtactatatggacagtcactgacagaggcatttatctgatcttgtgaacatgttacagggaattctgtgtccagagcctctgccctttgactgtggattgcttcttgtttattaagtatgaaaactggagaacgacagacttagaggacattttctcttatgcatacatacagcattattaacatactctcgcctatagcagattgttttagaattttagatttgtttgcgcatctgtaaaarataacaataataattatcttacagactgaggtaaggattaaattggcacagtgcctgagaagtagtacat

SEQ ID NO: 655427 - DNA, 603 bp, Homo sapiens
ggcagttctttattctgaaagaaatagacacttacatgtagcaagaaataatctgaaggcataaaattcgctggtaaaagtaagtacacacacaaatttggaatactccaatactgtaattgtggtgtataaagcactcagatatttagtataaagactgaaaagcaaatcaaccaacgataataactacaacaatttgttgagataggctatataaaaagacataaattcagaaaacataaagtcaaaaagtagaggaatgaagttaaagtacagagtgttataattttttctctgcttaattgtttattttattcatgattaaagttgccatcagtttaaaataatttctaataactataagatttttttgtaagccccatggtaatcacaaagcaaaaacatttaatagacacattaaaaacaaacagcagagaaattaaaacatactgccagagaaaatcacttatttactaaggaatacagtaagaaaaaagaaaggaggagagaaattctaaaccactaaaatacaagtaacaaaatggtagtagtaaatcyttacctatccataataacatgaactaaattctccaattgaaagat

SEQ ID NO: 655428 - DNA, 583 bp, Homo sapiens
tattcatgccgtagtcatggtgagtaaatgaagaacaaaataagaaatcagaaatatagtctacttcttttttggaaaatgtgaagtttgttagaaragacaacacaactttttctgcaagctcaagtttttcatttttgacttggtacgtaatttttgaactggtgtcctgatttctgttaaatgccaggaacgatagattaaaatggaatttaaaaaaacctccctcattctttaaaccgtttattaacaaaggtgaaaagcatggaaaagttatcatttataattgttttgtagccacaaatgtgaattagttgagctaaaaagccaaagataatttctagaaagtatgccaccaaaaaataaaagagcttctcttaggtactgtgattctaatcagtgttgaagagtgtcatcatttctttaaagcaacagacactccaaaaggatagatttgttaaattagttattgtgaacaatgctctctgggcattcagaggtgggaaaaagggcccaaatgaaaaaaaaaaaaaaccagccatacaatttatgctttaaaaaattcaacaagttttgatcaatc

SEQ ID NO: 655429 - DNA, 655 bp, Homo sapiens
acataaattaactatcacacttgcttaaagctatctaatttatgagtgccagagaagagatttcaacccaggtctgtcctcaaatgcccatggttactcctctctgccacaaacatggggccacaagacttgcctagaatgtatgattttacttgaagcttgtgccaagatcgcagaaaaattcactgataattgattttatatayatattatatattacatacatgtatcctacatacctacacatatataggtacacaaacaatttcaaaatattaggtagataggtaaacccatttaatttttgttattgaaccaaattaggtatgctggagctggagcactgcagaaaggaagaaagtacttgccactgaagatactgtggaaatagggagaagaaagccacctggatttcttttttcagtaatgtagaagtttattcaatgatgaccaagcccacaacgtcaaatacatcacttgtcaatttgattatattcaaatatagaacaaaaattagttcaaagaaggtttctcccctgtacttgcaaaagtatctttttgcaataactcaagagggagaattagatttgtgttgctgttgttaaaatgaggaattcagtccctaaaatagggaagatcagtaattgtattctat

SEQ ID NO: 655430 - DNA, 631 bp, Homo sapiens
aaaaaaagttgatgaaatggaagaagagaggttgagaacttgtcaaaagatgactcatagcacaacattgctgcacatatacacataacatgacaagttagcaaaaaaaatggcagaatagaaaattgtgtgtgtccttgccgtggtaagggaggagtggtcaagaaagataaagaaaaaatttgactgcaaaagagcacaactcagaggaattaatagtgcatagccctccactcagtatctgacataacccatctgacccaaaatagctcacctacttacaacttacaaccatatctctggatcctgacttcaagcctaaaagactcaaattctcatgactaccgctcccgctgtccaaggctaaaaatgtgtgttacatagaggaaaggccaggtttggcaattataagtggtagagtccaaagaagttagagcctggggagacaggaaatggaaatcaagagtattcccaatgggcattagagtgaaagaatgttgtaagaaataattttgaccagaactttttaaagggacaacgtcaaaatatgaacagtactctgagaaatgaaaaggaagttaattgcaggaagttctttcraagtttgaaatgaaaacaataattggactaa

SEQ ID NO: 655431 - DNA, 562 bp, Homo sapiens
tcagactagataaaaaatagatctaacaaaatgctttctgtaggacttgcattctgatcacacaagatacccaggtaacaaacctgcacatgtacccctgaatctaaaataaaagttgaaattatgaaaaaaaagatttgcattttaaacaaaaagacacaagtagattaaagtaaaataatgaaaatgtatgcagtcaaaatacaccaattaataaacagattggcagagtagtaaacacagacacacacacacctttatgctacatatttttaaaaactcacttcaaatataattatataggtaggttgaaaataatactattaaaaagatayatcatataaaacatcaattaaaaggaagcaggtataggtatattaatgtcagtgaaaatataattcagagcaaagaaaattaccagagacagagaaaggcattacataatgataaaaatattcaatacaccaaggaggcagagcaatcctaaatgcaccaaaacaaagagagctgcaaagtatttgaagcaaaaacagataagataaaaaaagaaatagataagttg

SEQ ID NO: 655432 - DNA, 485 bp, Homo sapiens
atcacatcttctgaagaggttggtctctatttctcgtaaccagaaataattattttcaaatctatttgttttttctaaacggagtggtatcttctgtctctggtgtgtktggagcaaaaaatttaagggaatttcaataacttaggcttagacaaaacaagtgtttgactttagctctcaagagctggctttggctcccagaaggtgactaggtttagggaacatgttaaggaagggagttgacagggacatggcacacttgccaccaatctgaatacattcattttacctgtgaagattatccaatttattttatgaatatttattttaatgtattatactactgcattataaataaatacatacacccacagacgaacatcagcccttatgatcattcagatatttaaacaattagaaaatccaataaagaccaagccccaagacctggaccaatcattccttcctctgcccgttcattgtct

SEQ ID NO: 655433 - DNA, 580 bp, Homo sapiens
acttaacttttctcattgatcaaaataatagagtgtgygtgtgtgtgtgtgtgtgtgtgtgtgtgtgtgtgtgtgtgttagtctgttctcacattggtcttgctatagacctacctacctgagactgagtaacttgtaaaaaagaaaaaaagaggtttcattgactcacagttccacaagctgtacaggaagcatggcttggagacctcaggaaacttataatcatgacagaaggcaaaagggaaacagtcaagtcttacatggctggagaaggagaaagagacaggggaggaggtgctacacacctttaaacaacaagatcttatgagaacgcattcactatcacaagaatagcaagggggaagtctgcctccatgatccaatcacctcccactaggcccttcctctaacattgggaattacgatttgacatgagatttgtgcagggtcacaaatccaaaccatatgattctgcacttggcaattcccaaatttcacatctttctcacattgcaaaatacaattttaactcttcaatagtccccaattcttaccttatttcagcattaactcaaagtct

SEQ ID NO: 655434 - DNA, 580 bp, Homo sapiens
acttaacttttctcattgatcaaaataatagagtgtgtgtgtgtgtgtgtgtgtgtgtgtgtgtgtgtgtgtgtgtgttagtctgttctcacattggtcttgctatagacctacctacctgagactgagtaacttgtaaaaaagaaaaaaagaggtttcattgactcacagttccacaagctgtacagraagcatggcttggagacctcaggaaacttataatcatgacagaaggcaaaagggaaacagtcaagtcttacatggctggagaaggagaaagagacaggggaggaggtgctacacacctttaaacaacaagatcttatgagaacgcattcactatcacaagaatagcaagggggaagtctgcctccatgatccaatcacctcccactaggcccttcctctaacattgggaattacgatttgacatgagatttgtgcagggtcacaaatccaaaccatatgattctgcacttggcaattcccaaatttcacatctttctcacattgcaaaatacaattttaactcttcaatagtccccaattcttaccttatttcagcattaactcaaagtct

SEQ ID NO: 655435 - DNA, 580 bp, Homo sapiens
acttaacttttctcattgatcaaaataatagagtgtgtgtgtgtgtgtgtgtgtgtgtgtgtgtgtgtgtgtgtgtgttagtctgttctcacattggtcttgctatagacctacctacctgagactgagtaacttgtaaaaaagaaaaaaagaggtttcattgactcacagttccacaagctgtacaggaagcatggcttggagacctcaggaaacttataatcatgacagaaggcaaaagggaaacagtcaagtcttacatggctggagaaggagaaagagacaggggaggaggtgctacacacctttaaacaacmagatcttatgagaacgcattcactatcacaagaatagcaagggggaagtctgcctccatgatccaatcacctcccactaggcccttcctctaacattgggaattacgatttgacatgagatttgtgcagggtcacaaatccaaaccatatgattctgcacttggcaattcccaaatttcacatctttctcacattgcaaaatacaattttaactcttcaatagtccccaattcttaccttatttcagcattaactcaaagtct

SEQ ID NO: 655436 - DNA, 580 bp, Homo sapiens
acttaacttttctcattgatcaaaataatagagtgtgtgtgtgtgtgtgtgtgtgtgtgtgtgtgtgtgtgtgtgtgttagtctgttctcacattggtcttgctatagacctacctacctgagactgagtaacttgtaaaaaagaaaaaaagaggtttcattgactcacagttccacaagctgtacaggaagcatggcttggagacctcaggaaacttataatcatgacagaaggcaaaagggaaacagtcaagtcttacatggctggagaaggagaaagagacaggggaggaggtgctacacacctttaaacaacaagatcttatgagaacgcattcactatcacaagaatagcaagggggaagtctgcctccatgatccaatcacctcccactaggcccttcctctaacattgggaattacratttgacatgagatttgtgcagggtcacaaatccaaaccatatgattctgcacttggcaattcccaaatttcacatctttctcacattgcaaaatacaattttaactcttcaatagtccccaattcttaccttatttcagcattaactcaaagtct

SEQ ID NO: 655437 - DNA, 579 bp, Homo sapiens
tgacctcaaagaagccacaaaagacatctgcattatcatacagagtaaagtgggtccagtaaaattaggttccagctgagaagaaagcttcctgaagacatttggtgcctcagagtcatggactagatcaaattttccattagaaattgtaattggtttcattcttcattctcccagatgtcattcataaaaaattattaggcggtcatgtttgaccacaaggtagaccsttttatgcaaacttgaatctgctctgttacttagctaaacaatctagttctttaaaacagtcctcttcagatttgttttcaccccttcatcattactgcacatggtattttttgtctgttctgtttttcatgttttaaaaagcaaagaccaaaactggttatagcaaaaactgatttctccgcgcactggggagaaatgccctctagtgtagatgcacaaagaaggaagtgcttgactcttctttttatagtgagaaaatcttaactgagaaagatagattacatggaaacacgtaattgttcagtttatgttgagacttagcctctgttttttgaaaattcacacagt

SEQ ID NO: 655438 - DNA, 579 bp, Homo sapiens
tgacctcaaagaagccacaaaagacatctgcattatcatacagagtaaagtgggtccagtaaaattaggttccagctgagaagaaagcttcctgaagacatttggtgcctcagagtcatggactagatcaaattttccattagaaattgtaattggtttcattcttcattctcccagatgtcattcataaaaaattattaggcggtcatgtttgaccacaaggtagaccgttttatgcaaacttgaatctgctctgttacttagctaaacaatcyagttctttaaaacagtcctcttcagatttgttttcaccccttcatcattactgcacatggtattttttgtctgttctgtttttcatgttttaaaaagcaaagaccaaaactggttatagcaaaaactgatttctccgcgcactggggagaaatgccctctagtgtagatgcacaaagaaggaagtgcttgactcttctttttatagtgagaaaatcttaactgagaaagatagattacatggaaacacgtaattgttcagtttatgttgagacttagcctctgttttttgaaaattcacacagt

SEQ ID NO: 655439 - DNA, 585 bp, Homo sapiens
tgtatattttgacttgatgtattcctgaacagcaatttcattcattttcttcaaaatagaaggaattaaaagcatrtaagaagcaacgtcagggcctgttttcatgcactcactttgttaccaggtatcaggacacacatgtatgacagaactgctgactgcatttctaattcatacctggaaggggctccaactatgcatcatttgaaagtgctattgtatcacaaggctggttactgtagtattataattaaataacaagccataagattcaggactagtctaatatcacacacattttacgtttctgcctttcttctagatttaaggtatcagcagcatattatctaactagcaattgtatcattcctgaatcctaacctcaacagttaatgactgtacatagggacaaggtctatgcagagccattgtctgaaaatatttacttctcacagcatttctttgtgctttgcttccagtagaatgcattataaatgttattcaataaactctattttcctcatctatgagggcttggtaacatctcaatgcttgctacatcttttagaagttttacagatctat

SEQ ID NO: 655440 - DNA, 610 bp, Homo sapiens
ttttccaacttctagaggttggctgcattccttggctcatggccccttccttgcagcactccaagctcttgcttctattctcacatcttctcttttgtgtctaatctctctgtgccccacttttataagggacacttgtgattgcatttagagttgacctggataatccaagatactctccccatctyaagacccttaactcaatcacatctgacagttacttttggcatataaggtaacacttacaggttctggggcttaggacatggacatctttggggatcagtattgagccgaccacagacttgatcacttactcactaggtggctgtgaacaaatctccttccatctcagtgctttagttttcatatctggaggaaaacaggactagcctttcctactttgtagggctgttgagatgactaaaggaaatactgtatgtgctttagccagcctgacgcccagcaggcacaaactatctcctcactgctcttgaataagtgaagccttgaaagctgagtgcatttggaggatttcagaagagaatgtaggcattccaggctgagagactgccatcaacgaaggcacaaaaggccgggcgcagtggct

SEQ ID NO: 655441 - DNA, 591 bp, Homo sapiens
gaattatttgacagttatatgtattatttatatcttctcctattctgtggcttatcttttcactctcgatgtattttgatgaataratattcctaatcttaatgtaatccaatgtattagtcttctttgtgattagtatatttatgccttgtttaagcattttcaggatggggagaaaaaagtcagaaaataagaaatgaacatatgagacacatgggatatgttgaaaaagtataatatatgtataactgtgtcctggaaagggaggaaagagagactaggcagaagcagtatttggttttgttattttagttttttctgaaaatcaccctgtcttgatgatttggtttggatgttcgtcccctccaaatctcatgtcaaaatgtaattcccaatgttggaggtagggcctggtaagaagtgatgggatcatgggagtggatcccccctgaatggtttagcaccatccctttggtagcaagtgagttctcacgctgagttcatgtgagatctggctgtttaaggtgtgtgacaccttcccccttgctctcttgctccattcttgccatgtgccacacctactgtcctttg

SEQ ID NO: 655442 - DNA, 591 bp, Homo sapiens
gaattatttgacagttatatgtattatttatatcttctcctattctgtggcttatcttttcactctcgatgtattttgatgaataaatattcctaatcttaatgtaatccaatgtattagtcttctttgtgattagtatatttatgccttgtttaagcattttcaggatggggagaaaaaagtcagaaaataagaaatgaacatatgagacacatgggatatgttgaaaaagtataatatatgtataactgtgtcctggaaagggaggaaagagagactaggcagaagcagtatttggttttgttattttagttttttctgaaaatcaccctgtcttgatgatttggtttggatgttcgtcccctccaaatctcatgtcaaaatgtaattcccaatgttggaggtagggcctggtragaagtgatgggatcatgggagtggatcccccctgaatggtttagcaccatccctttggtagcaagtgagttctcacgctgagttcatgtgagatctggctgtttaaggtgtgtgacaccttcccccttgctctcttgctccattcttgccatgtgccacacctactgtcctttg

SEQ ID NO: 655443 - DNA, 657 bp, Homo sapiens
ggaccctgttcatcatctcgttaaacctaagaacactctttcatatgacatacacacaaaaagttggataaaattttaataacttaatgtctttctaaggtacgaaactgttctaagagaataccttctatatcatatagcaattgtgaagattatattagatgatgtgcataaaacttctagcccatagagtgggatttaacagatttgcaataaatattggtacattttccccattcctcttgttattcagaattcatatcttatttcaaaggtcctggatttggctggtgactaaatgcaattccactagtaaaacttaaaaatagtttcccatcttgmaatttacactgatattacagaaagcccagaattcaactccaaaggtgagtaacatgaagtatcagagaacaaaatggcctgggagctcccatttctctgctcccccaaaagcagtctcccatttccctgcaacccaaagcagaaataggaaaaaaaaatttcaggggcctgtctctcgtgtatcttcaaactctgccactccactttccatcctaacatgaaccctgcctggccctcaagccattatcacctatctcttttcctttcttcactaatatctctgaaaatagtctatattccgtcttccacgttctt

SEQ ID NO: 655444 - DNA, 577 bp, Homo sapiens
catttttctagaattctccaaggccatgcatagagagaaaaattcggcttagaggtgttttataccattcatctgaccttagcatgactaaattcactctatttcagagaagatcaacaccacctacaaaacattatctggtaccatcttgtggctattagacttcttttgcctttttagtttaaaaccaaatgcctatggaattatctgctcattgaatcatctaatcattcttatatttggatcaaagaaaacaactctgcctcttattcagtgacttgtgggaggctgttttcattgttgacttatgttagatggcttttgtcccataaatttttctgatttcttctcatatgttctttcttacttggaatggcccagygggtgataacctcagagatgtgataaaacagagggtttgggcttaaccacctgaaaaggtacaattcactgaaagaagatggctggtcccattacagaatgattatttgaaatataaaacattttcttatagggattttattaaatattattttatcaggctgggcccagtggctcacgcctgtaaccccagcat

SEQ ID NO: 655445 - DNA, 506 bp, Homo sapiens
aaaacctaataccaaaaatagtttaccctattttagagatgtagtagtcagagtcataaggtaatgagataaaaacaaaactcagagtgtgtacgtccaaataaatatttctctcaatattgtcttcagaacaccatacaatatattctgcttaaatatgcatatggattgattcaagtgactagtttttgataggttgctagaacaatgtagaacattctagaacctcctagaacagaatgattactatcagtggtggaagcatctgtacctcttcaaataccctcttcgtaaaaatgtatgcttgaaaggcaaaatgatttatttgtgcctcacaaccaattarcaatgaagataattcagaaaaagggagcaatgagcttaggatgaaaagctagagaagaggtaagagttgacctggatgggatgtgaagagctggcagagcaaaggcaggcatcccaaatggagagaacctgaggagagtgcagacctcttgtggaaggta

SEQ ID NO: 655446 - DNA, 504 bp, Homo sapiens
ttaggtacctcccacattttgttttcacagttaggatgtttccaccttttggctattgtaaataatgctgctgtgaacattggtgtacaatcttttttaggtttaatttttaagttggaattttaaatggaatgattagcaggagtcagacacctgagtcctgtcagcatctgtcccaggcctgcygctggtctgagggtggaggcagggacagggaggggctcacccacacagcgcagcaccaccaggaactcatcctcaggcagcccaaaggcattctcagggctctccagcacactcagcaggctcccactggagcagtactccatcaccagtaccttctgccggcttccgccctatgggtgggacagagaggggctcatgaggacggcacttctcctccccacccaccaggaagaagtggctcagcctggagcccagagcccccattctccaggtcccagcttctggcctggccttccctccttggcctcacactgatcc

SEQ ID NO: 655447 - DNA, 504 bp, Homo sapiens
ttaggtacctcccacattttgttttcacagttaggatgtttccaccttttggctattgtaaataatgctgctgtgaacattggtgtacaatcttttttaggtttaatttttaagttggaattttaaatggaatgattagcaggagtcagacacctgagtcctgtcagcatctgtcccaggcctgccgctggtctgagggtggaggcagggacagggaggggctcacccacacagcgcagcaccaccaggaactcatcctcaggcagcccaaaggcattctcagggctctccagcacactcagcaggctcccactggagcagtactccatcaccagtaccttctgccggcttccgccctatgggtgggacagagaggggctcatgaggacggcacttctcctccccacccaccaggamgaagtggctcagcctggagcccagagcccccattctccaggtcccagcttctggcctggccttccctccttggcctcacactgatcc

SEQ ID NO: 655448 - DNA, 617 bp, Homo sapiens
aggaaattagattctgctactctgtcagtttgacatccatagcaagtgacaattagagatgatgagagaacttatatttactctgaaactcttgatttcctgataggcatgtaacttttatttacccttgcaatgcaaragaatgtgcataacagtggcattcgaagaggttgctagaacattcaagatacaggctgaacagctgcagaaggggcaagtagagaggccagggttcacttgcacagcctggtgtaataagattgagagatatgctggagagagaaagccctgccgttaggggtttagagctgaaatgcagataataacacagtggtcacacaccttgcttcagcagacaagattacattagagcaagtcaaggctggaaggccaggaatcaaagtgattctgacttgagctgtggcagccaggccattccagttgattttacttttcttcataaaaccaagaccaaagcattgagcaacttggaggactcgtgtttaaacacaaatgcatttccagatattctcctccaccactcctaatacaagcaaatagaatttcaatttcaaattagggttcaaagagcaccaaaaattcagtagaactgaagc

SEQ ID NO: 655449 - DNA, 617 bp, Homo sapiens
aggaaattagattctgctactctgtcagtttgacatccatagcaagtgacaattagagatgatgagagaacttatatttactctgaaactcttgatttcctgataggcatgtaacttttatttacccttgcaatgcaagagaatgtgcataacagtggcattcgaagaggttgctagaacattcaagatacaggctgaacagctgcagaaggggcaagtagagrggccagggttcacttgcacagcctggtgtaataagattgagagatatgctggagagagaaagccctgccgttaggggtttagagctgaaatgcagataataacacagtggtcacacaccttgcttcagcagacaagattacattagagcaagtcaaggctggaaggccaggaatcaaagtgattctgacttgagctgtggcagccaggccattccagttgattttacttttcttcataaaaccaagaccaaagcattgagcaacttggaggactcgtgtttaaacacaaatgcatttccagatattctcctccaccactcctaatacaagcaaatagaatttcaatttcaaattagggttcaaagagcaccaaaaattcagtagaactgaagc

SEQ ID NO: 655450 - DNA, 617 bp, Homo sapiens
aggaaattagattctgctactctgtcagtttgacatccatagcaagtgacaattagagatgatgagagaacttatatttactctgaaactcttgatttcctgataggcatgtaacttttatttacccttgcaatgcaagagaatgtgcataacagtggcattcgaagaggttgctagaacattcaagatacaggctgaacagctgcagaaggggcaagtagagaggccagggttcacttgcacagcctggtgtaataagattgagagrtatgctggagagagaaagccctgccgttaggggtttagagctgaaatgcagataataacacagtggtcacacaccttgcttcagcagacaagattacattagagcaagtcaaggctggaaggccaggaatcaaagtgattctgacttgagctgtggcagccaggccattccagttgattttacttttcttcataaaaccaagaccaaagcattgagcaacttggaggactcgtgtttaaacacaaatgcatttccagatattctcctccaccactcctaatacaagcaaatagaatttcaatttcaaattagggttcaaagagcaccaaaaattcagtagaactgaagc

SEQ ID NO: 655451 - DNA, 617 bp, Homo sapiens
aggaaattagattctgctactctgtcagtttgacatccatagcaagtgacaattagagatgatgagagaacttatatttactctgaaactcttgatttcctgataggcatgtaacttttatttacccttgcaatgcaagagaatgtgcataacagtggcattcgaagaggttgctagaacattcaagatacaggctgaacagctgcagaaggggcaagtagagaggccagggttcacttgcacagcctggtgtaataagattgagagatatgctggagagagaaagccctgccgttaggggtttagagctgaaatgcagataataacacagtggtcacacaccttgcttcagcagacaagattacattagagcaagtcaaggctggaaggccaggaatcaaagtgattctgacttgagctgtggcagccaggccattccagttgattttacttttcttcataaaaccaagaccaaagcattgagcaacttggaggactcgtgttkaaacacaaatgcatttccagatattctcctccaccactcctaatacaagcaaatagaatttcaatttcaaattagggttcaaagagcaccaaaaattcagtagaactgaagc

SEQ ID NO: 655452 - DNA, 591 bp, Homo sapiens
aacagcagttaccgtgtaacaggcattattctaaatactcttcatgtaaggaactcatttaatctttgcaacaaacctaaaaaaggtatcattcccagagatgctaagtaaattgctcaggtcacaaagctgagataggattcaactgaagaagtcttgctccagagctcattttcttaaccagtatgagtagtgcccagtagatgaatgagctataatgtggtcttctgaagactgaacaagcaggaagataagggagggagaaatccagatttgtataagatggcttacagcgaggaagactgaggaggcagaaagatgtagtgtggttctttgggtcarttttcacattcttatctcttgggattttaccataactttgtggtgttttggcaatgatttatgcaattgttcattgtttaataaagaaatgatttttaggtatacttcctgtgctcatcatggaaggccattaattggctttaattgctcttatgatgaatcatcttaggaaaataagacctttagtcacttctgattttaactgcttacacaaaacccactttaaaaagtctattaacttacagaaag

SEQ ID NO: 655453 - DNA, 492 bp, Homo sapiens
gtaaactcaccagatcattttatttgggaaacaacaaaatcaaatagattccttcactgtgagccttctgaaggttgttaatatgctaatatgcaatgctaatacgaagagtgaatattgtacccagcatttccccaaaatattcaaacacagaagctttttatattgtcttgagactcaaaagttctgagggaaacagttttggaagtactactctaaaggtctgaatacatttgtgatgtttcaaatgggccaccccatgacatgcattcagagtgaatcaagcagcctggccagcagcactctgctgagtggttagttgtgggtagtaaaatgttaggcagcagaacaaggagaaaagaaacctctgcctctcccattgttttatgtgttcataaggaggcttttttgttttttgkttttattatactttaagttctgggttacatgtgcagaacgtgcagttttgttacataggtatacaagccacag

SEQ ID NO: 655454 - DNA, 548 bp, Homo sapiens
ctactgccatctgcttggtcctttagaaacttaaaatctcagaaagtatgatatatagaaaaaacagaactatatcttaggaagtatgacatatagaaaaccttcatgggtgtatgggaggcttgcttgccctctcagggtgtarcctatacacctcagacttccacattttttcccctctcataactgtggtgggaacatttgagctactacccaagcactaggagctcatgtaaaatattatttatcaattaaaaataaaaatgacttataagtcctcaaagaaaaatacttgttcatcacactaccgtgctagtatcagatcctcctttgaacattgagttgatttgaaattgaacaaggtcagactgatgtagcagtccctgatctggatgtgtcttttagacatgaacaaattcctaagaacctaagagcagagatgaactaacacgaatccacttccttgtgggactataagttgtcattcctaatgctgtctgataacaaagtccttcctagtccccatttctcagtgcagggctggccct

SEQ ID NO: 655455 - DNA, 375 bp, Homo sapiens
acactctaactcttctttcttccctcccccaacccttaaaaaccaccatttcactttctgtctctgtgtttcttttttttctctaggtgtcttatataagtggaatcatggagtatttgtcttttcgtcactaccctactctgcacaatagamatataaatatgtcctcaaatataaaaatgtcctcaaagtacacacatgttgtaacatgtgtcagaattggctttttaaggctgaataatattccattttatgtatataccacattacataatggattatatgtaccacatatccattcattcatggatacacatgtagattgcttccatattttgctattgcaaataatgttgttattaacatgggcttaca

SEQ ID NO: 655456 - DNA, 589 bp, Homo sapiens
ttttagcaataatatatttttaagttaaggtatatacattgctttttgtaggcataatgctgttgcacacttaaccgactacagtatagtgtaaacatgagttttatatgctctgggaaaccgaaagatttttatgactcatgttattgcaatatttggtttattgcagtagtctggaactgaacctgcaatatctttgagctctgctgattaatgtctttcatttaatagcagtggaaactgaaatttaaagacattaagtaacttggcctaaaacattcaattaatctgggcagagacaggattggaatctggttcctaattcctaactattacattgctcagccttctggctaataggttaaacattgggggaaagttttatgcttctggaatataatagagagcaatgcctctctrtatcacaaataatcaccaaccaattttggacactcctttatagtttgaaaaagtatttcatatatataaacccatttaatttgctttgaggtgttagaaagaaaactgggggattcttggtcttcatcttaagtaagaaaggtgaaaaaaagacaacagtgatctattt

SEQ ID NO: 655457 - DNA, 584 bp, Homo sapiens
gggtaggacttcatttttacaaccatggaggtcagagtgggcctcattaagaatgtaactttgagcaaacatttgaaggaagtggggaggtgggccatgcaaatacaggtgtcagagggaaaacatttcaaacagaaaaagtcatgtgaagctgtaagtcaggagtgtttctagcatttaagggggttggcaatgtaaccttatgctagagcataaggaggcaaagagtagtgagaagatacagaggaaaygtgtaggggagacagagcttgagaaaacgtctacaccattgtaaagacattcttacaatgtgtttgtggcacccagttctagaaaactattactaaattaattctaaagtgccccctttgatagattaatgtacctggtactttgatcattcttgcctctaattaggcaaagatgtttggtctctaaagattgagttggggaaagtagttgatgttagcaaggttaatgatggtatgctactgattttattttaaagtccaaaattagagatagaaagcatgacagagagggagagaaaaggagggtgactaaatgtattaacggaacaagtg

SEQ ID NO: 655458 - DNA, 590 bp, Homo sapiens
tttttaggcattaggctgttgcacatttaattgactaaggtatagtgcagacataacatttatatgcactgggaaacaaaacaattttatgtgacttgcattaatgcaacattagctttattatggttatctggaactgagcctgccatattgctgagatatacctgtgcatacttcttcatttttaataaacattatctttaagattttgctttaagagtttatcttataagagtttgaagattattatttcctagtttacttggtttgcaatgtaatttatcttgtctatgtatatcctaaaatgatttaaacatttgggaaagctgaagatcagtcttctcctgaaaccctagacaatttctaccatttgattacagatttatttattttwttattattatttttttttttttacagaatcttgctccattccctggctggagtgcagtggcacgatcttggctcactgtaacctccacctcccaggttcaagtgattctccttcctcagtctcccaagtagctggcactacaggcatgagccaccaatcctggctatttttattttattattattattatgttagt

SEQ ID NO: 655459 - DNA, 433 bp, Homo sapiens
gctcctggcacacccttgcagaggaggctgtttgctctttaaggcagcttgrccttgcctggcatgtacaggccccaggtacagacacgctgctcccagtgagcttgttctgccttggaccaaattctaagtggcttagaatttgcccagcatgcacaagcctcagtgtaataactgtgcaacaaatggagccacacagacgaaatgagcagcaggctcagaagcaaggtatgccctgcctttgggcctccagtcgatgcctcagggctcctatggcactgcgggtctcttggttgcctagctgcagaccacaggctgtattgaggaggactttatgttcaagtgcagaaagtagtcaggattaccatccaggggactctgccttctgtggtcctctccagacttagaatttggcccaaggcaggacaagctg

SEQ ID NO: 655460 - DNA, 539 bp, Homo sapiens
ctaaacttgctttggtaaaacttacagtcctatggccaaagctaagtcagatctgccctagagcctttgaaggtaaaaataagatactggttaccactgaaatcgtcaaatttattaggactaaccacattctaacaataaacttaaatgagagttcaaggtatttaaactctcattaatttagaagttaatcaaattaatgaatccgattgatctgattcagacctatactttgatccaaggrctgcacagatatctatcaatctatgctgaggagcaagagaaaggatttggaaggcaggtaggctgatggtcaaactgcaggccagctactttgttaactatgggatcatgaggcaattaatcagctctaatccatagttgtttatttaacagtaggttataggaacacagatgttatgatggctttatgagatgataaatgcatagaacatattaggatgtctagcccagaatacaacactcaacagatattagtttcttccatctatattttcttagttaacataattttttaa

SEQ ID NO: 655461 - DNA, 207 bp, Homo sapiens
ctttgtcctgtcagaatctctgagcaggatctcccaggtccatccaaacacgtgctttgtccacttttgactaggcccttgggcatcactgggctatcccagctgtccacagggccttcaataatgcacattgcacctggcttatccaagcagtgctcagcagcccacaktgaccaggtccctgctgaccagaccccgcacatcagg

SEQ ID NO: 655462 - DNA, 292 bp, Homo sapiens
agaagttggaacaagacagagagaggaaagagattccacagccttttaaactactagatctcatgagaactcactcactatcaggaggatggcattaagggcttsgtgctttgccatttgtgaaggatccactcccactcctttatgattaaagctttttccacctaggccccgactctaacattagggagtgtactttcacatgagttttggaaggggcatagagaaaaaccgtattattctgtccctgaccccacaaatctcatgtccttctcacattgcaaaatacagt

SEQ ID NO: 655463 - DNA, 469 bp, Homo sapiens
tttatagggtttcaggtctatagcatatccactaatatattcctgcttcaaaaggcaataaagtggtattatcattcttcaaaaagttataatggtagtgtaggcattcatagtatgatttagttcacgtttgctactgtttctattctatcaccatagtracactttcctacacaattctatattcagctgggtttcagttgagcacaaagtcatccttgtactaccactgatagctggcactagctctttgatactgttatcattctgctgtagaaagtaccacgaactggaaaaagtccacaatcaaatagctagtcattcaacactatcaaattttaggtgactttttgaaaaaatagtatctcttgttgcaagaaatgctccatctgtgatgtcaagtctctcacttgagtgaattggatggaagtggtgaatttcagccaaagtggccaaagaaatcctgttc

SEQ ID NO: 655464 - DNA, 542 bp, Homo sapiens
ttttaaattgctctccagtggttctttttccagatttctctaaaggaaggctattcccttgctattcagagctgtgtccaaggaccagcacaaacatcacctgagtgctcatgagaaatgcagactccaatacctgctragtcagaatgtgcactttccagaagctcctcaacgaattcatgacaatttgaatgccctgttctacactggtgtgcttccatattggtttaccctaattggcctttttggcctagcctcaacttctttcctattatgtccctgaatttaatactacgttataagccataatgtttctaatgaacttttaatcaggcaaagcttctctaattaatttcttcccaataaatcacccaacactattcttttcattttctataaaaacaaattatagccatacatggctgaccatttacggtgatgttcatctatggtagataaaacacaggtctgcatggtaaagtacctcaatccttaatgcctccccagtagcaagaatgacagcaagagaaggaaaatgttac

SEQ ID NO: 655465 - DNA, 572 bp, Homo sapiens
ggaggatcacttgagcctgagaggtggatacagcagtgagccaagatcatgccactacactrcagcatggacaacagagctagaccctgcctccccaaaaatttcaatttaaaatgtgagaacaaagagagatacaaacaaaaaacaagcctaattagtcaatgaaatatgagcttaagccaagaaagaaaacgaaaaacatgaagtacaataaagtacatggggaaatagatctataacagagccttcggtctttcataactctgataatactaattaatatttatgctgcaattagttttttgtaagtacttctgtgatagtgtttcttactataagacattcaattagctaaatatggtcatctaccattacctgaaagaacattattataacagagagagaaaactggaactttccatcaactttccacccagaaaaagaattggtcaccagaattctaaagagtaatgtatggcagacacatgaaaaaatgctcatcatcactggccatcagagaaatgcaaattgaaaccactatgagatatcatttcacaccagttagaatggca

SEQ ID NO: 655466 - DNA, 572 bp, Homo sapiens
ggaggatcacttgagcctgagaggtggatacagcagtgagccaagatcatgccactacactgcagcatggacaacagagcwagaccctgcctccccaaaaatttcaatttaaaatgtgagaacaaagagagatacaaacaaaaaacaagcctaattagtcaatgaaatatgagcttaagccaagaaagaaaacgaaaaacatgaagtacaataaagtacatggggaaatagatctataacagagccttcggtctttcataactctgataatactaattaatatttatgctgcaattagttttttgtaagtacttctgtgatagtgtttcttactataagacattcaattagctaaatatggtcatctaccattacctgaaagaacattattataacagagagagaaaactggaactttccatcaactttccacccagaaaaagaattggtcaccagaattctaaagagtaatgtatggcagacacatgaaaaaatgctcatcatcactggccatcagagaaatgcaaattgaaaccactatgagatatcatttcacaccagttagaatggca

SEQ ID NO: 655467 - DNA, 484 bp, Homo sapiens
tattttaaataaactacaatgacaaaattatgatgataaagacttaccatattggtattaagagtctctgcttctagaactggttatttgcaggaaaatacatgttattcaattagatgaagtgttttatataaactcttcatggacaactcataaatcacataaaaatacctttgcaatacaaatcttgagaacataaatttaaatttctacatttccacaatttatatttttaaatyagatacaatgttgcccaggctgttctcaaactcctgtgttcaagcaatcttactgtctcaaactaccaagtagcagggactacaggtgtacaccaccaaactcagctatttttctacaatttttaatacttttttagtctcactacagaaccaataatataagtagagaaacaatctctcctaaaaactatatgacaccaaaatgataaatttccaagaacaaaagctatatgctatgtgctgaa

SEQ ID NO: 655468 - DNA, 484 bp, Homo sapiens
tattttaaataaactacaatgacaaaattatgatgataaagacttaccatattggtattaagagtctctgcttctagaactggttatttgcaggaaaatacatgttattcaattagatgaagtgttttatataaactcttcatggacaactcataaatcacataaaaatacctttgcaatacaaatcttgagaacataaatttaaatttctacatttccacaatttatatttttaaattagatacaatgttgcccaggctgttctcaaactcctgtgttcaagcaatcttactgtctcaaactmccaagtagcagggactacaggtgtacaccaccaaactcagctatttttctacaatttttaatacttttttagtctcactacagaaccaataatataagtagagaaacaatctctcctaaaaactatatgacaccaaaatgataaatttccaagaacaaaagctatatgctatgtgctgaa

SEQ ID NO: 655469 - DNA, 554 bp, Homo sapiens
gaaatattctcctctgatttaatctggcctgcctcatcagaacaatacaaaaattacttaaaaatactgtttttacaggaaaaaagtcagttttctatgaggaatgatatataattctccacttttccaagggtacatattgtaacagaaaaggtatgyaatggtttttcaaaatggtagaatgaaagtcacaatataaaaaaataagtacattataaagatagtaaaatgtaaataattcattgtaatgaaactaaaaaatcaagcttctgccaaaattagtatcctaaaacacgttatataaactcaactagctacagaataagagttgacatgttaaattccatacacacttgacttttcacttgaaataatttcttctttggggcctgtgtctcatccaaattaatgtgataatgtgacataccttccagtggagactctaacgtagttaatttttttaggctgtcagccgcttcttgttgaagttgtctcacaaccacctgagaaaatatttttgcccctgactttataaattgccttattattaaatt

SEQ ID NO: 655470 - DNA, 580 bp, Homo sapiens
  misc_feature 1, 2, 3, 4, 5, 6, 7, 8, 9, 10, 11, 12, 13: n = A,T,C or G
nnnnnnnnnnnnnagcgtcatgtattcagtacaaagatgaaaactgtacaggagacttaagcttcgtttgggttacttcccttttattgttttgtgagttttgataccaccacctgcatggctgtttatggacagaagagaagtcattatttgtattgtttttgccttgctaagaataaatatttaacttcaaatataattggtctggaaaaacaaaagggttttggttaaattccttgttattgtatgttatagatggggaagtggcaaaatagataaaaattwcacaaactctgggaatcaaatttcttttgggcaggcttagaaaagacaaaactgaaactacttagtggcctagagagcagaagcctagggcccattttctgtcccaactttgcccagatcccccctctactgaaccttgtccaggtctgaccccacactgaaatacctcacagaactgcttagagaagatcagagtttggagtagctattcctactgcctctccagagctggtgctcccaatttcctgaaacacaaaagctgataaatggagaaaggcaatgtactttgaattta

SEQ ID NO: 655471 - DNA, 531 bp, Homo sapiens
ttctgcattttcatacatctctttcatttcctttatttgctgctgtgtttggcttaggttgttatgtacagtttctaaagccaatracttttttctgagagtatctcttgtcttacggaacttatcttttaaggtattgaatttaatttgtggtttagaaagttgttcagtaagaaactcattcttatcttctacttcggaaatatcagaactcatttttacttgtacggaaacatcttgagttctctctaaagcaagttttaggtttctttctgttttcacactttcactgtgtttacttatagaagcagccagtctagactgataagattcagtttcagcttccagtcttttgttgctttcttcttccttcaacagtccggaactgagccttgtattctcagctttgagatcattaagctcttgttgataccggaatgctgttattgttatcaattcctcattgagttttatatacttttcaaggacagcatttgtttctttaacaattttaacttccttaagttattt

SEQ ID NO: 655472 - DNA, 467 bp, Homo sapiens
atacaattcattaactttagtattttcagagttatgccgtcatcattacaattaattttagaacattttcatcaccctaaaaacaaaccccacatcatttagccatcttcactagttttcccttcctccctcagccctagggaaccacccagcttctttgtatagatttgcctataagcctctgaaataaaaagcaagtggtctgctgggactggcttatttcacttagcataatttttcatgctgcatctgtgctgtagcaggtatggatgccgggtttttgctccttagttcagctacatctgggttcttctctcrtgaccaggaaaaattaagcatgcagacacattgaggagggcagaatttattatgtgaaaggacagctctcagcaaagagaggggtcctgcaaacaggtttccacctcacaattgaataccaggagcacatgagctgaagcggccaggct

SEQ ID NO: 655473 - DNA, 616 bp, Homo sapiens
tgctggcattcatggtatcactatttgcaactgaaaaattataaacaagtctcattgtctaatcctaaagaacagattaagtaaattgtgatgcagcacatgatatcatactatgagctgtgtaattattatgctatagatctttccttattgatattaatttgtattcttaatattaaatttaaaatgagcttcaaagatgtattatgctatgattctatttctgttaaattatatatkcagattcaaaagctggaagcttgtatatcaactgtttatgccattttatctgggtgggttgaattacacgtgtttattttgtttttcagcctaaaccttttttttttcctgtattgattatttgtgttagactgagaaaaaaatgtattttaagttccatcctgcagaagctgtctaaggagatcaaatgacatatctagctcaagatatatcattaccactaacaatctttttttcctctaaacacaacttctcttacagattcttcctttctagaatgtttttcacccattttattcatgggtcatctcagccagtgatgactttcatattctcccaagggatcataaggtttgtttctatgcaataaactctc

SEQ ID NO: 655474 - DNA, 616 bp, Homo sapiens
tgctggcattcatggtatcactatttgcaactgaaaaattataaacaagtctcattgtctaatcctaaagaacagattaagtaaattgtgatgcagcacatgatatcatactatgagctgtgtaattattatgctatagatctttccttattgatattaatttgtattcttaatattaaatttaaaatgagcttcaaagatgtattatgctatgattctatttctgttaaattatatattcagattcaaaagctggaagcttgtatatcaactgtttatgccattttatctgggtgggttgaattacacgtgtttattttgtttttcagcctaaaccttttttttttcctgtattgattatttgtgttagactgagaaaaaaatgtattttaagttccatcctgcagaagctgtctaaggagatcaaatgacatatctagctcaagatatatcattaccactaacaatctttttttcctctaaamacaacttctcttacagattcttcctttctagaatgtttttcacccattttattcatgggtcatctcagccagtgatgactttcatattctcccaagggatcataaggtttgtttctatgcaataaactctc

SEQ ID NO: 655475 - DNA, 618 bp, Homo sapiens
ctgggtaggggagagatttagggagagtctctcagaaagaaaatgggagtcttgcaggtctagggagcttgggaagacagtagcctgcctgctctctttcaatggcctcttcctttccagtgaactgggraggtggcaataacttagaggacgctggtttcctggtatatttaagaggacagtttggatatatggaagttcctagcttcagcaaaaacactagaacccaaggctgatatggaagtagcagggctgcccaccttcaagggcacaggtgtgcttggacgacaaacatatcaatggtgaccaatgccaaccaaagacgaaaaggttactcttaatgttctgagctgcctaagactctcacagttcttgaatgataccagagaggtgagatatttcctctctcactattctccaggaatatcctctaccaatgttacaaatgtctgggtttttatcttctaatatcctaattaaattagttttggaaaaataaatttatttgccatttattgcaccctggaattataaattaaagttcatacttgttacaaaatcaatatataagtttaggtctaagaataggttatacagcccatgtaaaaatatgtgtaa

SEQ ID NO: 655476 - DNA, 590 bp, Homo sapiens
tggctttactttaatatcatttctaccataaaagacacctggcacatattatgcaaccttaatgtttgtgtgtgtgacttctgatactattaagctttaaaaatactatttcttagaattggggttatagggatatataatttttatcttgttatactctaaagagagaataatttaggtgtatctaagaaggtttgggattctatattcctctactgtgtttgaaggttgcatttcaaagcaattacagcagtctgtatgcttgaaagggtgagtgagtacattctaaaattgttaatgtaacacactacgttctaaactgttctcatgtcatagcttttatgacaaaaaggagtttgcacagagcaatggttagttttgcctgcctatttcacyaggctatagtactcagttatttaatcaaacactagtctacgtgttgatgtgaaaagtacttatggatgtggttaacacctacaatcagttgattctaagtacgttattcttgataaagttggtgggcttcactgaatcagtcaagacaccttaaaagcaaaaactgaggtttcccaagaaggagaacttctgtc

SEQ ID NO: 655477 - DNA, 521 bp, Homo sapiens
aaagttagttacagagtgaatgaaatttcattttctgacaatatagcagactagatggcatacagattattaacaatataaacatcatgtaaccatctcccagattacgaaatagaacattaccaatagttatgaaactgtccacttggctacaaatatcacatattcctcccctttccacaatctttttctgagttgtgtgtttcttttccacattccctttttaaatgtacatgtttaatttgtgtatatcccctaataatagttttttaaaaataattctgggagtagaaagaatacaaatttttaaggcttaatacaaacacagttataatgtgtaattcttttaaaaaattgtgttacttgaattgactttcattcttctttsctcaggataatattagatttgtcacactataacagagtagataattcttttttaatgtgacaatactatacccaagtgggcaaaaattagttcttgggatagaaaaaaatattcttcttgtaattaaaacaca

SEQ ID NO: 655478 - DNA, 650 bp, Homo sapiens
ttggctttataatgaaagttaagaatggcattctggaccctagagtacctaaatctgaattctacacaggtagctgagtgactactatcaccactctaagcttcagtctcccgacctacaaacagggataaacataccaataccacatcaggttggtgccaggcttaaacaatcatgccaaagccctatcactcagtgcctgatacacaataagctaaaaaatgccaactattattattatatggttactaggagcaatttacatttttatctcgatttacataawacatttctaaaataatttgtgtaaatggaaactcagattctccctggcttatagtacaattttacattctgtctttataactgtgatctaactggaaggacttctcacttgtattttgtttctccacatttttcaccactgcagaaccattcatccacccaaagtcaaacattaaatggactagagtaatatttaaattaaaatagaaacatcgccataaagttttaaaatacaattatgatttttaaattgcattatccaaagtgggacatcatagcatgcaatgtctcaagtttcagtaacttaacgtttactgatcatgtagtaggcaggtccccttagaatccatgacccccgtacattc

SEQ ID NO: 655479 - DNA, 643 bp, Homo sapiens
atgctgggggaggactctgtgtacactgtcactaggtgaagctcctagggtggggctgggtgagcttagggagcaccrcagaatccaccacaggttctcaaaagaaaacatactgtattccagggaggtagggccccatactccaactcagtgagggccagtcagtctgggggagtgtattaaaattatctgggcagaaaatttgataggcctctccctgccaagcgtgcatagtttgaagaggtaaatctgatctttctaccccagcaccccttcccaaagtggagaaccactagcctaggccaaactgacaatacctcaacttcttataaatggcttctacaagggttgagtctatttacaggcctggccccactcctttggcccaaggtacagtatgtccacccagttcctggaaatgggatctcttcagagtagccacatgaggaaatatggccaactgaagtcctgccaaaaaaaaaaaagtgctctttccctatgacaagtcctatgtaggagtggatccaggttttgagaagcctaaagatttagaagaccctttaataaaaataatataaaattatgaatataaaattggcaggcattgcccagggccttggaaggagcctgtgcaagacaggac

SEQ ID NO: 655480 - DNA, 643 bp, Homo sapiens
atgctgggggaggactctgtgtacactgtcactaggtgaagctcctagggtggggctgggtgagcttagggagcaccgcagaatccaccacaggttctcaaaagaaaacatactgtattccagggaggtagggccccatactccaactcagtgagggccagtcagtctgggggagtgtattaaaattatctgggcagaaaatttgataggcctctccctgccaagcgtgcatagtttgaagaggtaaatctgatctttctaccccagcaccccttcccaaagtggagaaccactagcctaggccaaamtgacaatacctcaacttcttataaatggcttctacaagggttgagtctatttacaggcctggccccactcctttggcccaaggtacagtatgtccacccagttcctggaaatgggatctcttcagagtagccacatgaggaaatatggccaactgaagtcctgccaaaaaaaaaaaagtgctctttccctatgacaagtcctatgtaggagtggatccaggttttgagaagcctaaagatttagaagaccctttaataaaaataatataaaattatgaatataaaattggcaggcattgcccagggccttggaaggagcctgtgcaagacaggac

SEQ ID NO: 655481 - DNA, 578 bp, Homo sapiens
agagacgtggagtcatgaggaggtcctggctaagaggccattcatttctctaatatctgaaagaacaggataattttgccacttcatgataaaccctccctggagttctgcacgtgtctctctgatgcctttaaagggcatccaggttcctgggaagagactcgtgctgtttcttacattccccctggctgggccagcactgggaaattccacaggggagaagagaggatacagaacaagatggtctrgttttgaagatgagaaatggagatagaggttgtgccttgttgataactacctgaaaatacctccaaccatgtttctctgtcttctaggggtggtgggaatattgggaagctggtgccagacggtgaagtgaggggttctttggggcctgccaagccatcaggggaattaccctaggcccagtgagggtgcattgccagggcaggaggcaacatcattgtcagaaacagcacctcatgcccaggcaggcattggggcacatctgaactgaagggtaaagctaggccagaattggatatccaaggagagcagaggcaaatagtgagggggtt

SEQ ID NO: 655482 - DNA, 652 bp, Homo sapiens
agccaaacagcctgagataataatgttaatatttcacaagtgtgtttttctttaaactcttctgaagtgtcatcatatacaactcaatttgattacaacatgcatatgaggtaggtgaattaagaagtagaatctcaattatatgagaaaaactaaggttcagagacgttagtgtcttggccaagaaaaacatgtaagttataactggtcttgaaaagaaaatcaaggtctcttgatctctgatccagagctcatttcattgctctatagagatcaaggtaaaattaagacaaaggcctcagaatcttaggtgctcctcttagcagtgctcrtagaatctttgggtttttgagacactttcagggcagtgtcttgatagaaatcatttcctcccagttatataagtgctcttcttttcatgggtaccaacagatacagccaaattatctgtatgtgcctttattctatttggtgatcttaatttactccagataagtcttgctccctgccttaaatttattgacactccagataagtcttgcccctgccttaaataattttgtttaaaattttatttatttgccttggtcattcttaaattcaggcaaaatgctatggactctttcaacactggccaaaaattaaacagatc

SEQ ID NO: 655483 - DNA, 565 bp, Homo sapiens
tgctttgaaataaaatgattatattatatattgagctattttttcctccttttggtgaggatttcaggacagtattgcttaattagaaatgcatgttaacgtattctgttgccatcattatagttttaaaataaaagtaatgaaaagtcaagctatttacttttacatataggaatatctttatgtgggatgaattagtttttagtaattagtgtttaaaagctagaaattaacacaataaatatttttccttttacagcrtcaagatggctaaatatttcttatgaaggttcaattacagattaatatttattttggttatttcatgatcattttccattgtgtctggagaatttatgccaaagagttagaatttacctgaaattgattggaatctttaatttttccttcaatgaaatatgagaattataaattataaggtagtaaaattaaagagcacagttagtagtttggaatttttatattttgggagataactgcttatataaaaagacatttcagagcttttatagtgattacagataatatttttatttattaatat

SEQ ID NO: 655484 - DNA, 608 bp, Homo sapiens
caccatggcacatgtatacctatgtaacaaacctgcaaattctgcatatgtatcccagaaattaaagtaaaataaaataaaataaaataataaaaacaacaacaaaatgtaccttgaatctccaaaataagttaagacaaatagttaaaattgagcatgcttttattagaagaagaaaatgtcattgaaaatataacagataatttatagatgggaacatacgtaaaaacgtataagtacttagatctgctagataaagtgagtcccaaatgataaggttacaaaaataatgttttttttgtagaatatgtgttttcaatgagaaagtgttgcaaaagtcagtcatacagattggtaacttttatgtttatttttcaaaagcagctcaaaatagttctttagattctgtaacaccayggtgtcctaattttgctcctaaaattttgtcacaaaattttaaattcacttgcaaattgatcttcatttaatcttcctctaggtgtgtaagctaaatcagagatctgcatgaactgcttattactctttcatgctatacattctccctaggtaattttgatcactgcaatcttttccatcatcatttctac

SEQ ID NO: 655485 - DNA, 507 bp, Homo sapiens
tgcttattcaaacttctcttctcttcttcagaggcaaacctgtataatttcgttggtttgtttgtttgttttaagacgtagtcttactctgttacccaggctagagtgcagtggtacaatgtgagstcactgcaacctccgcctcccgggttcaagcgattctccggcttcagcatcccaaataactcggattaaacccttataatttctatcatgattgattaattttgttcatcttcaaattccaataattagaattcctacaggatgtgtgtgtgagtgtgtatctggtttattttctttagcataaatacatatttgagatttagccaaatatttgtgtgtatcatttgtttatttttcctcatatttctgagttgcctacgtatttgtcagagtttgcttattcattagtctgttagtgaatattcagattgctttcagaattagcttttacaaataaaggacttaggtgcattctcaaacaggtttttgtgtaaatatatg

SEQ ID NO: 655486 - DNA, 608 bp, Homo sapiens
caccatggcacatgtatacctatgtaacaaacctgcaaattctgcatatgtatcccagaaattaaagtaaaataaaataaaataaaataataaaaacaacaacaaaatgtaccttgaatctccaaaataagttaagacaaatagttaaaattgagcatgcttttattagaagaagaaaatgtcattgaaaatataacagataatttatagatgggaacatacgtaaaaacgtataagtacttagatctgctagataaagtgagtcccaaatgataaggttacaaaaataatgttttttttgtagaatatgtgttttcaatgagaaagtgttgcaaaagtcagtcatacagattggtaacttttatgtttatttttcaaaagcagctcaaaatagttctttagattctgtaacaccacggtgtcctaattttgctcctaaaattttgtcacaaaattttaaattcacttgcaaattgatcttcatttaatcttcctctaggtgtgtaagctaaatcagagatctgcatgaactgcttattactctttcrtgctatacattctccctaggtaattttgatcactgcaatcttttccatcatcatttctac

SEQ ID NO: 655487 - DNA, 507 bp, Homo sapiens
tgcttattcaaacttctcttctcttcttcagaggcaaacctgtataatttcgttggtttgtttgtttgttttaagacgtagtcttactctgttacccaggctagagtgcagtggtacaatgtgaggtcactgcaacctccgcctcccgggttcaagcgattctccggcttcagcatcccaaataactcggattaaacccttataatttctatcatgattgattaattttgttcatcttcaaattccaataattagaattcctacaggatgtgtgtgtgagtgtgtatctggtttattttctttagcataaatamatatttgagatttagccaaatatttgtgtgtatcatttgtttatttttcctcatatttctgagttgcctacgtatttgtcagagtttgcttattcattagtctgttagtgaatattcagattgctttcagaattagcttttacaaataaaggacttaggtgcattctcaaacaggtttttgtgtaaatatatg

SEQ ID NO: 655488 - DNA, 507 bp, Homo sapiens
tgcttattcaaacttctcttctcttcttcagaggcaaacctgtataatttcgttggtttgtttgtttgttttaagacgtagtcttactctgttacccaggctagagtgcagtggtacaatgtgaggtcactgcaacctccgcctcccgggttcaagcgattctccggcttcagcatcccaaataactcggattaaacccttataatttctatcatgattgattaattttgttcatcttcaaattccaataattagaattcctacaggatgtgtgtgtgagtgtgtatctggtttattttctttagcataaatacatatttgagatttagccaaatatttgtgtgtatcatttgtttatttttcctcatatttctgagttgcctaygtatttgtcagagtttgcttattcattagtctgttagtgaatattcagattgctttcagaattagcttttacaaataaaggacttaggtgcattctcaaacaggtttttgtgtaaatatatg

SEQ ID NO: 655489 - DNA, 556 bp, Homo sapiens
cttcaacaaattctgctggaacaattagatactcatatgcaaaaagtagaactttaacaygtaactcatgatacaaaaattaatttagtacagatcatatgcctaaatgtaaaatgtaaaaacaaagtgaaaaaaaaggaagaaaaattatgtataggagaaaatatagaaaagtatttgacctcaggctagtaaatactacttagacatgacacaaacaccgtttcatcaaagtagaaattgacaacttgagttcatcaaaatgtaaaacatatgttcctcaggaaacactgtaaaacaaatagaaatataagacactactgagaacaatatttgcaaaatatatgtctggcaaaaaagttgtgtccagaaaacataagaactctcaaaacttgataataaatctaacaactctaataaaagtaggcaaatgacttaaatgaatacttcttctctaaagaacatatgtagatagaaagtaaacacatggaaagatcctcaatatcattagtcattagggaattaatctgtgtctgtcaaaaatgagttgggtaca

SEQ ID NO: 655490 - DNA, 587 bp, Homo sapiens
gccagctcacttggtgggaratgctcaagagagcaagatgttcttgtgctgcatccccatatctcaagtctcctgcttcaggaatggcaggagtgagagcctttcttttccaacgatgcccttgtaggctcatccctcaccccagatgtctctggccatttgacagaaggcccccccaggtaccacaggacaggagtcaccaggtagacatcaggccccagatggagctaccaggccaggcctcaccagtgatcccaccagggccacatctgcacattgtccttgtccagctggagcctctggagctcattgagacacaggcacatggtgaggtcacctgcagtctggaagtctttccagggacaatgttttcaggctgaaattcctttaaattcagtgaggttgttttcatgtttggaaattccagtggaaagtgagtgatattggtgacctctctcctttttcagctcctgcttcaggtgcagaaacacagctatttccagtgccagctgttgagccagtgccagcaccaggggcagagccccttccagggacagcgctggagctagaggaagctccagagccct

SEQ ID NO: 655491 - DNA, 587 bp, Homo sapiens
gccagctcacttggtgggaaatgctcaagagagcaagatgttcttgtgctgcatccccayatctcaagtctcctgcttcaggaatggcaggagtgagagcctttcttttccaacgatgcccttgtaggctcatccctcaccccagatgtctctggccatttgacagaaggcccccccaggtaccacaggacaggagtcaccaggtagacatcaggccccagatggagctaccaggccaggcctcaccagtgatcccaccagggccacatctgcacattgtccttgtccagctggagcctctggagctcattgagacacaggcacatggtgaggtcacctgcagtctggaagtctttccagggacaatgttttcaggctgaaattcctttaaattcagtgaggttgttttcatgtttggaaattccagtggaaagtgagtgatattggtgacctctctcctttttcagctcctgcttcaggtgcagaaacacagctatttccagtgccagctgttgagccagtgccagcaccaggggcagagccccttccagggacagcgctggagctagaggaagctccagagccct

SEQ ID NO: 655492 - DNA, 600 bp, Homo sapiens
tgggaggatcacccgaggccagaagtttgagatctaactggccagcatggcgaaaccccatctytactaaaaatacaaaaattagcgaggcatgctggcacacgcctgtaatctcagatacttgggaggctgaggcacgagaattgcttgaacccaggaggtggaggtttcagtgagccaagatcatgccactgcactacagactgggtaacagagtgagattctgtctcaaaaaaaaaaaaaaaaattccaataagtcatagattttgttcctttacctaatcctatatttctcaaaagtttggttcattatttttaaattctttttttatttttgtctgactgggttgattcaaaggtctggtctttgagctcttaaattatttcttctatttggtctagtctgttgctaaggctgtgaactgttttttgaaattcctatagtaaatttttcaatgcaagaagctctgcttggttctttctcaatatggctatgttgtcattcaaatccaggatcgttgttatggggttgttgctggatttcaactttctgttggcttttggtgattttttttgccacttatatcttgaatactatac

SEQ ID NO: 655493 - DNA, 600 bp, Homo sapiens
tgggaggatcacccgaggccagaagtttgagatctaactggccagcatggcgaaaccccatctttactaaaaatacaaaaatkagcgaggcatgctggcacacgcctgtaatctcagatacttgggaggctgaggcacgagaattgcttgaacccaggaggtggaggtttcagtgagccaagatcatgccactgcactacagactgggtaacagagtgagattctgtctcaaaaaaaaaaaaaaaaattccaataagtcatagattttgttcctttacctaatcctatatttctcaaaagtttggttcattatttttaaattctttttttatttttgtctgactgggttgattcaaaggtctggtctttgagctcttaaattatttcttctatttggtctagtctgttgctaaggctgtgaactgttttttgaaattcctatagtaaatttttcaatgcaagaagctctgcttggttctttctcaatatggctatgttgtcattcaaatccaggatcgttgttatggggttgttgctggatttcaactttctgttggcttttggtgattttttttgccacttatatcttgaatactatac

SEQ ID NO: 655494 - DNA, 600 bp, Homo sapiens
tgggaggatcacccgaggccagaagtttgagatctaactggccagcatggcgaaaccccatctttactaaaaatacaaaaattagcgaggcatgctggcacacgcctgtaatctcagatacttgggaggctgaggcacgagaattgcttgaacccaggaggtggaggtttcagtgagccaagatcatgccactgcactacagactgggtaacagagtgagattctgtctcaaaaaaaaaaaaaaaaattccaataagtcatagattttgttcctttacctaatcctayatttctcaaaagtttggttcattatttttaaattctttttttatttttgtctgactgggttgattcaaaggtctggtctttgagctcttaaattatttcttctatttggtctagtctgttgctaaggctgtgaactgttttttgaaattcctatagtaaatttttcaatgcaagaagctctgcttggttctttctcaatatggctatgttgtcattcaaatccaggatcgttgttatggggttgttgctggatttcaactttctgttggcttttggtgattttttttgccacttatatcttgaatactatac

SEQ ID NO: 655495 - DNA, 600 bp, Homo sapiens
tgggaggatcacccgaggccagaagtttgagatctaactggccagcatggcgaaaccccatctttactaaaaatacaaaaattagcgaggcatgctggcacacgcctgtaatctcagatacttgggaggctgaggcacgagaattgcttgaacccaggaggtggaggtttcagtgagccaagatcatgccactgcactacagactgggtaacagagtgagattctgtctcaaaaaaaaaaaaaaaaattccaataagtcatagattttgttcctttacctaatcctatatttctcaaaagtttggttcattatttttaaattctttttttatttttgtctgactgggttgattcaaaggtctggtctttgagctcttaaattatttcttctatttggtctagtctgttgctaaggctgtgaactgttttttgaaattcctatagtaaatttttcaatgcaagaagctctgcttggttctttctcaawatggctatgttgtcattcaaatccaggatcgttgttatggggttgttgctggatttcaactttctgttggcttttggtgattttttttgccacttatatcttgaatactatac

SEQ ID NO: 655496 - DNA, 533 bp, Homo sapiens
tcctgtgaattcctatttttcttcttgaattgaagtcacaaagtttatctttatgcttatttttctacttccaagtggctgaggcacattgaaagcccctaatccatcattctaggaaaaaaggatggtttaaataaaggaatgttcatataaaatatatattaattagtgcaaacatattttatttgacatgagttaggtgaatctttgatacattaattaattttaaaattgttaaataaaattagaaatatcttcgaatttgccaaggtatgtttctctcctgggattactggtcagttttattttttccttggatagacattttaagccataaatcttgacatagacctgatgtagacctccatacctttcccagatgtgggacrgagcaactgggacaggtccatcctagcactaagggatgattaaacctaacttgtagtcgttgtacaactataaacatggttgatgctttaagagaaagatcttgatggaaagggttaaatgtgaaaattgatcatatgaattgg

SEQ ID NO: 655497 - DNA, 446 bp, Homo sapiens
aacttatgccagtgaaagaaaataaaattaattttcacaaaagttgatacacatgactgaggataaatctatattgatattgttgagattaaaatacaacgcaattttaataaacatttaaaacacggacatggtgtccctaacaatttgttgataggggagaggataatataaaaattaattttatgaatcccacataagtacttgttaaaaacatatgcctctgttctttttatttaggaatcactcacagaaagcacacattctttgcttctgcactaactctggaattcaatattagaaggctcaactgccatgaatataaatcaaattcatctgcatcccctatatcagactaaatgtgtttgtttctcagtattctgctatrttccttgtattaattttaatagaatcaaaactgagatatggaagaggatgttatatat

SEQ ID NO: 655498 - DNA, 613 bp, Homo sapiens
  misc_feature 406, 524: n = A,T,C or G
agcatgtgttagcttaatatatcataacttaaatgatttaaattaggtatatgtttataccaataagttttaaattcttaattcttacctcatcaagtaccaacaaagaatgcccttccatattaatacactttgggaattaagataaagtatatgtaattaaatcatcaaactccttttgytgtttagcaggtagtttgatataataagagaaattgtgttctcattatatatttgtcacaatgaatgaatgtaaaaccttaatcaggctatctgacttcttttagtgacattaccctttttgcaaccaacacatcaaattagtaatatttatcctacaaaaataatgtgaagataaatgagataagatatataatagtcacaaatacttattgaataaagctgnttttatttatatatttctatgtacttactagatatgttcttattaaatattttattatggtatatgtcaagtcttttacttctttttttatacttagtgtattatagaactcaccatncaataaaattgtaatacaattttcttgatttactaatcctaggtgaaaaaaaaaaatatatatatatatatgttgttttctgtttgaat

SEQ ID NO: 655499 - DNA, 601 bp, Homo sapiens
  misc_feature 112, 230: n = A,T,C or G
accctttttgcaaccaacacatcaaattagtaatatttatcctacaaaaataatgtgaagataaatgagataasatatataatagtcacaaatacttattgaataaagctgnttttatttatatatttctatgtacttactagatatgttcttattaaatattttattatggtatatgtcaagtcttttacttctttttttatacttagtgtattatagaactcaccatncaataaaattgtaatacaattttcttgatttactaatcctaggtgaaaaaaaaaaatatatatatatatatgttgttttctgtttgaattatgcttagttgatggcattttcaataatctctctgattcttccttttcctgtttaaactactctcattctcattgtggcctagagttctttttccctaatattgccttcagaaggctaagtttctaatataataacaatttgagtctttaccacttctctctagaatcgtgatttagactaggttattagagtaaacaatatgattccaaattttgtcctttttttaatgggctagcatccaaaaagcataagaattctggggggaaatgacataattaag

SEQ ID NO: 655500 - DNA, 601 bp, Homo sapiens
  misc_feature 112, 230: n = A,T,C or G
accctttttgcaaccaacacatcaaattagtaatatttatcctacaaaaataatgtgaagataaatgagataagatatataatagtcacaaatacttattgaataaagctgnttttatttatatatttctatgtacttactagatatgttcttattaaatattttattatggtatatgtcaagtcttttacttctttttttatacttagtgtattatagaactcaccatncaataaaattgtaatacaattttcttgatttactaatcctaggtgaaaaaaaaaaatatatatatatatatgttgttttctgtttgaattatgcttagtkgatggcattttcaataatctctctgattcttccttttcctgtttaaactactctcattctcattgtggcctagagttctttttccctaatattgccttcagaaggctaagtttctaatataataacaatttgagtctttaccacttctctctagaatcgtgatttagactaggttattagagtaaacaatatgattccaaattttgtcctttttttaatgggctagcatccaaaaagcataagaattctggggggaaatgacataattaag

SEQ ID NO: 655501 - DNA, 591 bp, Homo sapiens
atcaccacagtcatttgttcttgactatttgcaaatcatttcaggaagacatggtgaaacatcctacactgtgagtggcagaaccccatgtgcactgcaatctcatttcctaccctccggaggagtatataaacttttcctacataaataatggccayatttttgtatcaatacattgtaagttctaagatgtgtgtgtttttttaagaggaattaaaatagaaaagcatatacctaaaagatgttcctcgggatatatctgcatatattctctactcttgtcattttaagtaaaaatacagtggtcccttgatatcctcaagagacagggtccaggaccccagaggataccaaaatcagcacatattcaagtaatcctgtggaaccagagtatacaaaaagtcagtcctccatatctgcgggtttttcatcctgtggctactgtattttgatccacatttcaatgcagatgctgatttttttaattaaaataatctctatataagggatgcacacagctcaagctcatgttgttcaagtgtcaaccgtacttttttatttctgtccaatataatttaaataacataattc

SEQ ID NO: 655502 - DNA, 591 bp, Homo sapiens
atcaccacagtcatttgttcttgactatttgcaaatcatttcaggaagacatggtgaaacatcctacactgtgagtggcagaaccccatgtgcactgcaatctcatttcctaccctccggaggagtatataaacttttcctacataaataatggccatatttttgtatcratacattgtaagttctaagatgtgtgtgtttttttaagaggaattaaaatagaaaagcatatacctaaaagatgttcctcgggatatatctgcatatattctctactcttgtcattttaagtaaaaatacagtggtcccttgatatcctcaagagacagggtccaggaccccagaggataccaaaatcagcacatattcaagtaatcctgtggaaccagagtatacaaaaagtcagtcctccatatctgcgggtttttcatcctgtggctactgtattttgatccacatttcaatgcagatgctgatttttttaattaaaataatctctatataagggatgcacacagctcaagctcatgttgttcaagtgtcaaccgtacttttttatttctgtccaatataatttaaataacataattc

SEQ ID NO: 655503 - DNA, 586 bp, Homo sapiens
ttgtttatttatggatgagagaacagatttgtttattttcaagtaaaatgaagatagtgtttcctccacagaaaacatcagacaagtgtgcttactgctcatttattaaagatttaagtttcctttacttggagttcttcatctgtgacacaaactgtgtgtagcatcaacttgaactccttgtcatcatctccagtaaacttgagggaaaacaggaaccagagcaaagatgaagctcgtgcaactctgtgctgtactgcaaataatggaagtctttctgtctctgaccaaacagttatgtgtcttctgccaacatccataaaactgaagcaggctaacttgtaagctcagatccttcacagttcttgacaatagtcccttaaaactgtctgcagatgcacatcccttggaaaaattttgcatccttttaagaataattaatatcctagttaatgacaactatatgacaggataggtcactttaagcttctacccagattactayaacttttaggtaaataatgtatatgccattttttctaaggctatctagccatttttgatatagaaaacaatattgtgtaag

SEQ ID NO: 655504 - DNA, 476 bp, Homo sapiens
aatagcaaccatattttttgcatactgttatttcttcaaagacgcttaatctatataaacaaattttaaaaaccctggtatcagttaggtaaaatctctgagatttaaaatatttactaagctaccaaatgttaagcaacacgggattctgagagattggccaatggcaaggattgtaagggaacaaaaacttggaaacaatgctgtttgtcgacatcttgaataatttgctgtgcctctattttatgtcacagtatttccacttccaggcctatacaaataaataaaatcagtgttatacacagaataggtacgcacacacacacaagcgttcagatataaagatttcaactgtagcatcatttgtaataaacaatattggaaacaatgttggtatatattgctaagaaaatgtgtcgagatcaatttagtataattatataatgagatayatgattatttcatttctttatgga

SEQ ID NO: 655505 - DNA, 511 bp, Homo sapiens
gtggttattcttgggtctctggtttacattttagcctccagttggtgggaagagaaaaatctactcacaaacagcttcaaaacggaaaggtcctatattggcattcctacataaaagaaagtactggggggcttgacaaatggacatttgtcttcaaagaacacattttctcctttagacaaagtttgcacttatatagcacaattaacctacttcttatcaatcaataaaatgaagagacaattacagaacaggataaggtgtttgcaaactatgtattcaacaaggtttgatatccagaatatataaggaactcaaaaaactcaatagcaaaagaaaaagttgaytaaaaaatggacaaaagaagacatacaaatggccaaaaaatatataaagaaatgctcaacatcattaagcctcagaaaaatgcaaaacaaaaccgcaatgagctatcaccttatcccagtttaaatgatggatattatcaagaagacaaaatataacaaatgga

SEQ ID NO: 655506 - DNA, 605 bp, Homo sapiens
ctgcatggcacaatataaagtctgttatgacatagtgactttaatatattttaattaaaattataatagtaaaagctaaaaatgacaagacaattgttagaaatcatatcacaacagcataatcatgtatccataagtgattgatacaataacatgaactgacattttgctgcaatattaatcagttaatacaggtttttaggtttcagttaactggttaatcataaaatattatataaaaaattatcaaattgtgtaagtcatctcactgtattctaaaatttatsttattttatatttctaatctatgttttgcagagatcatgaaaattttactgggtaactgaagaagaattgtcccaaggacttgaataaatgttaatgttcataacagtatgttctaaaaagaaatttaagtaaaaaaggaaaaaacatatttcattttaaaaatatctacccatgcacatcattcatctaaaaaacccatttaatataatcatctagttatgtaaagatatacccaatagctacttaaaatagaaatattctatttcattattagaaattattattttaaaaggttgttaaaacatcaaaaatatgct

SEQ ID NO: 655507 - DNA, 608 bp, Homo sapiens
caccatggcacatgtatacctatgtaacaaacctgcaaattctgcatatgtatcccagaaattaaagtaaaataaaataaaataaaataataaaaacaacaacaaaatgtaccttgaatctccaaaataagttaagacaaatagttaaaattgagcatgcttttattagaagaagaaaatrtcattgaaaatataacagataatttatagatgggaacatacgtaaaaacgtataagtacttagatctgctagataaagtgagtcccaaatgataaggttacaaaaataatgttttttttgtagaatatgtgttttcaatgagaaagtgttgcaaaagtcagtcatacagattggtaacttttatgtttatttttcaaaagcagctcaaaatagttctttagattctgtaacaccacggtgtcctaattttgctcctaaaattttgtcacaaaattttaaattcacttgcaaattgatcttcatttaatcttcctctaggtgtgtaagctaaatcagagatctgcatgaactgcttattactctttcatgctatacattctccctaggtaattttgatcactgcaatcttttccatcatcatttctac

SEQ ID NO: 655508 - DNA, 654 bp, Homo sapiens
tactggcttctagccacatagaataagtttgaaagtattccctcatcctttattttttttaaatagtttgagtaggattagtattagattttctttaaatatttggtagaattcagcagaaaggccatcaggtcccaggcttttctttattggaatactttttattatggctttgatccattacctgttattggtctgttcaggttttttatttcttcatggttcaaacttagtaggttgtatctatctaggaatttgtccatttctagattttccaatgtattgccatatagttgctcatagtagtcactaatgatcctctgaacttctgaactatcagttgtaatgtctccattttcatttttgatttacatggatctttctttttttcttagtctggctaaaggtttgtcaattttgttcatcttttcaaaaaatcaacttttgtttcaatgatcttttgtatgcttttatttcaatttcatttatttctgtgctgatctttattatttcttctcttctattaattttgtgtccagtttgctcttgcttttctagtttttttcaatrcatcattaggttatttaaaggttttcctttttatgatgtaggtacttatagctataaacttcccttttagtattgtctttgctg

SEQ ID NO: 655509 - DNA, 613 bp, Homo sapiens
cgtacttgtatatttaatctttatttctagtctgattctataacttttaaatgtaactaatataaaataaatgatctcatcaggtgtgtgattttatacatctcctaaaattctccctagactctttccaagaatcatattcctgttccagtccgtgttatcatagctggcttaagatttcctataataaactactcttttcaattgtcacccattagtaattaatatcattaatattaccaaaattacctatcttttaaatcatactatttgaaaactctctagtattctgtcacaccccttatttacccattttaaaattattgatacataatagttgttcatatttatggggtacatgtgatattttgttacatgcatacaatgtgaattgtatgcattgtgtgggtaattataatatccatgatctcaaaaatttatttctttgtgttgagaacattctagatcttctcttacagctattttgaaacatacaataaattattgctaactgtrgttgccctactgtactactgaacactagaacttattccttctatgtaactgtatttttgtacacattaaccaagttctcttcaccccgacgcctgcc

SEQ ID NO: 655510 - DNA, 648 bp, Homo sapiens
ttggctttataataaagtttaagaattgcattctggacccaagattacctagatctgaattctacacaggtagctgtttgactttagacaacactctaagcttcagttacctgatctacaaacagggataaaaatarcaataccacatcaggttggtgcgaggcttaaacaatcaggcaaaagccctatcgccagtgcctgatacacaataagctaaaaaatgttaactattattattatatggttactaggagcaatttacatttttatctcgatttacataatacatttctaaaataatttgtgtaaatggaaactcagattctccctggcttatagtacaattttacattctgtctttataactgtgatctaactggaaggacttctcacttgtattttgtttctccacatttttcaccactgcagaaccattcatccacccaaagtcaaacattaaatggactagagtaatatttaaattaaaatagaaacatcgccataaagttttaaaatacaattatgatttttaaattgcattatccaaagtgggacatcatagcatgcaatgtctcaagtttcagtaacaacgtttactgatcatgtagtaggcaggtccccttagaatccatgacccccgtacattct

SEQ ID NO: 655511 - DNA, 645 bp, Homo sapiens
cacaactgccaattctagtttgtaacctcagggtcctgggctgggatacttgtgactcctctaactcagcttgaaggaactgatgaggtaaaagagtcagaaagtcacaagaaaaatccagtccttcgaacctacccaggatgaaactgataagcaggaggacaaatgaactggtggtggtaatgatggcactaagagtctaggagaactacacctttgagatagaggtttccagattgctgtggttgtgaatcctgtgtgatacagattatacaaactgggaattcttttgtataattaatttgaaccgagaaatatttataaagcactattacatcaaaatatactataaacagtagtctcttattatctatgggagaatggtttcaagacccactttgaatatgaaaatttacagatgctcaagtccttatataaaatgatgtagttttgmatataatctatgcacatccaaatactttaagtcatctctagattacttataatacctaatacaaagtacatgctatgcaaataatattatactgtattgtttagggaataatgacaagaaaaaagtctgtacacgttcagtacagatgcaaccactcatttttcttcgcctgatattttcaattcatgatt

SEQ ID NO: 655512 - DNA, 645 bp, Homo sapiens
cacaactgccaattctagtttgtaacctcagggtcctgggctgggatacttgtgactcctctaactcagcttgaaggaactgatgaggtaaaagagtcagaaagtcacaagaaaaatccagtccttcgaacctacccaggatgaaactgataagcaggaggacaaatgaactggtggtggtaatgatggcactaagagtctaggagaactacacctttgagatagaggtttccagattgctgtggttgtgaatcctgtgtgatacagattatacaaactgggaattcttttgtataattaatttgaaccgagaaatatttataaagcactattacatcaaaatatactataaacagtagtctcttattatctatgggagaatggtttcaagacccactttgaatatgaaaatttacagatgctcaagtccttatataaaatgatgtagttttgcatataatctatgcacatccaaatactttaagtcatctctagattacttataatacctaatacaaagtacatgctatgcaaataatrttatactgtattgtttagggaataatgacaagaaaaaagtctgtacacgttcagtacagatgcaaccactcatttttcttcgcctgatattttcaattcatgatt

SEQ ID NO: 655513 - DNA, 645 bp, Homo sapiens
cacaactgccaattctagtttgtaacctcagggtcctgggctgggatacttgtgactcctctaactcagcttgaaggaactgatgaggtaaaagagtcagaaagtcacaagaaaaatccagtccttcgaacctacccaggatgaaactgataagcaggaggacaaatgaactggtggtggtaatgatggcactaagagtctaggagaactacacctttgagatagaggtttccagattgctgtggttgtgaatcctgtgtgatacagattatacaaactgggaattcttttgtataattaatttgaaccgagaaatatttataaagcactattacatcaaaatatactataaacagtagtctcttattatctatgggagaatggtttcaagacccactttgaatatgaaaatttacagatgctcaagtccttatataaaatgatgtagttttgcatataatctatgcacatccaaatactttaagtcatctctagattacttataatacctaatacaaagtacatgctatgcaaataatattatactgtattgtttagggaataatgacaagaaaaaagtctgtacacgttcagtacagatgcaaccactcatttttcttcrcctgatattttcaattcatgatt

SEQ ID NO: 655514 - DNA, 553 bp, Homo sapiens
  misc_feature 1, 2, 3, 4, 5, 6, 7, 8, 9, 10, 11, 12, 13, 14, 15, 16, 17,18, 19, 20, 21, 22, 23, 24, 25, 26, 27, 28, 29, 30, 31,32, 33, 34, 35, 36, 37: n = A,T,C or G
nnnnnnnnnnnnnnnnnnnnnnnnnnnnnnnnnnnnntaagcattattctrtagatggaatatataaatagccatcaactattttcaagaaaaaattaagtataaatcttttgcatttgttcaaagtatgtatccgttgccacaggtgtaaagatacgagtaaaaaacatgctagccccattcttcagagctcccttttaatatgaggaaaatgttatacacatgcaatgtttaattttataaatttatttatgcttctcaggtcatacactatttaatttagacaaaaagtaggaaaataatgatattttctcacactaggcattcaaacatgagaaattaactttgttttctataaaagatttttggaaagttaggagatacagagaaatagaaagcatatataagaaataaccttatacccttcagaaattaacatatattcttccactgtatattttaaagatagaaaatgtgataaataaagctaaatttttatttaatcattatctacagccccatcctcttctacctgtctctggagacactttca

SEQ ID NO: 655515 - DNA, 580 bp, Homo sapiens
agtgaactttcgatttcaggtgggtagggtcacaaaaggctctttatgcttgatattgaggctggaaaatcattcctgcttttagggaaaatctgattatttgtcttataatgtagagttctgtaacaaaatataaattttagggtcaggtcctcatcaacatgcaggcaaggaatctaaacttctccatgtagacaagggatgtgtctgttcatcatggtgttcctgccaattggaatagtgcctgggacacggaatcgtgttatcatacgtgttgaatgcatagataaccatacatgttgaatgcactgttggacatccatgaaattcatgttctagcataattttctattgctatggtctcaggagcattacrtggggctcatactgaagggtctcagagattttgagcagatttcagagtaagagggtgaaggccgggttttttagagaagcaaaacagtcttctgcaaattgggaggagattcctcaccagatgctgggtctgctggcaccttgaccttgggcttcccacctccagaattgtgaaaagtaagtgtttgttgttttaagccactca

SEQ ID NO: 655516 - DNA, 580 bp, Homo sapiens
agtgaactttcgatttcaggtgggtagggtcacaaaaggctctttatgcttgatattgaggctggaaaatcattcctgcttttagggaaaatctgattatttgtcttataatgtagagttctgtaacaaaatataaattttagggtcaggtcctcatcaacatgcaggcaaggaatctaaacttctccatgtagacaagggatgtgtctgttcatcatggtgttcctgccaattggaatagtgcctgggacacggaatcgtgttatcatacgtgttgaatgcatagataaccatacatgttgaatgcactgttggacatccatgaaattcatgttctagcataattttctattgctatggtctcaggagcattacgtggggctcatactgaagggtctcagagattttgagcagatttcagagtaagagggtgaaggccgggttttttagagaagcaaaacagtcttctgcaaattgggaggagattcctcaccagatgctgggtctgctggcaccttgaccttgggcttcccrcctccagaattgtgaaaagtaagtgtttgttgttttaagccactca

SEQ ID NO: 655517 - DNA, 537 bp, Homo sapiens
tacccgtttcgaacgaaggccacagagtggtccaaatatccacttgcagatcctacaaaaagagtgtttcaaacctgaactatcamaggaaggttcaactctgggattggaatgcaaacatcaccaagaagtttctgagaatgcttccgtttagttaggtgcagttatcgcgtttccaacgaaatcctcagagaggtcccaatatccacttgtagattctacaaaaagtgtgtctcaaacctgctccatccaaaggaatgttcagctctgtgagttaaactcaatcatcacaaagtattttctgagaatgcttctgtctagtttttctatgaagctattccctttactaccataggcctcaaagcgctccaaatctccacttgcacattccacaacaagagtgtttccaaactgctctatcaataggaatgttcaactctgtgaggtgaatgcaatcatcacaaagcagtttctgagaatgcttctatctagtatttaggtgaagatatttccttttccaccacaaaccacaaagcc

SEQ ID NO: 655518 - DNA, 227 bp, Homo sapiens
tttcatagctgctctttccaaaggaaagttcaactctgggagttgaatacaaacatcaccaaaaagttcctgagaatgcatctgtrtagtttttatgtgaagatgattccgtttccaacgaaatcttcaaagaggtctacatgtccccttgcagatgccacagaaagagagtttcaaaactgcgctctcaaaaggagtgttcaactccgtgagttgaatgcagtcat

SEQ ID NO: 655519 - DNA, 227 bp, Homo sapiens
gtttcatagctgctctttccaaaggaaagttcaactctgggagttgaatacaaacatcaccaaaaagttcctgagaatgcatctgtatagwttttatgtgaagatgattccgtttccaacgaaatcttcaaagaggtctacatgtccccttgcagatgccacagaaagagagtttcaaaactgcgctctcaaaaggagtgttcaactccgtgagttgaatgcagtca

SEQ ID NO: 655520 - DNA, 608 bp, Homo sapiens
gtgtctcaaacctgctccatccaaaggaatgttcagctctgtgagttaaactcaatcatcacaaagtattttctgagaatgcttctgtctagtttttctatgaagctattccctttactaccataggcctcaaagcgctccaaatctccacttgcacattccacaacaagagtgtttccaaactgctctatcaataggaatgttcaactctgtgaggtgaatgcaatcatcacaaagcagtttctgagaatgcttctatctagtatttaggtgaagatatttccttttccaccacaaaccacaaagccctccaaacgtccacttgcagattctagaaaaagagtgtttcatagctgctctttccaaaggaaagttcaactctgggagttgaatacaaacatcaccaaaaagttcctgagaatgcatctgtatagttttkatgtgaagatgattccgtttccaacgaaatcttcaaagaggtctacatgtccccttgcagatgccacagaaagagagtttcaaaactgcgctctcaaaaggagtgttcaactccgtgagttgaatgcagtcatcacagagaagcttctgagaatgcttctgtctagatg

SEQ ID NO: 655521 - DNA, 227 bp, Homo sapiens
gtttcatagctgctctttccaaaggaaagttcaactctgggagttgaatacaaacatcaccaaaaagttcctgagaatgcatctgtatagtttttatgtgaagatgattccgtttccaacgaaatcttcaaagaggtctacatgtccccttgcrgatgccacagaaagagagtttcaaaactgcgctctcaaaaggagtgttcaactccgtgagttgaatgcagtca

SEQ ID NO: 655522 - DNA, 548 bp, Homo sapiens
aggttatatacatttagcattgtacatacgtgtgcacccttctgcagtatacatctagactggcaattgacggagatatgctccaagagagcaaagcagtttctccttaagcctacttctagtctggcctgctaactacctattaatgtttttctgaaatttaaaattaaatgacactagagtgaaataagcaaccagcgattatagggaataaaaggtactctgaacacatgggagtgatgatagagtctatgcatcccaggcacaaccactgatcttccactatgcatgaataaaccttttaagactctcagctactttaaaatattttgcctttcccaaccttaaaatattttttcagatgatccctaggaaaaaacagtgtctggaaccacaagccattatgaaatccttattaagtacacatgtaggaaaggaaaktcatcaatgcatttcttggctaacacaaatgtagatcagaaagacttggagtaaaatctctgcaactttacacaaagtgaagaataccataatttgtatcaatatcc

SEQ ID NO: 655523 - DNA, 594 bp, Homo sapiens
agggacttgtctgaactctattcctaagtgtgattcttggaaaactccataacctctcagggtatcacattcttcaactgggggcaataatccctaccttgctgacacctcagagttttgataagggccaaatgaaaaaaaaaaaaaaaacttcagtgagtatgtattacttgttaagcactactttaagggagtattgttctttgcactttgcatgcattaactcctttaatttcctcagtagtcctataaggtaggtactatcatggtctcattgcactgatggggacattgaggcacagaggaggcaaacaattctctcaagctcacttgtgtatgtggctgtttcacatacacatgaacagcacagtggtgttcagccactgcactgttcaaccacccctagtctataaaatcaaactctagtctggctttcttaactggagtctttctctaccttctcattctgagccctggctttcaccygcgtatcttgggagcccctcacctaagagtaggagaagggtaagcattctcctcattctatagtgctttgctcaggccactgttctgccacctgcatgtaaaaccccc

SEQ ID NO: 655524 - DNA, 579 bp, Homo sapiens
cgcatgtaatgtgataaatgctttaataggagtgatcacaggattatatggtcagggaagacttcccagaggacagtgcctgagtggaatattgaagaatgatcagtaaaaaaggaaatgaagaacatgcttggaagaggaggtacaatgtgcaactgctaagaggcataamacaagtgggttttattcagaggaatggtaagtaattcagtcttcttagaccccacagaggcaaagttgaagtggagaaaatgaatactagaggcacacctgaggcctggccatgaaaggcttttaatgtgattttaggaatgtgtgaattcccaggggacttaattttccatttgctaatgaacattaacaaatccttgtttttgaccttagacatttgaatgtttgtgcaaatacatgttaacacacataagcatatgcatgtgcactcacatggatcctgtgaatgccagattcctggattttcacattccccatgttggactggggaatgcttgtcccctgaggcaaatgaaacagagccaggaatgttgggtatggggcatgcgatacacatagagtcagagt

SEQ ID NO: 655525 - DNA, 581 bp, Homo sapiens
gtagaatgggaacaacatttatcctcatagtgctcacactggtttcaaaattccattaaacattggtttcttaatcagaatatgctgcagttctgaattacaaactaatcactgtttttcatacatattcatgaaacttgcattactgtacatatataaaaattaattattagaagcaaaattaaatgctcccaaacctgtgggtgaaaaccaaatagyaccttgagtacacggacatctgaatgtaggcaccatttgtaggtgagtgaataccttcttcagtagtctcagtcctgtgttgacttcatacctttttcttgcacctactagcacacattcaccactgttcccaggggctgtgaattgacatccttactttctccttttttatcagtgaaaaagacaagcctaactcagtttgcctccatgagaagagttttcttgtgttctgtaggtctatcccaagatttatacaattgtgaaaagtgaatgtaatttttcagaaagcaatggtcatcttttatattgtagcaaatgtgcctccagaaacacaagaaagatcaccaaggcattatcaattt

SEQ ID NO: 655526 - DNA, 581 bp, Homo sapiens
gtagaatgggaacaacatttatcctcatagtgctcacactggtttcaaaattccattaaacattggtttcttaatcagaatatgctgcagttctgaattacaaactaatcactgtttttcatacatattcatgaaacttgcattactgtacatatataaaaattaattattagaagcaaaattaaatgctcccaaacctgtgggtgaaaaccaaatagtaccttgagtacacggacatctgaatgtaggcaccatttgtrggtgagtgaataccttcttcagtagtctcagtcctgtgttgacttcatacctttttcttgcacctactagcacacattcaccactgttcccaggggctgtgaattgacatccttactttctccttttttatcagtgaaaaagacaagcctaactcagtttgcctccatgagaagagttttcttgtgttctgtaggtctatcccaagatttatacaattgtgaaaagtgaatgtaatttttcagaaagcaatggtcatcttttatattgtagcaaatgtgcctccagaaacacaagaaagatcaccaaggcattatcaattt

SEQ ID NO: 655527 - DNA, 589 bp, Homo sapiens
agatccagagaaaatccatataaacaatgaagattgaaataagaaggaaactcaagcacatatatgtaaggccttcaaaccatacaagttaccaaagtcatcacagactttgattctcagctttttgaaatcaaagcaaaaagagaaaaacaattttcaatgcttttcagaaaaatatactatttatcagaaagtgcaaagaagtgttgtgacatttcatactgacagtagtaatagcaatattaaaaataataatgggagggcagtcaagatggtggactagaagcagctaatgtgcaccactgtcatgaagagggaacaakgtggctagtaaacactgaccctgcaagccaatcatttaagaaaccacgttggcatgcatcaaggtagcaaggtgagacagagaacagagaagaacaaaactgggcaatagcctatctgggatcagtgaggaagtcaggagaagctccccaacaagaggaaagggtaagtgagaacccacaggagatccacatttctcacagggacctgtgcaatcctgcaaatgggagaatcacctggcatccctaagtctctagactgacacgga

SEQ ID NO: 655528 - DNA, 541 bp, Homo sapiens
gacaaaactgtaaattgtacttccaatgaaatttattaattgaaaaattarttattaaggtttttcttagtaacaaaaaagatttgttataataatttatgttaggatgaaaatggctatttttgaaatctatgtatgtcaggtaattctcctttatttataatttccagtgacgttcatctataccttttctctgcttactcttttttttgtctgtccccactacaaataacttgcctagtctcacaaattttaatgttgttatccttaaaagtgtggaaccttatctactaattacaggttttttggagttgttttcctaacacactaagcaggaagacttaatgatgagactccttaatattataatttagttttggatcaatagctttactaagagttgactgaatttttcagtgccaaataattggaaattttattaatttgaaattttatatgttatgaataagtggtttatgtcaatttgtattatgtgtattgtgacatgataattgaagttttagtggaacttaattgtagc

SEQ ID NO: 655529 - DNA, 495 bp, Homo sapiens
gcatatacattctaaaattgactrtaacaataagccaagatattaaaaattgagtaatgtgaaatataaaagtctgcatttaaagtaaaattgtcaactggaaatttccatatagtaggactgcatggctaaatagaaggaaaattttaaataaaaaatttaaaggacttaatgaattttttgctctagtttcattatataccaacactatgtcaggagtgccaaaatgattatagtgtttttaaacttgtagtattaggagtagagcacatgaatcaaaggaaaacagctatctgttctccactactgagactatgctcaggccttggctcatttgagcaagagctaaaaaccctgtgagcagaaaatgaagtcaagaacaacaaaggatttaggaacaacagaaaacgaggctcatctgaggaaagcaagggtggcactctctcaaaggtaggtgaacatgctgactgttctgaaatatttatataatggtca

SEQ ID NO: 655530 - DNA, 424 bp, Homo sapiens
acagcaatattaattaatgtgttattaatttatcaatgccagtgcttctaaacttcctaaattaactgctttggacacaggactgcaactctaaatgacctcagaataatatttagagatttgatagaawagaatatcttgaaatatgcccagttatctttctgatcaatcctaaatgaattttatttggttgaagagactatttggatagcagagtttctttgaaaaataacagtctctgaaagttcctccagaataaatgttcagcaaatgatggcccttgagccaaatatgtctatctgcctgtttctgcagatgaagttgtactgacacattctcagtggctgttttgtgctaaaacagctgagttgagcagtagcaacagagactgtacgactcaccagacacttcacagcgtcggccc

SEQ ID NO: 655531 - DNA, 596 bp, Homo sapiens
ttttttttctcccgaatattacctctgttcttagtttcaggatgcaatatattaacaattagagatgtttaatgttttcttggctcccttcgttatctttggtttcctctcagttcctctgtttctgttttggtttacatgtgtctttatctttctggacacaggcttttcttaaatgtctwctagttattatctgtgttttagtatttaaggttaagcactaaatattttatcacaatcttggacagagatttgatttcttctttacttcagggatcatattaaggtttttactgcctccagtttttgatatccccatgtcatgtcatacgtcgttaggcatatcagcttctccagagtagaatttaaatatgttgccagtaattaagcatttcttagactactggttaagtttctacattaaagatacataagaatgcattatctctaacaagataaaagttttggtcctctctcatgaaatagactcaatgtaagcaggtagtacagggcaggtataaacccctgttccacaaaacttatttatttctcgatgagaggaaagaaggaaagagtgcagagtaagcagctgtctc

SEQ ID NO: 655532 - DNA, 603 bp, Homo sapiens
tttctctttctttcacttagtaatatatttataatcttggatcttttagttgtcactccagctagtcttccaaatgggtattatamagaatagacatcaatgcatccaaacccttcacttttggcttcggcttggcttctcttttctgtgcacaatgcaaacatctgaggcactttttcctgtgttttcctttaaagcttaggttaatcctagaactaatcagccatatgttttctcattgcagatatccaaaaacagccttagaatgtccatggataatttcaaagtaaaggaatagctgattattccttttatttaaaaaaaaattcaggaggaaagcaaagatctgtatccatatttacatctatatctatctatttaattctattgattgttgttgtttgtttcttctcagaccacagtctcaactcacagccccaaacaagtggaagtacaggggtcttcattctaggagccttgactcatggatgagctcctctggtgaaaccggaatgaggaggtcatttggaagttgttgagtagctgaaaatatatcagcatagaatacttcaatgttataataactgcctcttgagctaacaa

SEQ ID NO: 655533 - DNA, 603 bp, Homo sapiens
tttctctttctttcacttagtaatatatttataatcttggatcttttagttgtcactccagctagtcttccaaatgggtattataaagaatagacatcaatgcatccaaacccttcrcttttggcttcggcttggcttctcttttctgtgcacaatgcaaacatctgaggcactttttcctgtgttttcctttaaagcttaggttaatcctagaactaatcagccatatgttttctcattgcagatatccaaaaacagccttagaatgtccatggataatttcaaagtaaaggaatagctgattattccttttatttaaaaaaaaattcaggaggaaagcaaagatctgtatccatatttacatctatatctatctatttaattctattgattgttgttgtttgtttcttctcagaccacagtctcaactcacagccccaaacaagtggaagtacaggggtcttcattctaggagccttgactcatggatgagctcctctggtgaaaccggaatgaggaggtcatttggaagttgttgagtagctgaaaatatatcagcatagaatacttcaatgttataataactgcctcttgagctaacaa

SEQ ID NO: 655534 - DNA, 571 bp, Homo sapiens
gaccttgagaagtctgtttaatctgagactgtttcatcctcagtcacatgggaataaggagagtttgytgagaggcttttaaaaagcaaaaataaataaataaataataaaaagcaaaaactttgaaaacatggagtctcttttttctcccctgagatacatcatttgaaaaaggtggcacctgttccagctcaaatcattcagcagtgatcttggtaataagtactttcctgaaaaaataccagtttgaagaaaagtaatatttcaaaacactgcctagtccttcacatttgtcccatgtatctttggcttcactcagctaacatccactgatatggattaaaagttaaacctgtttgtcttgttcctttttctactgacgcacgcaagagagaaagctctccagggaactctcctcatgaataatatcaaatttcaaaccaacaagtccacatccgaaaagcagaatggtagaaaggcaagaccttggttctaggtcctcctctttcactgtcactggacaattactaaccaaccaagacctctagttcccatttgtgaaccaagggca

SEQ ID NO: 655535 - DNA, 602 bp, Homo sapiens
tgctgtgtggcattaagagatccaccgggttcgctgaccttccatttcctcatctctaatctgaggataaaagcatttcaactcacagggcaagcatcatggcatttgcaagagttctttgttaaacatattacatacaagggactctttattacattttaaaaattcagagggaaatattgatcaaaaaattatctagcagcatgatacataaggaagaatatggatttaaagtcatactgaactaaatatagatctcaccttcaccactcctagctgtgtggcctcaggcaagttacttgacttctctgaacctcagctttctcatctgcaaaattggggtagaagtaccccccacccattagggttgctgcaaggcctaactctgataccctctgtaaatgcccctggctcgtacaaagtactggatataggtgastaactcagcccaggggtgcccagagcagcatggcccacacaatccagatttggggatgatccaagagccagctctgctctgcacatcccctagcttgagggaagaggctgcctcctcccctgacactcctctgaaagctattcttcaggctcacagctctggc

SEQ ID NO: 655536 - DNA, 602 bp, Homo sapiens
tgctgtgtggcattaagagatccaccgggttcgctgaccttccatttcctcatctctaatctgaggataaaagcatttcaactcacagggcaagcatcatggcatttgcaagagttctttgttaaacatattacatacaagggactctttattacattttaaaaattcagagggaaatattgatcaaaaaattatctagcagcatgatacataaggaagaatatggatttaaagtcatactgaactaaatatagatctcaccttcaccactcctagctgtgtggcctcaggcaagttacttgacttctctgaacctcagctttctcatctgcaaaattggggtagaagtaccccccacccattagggttgctgcaaggcctaactctgataccctctgtaaatgcccctggctcgtacaaagtactggatataggtgagtaactcagcccaggggtgcccagagcagcatggcccacacaatccrgatttggggatgatccaagagccagctctgctctgcacatcccctagcttgagggaagaggctgcctcctcccctgacactcctctgaaagctattcttcaggctcacagctctggc

SEQ ID NO: 655537 - DNA, 574 bp, Homo sapiens
tcttaaaaatatatacactcaacagtggagcacccagcttcataaaacattcttggagacaaatgaagagacacaaattattacacaataatagtggaaaacctcacaaccccactaacagtgttagacagatcattgaaacagaaatctggtagtaatcctagcaaaaatattccaaaaactctgggaggggggactcttccctaccttattgtatagggccagcattgttcttacaccaaaacctggcagagacacacataaaagaaaacatcaaatatccctgataaacataaacacaaaattcctyaacaaaatactggcaatttgaatccagcaacacatcataaagccaatgcaccatgatcaagtgtgctttattcctaggatgcaagtgtggttcatcgtaggtaaatcaataaatgtgatatatcacataaacaaaactagaaacaaaactacatgatcaactcaatagatgtacaaaaggcttttgataaaatcaaatactccttcatgttaaaaaccctcaccaaactagaagttgaaggaaaatacctcaaaatactagata

SEQ ID NO: 655538 - DNA, 574 bp, Homo sapiens
tcttaaaaatatatacactcaacagtggagcacccagcttcataaaacattcttggagacaaatgaagagacacaaattattacacaataatagtggaaaacctcacaaccccactaacagtgttagacagatcattgaaacagaaatctggtagtaatcctagcaaaaatattccaaaaactctgggaggggggactcttccctaccttattgtatagggccagcattgttcttacaccaaaacctggcagagacacacataaaagaaaacatcaaatatccctgataaacataaacacaaaattccttaacaaaatactggcaatttgaatccagcarcacatcataaagccaatgcaccatgatcaagtgtgctttattcctaggatgcaagtgtggttcatcgtaggtaaatcaataaatgtgatatatcacataaacaaaactagaaacaaaactacatgatcaactcaatagatgtacaaaaggcttttgataaaatcaaatactccttcatgttaaaaaccctcaccaaactagaagttgaaggaaaatacctcaaaatactagata

SEQ ID NO: 655539 - DNA, 564 bp, Homo sapiens
atgatgtttcataacaaccaatttttcgtgacatagattttagaatcaggaagacctgaactttctgcttctatagttattagccgtttgattgcacaggtttttggctgcaaacaacagaaatcaattctagctaattaaagccaggatctttattggatkttgtgcagtcaagggttaacccagcaggtgcagattgctcaagccctgaacattccaaagaaaggcctgtctttaggaggactggcccttgacaggttcctgggagacagcctctgagcccttggaacatcctgcttgagacgagtgtttttgtactcctgaggccttgtgtcatgttgtaccggtgtgatctctgggggctggacactgggtagcgaagtagtggtcacacaggtgctgcctagctatctgaccggctggcaatagacacaccctagatgccaaaaattaggtgaacttccatggttggcaatgcttctcttgtgttgcctcacatcactgatgggagaattaagtgctgtccatgcaactctgctcagagagacaactagagacttgttc

SEQ ID NO: 655540 - DNA, 564 bp, Homo sapiens
atgatgtttcataacaaccaatttttcgtgacatagattttagaatcaggaagacctgaactttctgcttctatagttattagccgtttgattgcacaggtttttggctgcaaacaacagaaatcaattctagctaattaaagccaggatctttattggatgttgtgcagtcaagggttaacccagcaggtgcagattgctcaagccctgaacattccaaagaaaggcctgtctttaggaggactggcccttgacaggttcctgggagacagcctctgagcccttggaacatcctgcttgagacgagtgtttttgtactcctgaggccttgtgtcatgttgtaccggtgtgatctctgggggctggacactgggtagcgaagtagtggtcacacaggtgctgcctagctatctgascggctggcaatagacacaccctagatgccaaaaattaggtgaacttccatggttggcaatgcttctcttgtgttgcctcacatcactgatgggagaattaagtgctgtccatgcaactctgctcagagagacaactagagacttgttc

SEQ ID NO: 655541 - DNA, 585 bp, Homo sapiens
caatctttactttttaaataatatttaaagatgataaaattctcacggaaacatctaagcattgagtggatagaacagactcttatttccccctaagtagctagaacagtctctcatgtgagcacctaaacacctatttagatcatttaaatgctatacacgtcaaaacactccaacctcacacttcctttgaagtcacgacaatcagttttttcttagtgtcattttttagcattgctatggcacttcacttttgacaagtgttttataattatttctactcttagttaactcctagttattcatttgcatgcagttaactttcccaatgaaatacagattttttggcaaaaatgaacctacccgtaaccaagaggttcatacagcagaattgcagataattgtgtacccacaggacgaataaggtagatagataggtaggtagacagacaaacagacataagaaactaattccaaggaccagtaacattcttgtattcttgtcttactggaattatcagtcacatcccyatgttgccaatgagaacatgaacgaatgagagactggtattcacatgtgaatta

SEQ ID NO: 655542 - DNA, 586 bp, Homo sapiens
caagatttttgtggttctttgtacactaagtaattttggattacattctagacactttgaatattatatcatggcactctgggtcttgtttaagttctgtggagaatattgatatttggttttggcaggcaattgactgagtatgtacaagctacaagtttcagtacactctctatagactgtgatgccaaagtcagttcaattttcaaagcttctgtcatgctttttggatctttcctaagtgtgtactgccaaatggtcagtctgagacttggacagtctattagttcagttctcaaagtctttggtatgcaaatgaggatcagacctatatttgtgcagcttaaaggtgagcttggtgctcatgaacaactttatagggttgatttcacaagcccctcccttcccaagatctctccagtactttccygttccctgggcctcccctacatggtccactagacaaacacttggagttctagttaccctgctgtgtcacactctgtgtcacacactttcatgactaaacctgtgtcctggccaaagcagaagaacagaggcagggaatcaacaggggtttgtccca

SEQ ID NO: 655543 - DNA, 595 bp, Homo sapiens
cttctggctctcctcagtgccacaactgttgtaatgtatcccagacttttggcagtgccacactgactgcgatgcatttggcttcttatgtgccccagtactgaaataaatgcagggcttttctagaaaaagctagtctataaagactaagtacctgtatcttacaataacacaaacattgacaaacaaccgcaaggatcaagaatatccagggaaacatgacatcatgaaatggacaaaataatatggcctaaagaaatggtaattataaattgtctgataaagaattcaaaataactcttttaagcaagatcagtgaattttaagaraatctagataaaaaaaatcaatgggaaaaatttaaaaaagtgagtagaatgagaaatttaatagatttaaattaaaaacaaagttaaacataaatgttgaaactgaaaaaatacaattaacacaatgaaaatgtgaaaaaaagtatcaacagcagaattgaacaggcagaaaaaattgtaaatttaatcacactttatttgaaaatatatagtaagaggagaaaaagaaaaaataatagaagggatgaagaaagcttacataattt

SEQ ID NO: 655544 - DNA, 595 bp, Homo sapiens
cttctggctctcctcagtgccacaactgttgtaatgtatcccagacttttggcagtgccacactgactgcgatgcatttggcttcttatgtgccccagtactgaaataaatgcagggcttttctagaaaaagctagtctataaagactaagtacctgtatcttacaataacacaaacattgacaaacaaccgcaaggatcaagaatatccagggaaacatgacatcatgaaatggacaaaataatatggcctaaagaaatggtaattataaattgtctgataaagaattcaaaataactcttttaagcaagatcagtgaattttaagaaaatctagataaaaaaaatcaatgggaaaaattwaaaaaagtgagtagaatgagaaatttaatagatttaaattaaaaacaaagttaaacataaatgttgaaactgaaaaaatacaattaacacaatgaaaatgtgaaaaaaagtatcaacagcagaattgaacaggcagaaaaaattgtaaatttaatcacactttatttgaaaatatatagtaagaggagaaaaagaaaaaataatagaagggatgaagaaagcttacataattt

SEQ ID NO: 655545 - DNA, 601 bp, Homo sapiens
ctacattgctactgcctttactaaacctcatgttatctttttacctagattttgttatgggaaacttgatgtgactagcacacctttctgattcatttagaattttgtgttctaaatttggtaaaatgtataaaagatcattttacttccctgcwaataatatactgtataatgattatgatgattacttctttctgcttcttttctttagtagcagagttctgtttttcaaactaaaccttttgcacaacccaattaattaaaatagattgatgaagtgatgcactaattgctaactccatatgaccacaacaccctcaattttgccaccaaagaaagtccatgacaacttaaggtataaaactaaccattgcagaaacaacagcaacaataagtgctttttagtatgtcatacctgcacacaatattcattgcccagttatatataaatcaaccataattattttccacataattgccacattctatactgtttctatgtctgtagcattcatctcaaaactttggtgcgacagtaagacatcaccttgttcttagtgtattataacatttgttggtacaccttaaaactaagtatgag

SEQ ID NO: 655546 - DNA, 601 bp, Homo sapiens
ctacattgctactgcctttactaaacctcatgttatctttttacctagattttgttatgggaaacttgatgtgactagcacacctttctgattcatttagaattttgtgttctaaatttggtaaaatgtataaaagatcattttacttccctgctaataatatactgtataatgattatgatgattacttctttctgcttcttttctttagtagcagagttctgtttttcaaactaaaccttttgcacaacccaattaattaaaatagattgatgaagtgatgcactaattgctaactccatatgaccacaacaccctcaattttgccaccaaagaaagtccatgacaacttaaggtataaaactaaccattgcagaaacaacagcaacaataagtgctttttartatgtcatacctgcacacaatattcattgcccagttatatataaatcaaccataattattttccacataattgccacattctatactgtttctatgtctgtagcattcatctcaaaactttggtgcgacagtaagacatcaccttgttcttagtgtattataacatttgttggtacaccttaaaactaagtatgag

SEQ ID NO: 655547 - DNA, 601 bp, Homo sapiens
ctacattgctactgcctttactaaacctcatgttatctttttacctagattttgttatgggaaacttgatgtgactagcacacctttctgattcatttagaattttgtgttctaaatttggtaaaatgtataaaagatcattttacttccctgctaataatatactgtataatgattatgatgattacttctttctgcttcttttctttagtagcagagttctgtttttcaaactaaaccttttgcacaacccaattaattaaaatagattgatgaagtgatgcactaattgctaactccatatgaccacaacaccctcaattttgccaccaaagaaagtccatgacaacttaaggtataaaactaaccattgcagaaacaacagcaacaataagtgctttttagtatgtcatacctgcacacaatattcattgcccagttatatataaatcaaccataattattttccacataattgccacattctatactgtttctatgtctgtagcattcatctcaaaactttggtgcgacagtaagacatcaccttgttcttagtgtattataacayttgttggtacaccttaaaactaagtatgag

SEQ ID NO: 655548 - DNA, 527 bp, Homo sapiens
cagctgggccagctggggtgacatcacatactggtaggaccatgatgcccacctgagcccccaaaccagtgagttttattatggatttcaaaaggggagggggtgcaagaacagggagtaggtcacaagatcacatgcttcaaagggcaaaaaggagaacaaagatcatatgcttctgaggaaacaggaccagggcaaaatcagaaactcctgataagggtctatgttcagcggtgcacgtattgtcttgataaacatcttaacagaaaacagggttcgagagcagagaaccagtctgatcaaaagtttaccaggctggaatttcccaatcctagtaagcctgagggtactgcaggagaccagggcatatttcattccttatctcaacsacataagacaggcactcccagagcgcccatttatagaccgccccccaggattgcaattcttttcccagggtcttaatattaatattccttgctaggaaaagaatttagcaatatctctcctacttgcatgtccattaa

SEQ ID NO: 655549 - DNA, 587 bp, Homo sapiens
  misc_feature 1, 2, 3, 4, 5, 6, 7, 8, 9, 10, 11: n = A,T,C or G
nnnnnnnnnnntactcatctatctatctatctatctatctatctatctatctatctatctatctatctctatctcttctatcttcctatctatagccatctttatagttatatcaattaaatttatgtacaataactcttcatgtcctttgaggacttttctstaattatagtgaactatcataaattcagaaaataattatttgtatttcctaattaaattttctaggaaatcgaccatatggcagagcatagtccttagatgctccttattctggtctggatagtggctcagggaataagggtttgactggcaggtagtgctaaagcaacctaggtttaaagcagcacataatctgctttgtaacataactcactgtttccattatcactcatgagtttagtttgtcatttgaaaaatttgttgctatccttactaatgtttttcttagtgtacgttaatacctttccttatcttaattttcccacctacaaatattaaaataataataaatctgtgtctcagttatttttcttggccatatatactttggagtctagtgtccgccccaaatgtgtaaaacaagt

SEQ ID NO: 655550 - DNA, 620 bp, Homo sapiens
aggcactgcaaagctcttcagtttattaaggctttctggtaaatgctcatgactgacactggaaactcatcatgttgcttctttctgctgcctgagttcatggagatgttctgagagcatggcatatactttctgaacattcctaagtgaaagctgcctaagcaccctgaagaaatacttccaaaatattttctttgtatgctcttctttcctccattactttgttttgcatcttagaaatagaaccagtaagttgaagcaggagaaaaaaattggagataacaatttatatcactcctcttcaaactatgtaatgtgaatatttaatatttccagaattccttaaagttagaaaaaaattaactggacaatcatattattgaaaaatcagataacttcttccatcctgctttagtcacattcaataataactgaataccttctttttcaaaatctacagtttgaactgagatattawgtcatttagggggtcaaggctgcagtgagccgtgatcatgccactgcactccaaccaggtcaacagaggacgaccctgtctcaaaaaaatgaataaaatataaaaataaataaataaatataaacaatgttttaatatataa

SEQ ID NO: 655551 - DNA, 595 bp, Homo sapiens
gttgacaagatgcctatgatttctggggagggaaattgcccactcattcctgtggcggcctctctttattatgcaaatacagggcaagtaagcactgtcatccttgcctttgggaaaggataacagaccttcttgtggcttcacagggccacccttccctagaactctcttctgtatgctcagctgtctggggaggtgtcaggggcattggatctcacctctctttcattctgaggttcagcgtaattacaacctctctcacagatgggagtcagctgacaggaaaggataccaaaggcctccaagagggagcttcccttagggaaggttgraagagtgaggagctggacatcatgccaggaagcagagtttgtgctgctgtcccctgcccccgacaacacctgggcacggcagacgttcttaggattaggaacagtggctgcagatgggaccagagttttagatactgcccctttgggaactcagaggtagtgcatcctgtactgaggtctctgcaactttctgaactactttcacaatattggaccaaagatcctttggatttgtgagaccagtttgcagctttaccacaatc

SEQ ID NO: 655552 - DNA, 467 bp, Homo sapiens
agttttcctgaaaaagtggcattcagataggttgtggaaataggttagtgggtgtgccaggtggagggaattcagtgggctaacaatgcaatttttaaaatacgggttaaggatatcaaaaggcaattcacaaaagaggaaacctacatggccgaaatagccccaaacaacaaattgcgtagagacacagtgcacagaaatacatggtacaatcgcaaatatataccacacgcacaacaygtcatgtaaataaagggcacacaatgaaagacaacatgcacagagtcataggaatggcagatggagtcagtgggcagagctccaatcatagggaccctgccctgtgggggaaaggcagacatggccccacccagactcactcttgggggaagggaggaagaacacttaccaataaccccacccccatccttgccctcagtccacagcgcccacctctgtggctacca

SEQ ID NO: 655553 - DNA, 599 bp, Homo sapiens
agaatagaatggagtggggcacgtaactgttatatgtcaaataagacctaggcccagggcagtggcttacgcctgtaatccctttgctttgccaggccaaggtggatggatcacctgaggtcaggagttcgagaccagtcttgtgaacgtggtgaaaccctgtctctactgaaaatacaaaaattagccgggcatggtggcacatgactgtagtcccagccrctcaggaggctgaggcaggagaatcgtttgaacccaggaggcagaggttgcagtgagccaagatcacaccactgcactccagcctgggcgacagagtaagacaaaaaaaagagagagaaaagaaaggaaagagagagagcgaaagagaaaaaaaagaaaagaaaagaaagggagaaagggagggagggaaggaaggaaggagggaaggaaggaaggaagcaagcttgggtgcagtaataaaagcagagagagaaatggaggattcaggaaaagtcgtggagtaaaggaagggaatgcatagggataaacctaggcaattcctatataaaagttgaaatagaaacaaagaatgcacagattcctcctaaaaatatagc

SEQ ID NO: 655554 - DNA, 487 bp, Homo sapiens
gacctaataaaaatggcaacttccaagcctcaatataaagtaacaatggaattgtgaagtgtgtgtgtatgccggtgggtgtgcatatgtgtgtttgtgttcctgcattgcattattagtgctttcttaataatatttaatgaaacttgaaatcagaattagaagaatgagccttggaatggaatttatgactgattaaacrgagagaactccatgtagattcacctcttcagagctatattttaaatttcaaggagaggtatgagtcctgggatttacctttcctatggatatacttatttacactctaaattaaagtaagaactcaagattcttcttttggagggaagatttttctccctttctttagggtgaaggggagcagcactcatctaagcaaaaatatttcatattttcatgttcttcatctgtggtacagactctgacatgtgtaggatgccacggttatcagcaccttgcccaagta

SEQ ID NO: 655555 - DNA, 546 bp, Homo sapiens
tctcattgcaatccaatgaggggtctcagaaacacccattacaatggcttcccaggctcccctcagaacagtcacatgacacctggaatgatgccttcatggagtcatgcagtgtctgctcaacaactgttgctttccattcctcagtaatgacaagtacactggcttctctctctaccatgtccctatctaaaactaaaattttgtatattattcccttgggrccatgttctcaggcagctatcatagctgaaaaaggatctgtcaaagaaggctccactgaaatgttaattactgacaatggcataacgcttttcctgctcagggatgtttgcattttgtgagggtcttagaaatagctaaatctcagctagtatatagcccagcgactgtttcatggataatttttaatacaatgtttgaactaaactcaacaaaataatgaatctctagtagtggaaatacaagctgagtatagaagacttacttggacaaagaagttgtccaagtgtaactcaatctccagaattgagtttgagctaactt

SEQ ID NO: 655556 - DNA, 546 bp, Homo sapiens
tctcattgcaatccaatgaggggtctcagaaacacccattacaatggcttcccaggctcccctcagaacagtcacatgacacctggaatgatgccttcatggagtcatgcagtgtctgctcaacaactgttgctttccattcctcagtaatgacaagtacactggcttctctctctaccatgtccctatctaaaactaaaattttgtatattattcccttgggaccatgttctcaggcagctatcatagctgaaaaaggatctgtcaaagaaggctccactgaaatgttaattactgacaatggcataacgcttttcctgctcagggatgtttgcattttgtgagggtcttagaaatagctaaatctcagctagtatatagcccagcgactgtttcatggataatwtttaatacaatgtttgaactaaactcaacaaaataatgaatctctagtagtggaaatacaagctgagtatagaagacttacttggacaaagaagttgtccaagtgtaactcaatctccagaattgagtttgagctaactt

SEQ ID NO: 655557 - DNA, 567 bp, Homo sapiens
aagagttgtatttacacatatacacatttttaactgcaaaaataaacattacattaacacttgcagaaaagcatttgctgatagccaacacactttcttgatcaaaactctcagcaaactaggaatacaaggtaacttcctaaatctgaaaaaaagtatctacaaaaaactcagtgctaacatccaacttaatggtggaagactgaatattctctttaaaagaacagaaataaggaagtctagtctcataacttccattcaatattgtactggaggttctagtcagtaaaataaggcaagaaaaaagaggtaccagaatagarttagcaattttgtgggatataaaatcaaaatacacatttttgtttttatactagcagcaaatattaaaaattttaaaatgccatttacaagagcatcaaaaatatgaaatataaataaatatggcaaattaggaagcccagtacatacatatatatatatatatatacacacacacacacatatatatatataaaacattgcttaaagaatttaaagaagaccctagtaaatgaagaaatatac

SEQ ID NO: 655558 - DNA, 489 bp, Homo sapiens
atataatatataatatgtaatatatgttatataatatataatatgtaatatatgttatataatatataatatgtaatatatgttatataatatataatatgtaatatatattatattatatataatatataaaaaatataatatatataatataatatgtatattatatgagccattctttcaaatcatacctattttgtatttatgttgtatttcctaacagccagattttggtrcaacatgaatccacaataatattaattctctttatttttcttatttgtacccctgctcatagactctctacttggcttcacaaatcatgcatgtaacaataaagcataaaattataaatgttctcaatatgttcctcctctgttactccttttcattgaataagttagagacatgtatgttagtcagcttggacagctatagcaaaataaggtggaatgaatggcttaaacaacaaaaaattattttctcaca

SEQ ID NO: 655559 - DNA, 320 bp, Homo sapiens
tcatacaaaattgactaacatgcatgtgtgttcatggcagtcatacaaaatatgaaaactcaaagggccaagtaacagacacctttatatcatgttgaggtaacaaaaagaatcggggcttggagcttggtaaaacaggttatgggagggagggaaagagaagggcatggggcaagaatagccttgttgtatagataaaacctcacaggtagcagctttcagaaagaatagatgttatctctgataaagcttctctctctctmtatatatataaaacatatgtatataacatatatatatctaattatatgatctgtccc

SEQ ID NO: 655560 - DNA, 576 bp, Homo sapiens
tggattgaattatttttttctttctttctttttttgttttagagatagggcttcaccatgctgcccagtctggtcttggactcctgggctcaagcaaccacccgcctcaacctcccaaagtgctgggattataggcatgagccactgcagctggcctggattgaatgttttagagcccagtgaacaattaacatataaagaaaagtaactaacactctctgagtatcagtgtattctaggtgataagcaaggctctttatgaatagttatcatttactcccaatttttaacaatgaggaaattaaaactcagartgattaatcaacctacccagtcacacaaagtagcaaggctcagatttctgcttgatatgctgcttttaaaataagtttctgattcttttatgtaaatatctaggtgatgtgtggctgagtcgtatgatagacgtgttcaattattttagaaactctggaacaattttcctagtggttttataattttacagtatcaccagcagtttatgagttttccagtgccatcacattttgccagaactttgtattttcagtaatttaa

SEQ ID NO: 655561 - DNA, 576 bp, Homo sapiens
tggattgaattatttttttctttctttctttttttgttttagagatagggcttcaccatgctgcccagtctggtcttggactcctgggctcaagcaaccacccgcctcaacctcccaaagtgctgggattataggcatgagccactgcagctggcctggattgaatgttttagagcccagtgaacaattaacatataaagaaaagtaactaacactctctgagtatcagtgtattctaggtgataagcaaggctctttatgaatagttatcatttactcccaatttttaacaatgaggaaattaaaactcagaatgattaatcaacctacccagtcacacaaagtagcaaggctcagatttctgcttgatatgctgcttttaaaataagtttctgattcttttatgtaaatatctaggtgatgtgtggctgagtcgtatgatagacgtgttcaattattttagaaackctggaacaattttcctagtggttttataattttacagtatcaccagcagtttatgagttttccagtgccatcacattttgccagaactttgtattttcagtaatttaa

SEQ ID NO: 655562 - DNA, 308 bp, Homo sapiens
tatgcctttacttaactcatcaaatatttatatagatgaggactattgtattggttccccacaggactagttttgttaaattgtgatttagtataattccattagcgttacagtataagaaatagcactatacaattcaaagctgtgtttacmagtagatgtaaatgagaatttcgtttgttaggttgcagtgtcctccttggaagcaacttggaaaacatagtttgctctctacagacgctatgactcatgagcttatcctattttctcgtctgcttttctgctatagtataaggttagagtcaaac

SEQ ID NO: 655563 - DNA, 627 bp, Homo sapiens
gggaacccttcctcatctggaccatctggcctctccaaagttggcaggctggaatgggtgattcaattgaatgacagagatggtgrctgtccctctcctcaggagctcagtccaaggaagagatcagagctgtctgtataaccctggctggagtggctgaagcccccacagggaggtcctgcccagtgaggaggaatggattggggtcccacttaaagaagcagtctggccacgatttggcaaagcaactgtgctgcactgtgggaggcccttccttttccagaccatttggactccccaaagctagcaggctggaacaattgagtcaatcgaactacagagatggtggccacccttccccctgagaacttggtcccatctcagacagactgcagcctgttgtctttggctggctggaattccaagtcagtgagtcttaacttgtgaggtgctgtggaagtggagcccacaaaatgatgctgcttggctccctagattcaacccccttcctaggagtctgtatggatggatgtctcaccttgccagggatcctggggccagaatatgtaaaactcttgagtctctgtgtgcttgagtggctgctctgccaagagttcacagagctct

SEQ ID NO: 655564 - DNA, 550 bp, Homo sapiens
cagttgaatgttatcctaaatgagtaaaaaatgttgtttaatttatagttacaacagtaattatcaaaaagtttgtcttctaaggaaaaatcaagtattaaataaaactgacaactgatattgatgaagtactggcttacatccttgaaactcttaaaaatatattcccatgtgtcataaaattatgatcaagttgaaggctgacaaacaaaaagatgaccagatatgacaagtgttttcactctttctttgttacatgaaattattatttaaaatgtgaaatatgtaaatcaatatttattttatacttaaaagtcccataactcttagttttgttggaatatttctattaggaaggcaagaagagagaggtggcatcttaaaattaacaaagaaaatcaactttastcattacttggacaagttgaacacttaccatttgattcctccctttaaactgaacagtgaaataaagagaaagcacataagagggcctaatttcaaagcttaaacacacacacacacacacacacacacacacacacacaca

SEQ ID NO: 655565 - DNA, 513 bp, Homo sapiens
ttaaaaatataagcttggaggccaggcatggtagctcacgcctgtaatcccagtactttgggacgccgaggtgggtggatcacctgaggtcaggagtttgagaccagcctggccaacatagtgaaaccccgtctctactaaaaatacaaaaaagtagccgggcatggtggtaggcccctgtaatcccagctactcgggaggctgaggcaagagaattgcttgaacccaggaggcagaggttgygatgagccaagaatactccattacactccagcttaggtagcaagagtgaaactctatctaaaaaagaaaaaattttatatatatatatgcttgaaggacttccataattctgatctgcctccaagtatagttggccctctgtatctgtgggttctgcatccatggattcaaccaatcacagatcaaatacatttcaaaagataaaaagaacaatacaacaataaatgtaacacaaataaaagcatagtataacaactatctacatagcat

SEQ ID NO: 655566 - DNA, 395 bp, Homo sapiens
tcctgtttgctgttgcagactcaaactatcctacatctgtcagcacctgcataagaggtctatcttcataaccaaaaggaactttccagataaatggtcacctagtatttggggtcaccataaaccagtgtgttttagtaatgcttgctaacttctgttttggaagttcttrtaattcattcaagttccccttagtttaagaaaaaaagattttatgaactttctctcattagctaatgtggaaggctctgatttttaaaactttttgccataagaaaactttgagaacctcgaactttaaaaaatgtcatatattcatgaattgagtttgcagaggacaagttaatatgaggattaacaaaatactttttatcctcactggttctattatattt

SEQ ID NO: 655567 - DNA, 619 bp, Homo sapiens
tgcttgctaacttctgttttggaagttcttataattcattcaagttccccttagtttaagaaaaaaakattttatgaactttctctcattagctaatgtggaaggctctgatttttaaaactttttgccataagaaaactttgagaacctcgaactttaaaaaatgtcatatattcatgaattgagtttgcagaggacaagttaatatgaggattaacaaaatactttttatcctcactggttctattatatttttgaccctttgatgaaaaatcatttatcagaaccataggcttcacagaaaagagcaagagagcaaaactatctactgctagataattatagagctaattcctagaaagaaatgttagtgtctatgaaatttgttcctcaatttagtcccctatggatttttttttaaattcagtctatttactgaggcttttcaggtatgcaacatgctgaaaaaggcataattagaatgttcactcaacacaaagatagttttgagggctttcaatcttgcattttcaaagcaacttttaatgttgctattttctggaattcgatcaatggttgtattagtgttttccattgctgctataacaaattaccacaa

SEQ ID NO: 655568 - DNA, 562 bp, Homo sapiens
ctttagatctcttgaactttctagctaatcaaggatagaggggtctaggtcgaagacccagctttgcctacagcaggtcaaatatctagacctaatcttagccagagggaccagggccctcagcaaggaatgaatacagcctatactggcttatccttgccctaagacattaaaacagttgcgggggttccttggaattactggcttttkctgaccatggatccccagatacagcgagatagccaggcccctctatactctaatcaaggaaacccagagggcaaatattcatctagtagaatgggaaccagaggcagaaacagccttcaaaaccttaaagcaggccctcgcacaagctccagttttaagccttctgacaggacaaaacttctctttatacgtcacagagagagcagggatagctcttggagtccttactcagactcgtgggacaaccacacaaccagtggcaggtatacataagtaaggaaattgatgtagtatcaaaaggctggcctcactgtggtggtggccatcttagtgtcagaggctatcaagatac

SEQ ID NO: 655569 - DNA, 614 bp, Homo sapiens
  misc_feature 420, 421, 422, 423, 424, 425, 426, 427, 428, 429, 430, 431,432, 433, 434, 435, 436, 437, 438, 439, 440, 441, 442, 443,444, 445, 446, 447, 448, 449, 450, 451, 452, 453, 454, 455,456, 457, 458, 459, 460, 461, 462, 463, 464, 465, 466: n = A,T,C or G
  misc_feature 467, 468, 469, 470, 471, 472, 473, 474, 475, 476, 477, 478,479, 480, 481, 482, 483, 484, 485, 486, 487, 488, 489, 490,491, 492, 493, 494, 495, 496, 497, 498, 499, 500, 501, 502,503, 504, 505, 506, 507, 508, 509, 510, 511, 512, 513: n = A,T,C or G
  misc_feature 514, 515, 516, 517, 518, 519: n = A,T,C or G
catcaatgaatgtatataggagtgactagtataatgtctagatttatgatttagtaaatgtaattcttaygactgaatataaaagtgttaaaagagtcaaattgaaatagaatgttatcagcaaaacagaactgtaataactctgggaaattttatctgtccaaatacgtgtgaaccaaggttcttactatagggtgttgtatgggttagatatcaaagtgtaaatgcaattttttgatatattttaatttagtcaaatttgttaatgctttaatttatgcttttcagtttgttgtaattcaaggaaaggcttttccaattctgaaattcttaaaaattctctggtttgtgtgtgtgtgtgtgtgtgtgtgtgtgtgtgtgtgtgtttacttttataaattcattgactttaaataaatnnnnnnnnnnnnnnnnnnnnnnnnnnnnnnnnnnnnnnnnnnnnnnnnnnnnnnnnnnnnnnnnnnnnnnnnnnnnnnnnnnnnnnnnnnnnnnnnnnnntattctttaacttcagaggtaatcacgatatttaattgagtactagctaaaactttctttagttttatttaggattttcataatcatgaagaaat

SEQ ID NO: 655570 - DNA, 614 bp, Homo sapiens
  misc_feature 420, 421, 422, 423, 424, 425, 426, 427, 428, 429, 430, 431,432, 433, 434, 435, 436, 437, 438, 439, 440, 441, 442, 443,444, 445, 446, 447, 448, 449, 450, 451, 452, 453, 454, 455,456, 457, 458, 459, 460, 461, 462, 463, 464, 465, 466: n = A,T,C or G
  misc_feature 467, 468, 469, 470, 471, 472, 473, 474, 475, 476, 477, 478,479, 480, 481, 482, 483, 484, 485, 486, 487, 488, 489, 490,491, 492, 493, 494, 495, 496, 497, 498, 499, 500, 501, 502,503, 504, 505, 506, 507, 508, 509, 510, 511, 512, 513: n = A,T,C or G
  misc_feature 514, 515, 516, 517, 518, 519: n = A,T,C or G
catcaatgaatgtatataggagtgactagtataatgtctagatttatgatttagtaaatgtaattcttacgactgaatataaaagtgttaaaagagtcaaattgaaatagaatgttatcagcaaaacagaactgtaataactctgggaaattttatctgtccaaatacgtgtgaaccaaggttcttactatagggtgktgtatgggttagatatcaaagtgtaaatgcaattttttgatatattttaatttagtcaaatttgttaatgctttaatttatgcttttcagtttgttgtaattcaaggaaaggcttttccaattctgaaattcttaaaaattctctggtttgtgtgtgtgtgtgtgtgtgtgtgtgtgtgtgtgtgtgtttacttttataaattcattgactttaaataaatnnnnnnnnnnnnnnnnnnnnnnnnnnnnnnnnnnnnnnnnnnnnnnnnnnnnnnnnnnnnnnnnnnnnnnnnnnnnnnnnnnnnnnnnnnnnnnnnnnnntattctttaacttcagaggtaatcacgatatttaattgagtactagctaaaactttctttagttttatttaggattttcataatcatgaagaaat

SEQ ID NO: 655571 - DNA, 614 bp, Homo sapiens
  misc_feature 420, 421, 422, 423, 424, 425, 426, 427, 428, 429, 430, 431,432, 433, 434, 435, 436, 437, 438, 439, 440, 441, 442, 443,444, 445, 446, 447, 448, 449, 450, 451, 452, 453, 454, 455,456, 457, 458, 459, 460, 461, 462, 463, 464, 465, 466: n = A,T,C or G
  misc_feature 467, 468, 469, 470, 471, 472, 473, 474, 475, 476, 477, 478,479, 480, 481, 482, 483, 484, 485, 486, 487, 488, 489, 490,491, 492, 493, 494, 495, 496, 497, 498, 499, 500, 501, 502,503, 504, 505, 506, 507, 508, 509, 510, 511, 512, 513: n = A,T,C or G
  misc_feature 514, 515, 516, 517, 518, 519: n = A,T,C or G
catcaatgaatgtatataggagtgactagtataatgtctagatttatgatttagtaaatgtaattcttacgactgaatataaaagtgttaaaagagtcaaattgaaatagaatgttatcagcaaaacagaactgtaataactctgggaaattttatctgtccaaatacgtgtgaaccaaggttcttactatagggtgttgtatgggttagatatcaaagtgtaaatgcaattttttgatatattttaatttagtcaartttgttaatgctttaatttatgcttttcagtttgttgtaattcaaggaaaggcttttccaattctgaaattcttaaaaattctctggtttgtgtgtgtgtgtgtgtgtgtgtgtgtgtgtgtgtgtgtttacttttataaattcattgactttaaataaatnnnnnnnnnnnnnnnnnnnnnnnnnnnnnnnnnnnnnnnnnnnnnnnnnnnnnnnnnnnnnnnnnnnnnnnnnnnnnnnnnnnnnnnnnnnnnnnnnnnntattctttaacttcagaggtaatcacgatatttaattgagtactagctaaaactttctttagttttatttaggattttcataatcatgaagaaat

SEQ ID NO: 655572 - DNA, 602 bp, Homo sapiens
aaacatttggttctggatacatgttgaacttagttgaatataaaaatcaatagataaaaagtgtgtttaccatactgtataattccatgtacgtgaagcatccagaaaagataaacgtatagggacaaaaagtagattaatatttgcaaagrgctgggaatagaagctggtagtgactgctaatgggcatgagggatcttgcagtgatggaaatgctgtaaagttggattgtagagatggctgcacaactcagtaaatggactaaaaatcttttaactttaagttaaaacagatacattctatagtatgtaaattatatttcaacaaagctgttttaataaaaaaaggaaaaatgtgtttactatatcagcttagaaacatgcctcatttctaggaaataaaaggtagagatgagagatgatttactttgagaaaagacattgtgtcacctatgaaattttattaggcacagagtcatattttaagatagatagttctgtactgctgaaataattttaatgactttatgttgccacatgttaagaccataatgtaggtataaatggaaatgtttacacctgaaatgagtattttcaaattaa

SEQ ID NO: 655573 - DNA, 596 bp, Homo sapiens
ttttaggctgatgatgctcaacagtggacaattctcttcacctgcctgggccccactgcccgcccttccaaacagtgcagggtcacagctgagctctctgagacacctcacaggatctcagcttctaaactatcaagtgtcttctaggtgaaggcttggtctcatagcctttgtggtttcctccaggtaacacttggttttctgacctaaccctggtatatgtgtgacacatgtgtgaatgtgctccctgtggcagcgctgaggaaggactcagtcatcacagatgctgaaaggcaaatgcagtgtgcttttttccaacatctccagtcttgtattatttttacccatcagcccatttgaaaaagaaaaaaaaaagcctcctgttagaattaaatcccctctggagataatgagtattttttaaatctttcattttttttatatagtcatgtttgctcccagttcctgccaggatccactagagggcagagacacctgtgtgtatttgtgtagcacttgctgagtggtaataaaaacagayaccctgccctcccagagccaacctccagtgccagggcaagcagcagcaagtaaga

SEQ ID NO: 655574 - DNA, 467 bp, Homo sapiens
agtttgagaacagcctgggcaacattgtatctaatttaaaaatataaattgtggaaatgtagaaatttaaatttatgttctcaagatttgtattgcaaaggkatttttatgtgatttatgagttgtccatgaagagtttatataaaacacttcatctaattgaataacatgtattttcctgcaaataaccagttctagaagcagagactcttaataccaatatggtaagtctttatcatcataattttgtcattgtagtttatttaaaatatttacttggccaggcgtggtggctcacacctgtaatcccagcacttttggaggccgaggtgggtagatcacctgaggtcaggagttcaagatcagcctggccaacatggtgagaccctgtctctaaaaaaaaaaaaaaaaaaaaaaaaagcacaaaaattatccaggcatgatagtgcatgcctgtaatcccagtt

SEQ ID NO: 655575 - DNA, 467 bp, Homo sapiens
acatgtgcaatggtgcatgcccataatgccagctgctcaggaggctgaggtgtgaggatcagatgggcccaagagtttgaggctgcagtgaactatgatcaaaccactgtctccagtctgggtgactacagttgcccagagccaagactacactagcaagaccctgtctcttaacaaaaaaaagctcacagaagtaggggaggtgaggctggttaatggatacagaattacagttagataagaggagtgggttctggtgttctgtggcattgtagggtgaatatggttaactacgacttattgtatatttttaaaaagccagaagattttgaatgttcacaattcaaagaaatgaamaatggttgaagtagtaaatgtgctagttagcttgatcattacacactatatacatgtataaaaatatcactctatagcccataattatgtatatatgtgtcaattaaaac

SEQ ID NO: 655576 - DNA, 552 bp, Homo sapiens
ttgaaaaacaactagaaatacttggtgacataggcaaaatcagacatttacctgatttcaattaactaaaattctaaaagaagaagctttgagtgtttattaatcaacctagtattcaattttcattttcttttctaaatgagcaaataaggagattatggaatgatttttagtcttcacagaagtaaaataagcatagtgtgttttgagtgttaagacatcaaatgcaatttctcctttaccttactccaagcttgtttgtatggagaagttaagaccatcccatctctatgttatgccacaatgctyctctatagcacacaacttggctccgaaattttgaaagtcaaaatactaacctactatgtgtctctgataaattgcctgaacattacctgattttgaagtgctgcactcctaagactttttcttggaatgagttaaacgttttattccaagaatcctctactgagctagaaagcagagctgtgcatctctgtttcagtaaaaggaggtcaatacagggaactgtggtctctgagaatgcaagat

SEQ ID NO: 655577 - DNA, 271 bp, Homo sapiens
ccggcgtttgactgtggcaaggatgctgctggtgtcaaaaccacaacgtgggaaccacagaaccactagtgggttttcagtgtttcagtgcatacaattcctaatawttctggccaagaaaacttgtaagttcttagattgtcccaaaggtggcgcatgaaatcaaagcaggagaacagtttcctacgaggtgtagcctgggaaagttgggggtgactgatggaaaggaggagtgaagctccgccctttccgctgctaggctgcgcccgag

SEQ ID NO: 655578 - DNA, 271 bp, Homo sapiens
ccggcgtttgactgtggcaaggatgctgctggtgtcaaaaccacaacgtgggaaccacagaaccactagtgggttttcagtgtttcagtgcatacaattcctaatatttctggccaagaaaacytgtaagttcttagattgtcccaaaggtggcgcatgaaatcaaagcaggagaacagtttcctacgaggtgtagcctgggaaagttgggggtgactgatggaaaggaggagtgaagctccgccctttccgctgctaggctgcgcccgag

SEQ ID NO: 655579 - DNA, 571 bp, Homo sapiens
attaaatcattctttactcctgtatgcctgccaaccaaatgggaaatcgctatagaaaagatggtttaaattttagtctttgaagtggtttatgcacgtttctggaatcaagatttaacrcggacttggattggatattgaatatttttgatttgtctacttttctctccatagggagcttatagcttcattgcactgtgtgtggcatttgggtcctgtttgacagcaatgactgcctttctgtttagtgtctgtgtgctatgaagattgcacacaggggtccagatgcatcctgttttgagaatgttaatggatacaccagctgctgctttggatttcacccattggtggtagttgacccgctgtttggaatgcagacaatttaagtgaagacatatccatatatgtggctctgttacaatggtgaaatctacaaccataagaaggtaggggaaaagaagccagatgtgtggatgtgattaaacttcagagcttgttggttacgatgacattatatattctgtatcttgctttttactttgcaaagcattctatgttatctcatttgctc

SEQ ID NO: 655580 - DNA, 571 bp, Homo sapiens
attaaatcattctttactcctgtatgcctgccaaccaaatgggaaatcgctatagaaaagatggtttaaattttagtctttgaagtggtttatgcacgtttctggaatcaagatttaacgcggacttggattggatattgaatatttttgatttgtctacttttctctccatagggagcttatagcttcattgcactgtgtgtggcatttgggtcctgtttgacagcaatgactgcctttctgtttagtgtctgtgtgctatgaagattgcacacaggggtccagatgcatcctgttttgagaatgttaatggatacaccagctgctgctttggatttcacccattggtggtagtkgacccgctgtttggaatgcagacaatttaagtgaagacatatccatatatgtggctctgttacaatggtgaaatctacaaccataagaaggtaggggaaaagaagccagatgtgtggatgtgattaaacttcagagcttgttggttacgatgacattatatattctgtatcttgctttttactttgcaaagcattctatgttatctcatttgctc

SEQ ID NO: 655581 - DNA, 571 bp, Homo sapiens
attaaatcattctttactcctgtatgcctgccaaccaaatgggaaatcgctatagaaaagatggtttaaattttagtctttgaagtggtttatgcacgtttctggaatcaagatttaacgcggacttggattggatattgaatatttttgatttgtctacttttctctccatagggagcttatagcttcattgcactgtgtgtggcatttgggtcctgtttgacagcaatgactgcctttctgtttagtgtctgtgtgctatgaagattgcacacaggggtccagatgcatcctgttttgagaatgttaatggatacaccagctgctgctttggatttcacccattggtggtagttgacccgctgtttggaatgcagacaatttaagtgaagacatatccatatatgtggctctgttacaatggtgaaatctacaaccataagaaggtaggggaaaagaagccagatgtgtggatgtgattaaacttcagagcttgttggttacgatgasattatatattctgtatcttgctttttactttgcaaagcattctatgttatctcatttgctc

SEQ ID NO: 655582 - DNA, 571 bp, Homo sapiens
attaaatcattctttactcctgtatgcctgccaaccaaatgggaaatcgctatagaaaagatggtttaaattttagtctttgaagtggtttatgcacgtttctggaatcaagatttaacgcggacttggattggatattgaatatttttgatttgtctacttttctctccatagggagcttatagcttcattgcactgtgtgtggcatttgggtcctgtttgacagcaatgactgcctttctgtttagtgtctgtgtgctatgaagattgcacacaggggtccagatgcatcctgttttgagaatgttaatggatacaccagctgctgctttggatttcacccattggtggtagttgacccgctgtttggaatgcagacaatttaagtgaagacatatccatatatgtggctctgttacaatggtgaaatctacaaccataagaaggtaggggaaaagaagccagatgtgtggatgtgattaaacttcagagcttgttggttacgatgacattatatattctgtatcwtgctttttactttgcaaagcattctatgttatctcatttgctc

SEQ ID NO: 655583 - DNA, 439 bp, Homo sapiens
actagtttttgtatcttctaaaaatttttatctccagaaagctctaattttcattcctttacaagctttatttctctctcctttccaacaccagactttgctctgtttgttttctatatcttttttagagatgcctacaatagaaaaaatctatgacatattcaatacatctgaaaagtttacattgccatagataagaatgaattrtctgtttataaagaaaaaacaataaaaatatgaaccaagaaagcacagaaggtagtaaccacatttagatgtttatcatggaatcatctttataatccatctgttacaattccacacagcaaattacaagtaattgtgaagtttcccctcattttataggtttggtcttataaggcatacaacacaaattttaattacttttctttttggtatttggatcttaatttggtca

SEQ ID NO: 655584 - DNA, 609 bp, Homo sapiens
gctttttctgtctcattttcttctctactctttctaggagtccaattatattagtgctagactggtcatawttttattatttttctcctttgtattagctgtattgggaaattgttcttgatctgtttttaagtgcactgatagttttttctgccatctttaatttactggtatgtgcataaaatgacacttttatataagacactctgtctctcagttctaaaatttgtcctattatctctttatcatttttacttctctgttgagattctccatatattccctcttatgaccatctattccttaaatccttgaatatgcttataatagcttattttaaatttcttatcttctaattccagcatgtgggccatttcaatgtcttaatccattgtttactttttttgttatgtgtcatattttcctggttctatgtctaggcaggttaaattatatgttagattatgtgtatgatattttgtagagataggctcttttattttcctttgaagagtgactcttttctaacattagtcttttttctgtagtcaaacaccaaactttcactcctgagctatatgcaatggttgaaatctctgctctgtacta

SEQ ID NO: 655585 - DNA, 583 bp, Homo sapiens
tgtactagcaatttagctgttgttttctgctagattctatggagtctctttttatgaatgtgaaatgtagcagccatcatatatctgaatgaagtttaagtgctgattttagatttttactctgtgacattctcctctgtgactttcagttgtgtgagatgtcctcccatgtcattcaaatttcccagttcttcttttctgtcagcctggaactctgtactcttattcctcaagctagtaaaactcacsgctttactcttagacatctaattttgcacagactgggaagtgtcatcaggtgtgaagttacattgatgcaaatttaaatcattgcaattttctttattcaatggtcaaatacttcatcagtggttgaatattctactatttctgcctgttttctgtttctcattaccatcaaatgtgtatttaattttttttagagttaatagttttttccctgcatttgagttagacctgagctactaccacattttgtaattcaaactttttgtctaacaatgttttaaaaaactctttatttggagggaattctcaaatttctaaatactctacaaacatt

SEQ ID NO: 655586 - DNA, 589 bp, Homo sapiens
ctggccttcactgtccatgtttttgtcagcattcttgtcactgccatttaaccagtctctaagatggtccaaaaatgttctcatctgtctgtcttctttggagccctccaaactcttccaacctctacccattacccagttccgaagttgcttccacattttcaggtatctttatagcaatgctccagtcctcatttgccatttttggtaagatttattttgaaaaagaggtttaattggctcatggttctgcagagtggacaggaagcttagtgcttctgcttctggggggcctcagaaatctttcaatcattgtgcaaggtaatgaaagagtgaattgtctcayatggcaagaggaaatcacggagagtagggagtgatatagagttttcagtggccagatctcacgagaattcactcatgattgtgaggagagtaccaaggggatagtgctgaaccactcatgagaaatttgccttcatgattcaatcaccttataccaggatccacctccaacattaggaagcataactcaacatgagatttggtggggacacatattcgaattgcctcatcagtctttgagtat

SEQ ID NO: 655587 - DNA, 589 bp, Homo sapiens
ctggccttcactgtccatgtttttgtcagcattcttgtcactgccatttaaccagtctctaagatggtccaaaaatgttctcatctgtctgtcttctttggagccctccaaactcttccaacctctacccattacccagttccgaagttgcttccacattttcaggtatctttatagcaatgctccagtcctcatttgccatttttggtaagatttattttgaaaaagaggtttaattggctcatggttctgcagagtggacaggaagcttagtgcttctgcttctggggggcctcagaaatctttcaatcattgtgcaaggtaatgaaagagtgaattgtctcatatggcaagaggaaatcacggagagtasggagtgatatagagttttcagtggccagatctcacgagaattcactcatgattgtgaggagagtaccaaggggatagtgctgaaccactcatgagaaatttgccttcatgattcaatcaccttataccaggatccacctccaacattaggaagcataactcaacatgagatttggtggggacacatattcgaattgcctcatcagtctttgagtat

SEQ ID NO: 655588 - DNA, 589 bp, Homo sapiens
ctggccttcactgtccatgtttttgtcagcattcttgtcactgccatttaaccagtctctaagatggtccaaaaatgttctcatctgtctgtcttctttggagccctccaaactcttccaacctctacccattacccagttccgaagttgcttccacattttcaggtatctttatagcaatgctccagtcctcatttgccatttttggtaagatttattttgaaaaagaggtttaattggctcatggttctgcagagtggacaggaagcttagtgcttctgcttctggggggcctcagaaatctttcaatcattgtgcaaggtaatgaaagagtgaattgtctcatatggcaagaggaaatcacggagagtagggagtgatatagagttttcagtggccagatctcacgagaaktcactcatgattgtgaggagagtaccaaggggatagtgctgaaccactcatgagaaatttgccttcatgattcaatcaccttataccaggatccacctccaacattaggaagcataactcaacatgagatttggtggggacacatattcgaattgcctcatcagtctttgagtat

SEQ ID NO: 655589 - DNA, 267 bp, Homo sapiens
tttgatactgttatcattctgctgtagaaagtacccgtgaactggaaaaagtccacamtcgaatagctagtcattcaacactatcaaattttaggtgactttttgaaaaaatagtatctcttgttgcaagaaatggtccatctgtgatttcaagtctctcgcttgagtgaattggatggaagtggtgaatttcagccaaagtggccaaagaaatcctgttcctgtgataatgacgccatcagcctctgcatctctgtcttcccttct

SEQ ID NO: 655590 - DNA, 549 bp, Homo sapiens
ttgtctattatttaatagggtggggggcgagggataaaagataacaaataaggtgcagtgtacactgttcgggtgataggtgcacccaaatctcacaaataaccagtaaagaagttattcatggacccgaaccaaataccaccgtaccccaataacctatgggaaaaaaaatwaaaaatacaataaaaaagagtcagaaaaaaagaaaataatcactgtacttaccatgacacttagaaatggtggctagcattatttgtgtcacctaatattattattttttctttatgctacaaactagctctgctattacaatcactactatttgaagtgttactaaattaaattaaatttattgtatccttctggactcagaaatgggggtaaatgctaagacaatttcagaatattatcacatattaaaagcttattatatggggaaaatgtgattttaaaaaaatagaaattggtagagaaacagtttttgggtctctttgatttccgcacattttgcaagtatggacgctgactttcttgttccaaatgata

SEQ ID NO: 655591 - DNA, 549 bp, Homo sapiens
ttgtctattatttaatagggtggggggcgagggataaaagataacaaataaggtgcagtgtacactgttcgggtgataggtgcacccaaatctcacaaataaccagtaaagaagttattcatggacccgaaccaaataccaccgtaccccaataacctatgggaaaaaaaataaaaaatacaataaaaaagagtcagaaaaaaagaaaataatcactgtacttaccatgacacttagaaatggtggctagcattatttgtgtcacctaatattattattttttctttatgctacaaactagctctgctattacaatcactactatttgaagtgttactaaattaaattaaatttattgtatccttctggactcagaaatgggggtaaatgctaagacaatttcagaatattatcacatattaaaagcttattatatggggaaaatgtgattttaaaaaaatagaaattggtagagaaacartttttgggtctctttgatttccgcacattttgcaagtatggacgctgactttcttgttccaaatgata

SEQ ID NO: 655592 - DNA, 501 bp, Homo sapiens
  misc_feature 157: n = A,T,C or G
tagttactatttttaaaaaccctaaagtgaaaaagtctcagttcttttgcctatctattttttttttccctgcctactttgaatctcctcatttgtctactggtgttcacataacacttactgtctgtggtgttactaattcaaggtcacttggctnaaaaaaaacaaaagaatgaaacaattctttatttttttctctttttgagacaagttctcactctaaggtctcactctgttccccagactggagtgcagtagtgagatcatagctcactgttatctcaacctcccaggctcaaacaatcctcctgcctcatcctctctagttgctgggacaatargcatgcaccaccatgcctggcaattttttatcttattcttagtagagattgggtctcactatgttgcccaggctggtctcaaactcctgagctcaagtgatcctcttgcctcagcctctcaaagtgctgggatacaggcatgaaccactgtgcccagaca

SEQ ID NO: 655593 - DNA, 587 bp, Homo sapiens
ccactttaaggaattgagcttgactttatagcaccaatgcaaagccccttagaatgactggcttggtgtcttgtctacaagggtcctttacaaagttgctgtccttgtggtaagaagtaaagaatgtcaytttctgacgggcccaggaacctcaagttatttggggaccttgagaagataggactacacccattcataaaagtattacagaagagctggcaagatgtctgaataggaacagctccggtctgcagcacccagtgggatcaacacagaaggcaggtggttcatgcatttccaactgagcctccactggtgatacccaggcaaacagggtctggagtggacctccagcaaactcgagcaaacctgcagcagagggacctgactggtagaaggaaaactaacaaacataaaggaatagtatcaacatcaccaacatcaaagaccaaaggtagataaatccacaaagatggggagaaaccagtgcaaaaaggcgaaaactccaaaagccagaatgcctcttctcctccagaagatcacaactccccaccagcaagggaacaaaactggacagacaatgagtt

SEQ ID NO: 655594 - DNA, 587 bp, Homo sapiens
ccactttaaggaattgagcttgactttatagcaccaatgcaaagccccttagaatgactggcttggtgtcttgtctacaagggtcctttacaaagttgctgtccttgtggtaagaagtaaagaatgtcactttctgacgggcccaggaacctcaagttatttggggaccttgagaagataggactacacccattcataaaagtattacagragagctggcaagatgtctgaataggaacagctccggtctgcagcacccagtgggatcaacacagaaggcaggtggttcatgcatttccaactgagcctccactggtgatacccaggcaaacagggtctggagtggacctccagcaaactcgagcaaacctgcagcagagggacctgactggtagaaggaaaactaacaaacataaaggaatagtatcaacatcaccaacatcaaagaccaaaggtagataaatccacaaagatggggagaaaccagtgcaaaaaggcgaaaactccaaaagccagaatgcctcttctcctccagaagatcacaactccccaccagcaagggaacaaaactggacagacaatgagtt

SEQ ID NO: 655595 - DNA, 587 bp, Homo sapiens
ccactttaaggaattgagcttgactttatagcaccaatgcaaagccccttagaatgactggcttggtgtcttgtctacaagggtcctttacaaagttgctgtccttgtggtaagaagtaaagaatgtcactttctgacgggcccaggaacctcaagttatttggggaccttgagaagataggactacacccattcataaaagtattacagaagagctggcaagatgtctgaataggaacagctccggtctgcagcacccagtgggatcaacacagaaggcaggtggttcatgcatttccaactgagcctccactggtgatacccaggcaaacagggtctggagtggacctccagcaaactcgagcaaacctgcagcagagggacctgactggtagaaggaaaactaacaaacataaaggaatagtatcaacatcaccaacatcaaagaccaaaggtagataaatccacaaagatggggagaaaccagtgcaaaaaggcgaaaactccaaaagccagaatgcctcttctcctccagaagatcacaactccccacyagcaagggaacaaaactggacagacaatgagtt

SEQ ID NO: 655596 - DNA, 532 bp, Homo sapiens
agtagatttcatctcaagaaaccactttctttgctcatccgtgggagcaactcatccwctcacgttttctccagaggctgctgcagtctcgccagatcttcaggctctttctctgattctagtgctcttgttatttccaccatatctgcagttacttcctccacagaagtcgtgaacccctgtgtcatctgtgagggttggaataatcttcccaacttctctctcttttttttttttttttttgagatgaagtcttgcctgggctggagtgcagtgatgcgatctcagctcactgcaacctccacttcccgtgttcaagcaattctcctgcctcagcctcccaagtgtttgggattacagtcacccccgaccaggcccagctaattttttttgtgtttttagtacagacaggatttcactatgttggccaggctggtctcaaattcctgacctcgtgatccacgtgccttggcctcccaaagtgctgggattacaggcgtgagccaccaagcccggccccaacttctcctaa

SEQ ID NO: 655597 - DNA, 532 bp, Homo sapiens
agtagatttcatctcaagaaaccactttctttgctcatccgtgggagcaactcatcctctcacgttttctccagaggctgctgcagtctcgccagatcttcaggctctktctctgattctagtgctcttgttatttccaccatatctgcagttacttcctccacagaagtcgtgaacccctgtgtcatctgtgagggttggaataatcttcccaacttctctctcttttttttttttttttttgagatgaagtcttgcctgggctggagtgcagtgatgcgatctcagctcactgcaacctccacttcccgtgttcaagcaattctcctgcctcagcctcccaagtgtttgggattacagtcacccccgaccaggcccagctaattttttttgtgtttttagtacagacaggatttcactatgttggccaggctggtctcaaattcctgacctcgtgatccacgtgccttggcctcccaaagtgctgggattacaggcgtgagccaccaagcccggccccaacttctcctaa

SEQ ID NO: 655598 - DNA, 519 bp, Homo sapiens
aaggcaatgagcaagggaaccgatggagatattcaatatggaccattccacttggacaaaagccagtaaataggggagtataacaggggacaagggccaaacagaaagtatctattacatttrccaatgcagatcaatcatgtcaacaatagaaatggcagttttggcatttggttattcaatgaaactatatttgtagctttttatttacaatgtttcaaggtatgggcgaagatatgaaaatttcattatgttctattgtatttgagatgtaaatgttctggcacaattatatacattttggattatatattgacagtaaattatttctcctttgttagcttcagcataacattaatattttcaacaacttgaatgcatacattgtgttctcactaatagtttagaatagcgaaggggtctttaaagaatttcttatgaagtagaggcattgggtcagacagagccgaaaaccattggcttagattaatcactatttatcctagggctgaagagggc

SEQ ID NO: 655599 - DNA, 575 bp, Homo sapiens
tttcccttaactctctgtgtcttggttttatagtttcatccatttttgcctctcatatgagctggtgagcattacactagtttatgcttctaggacactgaaaacagtacctggctcttgataaatattaacaattttgtttcattgtcttcaccttgagtatttcatggccagatggaaatcaatgtcaatatgaaaaaatgttcataattcagcaggaagaaatacaaaaccatataaacmactttgttttactggcaagtgaattgggaagctatgttaaattgagaaggggaagggaaaccctctaagagcatcgattaatcaatgaccgaaagctgatgagacttttctggaatttttttttggagactctgatacttaaaattttgacaaaataaggagatgaactgagtagtgtggaacagacattttgtgaagtcagcagagaaaggagagacaaatatggtaaggggaaaatggtatgaagtaataatatctatgaagtgctttctaaagtataacacatgtaagttgtgttaaatgtaaactatcatgattatatcattactgtc

SEQ ID NO: 655600 - DNA, 575 bp, Homo sapiens
tttcccttaactctctgtgtcttggttttatagtttcatccatttttgcctctcatatgagctggtgagcattacactagtttatgcttctaggacactgaaaacagtacctggctcttgataaatattaacaattttgtttcattgtcttcaccttgagtatttcatggccagatggaaatcaatgtcaatatgaaaaaatgttcataattcagcaggaagaaatacaaaaccatataaaccackttgttttactggcaagtgaattgggaagctatgttaaattgagaaggggaagggaaaccctctaagagcatcgattaatcaatgaccgaaagctgatgagacttttctggaatttttttttggagactctgatacttaaaattttgacaaaataaggagatgaactgagtagtgtggaacagacattttgtgaagtcagcagagaaaggagagacaaatatggtaaggggaaaatggtatgaagtaataatatctatgaagtgctttctaaagtataacacatgtaagttgtgttaaatgtaaactatcatgattatatcattactgtc

SEQ ID NO: 655601 - DNA, 619 bp, Homo sapiens
ccccttcatttgactaggaaagggaattccctgacccctwgtgcttcccaggtgaggtgatgccttgccctgctttggctcatgcatggtgcgctgcaaccactgtccagcactccccagtgagatgaacctggtacctcagttggaaatgcagaaatcacccgtcttctgcatcactcacgctgggagctgtagactggggctgttcctattcggccatcttggctccaccctctaatttttaactttcaaaagattagatacatttaccctcctctgaattttaattcctgatggaaagattgtgaaatctcaagaggataatgaatcagcttctgattatattctggaattgctatttgatcacacatccaagaatgcgtattcactttcctttacattacacacatgcataataccatgctgagtgatgctggaaaagtgagtcttcagtaatgccctcatgaaatacagtctcactacactgaagtattttctttttaaccctttctttcttttctgctgtgaatatgtgccttctaagaggtgaacaacggaaaaaactgaaaaagatacttcatctaattcagtaactagtttttgtatcttctaaaaattt

SEQ ID NO: 655602 - DNA, 619 bp, Homo sapiens
ccccttcatttgactaggaaagggaattccctgacccctagtgcttcccaggtgaggtgatgycttgccctgctttggctcatgcatggtgcgctgcaaccactgtccagcactccccagtgagatgaacctggtacctcagttggaaatgcagaaatcacccgtcttctgcatcactcacgctgggagctgtagactggggctgttcctattcggccatcttggctccaccctctaatttttaactttcaaaagattagatacatttaccctcctctgaattttaattcctgatggaaagattgtgaaatctcaagaggataatgaatcagcttctgattatattctggaattgctatttgatcacacatccaagaatgcgtattcactttcctttacattacacacatgcataataccatgctgagtgatgctggaaaagtgagtcttcagtaatgccctcatgaaatacagtctcactacactgaagtattttctttttaaccctttctttcttttctgctgtgaatatgtgccttctaagaggtgaacaacggaaaaaactgaaaaagatacttcatctaattcagtaactagtttttgtatcttctaaaaattt

SEQ ID NO: 655603 - DNA, 619 bp, Homo sapiens
ccccttcatttgactaggaaagggaattccctgacccctagtgcttcccaggtgaggtgatgccttgccctgctttggctcatgcatggtgcgctgcaaccactgtccagcactccccagtgagatgaacctggtacctcagttggaaatgcagaaatcacccgtcttctgcatcactcacgctgggagctgtagactggggctgttcctattcggccatcttggctccaccctctaatttttaactttcaaaagattagatacatttaccctcctctgaattttaattcctgatggaaagattgtgaaatctcaagaggataatgaatcagcttctgattatattctggaattgctatttgatcacacatccaagaatgcrtattcactttcctttacattacacacatgcataataccatgctgagtgatgctggaaaagtgagtcttcagtaatgccctcatgaaatacagtctcactacactgaagtattttctttttaaccctttctttcttttctgctgtgaatatgtgccttctaagaggtgaacaacggaaaaaactgaaaaagatacttcatctaattcagtaactagtttttgtatcttctaaaaattt

SEQ ID NO: 655604 - DNA, 556 bp, Homo sapiens
atttttaaaaatatctataaagcaatagttctcatgaacctagacacaaaaattctaaacaaaatgtttacaaatcaaactcagcaatatgtaaaaatgaaaatacattatgaccaagtggagtttatctaagaatgcaaaattagtccaacatttgaagtcaatgaactttactgtatttacataataaagaatatatacatattttttcagtagatgcagaaaagcaaatgaccaaattcatcatctactcatgacaaaaagaaagaaaaacacaactctctccctgtgcattaacaatggaagaaaatgttcttaatctattgagatcatccaaatacaaggtacagctaacatgacacttaatgatragagatttaatattttcaccctaagatggggaacaaggcaaaacgccctctctcaccactcctattctacatcatagtggaagttttagctactatgattaacatgcagaggtcagttatatttatatataccagcatacacaccagcactttgaattgtcagctttaaaaaagaaaaattggca

SEQ ID NO: 655605 - DNA, 607 bp, Homo sapiens
agtagatttttttttgcctctatgatttgcatttttctgatgattagtgatgttgagcattttttcatgtttgttggccatttgtaaatcttcttttgggaagtgtttgttcatgttctttgcccatttcttaatggggttatttgttttttacttgttgatttgttttacttccttatagagtctataatttctagataactgaaacaaggcaaggatgcccactctcacggctcctactcaacrtagtacttgatgtcgtagacagggcagtgaggcaagagaaagaaagaaaaggcatccaaaaaaaaaaaaagaaaaaagaagaagaaatcaaactatctctcttcactgacattatgattctacaagtaaaaaaccctaaagactccccaaaaaggctcctagaactgataaacaacttcaataaagtctcaggatacaaaatcaatgtacaaaatttagtagcattttaatataccaacaatgttcaagctgagggttaaatcaagaacacagttctatttagaatagtcattaaacaaataaaattcctagtaatacagctaaccaaggaggcaaatatctcctctgtttaattttcaag

SEQ ID NO: 655606 - DNA, 575 bp, Homo sapiens
tgcaaataaaccacaatgagatattagcacacacctatgagaaggggtataattaaaaatggatgatattaataaatactagagaaatgaaaagcaaatggatcatttatatgctgatggtgggaatgtatattagtacagttatagtggacgattggcagtttctcataaaactgaatatgcarctaccatataattcggctataacattcttaaacatttatcccaaagaaatcaagccttatgttgacacaaaacatgtacatgattgtatatagcagctttattcacaatagtcaataaccagaaactacctagatgtttgtacatgggtgaatgactaaacaaactgtagtagatccgtatcatggaacactattcagcaatgtgaagcagtcacccattggtacatataaaaacctggatgaatccccagaggattatgcttagtgaaaaaaaaaaccaataccaaaaggttacatagtgcatgattccattaacgtagcatttattgtttaaatgactaaattatagacatagagaaaagatgagtggttgtctgggtttaaggaagg

SEQ ID NO: 655607 - DNA, 586 bp, Homo sapiens
tttttttcaattaacttgtatttagtgttgatatgatttagatctgtgcacccacccaaatctcatgttgaattgtaatccacaakgttggaagtggggcctgggaggaatgtgattggatcatgggggtggattttcctcttggtactgtgtcacaatattgagtgaactcttaagggatctggttgtttaaaagtgtgtgacagctcccctttcctctcttgctcctcctgccatgtaagatgttcctgcttctcttttgccttctgccatgattgtaagctttctgaggcctccccagaagccaaagcctttaggcttcttgtactgcagaacctgtagaactgtcagccaattaaacgttttttctttataaattacccagtcttaggtatttcttcatagcagtgtaagaatgaagtaaaacagaaaattggtactgaggagtggggctttgctacagataccagaaaatgtggaagcacctttggacccgggtaatgggcaaagtttggaaaagtgtggaaagctcagaagaagacagaaagacgagggaaaatttggaacttcctagaggcttgttaaa

SEQ ID NO: 655608 - DNA, 562 bp, Homo sapiens
atggttttccaaagcagtacaatgcacactattatatttcagcatgggcaagcaatcagtgaaccaggtccaagcatttagggaaacctctgtgagtggaaaacctcattaagccagcagttttacttaaggcagtgaagtgagagacaaatttccctccaaaggggtagcttttactttttagtataaatctgagatgctgctaaggccgtgtcagctgaactcctaaaaataccatttttgtttctcttgataagcaaggctggtgggcccatctcaccttgtttttcattaagtctaaggtgatccatcacaagatatgaacattaagctggagactcacaggcctgcatgtgacatgaattcagctttttcaaaagaagtatacttggtatttagctcagacaggtgaaaccattgctctgggaaatagcttatccagtaccatgactgcagccaattttcaagctaaaatattktctttgtcctcctgtgatcatatatcatttctcctaggctacctgggagaggataggagggcaggttgtagagtgaattacat

SEQ ID NO: 655609 - DNA, 536 bp, Homo sapiens
tttaaatgcaaatatatgcaaaattttatatgaatataaaargatcttagcctccacacttttctgttttccattactattacatcacagaataaaatatgcacaaagtcagaagagaatatgccaagctgctttattctttttgcaaataagaaacaaactgcaactcagtaaagattagtaagttgtatgattactttaaaggtgaattagacactagattggtggatagactaaagacctctaaaatatttattaaggaaaaaaatatgtataaacaaaactgaaaatgtaacaaatgtatgaaagatttagacataggaaaacttttatcactgagctgcaggagcaagacaagtcaagaaaaatgatacaggccagaacttttagaaactccaagaaccttaaatagaagtaatggatagtcactggagtattgtaaaaagggaatagcttgctctggtgtcagttttaagaagacctctccactgctgtgtgaatgacagaaccaagaggagagaggcggattcaccagt

SEQ ID NO: 655610 - DNA, 596 bp, Homo sapiens
tccacattgcctggatcacttagaatgcatctggttgctcccatgagcgtctgccacctttttgctattttatgtcatcagcaaactggcgccgtcgtgaaattatgctccactcccggtcaatgcattaaacttaaacgttttctataaccagtgcgccctgtgcctgccttaattcccaactgatttatctacccgatttattaccagggctcaattcaatcaatactggctgggattccacccgcagaggcatctgatttatgcaggagacactcctggggtgatttagagtcctctcctccaccacggagcccccaggcccccaaaattgatgtgtctgccttgctccagggagaacttgcatcagcatccaaacgacccagccacaggccctcctggaggcctcaggctcccactccctgccccaaggggcctgcagcccttgctctggagtgccctgggccggccctgacctcagagctccctgggaaaygaaagttccagaaaccatgaatgctcagggttaatctgggctttaggctctggggagaaggaaggcatgcatgccctgtatgaactatgtcttattgcac

SEQ ID NO: 655611 - DNA, 621 bp, Homo sapiens
tgccaaggttaaagaccatggctcatgacacggcctcaggaggtccaagtctgagagtatgtgcccaaggtggctgggttacagctttgttttatacattttagagagacagaagctacagccaaagacacaaatccatacatgtaagataaataatgatttggcccagaaagaccagacatctggaagttggggctttcaggtcataggaggatccataggtggatttcatgatttgttttaatgttaatgctggtcagttgtgtktaaactctgtaaaccaaaaagtacttcagacaagtctcaatcaatttagaaagtttattttgccaagcttaaggatgtgcctgagacacagcctcaggaggtcctgacaatatgtgcccgaggtggacaggttacagattggttttatacattttaggggtcatgagacatcaatcaatatatgtaagatgtacattggtttggtctgaaaggcaggacaattcaaagtggggaaggggcttccagctcataggtagataagaggcaaattgttccattattttgagtttctgattaacttttcactgaatatacaatttacagaaatagtcacttgtgcttttgtctggctta

SEQ ID NO: 655612 - DNA, 627 bp, Homo sapiens
atcatgcatcaaacaggtgcttcctttctgactttcaacctttgtcccatgcagctctgaagcatcctgccttgcttctcaggctctgaccttccttctccattctgggttgaactcccacttcaatgtccccaatggaactcacataaccatctcaaggcctttggtacttggcagcactcagcaagggctgcctcctcagacttactgccgacccaggtcctcgggccatggtttttgagaagccaccattgaatccaatatctgcctgagtccttctgccagctcttccagtgtatggcttatcatggaccttctctttcaataccacattctctaaaccattttcataggtcactgtgggattataagctgctctctgaggcttccccctctcctacttgctcatgggatctcatatggaaattgacccagtaaacaaacatcttgctcagctgtaaaarcaccttctctgctatccactgtatccagtggctctcgagtggagcatacatctcttcttgatcctcttcacaccctcagtccagcactaagggaaaatctaagcctcattatttctcttctggggacattgtcacttctcttcttaactgtgtagacatccgg

SEQ ID NO: 655613 - DNA, 515 bp, Homo sapiens
ttgttataggtatatttaaattgtctatttttgttgatataattttatggatatagtttgtatcttataaggtctataayaatgtcccttatttctttccttttttcctttcttccttcttcctttcaaatgtataccttcttttttgttaattagaaaatatctggcaacactgggtccacattctcacagtctacagatgacttaagtgataaagaacttcctttatttgttgtggtatacacataccagtttaccactgtccccaccacccttgtctcctgacactaagataatctcccagagccatctctcaggtatatccacccatgctcacatatgctgccagcctggtcactaaaagatcttggagttgcccagctccagatcaacaggtatgtttgggaggagattgtaaagggctacacaggtccagggagccaactctcctcacagagaaaagaagtccttgcagtcacaggcattgaacttcaaggttgctgtcagtggacagg

SEQ ID NO: 655614 - DNA, 516 bp, Homo sapiens
atcccacagaggtaggatggatcctaaaattggttttgacgttgagaaaaatgatgccacacatgcatcaggagaataaaataatattttctggcaagcaggtccaaaaatgtcttgataaattagggaggggctactggcttagggtatgatggtgactgagcatgtggctggggtgcagcttctgaactggagcttgggttgtttaaatatccactggtgtcaaaggaggaaataatcagtctttcttatcaaattgcccagatatrgtgtagaagaggaaggttaagtggtgggacttgaaagctgtcagtagttgaaagtcaaaaatagaatcagaatcttctttacaagtgatagaaaagatatcaacaagactgtggaatggaagaagctatagattcagatctatgaacaaataaaataaatgacttttcagtttaatgtttgcatattattgattacatcttgcattttaaacattttataattgtgttttttcatatatttaaggtg

SEQ ID NO: 655615 - DNA, 516 bp, Homo sapiens
atcccacagaggtaggatggatcctaaaattggttttgacgttgagaaaaatgatgccacacatgcatcaggagaataaaataatattttctggcaagcaggtccaaaaatgtcttgataaattagggaggggctactggcttagggtatgatggtgactgagcatgtggctggggtgcagcttctgaactggagcttgggttgtttaaatatccactggtgtcaaaggaggaaataatcagtctttcttatcaaattgcccagatatagtgtagaagaggaaggttaagtggtgggacttgaaagctgtcagtagttgaaagtcaaaaatagaatcagaatcttctttacaagtgatagaaaagatatcaacaagactgtggaatggaagaagctatagattcagatctatgaacaaataaaataaatgacttttcagtttaatgtytgcatattattgattacatcttgcattttaaacattttataattgtgttttttcatatatttaaggtg

SEQ ID NO: 655616 - DNA, 589 bp, Homo sapiens
acgttttacttcatatacttaaggctttactattgcataaagaacaagtttcatagcaaaagcattttgaggcatctgtaccatgaggtccatatgtgaaatgttaacgaagcaaggcagtttgaaaagccacatctctgggaaatagaagggcagaggaaaaggtatcagagaggggaaaataaaacagctttagataaaagatgaagagagagaagatggtgattgagagcaaaggtagtacaagaaagcaatcttttacaaacaaataaaaaactaaggataacctcccaaattgcacaacttgggattgtgtaactcctttaagcttaatttattttattctgtttgtttcccattcttataaaaaataatcatcattatcagcaagaaggcagattattctgttttcatttgtttatttcacattttgtttgtgttttgttttggttttatgctgaatgaagggaatgatatccactaggactctggcatagagcagttggttaagagctgtgrtacataaaattactaaaagtgttttcaatgttagagaataattgaatggagatgaatatacatatgcata

SEQ ID NO: 655617 - DNA, 638 bp, Homo sapiens
ctgttatattatctttggttgttgctggtatggggaggtactgctgatttggggctacttttttcaatccaacaatcttactgaagtctattattggttttaaaagattttgtgtttgtcctttgtgtttttttagataaattaccaaatgatctggaaataatgacaatgttgtcttttctatccatacagcttattatattactgttgccaggacttttataatatattgtacaatacaggcaacaccaataattcatgccctcttccaaactttaaagatgatattcctaaagttcctcgtacatttgctttaggtttttgggagacaacttctatcaagttaaggaatttcctatctattcttggtttgtgtgagcttttatcctaaataagtgttgaagcttttcaaatgacttttctgtgtgtatgtgaaaaagtatgtgattttttcccccattaatgtgatggaaaatactgagtgatattcttttatttaactgtccttacactttcaaggtaaaatttactcaattacgatgaattsttttgttagtaccctgaactttttgatcagctaatgttaattaaacattttttacctatatttatttaaaatttgcatataattttgtttt

SEQ ID NO: 655618 - DNA, 500 bp, Homo sapiens
agagctgggctggggtagaccagttgtaaattcatacacacatacacacacacacacacacacacacacacacacttgaagtcctgcacgaggtcacctacaaggtcaggccacctcttcctgggaccttgctcargttttggtgtctcagaagatgctgcattaccaacctttgaggagaaaaccaaatgggcttgtcacaaagaaatacaaagtgtgactcagagcagggagcaagtgtggagggaagggcctggagaggacagtgagtgggagagctgccatttgggctggtctggcttcagaaccctgctttgctttctctccttttggctcaggagatgattgcacatgtggctcacagctgactcttgcaggatctcagataaatgatgagaagacaggtaacacctgggcaactttttctcattctgtgtggatagaggttggggccagatggcctctctcctcctcccccattatttatggaagccttcact

SEQ ID NO: 655619 - DNA, 428 bp, Homo sapiens
ttttaaaccatgttcattatagacatgaagaaaaacatactgaaaacagtattcaaaatacagagtatgaactgttacatttttatttcaccatcttctgtgtgaacttatggagaactaacatagaaaactctaaaatgcagctatgacatttttctgtaacaattgaaattgtatgtttaaataatagcataaagaatgaagcatgtatgctttttaataactttttcttctgtcacatcccaatgtcatgtgctcaatctctggtggctgtacagagcccagcgcagctcacgagasgcccctaaaaaccagggcaccacgtggacttggcattaaattcagacaactttgaaaagcagttcagatcttctgttttgtttttttttttttctttcttactttgtatttctttccataagaaagct

SEQ ID NO: 655620 - DNA, 576 bp, Homo sapiens
acattgctactgagcgtttgaaatgtgtctagtgcaactaaggaactaacttttaaactttatttaatttgaatttatttaactttaaaaagcaatattctgttcagttattgaaaaagtttaatgtatgactagaataattyaagtatatgactctgttttcagtcataaattttataaaatctctacacaaatcagatattttcaatggaaatttagtgtccaagttgagatgtgctttcaaagactaagtataaaaaagtgtaaaatatatcaattttataatgattatacattgaaataacaacattgtatcgggcttaaataaaatatatcacttttactatgtggcattaacatattattaatatagtactaaatatattaatagattaatttaatatatttaaatataaatatactaaatatttgtatattttatgtaaaatatataactatataaatgtataaagtaatatatttaagaatatattaatgtatcattgaaactaattttacctgtttctttttatttttttaaatgggactcctgaaaaattttcaattatatatatg

SEQ ID NO: 655621 - DNA, 587 bp, Homo sapiens
acatttatgttagtgtccccataccctagcacaataccaggcaattaataggtattcaataaaagtatgattttttttgcattatagttaacatttattgaggacttgccatctggcaggtactatgttaaaaacttggtatacattatttcatcagcctcataatactgtcaatattagttttcaatactgtgaagtatttagaggctagggaaataaaatctagggaggatagtttcctggggtcacacagtagtaagtgccagagctacggttaaaaaaaaaaaaaaaaaaaaaaaaaaaacatagacaatctaatgccaraacccatgctcttggctacatttgttgcctcttgggttgaacatctaagaccaggactgtgaaaggaggatgcttggtcaaagtaggaccacacaaagctggcatcattttcatactaagtcattgggatagggttcattaagtttttcacattattattatcccaagggtctaaagcagggactttctggaggcatatacaaataaaatgcagagggcaaagccagagcttgaattttatttttataacggtatgaaacatt

SEQ ID NO: 655622 - DNA, 596 bp, Homo sapiens
taagcaaaaagatacatattcacaaacatacatatattgtacatatttacatatatgtatatgagtgtatgcacaaaaacacacatatacatatgggagtttcacagaaaaaggaactaaaaaggtcttttagtcacatggaaagatgttcaacttcattcataataagaaataaaaattagaacttaactaaaagaacttaatttgtttaacctatgagattagcaaagttagatagagtttgataatagtgtgttatcctatgtacacagaggtactttcctagaaaagtaagtgaaaaaattgtccarccaccatactaaacaccctgatttgatcatcagacattatatgtactacagcatcactatgtaccctataaacatgtacagttattatgtgtcaatcaaaacattaaaaatgtttttaaaatttttaaagcacggattacttatgctattatcttacattagtttgggctacttttaagcttcatagaaatggaatcttgcagttcctacactcttgtcaccagcttcttttacttatcacattgactgtgatttatccgtgtcactttatataatgggttttgt

SEQ ID NO: 655623 - DNA, 598 bp, Homo sapiens
atttttaaatatttctgtagagatgaggtcttactattttgccaggctggtcttgaacacctggactgaggtgatcctcctgccttggcctctcaaagggctgggattacaggtatgaacaactgcgcccagcccagtcaatgtctttaaaatgggacagatataaacatgtctggggtgtttgaggcgaggcattgttgtaaggtagaggcatgggctygattacatttcagatcctctatggtctctaactttataatttgaagtattttcatagtaatattttacagataatatgatgacaaacaaggtctatacagacaaatgggtagaaattcaatgaatacagaaactttccagtaggatccatttgggaatttgcattctgtaagttgcagggacaaaaattaattttagcttccatgtctctgcttcattaacttgatcatgggcaaaatgagatttctgattttcacctacaaaatggcatagaagctagtggttaattgtatgtcctattatcaaatttacaagcaggtgtattcaataagcaaatggatgactttttttctaagtttgcttctgacagtctggaaaa

SEQ ID NO: 655624 - DNA, 565 bp, Homo sapiens
tagtaatagcatatgggggtcttggattggcctcacaaagaatccatcagcggctatgtcccactcttctatggagatggatggtacacctagtgtgctagtgtgtttgggtgaatgcactgtcaccagaagaccaatggaaactattgaaactacacatatatgaagatggcttttttgggtggctgtaaccatcatggacaagtctttgtgttgtttccctgaatgctggtgttaggttgtgttctgaaccttaggaagttcttttattccagcaggctttgaacgtctaggtccctgaagtccagaggccagaagcacttgccaatgggtaattatgcccccttgctgtgcacaagtaagaaagtagcaagcaattcagaggctgcagtgcagaaggcaaggcatctgcatccctgaggtccatcttaaggagtctcctgaaggcmttcccgggcaatctggaaggttgggagaggggtgctgaggatctagccactggtagtaagacttcctagctagaaaactatttatttgctagcgctggcataacaaactgagtggc

SEQ ID NO: 655625 - DNA, 545 bp, Homo sapiens
gtggggttagggggtggcagctggggatgattttcgtattgctatcattccttcattcctatttagctgtcatgcattagactctgtctcaaggagagggattattccactgcctttcttttcttttcttttctatttttcttgtcacccaggctggagtgcagtggtgcaatcttggctcactgctgcctccgcctcctgggttcargcaattctcctgcctcagcctcctgagtagctgggattacaggcacctgccaccacgtccagctaacttttgtatgtttactagagacagggttttgccatgttggccaggctagtctcaaactcctgaccttgggtgatccacctgccttggcctcccaaagtgctgggattacaggcgtgagccactgcccccggcctccactgcttttcatagatctcggtaaagactttgtaatgaaaaatatgtcacctgccttaaaaacagtgtgttgtcagtaaattatcagcccacttccagagtccaatcaaatatatcagtataactggagactcta

SEQ ID NO: 655626 - DNA, 490 bp, Homo sapiens
gactgagaccttgtctcaaaaaaaaaaaaaaaaaagtgctatctgacaggctttggcccattgtagtaatctacaagtctaccaaatttagatcttatattgtaatatcttctttcccctgatccccaaattcccttcataattctcattatttcattgacaaaagcccaaggatgaacaaattgttttcttttgaggtaaaacaaaacagatctaataattgcgtatgtttatgcttgataataataataatatattttatgaacatccctcccaagtcccgattgcactgttttgatattcagtcacggtatctttattcatagcctgcctttaatgagaatagtagaggtctttgtgcataaacacaagaagtacagtgctattttcatagtgtttaagaagtacttattataaaataatgyactctgtgttttataaaaggatcaaacagtaaagaaatataaaaaatgagaagtttcccatttcc

SEQ ID NO: 655627 - DNA, 505 bp, Homo sapiens
atctggcatccatctgttgacataccttgactcagtgcagttaaggatttatgaatgaaacacctcatacatgtttagtcaccctccctgttagccagcaagcaaggcagcatcctctctcgaagctggctgccttcaragggtctgttctgtaaaccaaggctgtttctcggaccaactatcccaaaactaggacgtgccgaataagtagaaagaagtatttgtcttatgttttagtcagaagtttcagataccaggataaaatcacttttgtcagacctggataaaataaagtcaggatagtatgaaggagagatggctcatgctcacatatgggagataaaaactgctttcagggactttctaaaaaccccacaagaaacctttttgcatccttcatgcatctcctgttttgacaaggtttatcactagatattctttagtactgcagtaattcagataagatatctcagaacactcacccagtaatgacatctccaccagt

SEQ ID NO: 655628 - DNA, 448 bp, Homo sapiens
agaattctcacttcctctgacatttttgttctattcaagtcctcagtggattggatggggcccactcacattgaggagggcaatctgccttactcagtacgccaattaaaaagttaatgagatatatacctcttttgaaaacaccctcacagacatgcccagaaatgtttaacccactatctgggcatcctgtggcccagtcaagctgacacatgacagtaaccgtcacactcatcctcctcccttcgaactgctttctcactgcccctcagtgactggagccrttagcacctctctgcttcacctctcatctcatctctcaaagccacgtttaaaatgttactgtatacattacatgtctttgtgaaaatcagtatgctgagctatggagaaaaaaagtatttcagagaagtgtgaaacaaactgaaatttaaaatttaaaacatta

SEQ ID NO: 655629 - DNA, 629 bp, Homo sapiens
agattttaatccttggactgctacttattatctatatgatcttgggtaaacatctcaacctttttgcacctctgttttttttatgtacaaactaggaagaatagccttttcagagtgtcgttgtaaagattaaatgtaatgtggcatgcaaactgcttagaacactttaggttccatagccagtcccataaccattgctttcaaagagtcttgattctcttgcctctctttctcttgtactaacttagaacaacccctactctacactttctgtgtatgtacactaaaacagttgaaaattactggaaaaaaaatcacccagccgtgctaaaggaactcattccaaattatgactacaaatttcaaatggccacccaacaytgacagatgataatagtataccccttaataaaactggctttcttgaccacagatgaggtctaaaaaaaaaacaaaaacaaaaacaagaaacaaaaacaaaactggctttcttgctctttaagacagctaattcacatattaccccttcaaatctttagtgtccattccattatccactttcagtgtatgatcttaccttcacatagaaaactgatacagagaactacctcattttccaccaccaattc

SEQ ID NO: 655630 - DNA, 629 bp, Homo sapiens
agattttaatccttggactgctacttattatctatatgatcttgggtaaacatctcaacctttttgcacctctgttttttttatgtacaaactaggaagaatagccttttcagagtgtcgttgtaaagattaaatgtaatgtggcatgcaaactgcttagaacactttaggttccatagccagtcccataaccattgctttcaaagagtcttgattctcttgcctctctttctcttgtactaacttagaacaacccctactctacactttctgtgtatgtacactaaaacagttgaaaattactggaaaaaaaatcacccagccgtgctaaaggaactcattccaaattatgactacaaatttcaaatggccacccaacattgacagatgataatagtataccccttaataaaactggctttcttgaccacagatgaggtctaaaaaaaaaacaaaaacaaaaacaagaaacaaaaacaaaactggctttcttgctctttaagacagctaattcacatattaccccttcaaatctttagtgtccattcyattatccactttcagtgtatgatcttaccttcacatagaaaactgatacagagaactacctcattttccaccaccaattc

SEQ ID NO: 655631 - DNA, 615 bp, Homo sapiens
aatgaactgcttttgactgttgatgtaataagtcagaaggcattcactaaaccaaaacgcaagaacttcttttccactgtgactaattcaacttaatgaattatttttaaaaaaaccctacatatatgagatacaagaagaaaagggaagatgatagaaaggcaagtaacagctagtacattttatgagaagacaatagccacaattttgaaccgattaaagttagaatttctctctgaccttgaatttgacaaaactcaatataaaggccaaacttataaaagaacttcaattataagacgttatctaaagagcacttaaactggttttcaagatgaaatactaactgaagtttgtatttatttcgtaaacaaccatgttaaccttgctatttgcactgccaatgacaacttccaaagactatagaatccctatgctataaatctttamtagataagcagctcattccttgtttgtcaaagtgtggtaggaagttgcaccaggaaaataatacagaaatgaatcaaatgcaatactgtatattacaaaaacaaaatatattatagtacatgtcatatacttggtaataatcctttatcccctagaaataaaatt

SEQ ID NO: 655632 - DNA, 615 bp, Homo sapiens
aatgaactgcttttgactgttgatgtaataagtcagaaggcattcactaaaccaaaacgcaagaacttcttttccactgtgactaattcaacttaatgaattatttttaaaaaaaccctacatatatgagatacaagaagaaaagggaagatgatagaaaggcaagtaacagctagtacattttatgagaagacaatagccacaattttgaaccgattaaagttagaatttctctctgaccttgaatttgacaaaactcaatataaaggccaaacttataaaagaacttcaattataagacgttatctaaagagcacttaaactggttttcaagatgaaatactaactgaagtttgtatttatttcgtaaacaaccatgttaaccttgctatttgcactgccaatgacaacttccaaagactatagaatccctatgctataaatctttactagataagcagctcattccttrtttgtcaaagtgtggtaggaagttgcaccaggaaaataatacagaaatgaatcaaatgcaatactgtatattacaaaaacaaaatatattatagtacatgtcatatacttggtaataatcctttatcccctagaaataaaatt

SEQ ID NO: 655633 - DNA, 532 bp, Homo sapiens
ctgtctgatcatgatttctacttttatttatcaagaaaactataacatacccctagaggacatgttatctctagtcagctcttcaaaacctccatgaccctcaggatggattagatgactacccttggcatcacacatgtccaggcacaatgactattaccttccctcttttctactatagcctatggccttgtagagactctagttcctcatatgggaaactgtcttattcatctttgattttytagtacctagatggcctagtggtcagcacacagaaggaaattatattgaattgatacattttaaaaaacaaaatgaataaatggatgaacttctttatataatacaatagaaaactgaacagaaagaaacttggtgatagcatgacattatatggagggtatggcattccatatgttgttttcaaatgcttggcatgtatgtgcatgcatgcacacatacacacgatcacacacacacatacatacacacacacacacacaatcacagagatatggcatttgttatt

SEQ ID NO: 655634 - DNA, 622 bp, Homo sapiens
gctgtgtgacctggcatctgctggtggagatggagaggagtggacaagcaaaaggtacttggaaggtgaaattgacaagatggacttgtttttgggggataagaatgagggagactgaatgggctcaaggagggttagtgacrgtgcaggcattaaattcgaatatgaaagaaaaaaccatcttattaaacagcattttgattgtagcaaaaattagcataaataagaagaaaattactagtaattccaccactcaagagagaactcttgttatgtacacatatatggatatgtgtacattttttcaaaaacaggatcatattgaacatagtattttgtaatatgcttttttcactcaacaggatgttgtgaatatatcttcaaagcaaaaaataccacttccacaagatcattttttcggtactgcttgctatttcatcttatagcaaatccattttcttcagccagtcagctaatgctcaacatttttggacatttctaacttttcaccatcctaacagcactgcagggaatattttgtactcaagtttttgcccagatattacattctttctggataagtaattaaagaagaatcatagagccggcgtatgcacatctt

SEQ ID NO: 655635 - DNA, 667 bp, Homo sapiens
ttcaagattactaatctcttccacctgatttcttatgttacaccttcaggccttccctgtaagcaactgactgcatctctactttcaaatccttagagtgctttccaagactgaaataatgagagttacagagcacacggtgtccactgcaggctagactctacactgaagtctcatttattttcgttttacagccaaaagatgtagatgtcatcatactcatttcctctgtgagaaaactgagtcacagaaaggtgaaatccrgcacagagacaagatttaaactcagttcatcctgtcttcaaaattgatattccattaaaccatggcaatcttaaatctttctgtgaaaaacagattgtcttcagctttcagatttagggttcatgtacttataccttctatccaaccacaaatacttggtgaggaagctgctgtcactcttttttaatatatagagcaatgttgactgatgaattttgactgtctgatacaaggcaagagactacctggtttgggctcacaatgtctaagatgtttctatctctgtgggcctagaaatctacttagactttctgagcctgtttctccatatgtaaaaggggatgcaaaagtatctacctcacagagttgttgaggattaaagatgttattacatgagcaagca

SEQ ID NO: 655636 - DNA, 667 bp, Homo sapiens
ttcaagattactaatctcttccacctgatttcttatgttacaccttcaggccttccctgtaagcaactgactgcatctctactttcaaatccttagagtgctttccaagactgaaataatgagagttacagagcacacggtgtccactgcaggctagactctacactgaagtctcatttattttcgttttacagccaaaagatgtagatgtcatcatactcatttcctctgtgagaaaactgagtcacagaaaggtgaaatccagcacagagacaagatttaaactcagttcatcctgtcttcaaaattgatattccattaaaccatggcaatcttaaatctttctgtgaaraacagattgtcttcagctttcagatttagggttcatgtacttataccttctatccaaccacaaatacttggtgaggaagctgctgtcactcttttttaatatatagagcaatgttgactgatgaattttgactgtctgatacaaggcaagagactacctggtttgggctcacaatgtctaagatgtttctatctctgtgggcctagaaatctacttagactttctgagcctgtttctccatatgtaaaaggggatgcaaaagtatctacctcacagagttgttgaggattaaagatgttattacatgagcaagca

SEQ ID NO: 655637 - DNA, 582 bp, Homo sapiens
tggcaaagtgcttgtatttgtaatacactaaaaaaacccttgacagcttgacaataagacaaataaatgattaaaaagagagagaaaggtttgaacaaccattttacaaaaaagcataaatgactctcaaaagcattatgcttagccaaagaagccagatattaaagagtaaatactgtatcatttcatttatattaaattacagaaaggcaaaacagaagatcgttttttgccaggggtggggaacattcactgcaaaaaaaaaaaaagcatgaaataatttttggtggtgatgggaaaaaattcagggaatgaggtcaaacccagagtgctgccagtaaaatctgtggcctcaggctcacaatcaaaccaaagctatggttgtaatttggttgagatttcaggaaattgtggaagagtgtctcattttcctctcagcagaaattgcttctaagaattttaagracaagactctttggccctctctgctgtgagggtcttcacaagtaaccccaaatagagaaagactctactcagagaaataggtggacgtcacttttgtctaatgaattggattataat

SEQ ID NO: 655638 - DNA, 429 bp, Homo sapiens
atgaggttctaaaactgacttctccattgattctggatttagctgctgtggtattggcttgtagtaactagttctacaaaccttttccytcacctttagaatgtaggcaatgttctgaaagctttcccatataaaaataaaatactgcattccccgcaaaggaagaaaaagctcatctattcaatcaggagacttagtcttgctaaaaacttggaaagaaggatctcctaaagatcaattacaaccgaaatggaagggtccctttcaggttttgttgagtacccccactgctattaaatttcagggaataactagttgggtatatttgtccaggattaaacctgtttcttaggagtcacaggcacaaaaggagggcaccaaaacctacagctgtgagcctttggaagaccttggctacctatttttaaa

SEQ ID NO: 655639 - DNA, 611 bp, Homo sapiens
taagtttaggtaattgcctcataactgtatatttcaagagcaaagctttggaatcagttgtatatatatatrtgtgtgtgtgtgtgtgtgtgtgtgtgtgtgtatacataatatatatgtatatatacatgtatatatatacacgcacatacatatacatatagtggagatatatgtctatctgtctatctatctatctatattcaagtttagagatctaaatatccaagttctaacgttatatagcagtatggtcttggattatttgcttcatttcactgaggatatttctcaactgtttaatgagaacaaactgtatatatcacagtagagttgagatggttaaataagatactatataaaaatgaatattaaaatatatgtcatatttttggtactcaatattttcaatagagaatagaaaactgcttatttgcttgggctgaggaaaagtaaaaggaagaaaaatagggaaaacacacactgtgagaaatgatagggaagacttgaaaggaataacttcaatgttacaggaataaaattggaggctcttggtttatggttaccagtccctggtttatggcaataaaggaacaatgttggaaaccaga

SEQ ID NO: 655640 - DNA, 577 bp, Homo sapiens
gttatatataagtgccaaagtttgttttttttttttctgcaggacttatcagaacctttgctatgcaaatgttcattgtggttctctagatgarcagagcaggaagccttttccaaatttatctaaatccatgatattttcctggagcacctcacctgactagtgttttgggctgcattctttggggaccagcagctggaatgattattccaaccaggcctggcagctcagagtcagaggtcatgggcatgtaatggatagagtcagaggcagagagcccgacctgattcccaggatccaaccttagctggtatcttacctgccagcaggtaggtgtcctccccggggctgacaggctcctcccctcggaaccagcggatggctggaggtgggatccccatggcttcacagagcagagttaaggggctgtgcaaggcagcagtgatgttggtcagcgggtccaagtctccaatgagctctgggggcactggacacaaagaagaagccacattcagggtgcagatatgggctgtgtgcttcatgctccttccccagccccactgactgccccccaact

SEQ ID NO: 655641 - DNA, 595 bp, Homo sapiens
tttctaatatttttcattactgttgtgtatttttcatgcaaaagtcctgcatggtttggttaaatgtacagctaagcattttattatatttttagtgattgttaattttatttttttttaaatttaacatctgtgttcattttagtatatataaacagaataaatgtttgtatgcttatcactgagatttatcaagatagtaagtgatacaataaaatgttttgttagtaacaaaacctagtcatgccaccattagtgtcttataagtttttttaaaaagcaatgtatttttcttctacaatatttcctgttgttttctatttttcactgtcaatatatttatttttacattaataacatattatttgctgatcaaagagccaatgccatttacttttattaagatccttagtattttaatatattctgttctcaagtatccactgactgctccatactgtcctctctttmaaaattgcatagaaattatatggaaataaataaaattacagagttaaaagtgtagtctattaatccaaccacttagccagatgtccattcatcattgtatttatttatttatttcgctagttaa

SEQ ID NO: 655642 - DNA, 589 bp, Homo sapiens
ccctcaaagacgtccacaacctaattttcagaacctatgaatatgttgttatatggtgagggagaattaaggttgcagaaggaattaaagttgctcaggaatacagttgcccttgatattatcctggattatccggagggccttatgtaatcacaaacgtcctttaacatggaagagggaggcagaaggtcagtgatacaatgtgaaaacacacaatcggccattgtggctttgaagatgaaagaggtcataagcccaagaatatgaacagcctccagaagctaaaaaggcraaaaaatggagtctttcctagggactccagaaagaatataaccctgccaatgtcttgatttttaaccctgtgtgatccattttggacttctgacttccagaactgtaagataaaaagcttgtgttgtattaagttactgtgtgataattattaacagctaagaaaggaaactaatacacttgtgttcattcattattttattcatattgagagtcatttaagttcctcaattggctaagcgctgtggtagaaacagaagtagaagataatgtgctggcccacaggcatttaaaatcc

SEQ ID NO: 655643 - DNA, 583 bp, Homo sapiens
agtaactgggaaatatttggtattgcctttctttgaggatggggtaaattttaatcaatgggccctaattgctttactttagctgggaatgtatttgggaaggggaatgaggttaaagattgataggtttcactaaatggatgaattttaataaatatttgtcatctgaagaggcgaggcagggaawccttgcatatgaacagccatatagagtttggcaagagatatggtccgcattcagcaatagtaccttgctgcttttacttaggacaagtgcgtggtgcctacatttgttcactcagattcccttatcttggactttgaatgaagataggaaaacattctttctggaagccaaaacattgtcagtaacataaagtttccaggggcaaccttagaatactcttagagtattcacagacatgatgaagcacctgtttttttgatggtgggcacaatggtaatgccactacagtgatcctggcatgattttggttatggttctagtagaatatcttctctatatctaaagatagcccaatctgtttctattctatatctgtttctctagccttttcaatga

SEQ ID NO: 655644 - DNA, 575 bp, Homo sapiens
tcacctccctactaattgcttctcaaagcattcttccttttctctccccattcagataacctacctagtcccaaagctttatctgatccttgctagaggaagtcttttagttggcctcaccaaaatcctcttaaattcatggacacaaaccttagattggctctcagtactgcttagtgactctgccaagtttcttgactaggcttgttttcctgttgtccaaagtaaccatttcataccttctatctctcctaaccacctcctgcctctcrcttctctcctcacccttaacaaatgctctcttcaaaaatcattttttaacaatgagccaggtgctcaaatgccctcaaattccctatgccaaatgtataaatccatttgaactcatcttcttcaatcctaaaagcaaatgatcaaatttcctaattcctattaaataccaatttctttacctgtcccctggattattttacctctttcttaggaattttctcctacctattctctcttgcattgccagtctctccttctcacctgcattattttcatcaatatacacactttattgttatttt

SEQ ID NO: 655645 - DNA, 626 bp, Homo sapiens
attaagggctggacctgaacttccaaaggaaactcaggagtcaattaagtgtttagcttaacccctgtcataatagtcaatatgaacgaatgcattttaagaaaactgatataaaaataaattcatcatgtcaaagagatgaaaaaggaaaatgaatgcaatttgatttggttagctcacagttaacaacttaggttaagttttgtttatttatttatttatttttttgagatggagtctcgctctgtcacttaggctggaatgcagtggcacgatctcagctcactgcaacctctgcctcccaggttcaagcgattctcctgcctcagcctcccgagtagctgggattacaggtgcctgccaccgctcctgactaatttttgtgtttttartagagatggggtttcaccatgttggtcaggctggtctcgaactcctgacctcaggtgatccgcccgcctcggcctcccaaagtgctgggattacaggcatgagccaccatgcccagccaacttagattaagttttaaggaaatgaaggtacttaacgaaaacattaattatagtacatgtattggggactgtccagtctctcctcagactagtaaaaaatgccaaatttgtcag

SEQ ID NO: 655646 - DNA, 626 bp, Homo sapiens
attaagggctggacctgaacttccaaaggaaactcaggagtcaattaagtgtttagcttaacccctgtcataatagtcaatatgaacgaatgcattttaagaaaactgatataaaaataaattcatcatgtcaaagagatgaaaaaggaaaatgaatgcaatttgatttggttagctcacagttaacaacttaggttaagttttgtttatttatttatttatttttttgagatggagtctcgctctgtcacttaggctggaatgcagtggcacgatctcagctcactgcaacctctgcctcccaggttcaagcgattctcctgcctcagcctcccgagtagctgggattacaggtgcctgccaccgctcctgactaatttttgtgtttttaatagagatggggtttcaccatgttggtcaggctggtctcgaactcctgacctcaggtgatccgcccgcctcggcctcccaaagtgctgggattacaggcatgagccaccatgcccrgccaacttagattaagttttaaggaaatgaaggtacttaacgaaaacattaattatagtacatgtattggggactgtccagtctctcctcagactagtaaaaaatgccaaatttgtcag

SEQ ID NO: 655647 - DNA, 626 bp, Homo sapiens
attaagggctggacctgaacttccaaaggaaactcaggagtcaattaagtgtttagcttaacccctgtcataatagtcaatatgaacgaatgcattttaagaaaactgatataaaaataaattcatcatgtcaaagagatgaaaaaggaaaatgaatgcaatttgatttggttagctcacagttaacaacttaggttaagttttgtttatttatttatttatttttttgagatggagtctcgctctgtcacttaggctggaatgcagtggcacgatctcagctcactgcaacctctgcctcccaggttcaagcgattctcctgcctcagcctcccgagtagctgggattacaggtgcctgccaccgctcctgactaatttttgtgtttttaatagagatggggtttcaccatgttggtcaggctggtctcgaactcctgacctcaggtgatccgcccgcctcggcctcccaaagtgctgggattacaggcatgagccaccatgcccagccaacttagattaagttttaaggaaaygaaggtacttaacgaaaacattaattatagtacatgtattggggactgtccagtctctcctcagactagtaaaaaatgccaaatttgtcag

SEQ ID NO: 655648 - DNA, 578 bp, Homo sapiens
cttaattttgttagaaaccaccagaacgctatccaaagtagctgtaccattttatattcccactagcaatgaaggagagctcctgttgatccatatcctcaccagcctttgttgttgtcagtgttctatatttttgacatttgaataggtgtgtagtggtattttattgctgttataatttgcatttccctggtgacatggggtgtaaatcatcttttgagatgctatttagcatctgtatattttctttaatgaggtgtctcttaaggtctttggcccatttttaattgtgttgtttcttttctttcttattgttgaatttaatgagtcttttgtgttttttggttaacagtcttaccagatgtgtcttttgcagatattccttccagtctgtggcttgtcttcttagtctcttaacattgtcttttgcggagcagaagtttttaattttagtgaggtctagcttattaatcatttctttcatgaattgtgccttcggtacaatatataaaaagttattgccatacctgaygtcatcaaagtctcctacattgtcttctgagagctttataatttta

SEQ ID NO: 655649 - DNA, 443 bp, Homo sapiens
  misc_feature 64, 65, 66, 67, 68, 69, 70, 71, 72, 73, 74, 75, 76, 77, 78,79, 80, 81, 82, 83, 84, 85, 86, 87, 88, 89, 90, 91, 92,93, 94, 95, 96, 97, 98, 99, 100, 101, 102, 103, 104, 105,106, 107, 108, 109, 110, 111, 112, 113, 114, 115, 116, 117: n = A,T,C or G
  misc_feature 118, 119, 120, 121, 122, 123, 124, 125, 126, 127, 128, 129,130, 131, 132, 133, 134, 135, 136, 137, 138, 139, 140, 141,142, 143, 144, 145, 146, 147, 148, 149, 150, 151, 152, 153,154, 155, 156, 157, 158, 159, 160, 161, 162, 163: n = A,T,C or G
aatatgttagcagcagtttataaccactaaaattaagtcactcaaaccgaaaccaactatactnnnnnnnnnnnnnnnnnnnnnnnnnnnnnnnnnnnnnnnnnnnnnnnnnnnnnnnnnnnnnnnnnnnnnnnnnnnnnnnnnnnnnnnnnnnnnnnnnnnnctaattcccaaccttcgtgcaaggcctaattcaaagggcatctcttccataaagggttccttgacctcttcagctggttatagtctttccctcatcagaagacccaaaacagtctatgtgtacctctcatgacacttggtttatgttttttttttttcagacactggttttgtggkagcaggatttatatctgattcttccttgcatactctatggcaccttgaacactgctttgctcaaagtactaaaaaactgtttaagatttgttatctgaactttg

SEQ ID NO: 655650 - DNA, 443 bp, Homo sapiens
  misc_feature 64, 65, 66, 67, 68, 69, 70, 71, 72, 73, 74, 75, 76, 77, 78,79, 80, 81, 82, 83, 84, 85, 86, 87, 88, 89, 90, 91, 92,93, 94, 95, 96, 97, 98, 99, 100, 101, 102, 103, 104, 105,106, 107, 108, 109, 110, 111, 112, 113, 114, 115, 116, 117: n = A,T,C or G
  misc_feature 118, 119, 120, 121, 122, 123, 124, 125, 126, 127, 128, 129,130, 131, 132, 133, 134, 135, 136, 137, 138, 139, 140, 141,142, 143, 144, 145, 146, 147, 148, 149, 150, 151, 152, 153,154, 155, 156, 157, 158, 159, 160, 161, 162, 163: n = A,T,C or G
aatatgttagcagcagtttataaccactaaaattaagtcactcaaaccgaaaccaactatactnnnnnnnnnnnnnnnnnnnnnnnnnnnnnnnnnnnnnnnnnnnnnnnnnnnnnnnnnnnnnnnnnnnnnnnnnnnnnnnnnnnnnnnnnnnnnnnnnnnnctaattcccaaccttcgtgcaaggcctaattcaaagggcatctcttccataaagggttccttgacctcttcagctggttatagtctttccctcatcagaagacccaaaacagtctatgtgtacctctcatgacacttggtttatgttttttttttttcagacactggttttgtgggagcaggatttatatctgattcttccttgcatactctatggcaccttgaacactgctttgctcaaagtactaaaaaactrtttaagatttgttatctgaactttg

SEQ ID NO: 655651 - DNA, 444 bp, Homo sapiens
  misc_feature 65, 66, 67, 68, 69, 70, 71, 72, 73, 74, 75, 76, 77, 78, 79,80, 81, 82, 83, 84, 85, 86, 87, 88, 89, 90, 91, 92, 93,94, 95, 96, 97, 98, 99, 100, 101, 102, 103, 104, 105, 106,107, 108, 109, 110, 111, 112, 113, 114, 115, 116, 117, 118: n = A,T,C or G
  misc_feature 119, 120, 121, 122, 123, 124, 125, 126, 127, 128, 129, 130,131, 132, 133, 134, 135, 136, 137, 138, 139, 140, 141, 142,143, 144, 145, 146, 147, 148, 149, 150, 151, 152, 153, 154,155, 156, 157, 158, 159, 160, 161, 162, 163, 164: n = A,T,C or G
aaatatgttagcagcagtttataaccactaaaattaagtcactcaaaccgaaaccaactatactnnnnnnnnnnnnnnnnnnnnnnnnnnnnnnnnnnnnnnnnnnnnnnnnnnnnnnnnnnnnnnnnnnnnnnnnnnnnnnnnnnnnnnnnnnnnnnnnnnnnctaattcccaaccttcgtgcaaggcctaattcaaagggcatctcttccataaagggttccttgacctcttcagctggttatagtctttccctcatcagaagacccaaaacagtctatgtgtacctctcatgacacttggtttatgttttttttttttcagacactggttttgtgggagcaggatttatatctgattcttccttgcatactctatggcaccttgaacactgctttgctcaaagtactaaaaaactgtktaagatttgttatctgaactttg

SEQ ID NO: 655652 - DNA, 566 bp, Homo sapiens
ttaggaatacatctaagcaaggaagtgaaaggtctctacaagaagaactacaaaacgctgctgaaagaaatcagagacaacacaaacagraaaacattccatgctcatggattggaagaatcaatatcattaaaatggccataccaccctaagtaatgtacagattcaatgctatttctatcaaactaccaatgtcatttttcacagaataagaaaacaactattctaaaattcatatggaactaaaaaagagcttaaatgaccaaaagcatccttaagcaaaaggaacaaagccagaggcatcactctacctaactccaaactatactataaggccattgtaaccaaaacagtatggtactggtacaaaaaccgacacatagactaatgaaacagaatagagaatcagaaataagacagcatacctacaactatctgaccttcaacaaagtcaataaaaataggcaatggagaaaggactccctattcaataaatgtgttggaataaccagctagcagagacatgaaaattctaagaacaaaaaagaaatgctagtgatcaaaaa

SEQ ID NO: 655653 - DNA, 566 bp, Homo sapiens
ttaggaatacatctaagcaaggaagtgaaaggtctctacaagaagaactacaaaacgctgctgaaagaaatcagagacaacacaaacagaaaaacattccatgctcatggattggaagaatcaatrtcattaaaatggccataccaccctaagtaatgtacagattcaatgctatttctatcaaactaccaatgtcatttttcacagaataagaaaacaactattctaaaattcatatggaactaaaaaagagcttaaatgaccaaaagcatccttaagcaaaaggaacaaagccagaggcatcactctacctaactccaaactatactataaggccattgtaaccaaaacagtatggtactggtacaaaaaccgacacatagactaatgaaacagaatagagaatcagaaataagacagcatacctacaactatctgaccttcaacaaagtcaataaaaataggcaatggagaaaggactccctattcaataaatgtgttggaataaccagctagcagagacatgaaaattctaagaacaaaaaagaaatgctagtgatcaaaaa

SEQ ID NO: 655654 - DNA, 566 bp, Homo sapiens
ttaggaatacatctaagcaaggaagtgaaaggtctctacaagaagaactacaaaacgctgctgaaagaaatcagagacaacacaaacagaaaaacattccatgctcatggattggaagaatcaatatcattaaaatggccataccaccctaagtaatgtacagattcaatgctatttctatcaaactaccaatgtcatttttcacagaataagaaaacaactattctaaaattcatatggaactaaaaaagagcttaaatgaccaaaagcatccttaagcaaaaggaacaaagccagaggcatcactctacctaactccaaactatactataaggcyattgtaaccaaaacagtatggtactggtacaaaaaccgacacatagactaatgaaacagaatagagaatcagaaataagacagcatacctacaactatctgaccttcaacaaagtcaataaaaataggcaatggagaaaggactccctattcaataaatgtgttggaataaccagctagcagagacatgaaaattctaagaacaaaaaagaaatgctagtgatcaaaaa

SEQ ID NO: 655655 - DNA, 566 bp, Homo sapiens
ttaggaatacatctaagcaaggaagtgaaaggtctctacaagaagaactacaaaacgctgctgaaagaaatcagagacaacacaaacagaaaaacattccatgctcatggattggaagaatcaatatcattaaaatggccataccaccctaagtaatgtacagattcaatgctatttctatcaaactaccaatgtcatttttcacagaataagaaaacaactattctaaaattcatatggaactaaaaaagagcttaaatgaccaaaagcatccttaagcaaaaggaacaaagccagaggcatcactctacctaactccaaactatactataaggccattgtaaccaaaacagtatggtactggtacaaaaaccgacacatagactaatgaaacagaatagagaatcagaaataagmcagcatacctacaactatctgaccttcaacaaagtcaataaaaataggcaatggagaaaggactccctattcaataaatgtgttggaataaccagctagcagagacatgaaaattctaagaacaaaaaagaaatgctagtgatcaaaaa

SEQ ID NO: 655656 - DNA, 588 bp, Homo sapiens
gtttacattcaattccttaatctattttgagttgatttttccctgagctatatattttttaaataattttatattttattttagattcgggggtatatgtgcaggtttgttacctgggtatattgtgtgatgctgaggtttggggtatgaatgatcttttcacccagatactgagaatagtacccaatagatagtttttcagcccttgacmactccttccatctctccactagaaatcccccatgtctattgttgccatctttatatccataattaccaagtgtttagctcccatttataagtgacaatatgtggtatttggttttctgttcctgtgttaattcacttaggataatggcctccagctgcatccacattgctgcacagaacatgatttcattttttatggctgcatggtattccatggtatatatgtatgacatttttttttttgtccaatccactgtggatgggcatctaggttgattccatgaacataagagtatgtgtgtctttttggtagaatgatttattttcttttggatataaacctgggtggaatggtagttgtttttagttctttgagaa

SEQ ID NO: 655657 - DNA, 669 bp, Homo sapiens
ctctggggaaggtgaaaggaattataattacatctgtgaagaaggcttgagaagggaaaaaaaatcctgccatatggtgtgtggaaaatgttttggaactgaataaaaaatatggcgggtgtttttctcctcccatttttgtttatacatctacgttatgcaggctgactggggaacacggataagtttttctttcagaatagaaatgcactgggtaatttaattttatgaccrttaataatatgggtctctcccggcaagcaaagacatttacaaacttataatcagattttgtgatttaggtgtaaaccaatcatccacaagaggctgggagatatttccatcccgctttcccattgcagtgggatttcatgaaatgcaaaaaggagatatagtaaaaggttcaggatcccagaaggaaggagggagagagccactggtttcgatggacagtccatcctatgaaaagaattttaaatggtcaagagacaggcattcataggtattaaccatcaagtgtgttctagactctgtccaaatgggatcttgtcgaatgttcctatcaactctgtgctgcagacattgacatgcccatttatcagatgaggaagtggaggtcacagaagtgaagggaagttgttgctcctactcacacagctacccagtaac

SEQ ID NO: 655658 - DNA, 612 bp, Homo sapiens
ttgtttttgtcattctcttggcttattcgtataaagatgtttcagtgttatctgcttagccttctccatctgataacccatacccctcgggacaaggacctaatgtgaagtttcagctcacagccaaatatatctatccaaattatatattagagacttggaaaataactaaatgagtgagtctgtcggcacagtgatctatttgggactcagactccttttcaattaatggctttcagatctracagcttgttcaagggatcatgacatgttattgggcgccctcagctttctgatcattcattcctggtttattctgatgatacaaattaaatagtttttggttgcccgtgtttctagtttgtccctaaaaacattgtgtttattaattttctgcacaactatttgcaggtcagatctcgcctgctttcctaccttgcttactgggaaattggatccacatttcctctactgggaaattttttattttattttttaatactttaagttttagggtatatgtgcacaacgtgcaggtttgttgcatgtgtatacatgtgccatgttagttagtatcctaccattgcctttattattagagatactagttct

SEQ ID NO: 655659 - DNA, 612 bp, Homo sapiens
ttgtttttgtcattctcttggcttattcgtataaagatgtttcagtgttatctgcttagccttctccatctgataacccatacccctcgggacaaggacctaatgtgaagtttcagctcacagccaaatatatctatccaaattatatattagagacttggaaaataactaaatgagtgagtctgtcggcacagtgatctatttgggactcagactccttttcaattaatggctttcagatctaacagcttgttcaagggatcatgacatgttattgggcgccctcagctttctgatcattcattcctggtttattctgatgatacaaattaaatagtttttggttgcccgtgtttctagtttgtccctaaaaacattgtgtttattaattttctgcacaactatttgcaggtcagatctcgcctgctttcctaccttgcttactgggaaattggatccacatttcctctactgggaaattttttattttattttttaatactttaagttttagggtatatgtgcacaaygtgcaggtttgttgcatgtgtatacatgtgccatgttagttagtatcctaccattgcctttattattagagatactagttct

SEQ ID NO: 655660 - DNA, 612 bp, Homo sapiens
ttgtttttgtcattctcttggcttattcgtataaagatgtttcagtgttatctgcttagccttctccatctgataacccatacccctcgggacaaggacctaatgtgaagtttcagctcacagccaaatatatctatccaaattatatattagagacttggaaaataactaaatgagtgagtctgtcggcacagtgatctatttgggactcagactccttttcaattaatggctttcagatctaacagcttgttcaagggatcatgacatgttattgggcgccctcagctttctgatcattcattcctggtttattctgatgatacaaattaaatagtttttggttgcccgtgtttctagtttgtccctaaaaacattgtgtttattaattttctgcacaactatttgcaggtcagatctcgcctgctttcctaccttgcttactgggaaattggatccacatttcctctactgggaaattttttattttattttttaatactttaagttttagggtatatgtgcacaacgtgcaggtttgttrcatgtgtatacatgtgccatgttagttagtatcctaccattgcctttattattagagatactagttct

SEQ ID NO: 655661 - DNA, 612 bp, Homo sapiens
ttgtttttgtcattctcttggcttattcgtataaagatgtttcagtgttatctgcttagccttctccatctgataacccatacccctcgggacaaggacctaatgtgaagtttcagctcacagccaaatatatctatccaaattatatattagagacttggaaaataactaaatgagtgagtctgtcggcacagtgatctatttgggactcagactccttttcaattaatggctttcagatctaacagcttgttcaagggatcatgacatgttattgggcgccctcagctttctgatcattcattcctggtttattctgatgatacaaattaaatagtttttggttgcccgtgtttctagtttgtccctaaaaacattgtgtttattaattttctgcacaactatttgcaggtcagatctcgcctgctttcctaccttgcttactgggaaattggatccacatttcctctactgggaaattttttattttattttttaatactttaagttttagggtatatgtgcacaacgtgcaggtttgttgcatrtgtatacatgtgccatgttagttagtatcctaccattgcctttattattagagatactagttct

SEQ ID NO: 655662 - DNA, 464 bp, Homo sapiens
ataatagaagcatatttctttaggaattattttttgtttacccttaatgactgtgctgtggtctgaaagtytgtgtccccacaaaatccacgtgttgaaatcctaaccctaaggtgatggtattaagatctggggcctgtgtgaggtgatgaggtcatgacggcagggcactcatgaatgggattagtgtcattttaaaaaagactcaggggagcttgttggcctcttccaccacatgaaggcacagctagaaagtgcccacatttatgaactagaaatcaggctttcaccagacacccggtgagatcttgaacttcccagcctctagaactgtgagaaataaatttctgtggttgatatgccatttgtcacagcagcccaaatgggttaagacagattggaagcctttcaaaaagcacatcatgtacttccttgcttttttctgaagcagagcacattgaacc

SEQ ID NO: 655663 - DNA, 562 bp, Homo sapiens
aataaatttaaccaagtcagtaaaagacctgtatagtaaaagctgtaaaatactgatgaaagaaattaaagaagaaaaaaatggaaacatatttcatgttcatggattgaaagaattaatattkttaaaatgtccagactatccaaagcaatatacaaatgtaatatcatccctattaaaattccaatggcatttttcacagaaataaaaaaaaaaactctaaaatttatacagaaccacaaagacctgaaatagccaaagcaatcttgagaaagaaaaacaaacttgaaggcatcatactccttgatttcaatcatattacaaagctataataatcaaaataatatagtcctggcataaaaacagacatatagaccaatggaacagaatagagagtccagaaatcaactcaggaatatacacttaactaattttcaacaaggccaccaagaagacagaatgggaaaaggatagtctcttagatacgtggtgtgggaaaaactggatatccacatgcagaagaataaaactggactcttaccgtacaccacaaacagaaatc

SEQ ID NO: 655664 - DNA, 524 bp, Homo sapiens
tgaattctttttcaattaaataaccagctcacatacaagagggacaatataaacttggtcaatataaacttctcaaatttctaccccgcagtcactctgaggattcctaaaactttcttttatccatgttgtttaccaatccccaagccctcaagcctaactgtaataataacctcagtccttccaccccaggtgttgaggactgaagactcccttctccatttaagaaatgcaacagaacacgaaggtttggagaaaagccacccaggagcagacatggtggtatgaagctctgctggggaggacagcaggtggttccytccattggattagagtcctctgtccaaaaccaagtagctaggaggaacactcagaaatgcccacatacccatccacatgctagagaaggcactgttcccaaatgggtctctgtggtgctcccaaagtcattttattctgtagggactcatgtggtgtgaacgttgcaaaaatcatgtttctttttgcttctagcagctgggaat

SEQ ID NO: 655665 - DNA, 581 bp, Homo sapiens
agagcattcatgggaatgagtctattttagatgatagcccgagggaaagcttggaagcttggcatgctgcagctgcgtgtaaggaatgcattctttgcacggtggtgaaactactgttggtacacaacagccttttctggtggtaagccagcttccttctaagtaagtgtggttagagggtcatgctctcttcatgaaactaaattcttaggattgtattcagggttgcctttcttttcttccggctgtgctgctcttctttcttggtcttggtttctttctgcattccctgaagggtgtggaaggcatgcccacgtttgcccctctgcttccctcactttccactagggactcaccgcatgactcagagcctggctggacacagcaggtgcagamagccttccctttctcagaccatgcttctgtagtggccacatgcctgtgcctcacaggcagcacactcaacttgagggcagagtcactgaagctgttctgctagtggatctgctgttaaggaaactgtggatcgccaacagaaaaatagtagggcgcaagctcccccagtgggcaaacagaagctt

SEQ ID NO: 655666 - DNA, 572 bp, Homo sapiens
gcagttgaaaccagccaatccctgagggcccacacacctccccagacaaggaattctcatctgcagggctttgccactcaggacagtgatgtgagcttggagccacaaggctgtaaatccacatggtgtgtgccttcatcctttcctgcctcctggaattccatgaatgcargctaatattacattaacttcctttcatccacagcacatgcatgcttaaaattgaacttgttaactaagatccatatggaatcccgtgtggttagatttcatatctgtactcaggcggttagaactttctatttcagggtagaaatccatgggtctccctacagagaggcagtctacccgttttaaatcctcctaatacagtgtctgctactacctgacacatcggatgtgttcaacaagtgtttgttgaatggagccatcagtgagttcattttattccccagttaattttcttctgtgagtttgccccacccgtctacctttaacttgcattttttgtttttccttaaaaaaactagatttgggaaagaatttttgatttacagaaaagttgcaaagac

SEQ ID NO: 655667 - DNA, 572 bp, Homo sapiens
gcagttgaaaccagccaatccctgagggcccacacacctccccagacaaggaattctcatctgcagggctttgccactcaggacagtgatgtgagcttggagccacaaggctgtaaatccacatggtgtgtgccttcatcctttcctgcctcctggaattccatgaatgcaggctaatattacattaacttcctttcatccacagcacatgcatgcttaaaattgaacttgttaactaagatccatatggaatcccgtgtggttagatttcatatctgtactcaggcggttagaactttctatttcagggtagaaatccatgggtctccctacagagaggcagtctacccgttttaaatcctcctaatacartgtctgctactacctgacacatcggatgtgttcaacaagtgtttgttgaatggagccatcagtgagttcattttattccccagttaattttcttctgtgagtttgccccacccgtctacctttaacttgcattttttgtttttccttaaaaaaactagatttgggaaagaatttttgatttacagaaaagttgcaaagac

SEQ ID NO: 655668 - DNA, 572 bp, Homo sapiens
gcagttgaaaccagccaatccctgagggcccacacacctccccagacaaggaattctcatctgcagggctttgccactcaggacagtgatgtgagcttggagccacaaggctgtaaatccacatggtgtgtgccttcatcctttcctgcctcctggaattccatgaatgcaggctaatattacattaacttcctttcatccacagcacatgcatgcttaaaattgaacttgttaactaagatccatatggaatcccgtgtggttagatttcatatctgtactcaggcggttagaactttctatttcagggtagaaatccatgggtctccctacagagaggcagtctacccgttttaaatcctcctaatacagtgtctgctactayctgacacatcggatgtgttcaacaagtgtttgttgaatggagccatcagtgagttcattttattccccagttaattttcttctgtgagtttgccccacccgtctacctttaacttgcattttttgtttttccttaaaaaaactagatttgggaaagaatttttgatttacagaaaagttgcaaagac

SEQ ID NO: 655669 - DNA, 572 bp, Homo sapiens
gcagttgaaaccagccaatccctgagggcccacacacctccccagacaaggaattctcatctgcagggctttgccactcaggacagtgatgtgagcttggagccacaaggctgtaaatccacatggtgtgtgccttcatcctttcctgcctcctggaattccatgaatgcaggctaatattacattaacttcctttcatccacagcacatgcatgcttaaaattgaacttgttaactaagatccatatggaatcccgtgtggttagatttcatatctgtactcaggcggttagaactttctatttcagggtagaaatccatgggtctccctacagagaggcagtctacccgttttaaatcctcctaatacagtgtctgctactacctgacacatcrgatgtgttcaacaagtgtttgttgaatggagccatcagtgagttcattttattccccagttaattttcttctgtgagtttgccccacccgtctacctttaacttgcattttttgtttttccttaaaaaaactagatttgggaaagaatttttgatttacagaaaagttgcaaagac

SEQ ID NO: 655670 - DNA, 487 bp, Homo sapiens
cagtggggaccggaccaagctattcatgagggatcaactcccatgatccaaccacctcccactagaccccacgttcaacatggaggatcagatttcaacatgagatttggagggggcaaatatccaaattatatcagttcctttggtttagaatcacttgtttgctatgtacagaaactaatttcaaactagcttgtacaatttattggctcacgtaggtgggaaatctaatgaagttcaagcacacttgaaccmaaagtgttgattcaaaaagagaatcaagattttgctttttaaattttgtactataatatttgttttatttttaattttatttttctttctgcaggtatgctctgaccgctgttttaagtcattttagaattattacatagttttcctcttcctcagtctcctgacttttctgtgtcttttatttagggtagcctaattttcttccattgaatatagattgttatttgcagga

SEQ ID NO: 655671 - DNA, 553 bp, Homo sapiens
agcctgggcaataaagcgagactgtctctaaaaataaaaaaatacaaaaataaaaaaaaggagaaaaatccaaacaacttgtttctaaagaaagatgagccaggcatggtggctcactttgggaggtcaaggtgagctgattgcttgcgcccaggagttcsagactagcctgggcaacatggcaaaatcctgtctctacaaaaaaaaagagggaagaaagatgagctttattgtaccctgtaccctgtctcagaggagtatctattttgaatgtaactcctcccaccttgccgttttttgcttgctaatactgaattcaatgtaacctttttaaaaagaagcataatattcattgtatacagtgttggtagttttcagtgccatatatttgcaatagttcacatttggcatggggtgtaatgcttagccggcccctttctatgctcacagaacttcctccctctccatctattcttctttgccctcacattttgctaggataatcaaaagcttctcaaagtctggctcacattctatttgcataaaaatcaaa

SEQ ID NO: 655672 - DNA, 553 bp, Homo sapiens
agcctgggcaataaagcgagactgtctctaaaaataaaaaaatacaaaaataaaaaaaaggagaaaaatccaaacaacttgtttctaaagaaagatgagccaggcatggtggctcactttgggaggtcaaggtgagctgattgcttgcgcccaggagttcgagactagcctgggcaacatggcaaaatcctgtctctacaaaaaaaaagagggaagaaagatgagctttattgtaccctgtaccctgtctcagaggagtatctattttgaatgtaactcctcccaccttgccgttttttgcttgctaatactgaattcaatktaacctttttaaaaagaagcataatattcattgtatacagtgttggtagttttcagtgccatatatttgcaatagttcacatttggcatggggtgtaatgcttagccggcccctttctatgctcacagaacttcctccctctccatctattcttctttgccctcacattttgctaggataatcaaaagcttctcaaagtctggctcacattctatttgcataaaaatcaaa

SEQ ID NO: 655673 - DNA, 552 bp, Homo sapiens
tcatcctacttctaaatcttttaaatgaacactgtactcagatatgctaaaattgtggctatggcttttgttgttgttttaacttctataattttgaccaaattttaaatgggaaaatattattaataacatttattgcacacatgaaaaaaattacagttacatattgttagcgtacaaatatatsaagtatgttttattatcacaaaaatctcagattaacataactaattctttatatttccttcttatttggaagagatatcttttgtgacataaactttgaatattttgcaaatatccttttaacttatttgaagaagtgcctattattcaatggggtttaaatcacatttttcaaatactcaatagccatatatggaaaataatatactttcattttttaaaaagcatattattcaattattcagagaagcccatgaataatatagtaaaatgcatatctgcaccaatcaggcttaatgaatgttaatgtttgctattatttgcttccagtctctttttctagtagagtttaagtccccattatcc

SEQ ID NO: 655674 - DNA, 602 bp, Homo sapiens
  misc_feature 72: n = A,T,C or G
gtctcctttaaatgtacttaaatcaaatttgcttacaatatccctgccccccattccatgatttgagggganagaagatgaaaaatgtactttgtgatacaaaatggatgactctttatggtcctgcacagctgcatgttccagcatcacattaacctctggatcttctcagcattcactctggaatttttaaaatgtcataacagtgtattttcaaaataatatccttgtgcaccccctcctccccaatcgygtaatattgtcaggatgttttatctggtgccatatatcctgcacatgacaaatccatttccccaaacaaaccatcgcatatgtccacactgtccataaattttgaatcctgacatcaacactattaccctctgacgtttgggttggcctgagttgtgcaaaattgagggggtgatgtttttaaggaatgaggggatgtcactcttttctttctgatgggtcccctctggagaaagtgatgtcgggaacatgcaaaacttaaccctactggagaaagccccagatactctccccagggtatccagagattaaaccggccagatctgtaagcatctccacctctgggggtg

SEQ ID NO: 655675 - DNA, 518 bp, Homo sapiens
ctttaaaagtgtgtgacacttcctcatcacccccagttctcttgctcctgttttagtcatgtgaagtacttgttccacattcagcttctgccatgtgttaatgcttcctgaggcttccccagaagcagatgttggcactatgcatcctgtgaaccctgcaggacgatgagcccattaaacctctatcatttataarttaccctatctcaggtgtttatctatagcaatgcaagaatagcctaatgcagaaaattggtactgattggtggggcattgctataaagatacctgactatgtggaaacgactttggaactgggtaacacacagagtttgaaagcatttggagggctgaaaagaagataggaagatgagggaaagttcagaacttcttagagactggtcaaatagttgtgacaaaaatgctggtagtgatacagataatggagtcaaggatgacatggtctcagatgaaaatgaggaacttactgaggactggatcagaggtcacatgttata

SEQ ID NO: 655676 - DNA, 497 bp, Homo sapiens
taattttttataatttaatagttagcaagccaaagctatatctaaacattcccctttagaatagctcattgtaatctgaataaaggctttctattttatataggatgtaatgttattagaaagagataatttatttttactatttttacacttaagtgtctttcagaaacakaatggactctgttccattattatggttgtattaagagaaaaaaaaaatacccccagagcaagtggcacgaaataacctagcctcagctagaaaacttgaaggctgaggtctggaataaaatgagatcatttactcacatgtccgacacatgatgttggctgtcagctgagaatttagctgcagctgtagcctggaagagctatacatggccgctccatgttgcctagccttccccacaaattagtagccagatcccaaaggtaaacatcccaagaaagaccaaggaagaagccacatcatcttttatgatgtagtctcagaaggc

SEQ ID NO: 655677 - DNA, 497 bp, Homo sapiens
taattttttataatttaatagttagcaagccaaagctatatctaaacattcccctttagaatagctcattgtaatctgaataaaggctttctattttatataggatgtaatgttattagaaagagataatttatttttactatttttacacttaagtgtctttcagaaacagaatggactctgttccattattatggttgtattaagagaaaaaaaaaatacccccagagcaagtggcacgaaataacctagcctcagctagaaaacttgaaggctgaggtctggaataaaatgagatcatttactcacatgtcygacacatgatgttggctgtcagctgagaatttagctgcagctgtagcctggaagagctatacatggccgctccatgttgcctagccttccccacaaattagtagccagatcccaaaggtaaacatcccaagaaagaccaaggaagaagccacatcatcttttatgatgtagtctcagaaggc

SEQ ID NO: 655678 - DNA, 485 bp, Homo sapiens
agtggaaacatcactacttcattgattgatgttttttcatgtggagggtgagactaatgtggtgtcttattgctcctgagtttatctcattcagctattctttcctcaagttttaaccattttgtgtaatatcaacataagctttatgtgataactatatatggttatacttgccattcttaatcccttcaaaatatattgagataatttgtcaaaatgtttatatatctatgaaagggagagttggcaaggggaagaattgttcagaaatagtgttattctgtaaggtttttcaacgaatagactgccacagcttagtttctccytctctaaaataagatgttctgactagaataccttttaagatcctagcttctagcattaatagtcccaaaggatagtccagttctcaactctggctattagttagaaatgaaatagagaatgtcattgcccggtccctaccctcagagatactggctgaa

SEQ ID NO: 655679 - DNA, 421 bp, Homo sapiens
acaaaaggcatgttcttgaattagaatggaattaaactaataatagcagaaagagagctgaaatatcctcaaataccaaaaaatttaaaaacacatttctaaataataaaacatggtgaaagagaaagtctcgagagaaacaaaattttttaactaagccagtaattaataaccttcccaaacagaargtaccaagcccagatgattcactggtgagttctatcaacactggagaaataaatgataccaattttccacaatctgttgcagaaaatagaagcagagtgactatttcttaactcattccatgggccagcattaccctaatacccaaaccagcaaaaccttacaaaaaagtaaactgcaaacaaatatctctcttgaacatggatgaagcaatccttaaaaaatattagcaaat

SEQ ID NO: 655680 - DNA, 494 bp, Homo sapiens
gctaatacttatttttaatgcttctagacagagtcttcattaagatgcgacgattcktccagcttttcctagaagtcattcacaactcctcattttctctcacactccattgactaaaccttttccatacacaaacatccactaaatcaccaagtctctttggttctaccttctaaatttctctatgatccacccactgctctctatcccctctaccatgacctcaggtttcattggcattgctgcaatggcctctcagttggccctgtcatcaatccattttccatactgctgccagaatgatctttctgaaactcatgattatcacccatctctaaaaccccccaacagtttccctgaagaaaatttccaaatttctctaatatggcctgcaagacatttcatgatttggcctctctctacttgttcaggttttagatatcctcgaactctaaatggtccagttatatcaaatgccttacagatattgaagt

SEQ ID NO: 655681 - DNA, 537 bp, Homo sapiens
atctcagcttctaccttctctaagaatcttttgatgtctacctcagtgagaattaccttctctatcttctacccaactcctcatgtagctttgagagcaatgcagcttatgtttactgggctcaagactggttttgaagagtctacctcattgtcaaatcttgtgacgtaattttgggtttcaaaataaaattgcaaccaataattcaataacaggaatcataattacaggaacggtattagatgtctcagaattgttttttttwaaaaagttattgttaaaagtatcctgaatagggaacagatctaaatatactgagctcccactctatgttgaataccgtgacaaaagggggtggttataaaagtggaagaaagagtccctgcccgaaagtagtgtatggttcaattgagagatgacaagatagaccattataatagaacataatcagtgtagtgataaagataaaacaggaagctttgggcacacagagcagggatgctcacctcctctgcaaagtcagagaatgcttcctac

SEQ ID NO: 655682 - DNA, 537 bp, Homo sapiens
atctcagcttctaccttctctaagaatcttttgatgtctacctcagtgagaattaccttctctatcttctacccaactcctcatgtagctttgagagcaatgcagcttatgtttactgggctcaagactggttttgaagagtctacctcattgtcaaatcttgtgacgtaattttgggtttcaaaataaaattgcaaccaataattcaataacaggaatcataattacaggaacggtattagatgtctcagaattgtttttttttaaaaakttattgttaaaagtatcctgaatagggaacagatctaaatatactgagctcccactctatgttgaataccgtgacaaaagggggtggttataaaagtggaagaaagagtccctgcccgaaagtagtgtatggttcaattgagagatgacaagatagaccattataatagaacataatcagtgtagtgataaagataaaacaggaagctttgggcacacagagcagggatgctcacctcctctgcaaagtcagagaatgcttcctac

SEQ ID NO: 655683 - DNA, 537 bp, Homo sapiens
atctcagcttctaccttctctaagaatcttttgatgtctacctcagtgagaattaccttctctatcttctacccaactcctcatgtagctttgagagcaatgcagcttatgtttactgggctcaagactggttttgaagagtctacctcattgtcaaatcttgtgacgtaattttgggtttcaaaataaaattgcaaccaataattcaataacaggaatcataattacaggaacggtattagatgtctcagaattgtttttttttaaaaagttattkttaaaagtatcctgaatagggaacagatctaaatatactgagctcccactctatgttgaataccgtgacaaaagggggtggttataaaagtggaagaaagagtccctgcccgaaagtagtgtatggttcaattgagagatgacaagatagaccattataatagaacataatcagtgtagtgataaagataaaacaggaagctttgggcacacagagcagggatgctcacctcctctgcaaagtcagagaatgcttcctac

SEQ ID NO: 655684 - DNA, 518 bp, Homo sapiens
ctggtaacaaatcacctgagaacttcaagttcttagggaagaagtgaaacttggaggaagtaaaatttcaagaaaggaaggaattaaaagtaagagagtggggttctcccctttcttccaactagctgctggaaaaacaattttttctggcaygtaacagtttaatataaatctgtcagcaacagttttatattttcccaagtgtttgacacaatatgcctaaattcaggacctggtgatcttttggaggtcaaagcagaaacttgataagcatgaaagagcaagatatgagagcagacagaagaccatgagcagaagctgtgtctttggaattaatgttgcagccacatccagattccaaattatggcaagatccaaggtgtaaccatgaatgggactggatgaagtagaatggagatgaaaaccctgaatgttacaggatccaggaaggatagtaaaatttgaacatgaaaggacaacagtgagtcaaaggcgatcggttaccccaaagggaaatg

SEQ ID NO: 655685 - DNA, 530 bp, Homo sapiens
ctaaagtcggatagcagctcagcagttaaatttgttgcttctgctctgcccaggctacatctagcaggttgatagagatattgtgaaggatgatggttaagagcttggaccctgacatcaaatggtttttcatttcagccctattacctttaagctgcatgttctttggcaagtgatggcctcagtttcctcatagcgaaaaatgtgagtgatagtagaaacaatatcatgaagtttctgtaaagattagatgagatactgcatgcaaaaatttagttctattgtctggcacctaagttagtggctatgttactagtgatagtggtagtgatgatgatgataataataataacaattattattatggcatcctttactaagaaagtaatcttaagcaaaacaaatctatacaaagtacaataaaaggactcaaaatatgactttagagaaacaaaataaagytattagtgtttggtttgaagaaagaaagctcaaggcaacctaatttccacctttaacaaaatagctgc

SEQ ID NO: 655686 - DNA, 512 bp, Homo sapiens
gcactgactttaccccacccaacacagcaccatctcactccattcgcgtgctcccaggtagtcctaagaggctcatttagatcattggatgagagcatggatgatgaggctgggtgcatatttcagcagcagcattgactgagtgagtttgttcaagttacatgccttttccagatctcagatttcccacctgaaacatggagacagcatctgcttcaaaggatttttgtaaacatcacaggagaacacacagtatcttgcacatagtggagctccaaaaatgttagatgtgattattatcactaaaggccaatgaagagctagaaaaaacagraaaaatattcaactaacgggataaaacagaaagaaaaccaagtgtaaatgtctaaagcaagtagatacgaattaaaaggtaggtaggtgatgccatataccaaggctttattctcctagggtgtactcattttaattcctgaaggacagaaaacaaatagccaccaaacaagtagccc

SEQ ID NO: 655687 - DNA, 522 bp, Homo sapiens
aaatctttaatctgtcttaagttcatttctgtccatggtaaaaagtaaaagtctagtttcattcttctgtgtctggctaggcagttattccagcaccatttgttgtatagggaatcctttccccattgcttgtttttgttggtcttgttgaagataagatggttgtagttgtgtggctttatttactagttttctattctgttttattgttctatatgtctgtctttaaaaattactwtactgttttggttactgtagccttatattatagtttgaagtcaagtaatgtgatgcctccagcttattatttttgcttaagattacttttgctatgcaggcatataaattttggaatttttaaaatatctgttatgaatgatgttggtagtatgacaggaataactttgattctgtacattgctttgggctgtagaacatttcaacaatattgattcttccaattcatgagaatggaatgtttttccatttacttgtgttgtgtgtgatttctttcagctatat

SEQ ID NO: 655688 - DNA, 517 bp, Homo sapiens
tatgtatacacacacacacacacagaggcacaaacgagatataaaagcacaagccaggcatgatggtgtgcacctgaagcaccagcaactcaggaagctgaggcagaaagatccctgaggtcagtagttccggactacagtgcactataatcatgcctgtgaatatctactgcactccatcctgagcaacataacaagacccagtctctaaaatccaggctatataaaatttttaaaaacttaaaaataaaaacatgtcgggttagaattggtgtctattgatttttagagcaactattttcaatatgcagaatcattcaccatcaaagtattttccctagtccctaaaaatggtttttagttataaacgtcataaaattgcttataaacagatgttaaattcaccwttcccagtcaaacctagatgaatatttggattcagaagaaatggttatatttagtgtctagagtttaataagaattgcataaattgatagctatttgatgacagaagata

SEQ ID NO: 655689 - DNA, 515 bp, Homo sapiens
caataattaaaacactgtatttaaaactgcagggaactatgtgcatggctataacaactaatatattgtcttaagggaaaaaccatgattgtgtataatacagtgaatttgactttttaaataacagtggcatgaagagcagagagtaaacatcactgccatgagattaaaatttccctttattttataaattactgcaaaatatctaggaattgttttgatatttcatttgaaaattcaactaagtaattctagatgatataactagaaataaaaatcaactagcttcaaactaatgtaaaaagttaaacaaggcttttgaccgatttttattagttaactattttgcaactattgatgctcctcgatttcctttgggattacatcctgataaactcttcttaaatgtaaaataacgtaagtcaaaatgcaytggatacacctaacctacagaacattatagcttagcctagctttcattagcctacagttggaaaaaaacgcattcaatacaa

SEQ ID NO: 655690 - DNA, 556 bp, Homo sapiens
tctatgtttactgcagcaatactaataatagccaagatatgaaatcaacctaagtatccatcaacagatgaataaaaaaatggtatayaaaatatgtttggaaatgtaaaggatctaaagttgccaaactttactatataatttcaatacttatttgaaaattctaagactctagatcaagcattgccaaaagaccaaaaggacaaagaagtatatattttagcttttttgggtcatacggtctttgttacaactactcaaatttctcattttagtgtgaaaacagtcatagacaatacataaataagtgcgtgtgactatgttccaataaaacattatttacaaaagctttcaatggactagatttgtccagggagccctagttcgctagcaacacatctagacataatggtcttggtgtaggatagatatatagatcaatgcaatggaattgagtactgaaatgtacccttacagttataatcaaatgatttttgacaaagatgccaaggcaatttaataaggaatgcagagtctctttcaacaaactctgctg

SEQ ID NO: 655691 - DNA, 556 bp, Homo sapiens
tctatgtttactgcagcaatactaataatagccaagatatgaaatcaacctaagtatccatcaacagatgaataaaaaaatggtatataaaatatgtttggaaatgtaaaggatctaaagttgccaaactttactatataatttcaatacttatttgaaaattctaagactctagatcaagcattgccaaaagaccaaaaggacaaagmagtatatattttagcttttttgggtcatacggtctttgttacaactactcaaatttctcattttagtgtgaaaacagtcatagacaatacataaataagtgcgtgtgactatgttccaataaaacattatttacaaaagctttcaatggactagatttgtccagggagccctagttcgctagcaacacatctagacataatggtcttggtgtaggatagatatatagatcaatgcaatggaattgagtactgaaatgtacccttacagttataatcaaatgatttttgacaaagatgccaaggcaatttaataaggaatgcagagtctctttcaacaaactctgctg

SEQ ID NO: 655692 - DNA, 567 bp, Homo sapiens
gtgacccatgcactttccgctggtctttttctctcccttccggggtcttttttacaagtcccttgacttaagtatagtgagtccacccctattcagctgtttgcccggccgtcttggtggtcaggagcatttaataaagaccttcccagcttgggtggagcttgtcttctttccaagccttaatcagtaccaagtccccaggatggaagtgatgaactgcaaacccaagaggcagagtttgagtcagaagtccttttaacctaaggggtgacagggtgaagaatatggccagtacataatttcttaacaattggtccctggtttccatagtaggaagatctgtagctctgcccaaatatgagagtccatataataactgttagggggacagtcccaagtctttccttggggctgtcctaatcctaaggagtactattgggagacatttgctccaaggctttttagtttttaagacgagtttagtaatatgctttttgaragtttcattcattctttatacctttccagaggaaaggggatgccaaaggtgtgataatcccatttaat

SEQ ID NO: 655693 - DNA, 576 bp, Homo sapiens
tttttatggttttagcttgagacaggttttatgttccttgtggccaaagacatttaaactgaggtgatccttgataaatgttttctcaatggatagatggaaagctgaacgagaaggttattaaaggattaaaataaaggctatgtacgcaggcagggctggaaccccctccccacaaggggtgcccggtgtgggctggggtgggtgaaggagcgtacggggctggccctcaccgccaggtatgtcagaaagtgcccccgtcttcacagcaaaggctgctgagtgaaccaaagagttttgcaaagttttattatgattcagaaaggagtgacagtgacggggcggcagggatgactgatcactctcagctcagacaggtttcatcttctgaatgttcaatcagagcatgagtgattggtgggtattagaggcgctcttttaaaggtcagtgcggcagacagaagtcctcgtgkcccagacatgtgccttagtaaccacagcggaattcattaacttgtcatggctgtcccagagcctgtcagctggccttccacagacatatgtcatcctcaacca

SEQ ID NO: 655694 - DNA, 610 bp, Homo sapiens
ggtgccaggatttaggtagcagcaacataaaatcactagttcaagttcttagggaaaataactgccagtctataaatatataccctgctaaaaattatccttcaaaagtgaagtcataataaagatgtgagttatggtggttattttcctatttttggtacttatctattttaataaaccagcaattattatgctacaaattctttacaactcagattccattggcattttgcagtttatatgacataaactgcatgagtcatgttatagaggaaaatatatttaaggaaaaaagcaaaaaacggcagataggaygcaggactaacttgcagcttccactcagatggacagaacagcatatggagattcacataataaacatttgctccaagaaccaccacaggaacataccaggaaaactgaaagattcacagaccctttgaaagaagtagcttgccactgcaaactctgtgagacagccaaaaaactgtgagtgcccaaagtgtgaaagtatgaaagtccacctcccaacacacatcctcactggggaacctgaaaatctagatcacagaagaaggatttaaccttacctagagctgaaacaaagtta

SEQ ID NO: 655695 - DNA, 585 bp, Homo sapiens
gtcatgggtacatcaaaatctcagaaatcaccactaaagaacttatccatgtaagcaaacaccacctgttccccaaaaactattgaaataaaaaataataacaataaatatctttaaaaatatgactctatttaaatgttgagataaaatgaggctctattttccacgaagaaattaataatgctaaaattaagaattccagtttctccaataaacaattatatatttaacaaaaagtagtttattaatcacctttgttattgctgatatttatcccattgatttagaatcactactgccttcctgagagctaaacatctctttaakcaaataacatttttattttttgcttattatttgaacatgtgccttaaaagcactgcctattttgtttctaataagatatttatttttacctattttttacatcgcagatttgttccactgttgttgttgtttttgtttcaggtatagaatgccacatactacataaaatgattctttttgcttatgaataatgtcaccaatttttaaaataacttgcagaaaacaaaactatgactaggcgttttcagcaaaaatgct

SEQ ID NO: 655696 - DNA, 503 bp, Homo sapiens
aagggtaaggagttcatatcagtgtcttcttcattccccatagtaccttctcaatcattcccaccccaatgtgtttgtaaaaatctatacctctctgaatctggtcccatttttctgtacaacttattgtggacatctgtgagttaccaacacagcattcattctatcatgtgcccttgttaactatacttcaatttttttcaacrgtgacccatccccctacttatgccctaaagtcaactttttgataaactgactttagttctacctctagaattagtgtatgcatttacctggccacattgatggccttaggcataatcttatcagagtgaagctcaaaacttttgttcagtggttgcaggaaatggacactttttcttccacgagaggcaaactaggaagaatggattcaccattgctgctgatacctgtcttgcaaccaggaggaaaatcagcctaaagaaaaaactaacatataaaggaaagaagaaccaaagaaa

SEQ ID NO: 655697 - DNA, 332 bp, Homo sapiens
acagtactaattagaatgtcatatctgttgaccatttttactatccacctactccttcctattttcatatataagttttgttcaccagtgggccaacccatgtagctcagtgtcttacatttagtaggcaattaataaattgtgttgattcattggttaattgattgttctctttgcctttytctctcaccccttcccaagtatgcttcacctagtgattattcttttaaattttttccataattatttttctgtaacacaatatatccttattactgtcccactggaaatcttcaataacactcattttgtccatagctggacctcagatg

SEQ ID NO: 655698 - DNA, 579 bp, Homo sapiens
ttacatttgacttttacataaaagttgctgattttcagtagaggctgagatgaacgacagttgataactgttcctcatgttctatagaatttatgtgtaaggtttccagctatttttctatcttccttggtaagactgtagtgtagctaaacaggtggacttaaatgtcagctgtattctagtggcttaataatgcctttgaatacgtaatagccaatgcttacaggttatgttattttatattacagtctcctgtttaattttactgcagatacgtcttaaattgagagcaattactcccttcatttttgccattttaaacctgctgygtactcattttttttaaattatgggccaaaaaaggacagctatacattttcagtgtcatggatctagagttatagctctagaggggccacagagatcacctagtttgcccctttgttttacatacaaaaaatttaagaacagttaacatttgttgagagtgtaccatgttctgggcactggcctactgttttctcatgtattaactcaactgatcttctcaatagcccaagaaaataaatactgtcatca

SEQ ID NO: 655699 - DNA, 573 bp, Homo sapiens
cacctagtttgcccctttgttttacatacaaaaaatttaagaacagttaacatttgttgagagtgtaccatgttctgggcactggcctactgttttctcatgtattaactcaactgatcttctcaatagcccaagaaaataaatactgtcatcatctccatttcacagatgaataaacttacctaagattgggaaacatttcccccttattagacaggtcaatatttwtaaaaaaaaaaatggcatagcctggtgctggggagaacacgaacaggcacatggcctcatttactgttcagcattttgtgacatttagctcaaactttttgatattgaatcttcctccatttctccacagttcttacatatcaatttggacaaaggtgacaagataatagcaaattccaagaaaaactattacatagttcaaataatcacacaattacatattagacagaaagtaaaggctagagaaagtctgcagcactacctaatctgagaaaatgattgggaaggaatgttaaaattattaaccattgaggcttgggccctaggctcccttactgggaagtt

SEQ ID NO: 655700 - DNA, 573 bp, Homo sapiens
cacctagtttgcccctttgttttacatacaaaaaatttaagaacagttaacatttgttgagagtgtaccatgttctgggcactggcctactgttttctcatgtattaactcaactgatcttctcaatagcccaagaaaataaatactgtcatcatctccatttcacagatgaataaacttacctaagattgggaaacatttcccccttattagacaggtcaatattttwaaaaaaaaaaatggcatagcctggtgctggggagaacacgaacaggcacatggcctcatttactgttcagcattttgtgacatttagctcaaactttttgatattgaatcttcctccatttctccacagttcttacatatcaatttggacaaaggtgacaagataatagcaaattccaagaaaaactattacatagttcaaataatcacacaattacatattagacagaaagtaaaggctagagaaagtctgcagcactacctaatctgagaaaatgattgggaaggaatgttaaaattattaaccattgaggcttgggccctaggctcccttactgggaagtt

SEQ ID NO: 655701 - DNA, 659 bp, Homo sapiens
tatgcaataagtgaagatgtgtccctatcaattccatcttatataagtttatgtaaaggctctgaacataatgtctaaagcacacattgatttgaatacacaaacagatacacacacacwcacacacacacacacacacagtttgttgaaagatcttaagaggatacccaataaggtctgacttgaaagaggaacaacccacagaatcataataacatattaatactgggaaatacagataagaaatcttccataatcataaaaatcccagcatctcaaagagggaagggcccttagatgtctctggaccaagttccaatctaaaataggacatctcaccaccacattctgtacaggttggcttccatactccagttgaacatcttcagtgagtcaaagctcatgcacctacaattccattgtttattccaaatttaacttccacctatactctcattctgttttatagatgccaaatccatgtttgattctatttttcatattaatcctgaaatactagacaccaaatatcatctcttcctacttagtaatttcctcctttataagaccaagaagcacagggtaagcatacctatgcctgtctattatcttggcccatcctacacattctgattatttactatactaatttgttgatg

SEQ ID NO: 655702 - DNA, 545 bp, Homo sapiens
cgcatggcagagactgtttttgcctcatagcccttctgcactctccagtattttccccacacagtgagatcattttcttcacatcttggtataggtattactcttctcctaccatcccccttcatcctgtgtaccattttatttctctctgtcagtacatttagcatatcaatacagcatttatccacatttctgactccctgactagactgagacamcttaatctcaggaactatatccaatatatctttgtaatcccagaaagcaatacctgaatatatgataaacagaactgggctttattataactagcaaccatttgaaataatattcaacttagatttttctagtcctaatcccactaacaaatttttacccctaagcaatcgagagtggtagaactgaaagagaattagagtatgaaactaagtagttctgagtcataaatgtttcaagactgaaataaacttcacctctaccccaggctagtgtcctgcatattggactcaaaatttcccttctaatagactttctcagcctattgc

SEQ ID NO: 655703 - DNA, 593 bp, Homo sapiens
tttggtcacggaagtgggtaacaytcaaaatgtcgtatttccctttccattgtatacatatccttagtgattaaatcattcaacaaattctcagtgaccacccaccatgcaccaagcactgaactaaacactagagaggagttcaaaatctatcagaagagaagatcctcgacaaataattacacacgcgtcttactgagttatagttgtgaccatcctaaagcacagtgtgtaatgcactttggctttcatcccatcacatgaaagtggattttttttcttacgtacggtcagtctagacccataaagcacgggcaggggaaaaaactctatggcttcagatatttcgccaacaactgtcttataaaagcataaatgtcccatgggttcaacagtaagcatttgaacttttgctcaaggctcccttttatttaagagcagactgcttctgttgagtgactatggcagggatatgagaacaaaccctctagctcttatggactccttctaggcttattcttggaaatgtctctctctgccccttattaagtagagatgcagtcttccgtcccaaataacaggattggagtaat

SEQ ID NO: 655704 - DNA, 593 bp, Homo sapiens
tttggtcacggaagtgggtaacattcaaaatgtcgtatttccctttccattgtatacatatccttagtgattaaatcattcaacaaattctcagtgaccacccaccatgcaccaagcactgaactaaacactagagaggagttcaaaatctatcagaagagaagatcctcgacaaataattacacacgcgtcttactgagttatagttgtgaccatcctaaagcacartgtgtaatgcactttggctttcatcccatcacatgaaagtggattttttttcttacgtacggtcagtctagacccataaagcacgggcaggggaaaaaactctatggcttcagatatttcgccaacaactgtcttataaaagcataaatgtcccatgggttcaacagtaagcatttgaacttttgctcaaggctcccttttatttaagagcagactgcttctgttgagtgactatggcagggatatgagaacaaaccctctagctcttatggactccttctaggcttattcttggaaatgtctctctctgccccttattaagtagagatgcagtcttccgtcccaaataacaggattggagtaat

SEQ ID NO: 655705 - DNA, 593 bp, Homo sapiens
tttggtcacggaagtgggtaacattcaaaatgtcgtatttccctttccattgtatacatatccttagtgattaaatcattcaacaaattctcagtgaccacccaccatgcaccaagcactgaactaaacactagagaggagttcaaaatctatcagaagagaagatcctcgacaaataattacacacgcgtcttactgagttatagttgtgaccatcctaaagcacagtgtgtaatgcactttggctttcatcccatcacatgaaagtggattttttttcttacgtacggtcagtctagacccataaagcacgggcaggggaaaaaactctatggcttcagatatttcgccaacaactgtcttataaaagcataaatgtcccatgggttcaacagtaagcatttgaacttttgctcaaggctcccttttatttaagagcagactgcttctgttgagtgactatggcagggatatgagaacaaaccctctagctcttatggactccttctaggcttattcttggaaatgtctctctctgccccttattaartagagatgcagtcttccgtcccaaataacaggattggagtaat

SEQ ID NO: 655706 - DNA, 569 bp, Homo sapiens
tatatgcagaatgtatgctatgactggttagcaagagaagagcggtctggaaagttaataaatgattgacttgaytcttttggggaactataaataaaaatagaatttcctccccacctagatgaatatatatatattcatctatgaaatgaaataaattcataaaatttgctatgagtcaaatcagataataaatgttaaagatggtagcaaaatgctagaaatattacacttatattctttgtacctaattcatctccacttcctcaaatgcatttaacatcatgctttgtttgcaactggtactcaataaattatttataattggtactgaatcttctaagtaagccagagtttccacacacaaaagcatctgagctacttaatacatataaacaactcggtatttttaataatggttgatttcaattaccattttgctgtttgtatgtgtaaaggtactgactaccattttactgttttgagtcaaaatataccgactatagtaacataaatgaggtaagaagctcctcatttatttaacatgcactaagaggttgaagagaaaa

SEQ ID NO: 655707 - DNA, 569 bp, Homo sapiens
tatatgcagaatgtatgctatgactggttagcaagagaagagcggtctggaaagttaataaatgattgacttgattcttttggggaactataaataaaaatagaatttcctccccacctagatgaatayatatatattcatctatgaaatgaaataaattcataaaatttgctatgagtcaaatcagataataaatgttaaagatggtagcaaaatgctagaaatattacacttatattctttgtacctaattcatctccacttcctcaaatgcatttaacatcatgctttgtttgcaactggtactcaataaattatttataattggtactgaatcttctaagtaagccagagtttccacacacaaaagcatctgagctacttaatacatataaacaactcggtatttttaataatggttgatttcaattaccattttgctgtttgtatgtgtaaaggtactgactaccattttactgttttgagtcaaaatataccgactatagtaacataaatgaggtaagaagctcctcatttatttaacatgcactaagaggttgaagagaaaa

SEQ ID NO: 655708 - DNA, 561 bp, Homo sapiens
attctctctaatcttcattcactctcaaaaaatgtcatatatgcagaatgtatgctatgactggttagcaagagaagagtggtctggaaagttaataaatgattgacttgattcttttggggagctataaataaaaatagaatttcctccccamctagaaaacttctccacaaaggtagaaaagaaaaaagataattttattattgaataatcattaaactagatcgtgatgcccatcacaggcaatctgccaagagaatgcaaagacaaagaaatctcacccttttatatagtcaagcagactagacccattacatacttgttctcaaggtaataactagtcttcagctaagaggagttgacagcattgtttgtcacatacagtttgttctaaattcagtagatagttgacataaccttctgtgttagctagttggctttatccataaactttttacagctttatgacaaaaggtagttctgaaatttagagagagagaggggctcaccaaagttaaggtcctacctccccccagaaactgggagacaggggcattatct

SEQ ID NO: 655709 - DNA, 580 bp, Homo sapiens
atataaaaataggataaagggtatgtcaactctaaactccagagaagaatgtgtttatatgtcacaaaacttttmaatgattctactgaagaagtttcagatacaccaacagaaagttgaaacttgttgcagacaccatgtgcccacctactgttacgtaattctcttcttcaccctcacctacagactctagatggtggtgtactcagctcaaaaatgaacaatgataaaacccttatatatttcccagataccctctcttgtagtcaagagaagcaacattacccattctggccaacagattgaagcaaaagcctactggaaatttctggaaaattcttgctttcctgacagggcctctactccctcctccttgactccatcctctctggcctgaagtatatttttgtgactgcagtggacccagccctaagatccttgagtggcacatactacagagcatttacgagatattagttcatatttttattgctaagaaaatatagggagaaagcttaataacactggatttggtaatgatctcctggacatcacaccaaaagcacagacaacaaaagaa

SEQ ID NO: 655710 - DNA, 576 bp, Homo sapiens
atgaaggataaatatccagaatatgcaaagaaatcctacaactcaacaaaacaacaacaaaaactaatttaaagacaaacaaagcacttgaataaacatttctccaaacaagatatacgaatggccaataagcacatgaaaagatgctcagcatcactaatcattaggaaatgcaaatcaaaacctcaatgagacaccacttcacatattacataacaagagttggcaaaatgyggagaaattgaaaccctcgtacatggctggtgggaatgtaaaattgtgaaaaacagcacggtggggaggttcctcaaaaaaataaatatataattaccacatgatctgccaatttactttttttatatagtccaaagaatatttaactgagaatgagtccctccaaagggactcaaacagatatttatacaccaatgttcatagaagcattattcacaatagccaaaatgtgaaataaccaaaatgtccatggatggatgaatgaataaaccaaatgttctacacatacaacatctgtatatacaacaatggtatatacatacaatatgatattattcagcc

SEQ ID NO: 655711 - DNA, 604 bp, Homo sapiens
tatccagaatatgcaaagaaatcctacaactcaacaaaacaacaacaaaaactaatttaaagacaaacaaagcacttgaataaacatttctccaaacaagatatacgaatggccaataagcacatgaaaagatgctcagcatcactaatcattaggaaatgcaaatcaaaacctcaatgagacaccacttcacatattacataacaagagttggcaaaatgcggagaaattgaaaccctcgtacatggctggtgggaatgtaaaattgtgaaaaacagcacggtggggaggttcctcaaaaaaataaatatataattaccacatgatctgccaatttactttttttatatagtccaaagaatatttaactgagaatgagtccctccaaagggactcaaacagatatttatacaccaatgttcakagaagcattattcacaatagccaaaatgtgaaataaccaaaatgtccatggatggatgaatgaataaaccaaatgttctacacatacaacatctgtatatacaacaatggtatatacatacaatatgatattattcagccttataaaggatagaattctgctacatgatacaatacagat

SEQ ID NO: 655712 - DNA, 626 bp, Homo sapiens
gaggatgacaacacaagtagggtatttgcaagggagcagaaagatgatttcatctgtgactctaacatcaccatggaagtattgaggttttcctaaatcagaggtatattatctttttaaattyccaaaacaccaatttttgagacacaattaaaagggaactaaaagacaccctataatctagacacaggaaagtacatgaagctgaaaatcgtactaattgtttacaatatttgtctttagaaaccaaatattcaaacatatttaatatttttcttcttctgattacctagaatgagagataacacagcaagtagagaatcatagataggagaacatcctgatattttattgcataggagaatgtgagcaaatcacttattttaagaaggcagggacatggttacatcagtcataccctgtgccatattatatcaagtctatatatcaagtcctaaagtgaaaaaatgtaatgatatctacattttgttgtgattgaaatggctaaccagtaaaatgcaggaagcacaacgtccaggaaaatcttagaggtacttgaacaagaaacacacagtcattgaggaagcgtgcagaagctcataagggaagacacacacaatttaatg

SEQ ID NO: 655713 - DNA, 608 bp, Homo sapiens
aagaaatgaaacaagaggtattacaacaaacaccactgaaatacaaaagatcattcaaggctactatgaacacctttatgcacataaactagaacacctagaagaaatggataaattcctggaaaaataacaaccctactagcttaaatcaggaagaattacataccctgaacagaccagtaaaaagcagcaagactaaaatggtaattaaacaatttcaacaaaaaaaaatgtccaggaccaggcaaattcacagcrgaattctaccagacattcaaagaattggtaccaatccttttgacactattcgacaggtagagacagaaggaatcctccctaattcatgctatgaagccagcatcaccctaataccaaatccaggaaaggatacaaccaaaagagaaaactacagaccaatatccatgatgaacatagatgctaaaatccttaacaaaatactagctaaccaaatccaacaacatatcaaaaagataatccaccatgatcaagtggatttcataccaggaatgcagggatggtttaaaatatgcaagacaataaatgtgatacaccaaataaacagaaattaaaacaaaaattacatgatc

SEQ ID NO: 655714 - DNA, 582 bp, Homo sapiens
caatgctattcctatcaaactaacaatgacatacttaaagaactagaaacaactattttaaaattcatacagaaacacaaaagaggctgggtgtggtggctcacgcctgtaatcccagcacattgggaggctgaggtgggcagatcacttgaggtcaggagttcaagaccagcctggccaaatggagaagccccatctctactaaatatacaaaaattagctgggtattgtggtacacgtctataatcccacctactcaggaggctgaggcaggaaaattgcttgaacctgggaggcaggaagttgcaagtgagctgagatcacgycactgcactctagcctgggtgacagagcaggacttcatctgctctgtcaaaaaaagctattaagaaatcataaggaaaagacaatatatttattatttattaggtggaagttagatcatcatgaaggtcttcatctgcatctgctccagtgatgggcacaccaaaatctcacaaatcaccactaaagaacttactcatgtaaccaaacaccacctgtaccccagtaacttatggaaaaaaaatttaaaaatgccgc

SEQ ID NO: 655715 - DNA, 582 bp, Homo sapiens
caatgctattcctatcaaactaacaatgacatacttaaagaactagaaacaactattttaaaattcatacagaaacacaaaagaggctgggtgtggtggctcacgcctgtaatcccagcacattgggaggctgaggtgggcagatcacttgaggtcaggagttcaagaccagcctggccaaatggagaagccccatctctactaaatatacaaaaattagctgggtattgtggtacacgtctataatcccacctactcaggaggctgaggcaggaaaattgcttgaacctgggaggcaggaagttgcaagtgagctgagatcacgccactgcactctagcctgggtgacagagcaggacttcatctgctctgtcaaaaaaagctattaagaaatcataaggaaaagacaatatatttattatttattaggtggaagttagatcatcatgaaggtcttcatctgcatctgctccagtgatgggcrcaccaaaatctcacaaatcaccactaaagaacttactcatgtaaccaaacaccacctgtaccccagtaacttatggaaaaaaaatttaaaaatgccgc

SEQ ID NO: 655716 - DNA, 605 bp, Homo sapiens
ggcaggtacaatcttattactgccaggttgtgggggaagtccaattccccactcagtttccattgccattttaatagggaggtgcaattcattgctggatggtatggaatttcaggctcctcactaggcctctgctgacttcacttcagtagtaggggatggaatgccttattatggctgagaggggttgaaagtctgggtttaccaagtgctctctactgataggagattgctgatacctggcagaactcaaagtccagactggctaatagtctttcaatgatactgctccaggggcagggtgatgggtattgtatgtgtgtgcctggggcagggagggttttctcttattgaggggtgatgagggttgaagtatagtcttccctctggggctttgggtcacagttttttccatggtgtgaggttgaagttactctctcaaagtttttgcctgtttggytgccccttcctgtcctagagaaatcagagaaagcaggattttcttagcactcctttgtttgcatctgttggtgtttccaggttgcagcgttctccagcacccatctaagatatatgaggcaagaagaaaacacagggaatacact

SEQ ID NO: 655717 - DNA, 608 bp, Homo sapiens
ctactggactgtgagtgagagaactggctttagatctcattcagctgctaacttaactgtgaccttaaactgttctggcctcagttttctcatttacaagcgacagtttcattatctcatcttaaatgtttcttccaaacttgaaaatcttataagcttttgtagctgtgtagctttaggcctattttgtaaataagctttgcctccgttttctcatctgtaaaatggggacaaatagtattacctaatagggttgtattgaggcatttatgaaatcawccacgtagagcacttaactctgtgcctggcaagtatcatatcactcaataaatgttagctactgatgtaatgactttaaagtataaattcatgaaccgaattaattatgagatacattaatcagaaataatactttcttctttatagacttattttagaaaataagtttctgctgggtgcagtgggtcatgcctataaacccaacactttgggaggccaaggcaggcagatccctctagcccagcagtttgagagcagcctgggcaatatggcgaaaccccgtttctacaaaaaattagttgggcgtggtggcacttgcatgtagtccc

SEQ ID NO: 655718 - DNA, 414 bp, Homo sapiens
ctgttttgatttctgacaccagaactgaactgatgttctcttgaggtgtcaaatttgatttgaatattcaattttttttttttttcttgacagagtcttgctctctcgcccaggctgaattgcagtggtgcgatctcggctcactgcaacatctgcctccaggattcaagcaattctcctgtctcagcctcccaagtagttgggagtacaggcgtgcgccaccatacctggctaatttttgtatttttagtagagayggggtttcaccatattggtcaggctggtctcgaactcctgaactcaggtgatacacccacattagcctcccgaagtgctgggattacaggtatgagccactgcgcctggccagaatattcaatttttaaaaatctacaatgtcttgataattaaaaa

SEQ ID NO: 655719 - DNA, 573 bp, Homo sapiens
aggatattctattccctgttcttttcaaagtttcttccctttcttcatgtcttatcttgtgacatttaaatgtcactccttgaagattctttccccaaccactatgtaaatgggccttccctgcaactctcttttgttacattgtttttcttatagtacattaacarttctaaacatacatttatttgctttgttattttctgtctcccccactacagaatgatgttgggaaggaatttatagacagtgccaaaattatgagattgaagcttctatccaattgaggagcaggtatagtgggaatgagcagttgagagagccagaaagataaaagattgcagccagatgacattagaaaattataagtgtccagcagttcttagaacaattttgggggtgagactatgggtgtaagaggccaatgtcaagtggaggggaagtgaggattgttagatttgagtgtccaccatgtgtgaggcttcattaggcacttggtatataagtctcagttcatgccttcaagtgctccagacttgtctataaaacaaaatccggtgctcacaagctgccaca

SEQ ID NO: 655720 - DNA, 481 bp, Homo sapiens
cttagtccttttatgctgctgtaacagaatatcacagactgagtaatttataatgaacagaactttatttgtcttctggttctggagactgggaaatctaagagcgtggcattgacatatggtgagggcatttgtgcctcatcatcccatgacagaagatggaaatgcaagagagctcaaaagcaagagagcaaatggggccaaacttgctttttataacaagccactcttgtgataatgaaccaactcaaacaataaagacataaatccattcatgagggcagagccctcaaggatgaatcrcttcacttcttaatggcctcagcttctaataccatcacaatagtaattcagtttcaacatgggttttatagggacgttggaaccacagcaaactgtaaccattttgatttccttatttgcaccattttaaaaaaacctatttatttaacggctgtttattcagtgcctattctgttgt

SEQ ID NO: 655721 - DNA, 556 bp, Homo sapiens
tgttcccttgttaggctcgagctgttttaactcaggatcaccaagtgactcttgatgttctgcataccgaggcaaatggattaggctacagaagaaagacttggagcaggagttccagtggagtgattttactcatgttagcttaccagcctcagagatgtgcccgggagtctgttcctattttaggtacccaaacttcagcaggccttcaggacccatggtacttggactctttcctggacttcatggtatctgggctccttctctcttgagtatttagataaacacatgaacagtcagttagtgcattgaactcacgatacattgattggttcctcttgtggtattaacagagcttattgctgcagattttactgacagataaaactggcactaaaattatctatttgtatttccttctccatgagacactttcaytgattgtttacttttatcccctataaaaatacctagtgagaaatctgtgtttttagtgtcttttttgttctgcttggggaccatggcaaacctttggttgtggttgtacaatcagtta

SEQ ID NO: 655722 - DNA, 553 bp, Homo sapiens
tgccccctgtctcaaaagcaattttcatggaaatttcgtgtgtgtgtgtgtgtgtgtgtgtgtgtgtgwgtatgcatatatatacatacatatgtgcatatgtgtgtataaaaatatatttacatatatgtatatacatttgtgtatgtttacatgtgtatgtataaaaatatatatgtatacatttttttcacacctgatttcccataatgtaacttgattttactctatgtatttaaaattatttgtctcattaatataggaagcaaaaatatgaaagaataaagactagagaggtaggaggatgaaaagatcccgatatgttatagactgaatgcttatggccctccactccaaatgcatatgttgaaatctaatccccaatgtgatcatatttggaggtagagtacattttgggggtgattagcacacaaggacagagcctttatgaatcgaattagtgcccttataaaagagactccagacagctctcttgtcccttccaccaggtgaagacatagagagaagtcagccatctatgaaccagacacca

SEQ ID NO: 655723 - DNA, 585 bp, Homo sapiens
aaaggacagtaatgacaggaaggaacttattagagacctctgcgtttattcgtcaccacatctgagtcttacagtgttcacagagtaatggtagttgtttttactctgccttccaaatatgccataacttccacttttgactaattctaaccacctattacatagaaccatttaaaaaccacctccataataattattttacttgtgagaccaaaaagaaagtaagccaggacaacataatgagacttcatctctacatctctatttctacaaacagaaaattagttgagcatggtggcacacacctgctctagctacttgggaggctgagcctggagtatcacttgagaccaagagttcaagactacagtgagctacgaccacacctctgtaccccaaatgtgggttagagattgaaaccacgtctccaaaactraaaagaaattatgttttaaacaatttattattttttctgttactcataccatatatcagatcagattccccggaagtaacttctaagagctagatttatttgagattgatttaataagaagtgttcataggaaactctggtagaaaagt

SEQ ID NO: 655724 - DNA, 501 bp, Homo sapiens
tgactgttccttttgctgtgcaaacactttctagtttaattaagtcccagctatttatctttgtttttattgcatttgcttttgagttatttgttatgaaatcctcgcctaaactgatgtctaggagggtttttacaatgttacttatagaatttgtatagttccaggtcttagatttcagtccttaatccatcttgagctgatttttgtacaargtgagagatgaggatccagttcaacccctcttacaatagctgcaaaaaaacaaaaacaaaaacaaacaaacaaacaaacaaaacccttaggaatatatctaaccaaggagttgaaagacctctacagggaaaagtataaaacactgctgaaagaaaacataaactacacaaacaaatggaaacacattctgtgctcatggatgggtagattgaacatggtgaaaatgaccatactgacaaaagcaatctacaaattcagtgcaatctccatcaaattaccaccatc

SEQ ID NO: 655725 - DNA, 504 bp, Homo sapiens
tatattgttctggagatttgtattaactctgtgtgatttattttaactgtgagtgttctgttccatccacacttattccataaatakgcatgagatagaacaagtacacttacacagagttcatatcagtctatcttatcagtcaacatatataatgtctaaacttcaaattattttcatgagtatacctgttgtgtgctaagagacataattaggaagctttcagggaaaaaaagcggttttctcaatagaatcttctcatctgacagatgaatccataattttatatagtttttaatgtttgatatttctgagcaatgatcacagagtttaatgggtttttatgtaatacatttctaataggtcatagttttatacttcataaaaagttttgtttggcattgaaaaataatatttggaaacagattgacagcactagaccagcttatatgggaataatttaaaatttataagcttatttaactataataaaattgttattta

SEQ ID NO: 655726 - DNA, 504 bp, Homo sapiens
tatattgttctggagatttgtattaactctgtgtgatttattttaactgtgagtgttctgttccatccacacttattccataaatatgcatgagatagaacaagtacacttacacagagttcatatcagtctatsttatcagtcaacatatataatgtctaaacttcaaattattttcatgagtatacctgttgtgtgctaagagacataattaggaagctttcagggaaaaaaagcggttttctcaatagaatcttctcatctgacagatgaatccataattttatatagtttttaatgtttgatatttctgagcaatgatcacagagtttaatgggtttttatgtaatacatttctaataggtcatagttttatacttcataaaaagttttgtttggcattgaaaaataatatttggaaacagattgacagcactagaccagcttatatgggaataatttaaaatttataagcttatttaactataataaaattgttattta

SEQ ID NO: 655727 - DNA, 620 bp, Homo sapiens
ttttttcctaatggatgttgtaatgaaacagagaagtcaagaactggagttcaaaaatactgattactgtctcttgttctcccattgttacttattgggtgtgtgaatataggcaagttatttaagatgcaggagttcaattttattacctttctaagacaaatgaagttgttttagatttaggtgccratctttccagtcctaaaatttaaaccttctcctccatattttactttagaaattggagtaaatcttattgatactgatgcgctattcctaataaatttgttttttagaaatgtactaaaggatacaggacttcagatatgaatgtctcccctttttccaaattttaggaataatttaacatctatactctaacagcaacatttatttggaatcaattataattttataatattctgtttgtaattggtggtaaaagatgaattatctctaataaacttataagcttcaagttccttcttgtcaacagtgactatgaggactcacttaataaaaatgcaaacccaaattaaatttttatggaagtaagcagtataatgacctcccaagaatgttcacccccatgaagaggttatgttatatggcaaagggga

SEQ ID NO: 655728 - DNA, 565 bp, Homo sapiens
ttctcttgaaacaaatacaaaatagaaaattccagtaagatgtaaaagttataaaatggaaccaaatgaaaaaatatagaccttaaaaataatagatgatttaatatatgttgtgttgaagttattttgcaccacacacatgctaaaggttatactgtattttaccatttggttctgtcttttcaagggaaaattctagcaaaatgaagtcaatggtcctggatttttgctgttagtgcttgttaatacatttttgaaaagcacagtatgtttagaacacaaaatttcctttctggtacattaaactagctctttccacactgtctccatctcagtaaatggtaattctattcatctgtttgctcatgccaaaaactttggggatatcttgatatcttacattctcttgtaatcaccagatatgttcttccttcccactgcatagacaaaaccaattcactgagatcatggcattayagtaaagacagtttaattgatacaaggccagccagccacacaggagctggaataatcattcaaattattatccccaaaggctcagaag

SEQ ID NO: 655729 - DNA, 547 bp, Homo sapiens
tctgcaagcgtgggctgttataaagccaggatagccctccctcagttttgctttttttgcatgtgtttatttttcttttaaccttctctgctatgctatgacatagcacagaagtcctcaccagaagcaagagccatgcccttgaatttgctagcctaagttaaataaacctcccttatttataaattccccagtttcctctattctgttatagcaatacaaaatagactaagacagccatccttaaagttaggtgtgcacatgtaactgagtttcagtcaatgcaatttgaatcataatgatgcacctcacttacagaaccgatccatyacaaactccaatacgtgattctccatgatcttctcctgttgtctgcagaacaaaacccaaggcaaatcttggaagctatgttaaagagggcagagcctccagcagatacggttgaatgtggagagcaaattctctatacatccagcatatctacaaattggactttatacagatcggaagtatcattctatttgattaagccactgagatgttaagg

SEQ ID NO: 655730 - DNA, 554 bp, Homo sapiens
gttactccttatgcaaaactctgtatcacagcctctatgacttaaaacagtttaatatggtattactgatgaccatggaataactttattttatgaaaagaaagacatagcaaatatacttgtgactacatatttgaaaacgcactataagactattgacaattaatgcaccaccctttcagttggtagatgtttctcaattttaaatatatttatttttatgatattgaagccctattctgttattagaattagtttatttatttggaataattcacttcttggattggatggatgccaagctggattattacccyaggctgctgatggaaagcatccaaaagttttaccagttcttttgttagtttcttgtatagggtaagaataaaaactcatttaaattgccataatttatgcaatgaaacccaataaactagccaaatttcaagttcctgccttccatcaacatttccattagatgaaaactccttctttatctaaaccaattgatggtagttagatcttttaatggatttgattctctacttaacatt

SEQ ID NO: 655731 - DNA, 554 bp, Homo sapiens
gtcatcacagccattaccaggcatgctgctgggacccccaaaagttttgattgaacgctgcgcattatccattaaaaggaaaagtatggaggctccagatgttattcttcaccaaaggggagtacaccttcttttgttaggcaagctgagaaggggataatcaactttcactgagctgagtgaaatctaggctcctaaggcctcagccaagaccctggtttattcaccagggcccttccccttgtgagtcctgaaccgtaattcttgttccctaagcatggtgaccctgccaaaaacttcactttcttttcagtctttccacttagccttttgccctgttaatcttttagccttttgctctcttaacctcttgaagagaaaaccagggtcagttttctgcctctcaccaggatcttggcctcgtatattttcaactttgtcttttgaaccctccaaggctrtctagagctctgctgatttctctgctccagtggcggattcttactctacatctaaactctgcaaatgtccccgaataaaagaagttgcagatc

SEQ ID NO: 655732 - DNA, 529 bp, Homo sapiens
caactcacccctctgtgattctaccctcttcaaactgtggccttgatagtcacctatgcatcagcagttctcttatgtcttttaaccgagttttaaatttaattttattttatgtggcctttctagttatttttggtgagagcatcagtctgctgcccgacagcctattcagaggcagaagtcctaagcctgtatttgaaaccacagggcaggagctgtgttcaagcatgtagcttttcataagtctaaaggactttatccagtttccatctgggggctctaaaaaggtcttctctgctcagaaagttaatgttcctcaagatttgacaaatgcgtgtcaaaattcatcttgttcctccttttaacatcaaatggtgagattttcttacaaatacattaaagcatarcatttagtgattccatgtgttaagccattatttgttaaatcagctttattttagtacggcttatagactcacttggagttgaccaggattgattttggcagggaggtacatcctctccctgc

SEQ ID NO: 655733 - DNA, 506 bp, Homo sapiens
ttatcttttgatctacaatactctaaaaagtagttataattatgtatagagatagagtcttcatccttctgtatagagatggtgtattagttcattcttatgctgctaataaagacacacccgagactgagtaatttataaagaaaaaagaggtttaatagactcacagttccacatggctggagaggcctcacaatcatggtggaagacaaaggaggagcaaggacacatcttacattgcagcagacaggagagcgggtgcaggggaactcccctttataaaaccatcaaatctcgtgagatttattcactatcacgagaacagcatgggaaagatctgtcaatgtgattcaattacctcctaccaggtccctcccatgacatgtgagaattatgggagctacaattcaagatgagatttgggtggggagacagcaaagccacatcagatggcaaataaatatgtktcatctattatgccaacctatgaaaattgggtgtgaatt

SEQ ID NO: 655734 - DNA, 394 bp, Homo sapiens
gtcggttacccaaggccttaccggaaaaactgaaaccaaaacattacctttatctcagcccatgaagctttcactgtctcccctcttgttcagctcttcacttaygtgtagtccctacacatctttccagaggctcttacaatgctccttctgtctctctaatctatttctgatacaacatctattttttgatccaacatcaaaagtgccagaagaacttgtctggcagagataaactctcctcaagggagggaatggagagaggaaaattgaaatggcaatggcaggcatcttttagaaagatcagagaagatgggaagtcaaggaccactctcatcataataaattgtatcttatcacacatttgtttcttagtgaagcatccactatgaga

SEQ ID NO: 655735 - DNA, 592 bp, Homo sapiens
agtgacatacagaaatttggaagtgaggtacagaacagctggattggtcacagctcagtgtatgccttatttgaacacagttggaacactcagcagtgtatgactggttgaagtacagctgctgggattggccaagacttagctattgttacagatgcataccactaagttaggttctcaattttgtctgcttatttarccaggttacagttcatccacaaggactcaaatatagaagtacagagtccttctcaggccatatttagtttgctttaacacatctaatatgaaagaaaagtattctgttgaaagcagtcctcaatttccccagataaacacttcctgagaccaggcacagtgctctgtagacattttgaatgagtgatctttgttaactccttctgttcagacctcattgtttgcttatttggccattcagtatgtatttgggaaaatcatgcttgttgtggaatttcatgtttcttcagatgagggataacttctaacctttgaacctcttgaaatttgaaacctggaaagcagcatctcaaatcatgaacttgaaacaaacccaagatattcttatggagca

SEQ ID NO: 655736 - DNA, 561 bp, Homo sapiens
cagcctccttaaaacagctcaggattgaaaaaactcttgtgcagaacagttaattgaagtgttctgctaacattttttgttgctttattaatgcttgccctgggaatcatatcataaacagtttaggtaaacaataagttaacaacactgagaattttcctgtttcaccaaacgtgtcttatctacaggctgcagacattcagcattaccttgtcccttgcttctgttctctttataaagctctggacaagaggcacacaacagacrtgtcccagctgctgactcagtgtgacagagcactgttgccagtgcccaggtgactgcagtgggccacactgcaggattgatggtttaactctctgtagcttccaaatcagattattttcatttgcgcaaaggcacaccagcaggggtgtgtactgtttgacgcacagatgacaatctggccggaagctagtacttggggaaaaaaataagggaaaggaaaatgatagttttgaaacaacatagttataaaacacagcatgtatctatatttttcttctgaaaaatgtgaaaatt

SEQ ID NO: 655737 - DNA, 561 bp, Homo sapiens
cagcctccttaaaacagctcaggattgaaaaaactcttgtgcagaacagttaattgaagtgttctgctaacattttttgttgctttattaatgcttgccctgggaatcatatcataaacagtttaggtaaacaataagttaacaacactgagaattttcctgtttcaccaaacgtgtcttatctacaggctgcagacattcagcattaccttgtcccttgcttctgttctctttataaagctctggacaagaggcacacaacagacgtgtcccagctgctgactcagtgtgacagagcactgttgccagtgcccaggtgactgcagtgggccacactgcaggattgatggyttaactctctgtagcttccaaatcagattattttcatttgcgcaaaggcacaccagcaggggtgtgtactgtttgacgcacagatgacaatctggccggaagctagtacttggggaaaaaaataagggaaaggaaaatgatagttttgaaacaacatagttataaaacacagcatgtatctatatttttcttctgaaaaatgtgaaaatt

SEQ ID NO: 655738 - DNA, 544 bp, Homo sapiens
gaattcttctgtgtggaagagatttttccttctctattgttttaaaacgttaaaraactttcttcaacatttctcatagagtacgttttctggcagtgagttccctcagtttttgtttgtctgagaaggcctttgtttcttctctatttttgaaaggtgtttttgatggatatagaattttgtattgacaggcattttgtaaaaataagcactttaatgatgtcacaccagtgtcttctgacttgtatggtttcatatgagaggtcggctgtaactcctttcttgttcctgtgaatgtaatattccttttttctctggctgccttcaagattttgtcttttgttttctgcagtttgaatatagtatgtctagatgggtgtgtgtgtgtgtgtgtgtgtgcatattgtaaaaccaaagtaataattgccacaagcaagatccactgatggatgctaaaattaagggtgtagaagtttaagccaaaagggatatttgcagtctcaaaggatctcgaccaaaatagttggtaattacaaagagaaaa

SEQ ID NO: 655739 - DNA, 530 bp, Homo sapiens
aacccacctcccgaccccactcccaccccctctccaaccaggaatgtcaggcaaccatcaggtgatggtcaggcagttgttaactatctccctaaaataataattggtgacagccagcaccaggaaaaaaaaaatttcccaacggacagaaaaaacctgaaactggtgatcagtggcttcccggaagatctcwggagttgggcaagtgggctcaagcattggaaagaggcaaaatggcggagtttaattaattaatttaattaattaattaaatgacttagagacatttggtaaaggaaagacacctcaaatgagcatgcgtacaactccagtaaacacactgggcatgctccccccaggcactagcaggccactgcgcatgcggacagcccgccgcaaggcaacaaccagaggagaagggatgcaagactgcaagactccagaagggtaagaccccaagtcaaaggtcaaactgtgcacttcatctctcaagtcgcccactcggccctcttgcaagtgtaccttacttc

SEQ ID NO: 655740 - DNA, 577 bp, Homo sapiens
atgcttatggaattcactggtcttagcatgttccccatcatcctgaagcagctggattgatagaatggtggaatggccatttgaagtcacaattacaatgccaactaggtgacaatactttgcaggcctggggcaaagttttccagaaggccatgtatgctctgagtcagcgtccaatatatggtattatttctcccatagccaggattcacacrtccaggaatcaaggggtggaagtggaagtagcaccactcaccatcacccctagtgatccattagcaaaatttttctttcctgacccagtgacattatgttctgttcgcctagaggtcttagttccagagggaggaatggtgccaccaggagacacaacaacgattccattaagctggaagttaagattgccacctggacactttgggctactcctacttttaagtcaacaggctaagaagaaagttacagtgttggctggggtgattgacctagacaatcaagatgaaatcagtctactattacacaatggaggtaaggaagagtatgcatggaatatagagatccattagggtgtctcata

SEQ ID NO: 655741 - DNA, 577 bp, Homo sapiens
atgcttatggaattcactggtcttagcatgttccccatcatcctgaagcagctggattgatagaatggtggaatggccatttgaagtcacaattacaatgccaactaggtgacaatactttgcaggcctggggcaaagttttccagaaggccatgtatgctctgagtcagcgtccaatatatggtattatttctcccatagccaggattcacacatccaggaatcaaggggtggaagtggaagtagcaccactcaccatcacccctagtgatccattagcaaaatttttctttcctgacccagtgacattatgttctgttcgcctagaggtcttagttccagagggaggaatggtgccaccaggagacacaacaacgattccattaagctggaagttaagattgccacctggacactttgggctactcctacttttaagtcaacaggctaagaaraaagttacagtgttggctggggtgattgacctagacaatcaagatgaaatcagtctactattacacaatggaggtaaggaagagtatgcatggaatatagagatccattagggtgtctcata

SEQ ID NO: 655742 - DNA, 432 bp, Homo sapiens
agggctgagatctgaacccagatagcctgactccagacttggtattcttaataatcgtgtgtgtgtaggggtgtgtgtgtgtgtgtgtgtgtgtgtgtgcacatgcatgcatacagagggggttgcaggacaagcctctgctcycgaggagcttaaaacttaacagaaaatacaaagttgtattgattaggccttcaggctgcggcaaaaaagaatatacacaatttagaaagagaaattacttttcttgtgaggaaagtgaaagagagatatattcaagtgtgttactggcctacagtaaatacctagacattgacaaaacaacctggcactttcgagaaattcacctgctttcgttgcctcaaaaccacttctgcaaagttaatggagtcttcctgttgcacctgccctaactcccttttgcctttgtga

SEQ ID NO: 655743 - DNA, 432 bp, Homo sapiens
agggctgagatctgaacccagatagcctgactccagacttggtattcttaataatcgtgtgtgtgtaggggtgtgtgtgtgtgtgtgtgtgtgtgtgtgcacatgcatgcatacagagggggttgcaggacaagcctctgctccygaggagcttaaaacttaacagaaaatacaaagttgtattgattaggccttcaggctgcggcaaaaaagaatatacacaatttagaaagagaaattacttttcttgtgaggaaagtgaaagagagatatattcaagtgtgttactggcctacagtaaatacctagacattgacaaaacaacctggcactttcgagaaattcacctgctttcgttgcctcaaaaccacttctgcaaagttaatggagtcttcctgttgcacctgccctaactcccttttgcctttgtga

SEQ ID NO: 655744 - DNA, 465 bp, Homo sapiens
acaattttcctgtaagagtaggatagggaaaaaatagacattcatgcctttgtctggctcaatgaatctgtatgttttacataagatgacgtaaacaaatggggcagaggaaaaatgcagggaatctgcattttctgtcagatagcatagacaaaatggggcaggggaacaatcagatatgcatttgtgtctgttggacagggctgactgcacctgtaaagataagctatcaatttgcattgctgtggtgaaattttaacagctcactargaatttccttgtgggcaaaatatgggggaggatgtagcttttcatcttgtagccatcttatttaggaaccaaaaggcagaggcaggtttgccggacccagttcccagcttgacttttccctttggctaaatgagtttggggtcccaaaatttaatttcctttcacataatctcctggtaaataccagttcacttg

SEQ ID NO: 655745 - DNA, 465 bp, Homo sapiens
acaattttcctgtaagagtaggatagggaaaaaatagacattcatgcctttgtctggctcaatgaatctgtatgttttacataagatgacgtaaacaaatggggcagaggaaaaatgcagggaatctgcattttctgtcagatagcatagacaaaatggggcaggggaacaatcagatatgcatttgtgtctgttggacagggctgactgcacctgtaaagataagctatcaatttgcattgctgtggtgaaattttaacagctcactaggaatttccttgtgggcaaaatatgggggaggatgtagcttttcatcttgtagccatcttatttargaaccaaaaggcagaggcaggtttgccggacccagttcccagcttgacttttccctttggctaaatgagtttggggtcccaaaatttaatttcctttcacataatctcctggtaaataccagttcacttg

SEQ ID NO: 655746 - DNA, 639 bp, Homo sapiens
agctatcaatttgcattgctgtggtgaaattttaacagctcactaggaatttccttgtgggcaaaatatgggggaggatgtagcttttcatcttgtagccatcttatttaggaaccaaaaggcagaggcaggtttgccggacccagttcccagcttgacttttccctttggctaaatgagtttggggtcccaaaatttaatttcctttcacataatctcctggtaaataccagttcacttgcctaatcgtgtcaccaatccctacagctcatttccagctaggtgagaaaggagacagacctgctgagcccctccttggggaggctcttctctgtagggctgagactgctaagcaacagatttattctgtacacaggagccccaaggcacatgggtagactatgaaggaaaactcatagaggccagagaaggccagtttcacatcccattattccttcttggtaattttccagtggtgtttgtgaagaaggaacgatgtcaaaggaragatatccttaccttgattttcataattcataaagactgcttttttgatttgtataaagcagattatgattgtggaccctgaacatgtgagacatgtctaagttaatttagaaagtttattttgccaaggtt

SEQ ID NO: 655747 - DNA, 357 bp, Homo sapiens
cactgcaccccagcctgggcaacaagagcgagactctgtctgaaagacaataaaaaataaataaataaataaaaccatcagatctcatgagaactccctcactatcatgagaacagcatggaggaaactgcccccatgatccaatcacctcccaccaggtccctcctttgacacgtggggattataatatgaggtgacatttgggtggggactcagagccaaaccatatcacgtagattcaaagattttccaatttgcaattacttaaggaaaagaagctttatttaaaaactggaggtcaggccgggcatggtggctcacacmtgtaatcccaacagtttgggatgccaaggctgg

SEQ ID NO: 655748 - DNA, 583 bp, Homo sapiens
ccatttggtgggggaccaggtttctgaaaaacaactcggagacatatattaagatgttatctttagtttctrtagggaaccaaaaaccttgtgacttcagcttccttagctattgttttaagctactactcccttcttggtcatcaagttgctcatttacttctcaggggtacctaggtacctggaatttcccctgaaggaactcaagattttcctttatttccatgcttgtgggtttgggagtggaccagcaggctcctaagaggggtccctacttcatctcaaaaagacatgtacaaaaaagtttgtggaaacattattcttatagcccaatttgggaagcagccaaatatttatcaacagtagaatgctctcttcctcctacccctgccctcaattggaggctgttccttaaaaatcaaacaggttcaacagcctgcttgatttacaagttgaacctccattaaattccacataccttgcaaggcctcctcttgaagcccctttaagtccctcacacctaattttcaatggaaaatggagcagggagctgaagaagaggaggaagatagagggaaacagg

SEQ ID NO: 655749 - DNA, 504 bp, Homo sapiens
tcatcacctcgaaataacctgattgaaaatttcgtgtatttttccccccttttctatgtatgtccgtggcagacattgtcatttctgaggtccatctcttcccccaagggaatctgatgaatcctgaccagaggaatctttcctcttatagataattggttttcggagtatgcatgtaacttgggctggtcagtggtatataatggcaattttgccaaaggatttctggaaaggatacacaaagtaggaaaccatttttctgactctggacactggtgtgtgarggagtggttcctgtaactcttggtatgaagggagccagctgacatggtgatggggccagagctgggaaggagtcggtcttgattcatgcatcatattctaaagtcaccatattaaccatccctggagctgccctctctctcaatttcatgttctaggagctagcccctgcatgtttaagccacctctatttatgatttgctgttcctggcagccaaaagc

SEQ ID NO: 655750 - DNA, 393 bp, Homo sapiens
cgattctcctgcctcagtcccctgagtagctgggactataggcgtgggctaccacacctggctaatttttgtatttttaktagagacagggtttcaccatgttggccaggctggtctcaaactcctgacctcaagtgatccacccgcctcagcctcccaaaatgctgggattataggcgtgagccacggtgcctggcccttaatctccttttcttataaggacatcagtgatattggattattcccaacccgtatgaccttattttatcttaattacccctttacatgtcctatctccaaatacaggcagattctgagataatgagagttcttcaaatacatacattttgaggtgacacaattcagctcataatatacagttcctaaaaggca

SEQ ID NO: 655751 - DNA, 610 bp, Homo sapiens
aagcttctaggagtgggcagggtgtggcaggccctaaggtgggcagggagagaaattgctggcctagccaaccacggatgcccagagtccctcttccaatctcttgtcctactgtgtccaggtgggagcccagtcaagaggactgggaggagatggctcctttgtcccaggctcgaagccttttctccttggtggcactggatggaaaactttatgccctgggtggaagacacaatgatgttgccctggactctgtggagacctacaaccctgrgctcaatgtctggaggtaagcaggcaagggggcatctgggagagattaggagacttggaatagaaggagagttgaagatgctagttgccttatcttgtgtcctgttctcccttaggccagcacctgcacttccagcaccatgttttgcccacgcagctgcgattttggagggccagttgtacgtgagcggtggctgtggtgggactggccaatacctggcctcactgatgcactatgaccccaaacttgagaagccagggacgtttctgagccctatgggggtacctcgggctggccatgtcatggctgcattgggtgggaggttgtatgtggcag

SEQ ID NO: 655752 - DNA, 503 bp, Homo sapiens
cattcccttggtggtgttcttctggtagtgagttttcgtgagaacttgttgtttacaagtgtgtagcaccttctgcctcactctctttcttgctcctgctcctgccatgtaagacrtttcacgcctcctttgccttcttccataattgaaaacttcctgaggcctccccagaagcagatgctgccatgcttcctgtatagcctgcagaaccatgagacaattaaacctcttttctttataaattacccagtctagggtatttctttatagtaatgtgagaacagacaaatacagtattagaagaatgacaaaaaaaacgtatagccttgaaagtgtactgagctagattcagtaacttggcttcaagtttcaattcaattgttgctttggtaattatgagtaagtcctttaaccagtttgaattccaagttcgtaccccataaaataagcaccataatggtattgtaaacaccacagtgttattatagctcatgaaccccaga

SEQ ID NO: 655753 - DNA, 519 bp, Homo sapiens
acacacacacacacacacacacacaaagagaaaacattttaatagtgtttgtttccgagaggtgggattttcaatgatttttttttaactgagtagcatcattctcaccaaaatagtagagctattaaaagacaactgctatctcaataagcccactatctttcctgagcagcaaacttctcaagccataacccacaggaagacagtcctaatcatttcccatgtcagttgtgcttgctttctctttatctgggggaaggagtgtgactatcaaggtttcccacaggaaccagctgacacactcaaattaggattgtttgagtttttaataaagaggttgtttgcaaatatgtgggcaggctctaaagaaacttcaagggattgcacagtaccattgggaatctgttctcaccctgaggcctacaggggagaggggacagagtggkgaccagaactggggggttgggggactgtgtgtgtggagagatcccaagaacaagaacttagacccatggccca

SEQ ID NO: 655754 - DNA, 622 bp, Homo sapiens
ctgttatttaatcctaaaagtcccagtcattacagaggaagaggagactgggagcacctgtagtcatctgagttacttcctggtctcttaaacataatacctcacctacagctctgttgaactggacatgtggttcccatgacaaccatggttctccatagcatatctctctttttggggcagatgcctggagcacttctaaagttgtcctaatcttgttaagtctggattcactgtaaaatgaatgtttactgaactatagtgacatgaaatatgaagctgagaggacagtcaagtttggaacaccacataacctgagggtagaggtaggtactctgtatcatacaactttagcgcaaaattatagatgccttctaacagtagcatgaaatagtscgacagaattgaacctatttaagtatctagtccttttgaacttactgttgttccctctgatcatctacataaagataagttgggctgggactatacctaaggagcttaaaggccaagagacaatatttggcatgtgtctgcggctcctgtttgctatatactacctaaggtggtttatttacatgcaaattaattgcccatctttggtctccagagcagcccaaga

SEQ ID NO: 655755 - DNA, 446 bp, Homo sapiens
tgtaaataggagttagccaggtgaggkggtgcgggtcaggagtgaggaagacttccaagctgaaggaacagcactttcaaggttcggagttgtgagggaatgtggcacatccagggcactgaaaaaaaaagtttactgtgtgtgtcaggagacacacacagtaaagtgtgtgagagtgaggtgggtggtgggggagaggactgagaagtaggcaggggccatgataagaggtttggctttaattttaaaggcaatgaagaattttaagcagggaggtcgtgagatcagttctgtaggtacattagacaatgactccgactgcagtgcggacaatgtattgaagggtgtggcatgggagagaataagaccagagggtcacctggtgggaaccagggaagaggggatatggctctaagtcagagtaatagtgttgggcgtaaagagca

SEQ ID NO: 655756 - DNA, 370 bp, Homo sapiens
ttcaaggttcggagttgtgagggaatgtggcacatccagggcactgaaaaaaaaagtttactgtgtgtgtcaggagacacacacagtaaagtgtgtgagagtgaggtgggtggtgggggagaggactgagaagtaggcaggggccatgataagaggtttggctttaattttaaaggcaatgaagaattttaagcagggaggtcgtgagatcagttctgtaggtacattagacaatgactccgactgcrgtgcggacaatgtattgaagggtgtggcatgggagagaataagaccagagggtcacctggtgggaaccagggaagaggggatatggctctaagtcagagtaatagtgttgggcgtaaagagc

SEQ ID NO: 655757 - DNA, 555 bp, Homo sapiens
acaggcgtgagccacccttcctggcctatttttgaactttctgttctattccatcagtctgtctaccaggtgctaaaacgacactgttttgattattataaatttgtaagtgatatgaaatgtggtaatgtgagtcctccagctttgttctttttcaaaatagctttgactagcccaagttcttttcatttccatacaaagtttgggatcagcttgtcaatttctaacataaaaatactaggctgtgggatttttattgtgattactttgaatctttaggttaatttagggaaagctgacgttttaagaatattgagtcttctgattcatgaacatggtatacctctccatttatttaggttttaattttttcagcaatattttttagtttccagtataagatcttgcatgttttgtcagatttatccccaagaattttatgttatttattctaaagtaaatgtaatttaaaaatttttaatttctaaatgtttattactagtatcttgaaatatratttttgtattctgtgactactaaattcacttattagtt

SEQ ID NO: 655758 - DNA, 622 bp, Homo sapiens
ggtgtttcgtggtgctaccggacaggcagaatgaccgacctcgccgggcgaccgctcccagccgcgagaatcctgtattcgtttatctgggagtgaccatcctcgctactcagctactcacgtgaggctccagcgttcacacaacgcgaaccctcaaccactatggacgtggaagyaaaagccccttcagagtttgttgtagcccagacagtttaggcaatatcccagctcagagtaccataattaagattgcaaaaaggatcaatatgggaaacttttgcagttccctgtccagttaaaatcatatttatatactgtggcatgaagtgtaatcacatgcattccaccgatatttattgaacacctaacttgccacaaggggatgccataacggataagaccaaaacaatccctgccttcatgcagctcacagctgtgcaagcaagcgtgccggtcctgccgccattgtaagagtgtgcaacaagtcccatgggaaggaagaaaaccataacagacactttccaacctgagacaaagtacccatactactcctttacatctggtctccaaagtgaatgacatcttgagcttttcccatgagttactgattcccggatgaata

SEQ ID NO: 655759 - DNA, 622 bp, Homo sapiens
ggtgtttcgtggtgctaccggacaggcagaatgaccgacctcgccgggcgaccgctcccagccgcgagaatcctgtattcgtttatctgggagtgaccatcctcgctactcagctactcacgtgaggctccagcgttcacacaacgcgaaccctcaaccactatggacgtggaagcaaaagccccttcagagtttgttgtagcccagacagtttaggcaatatcccagctcagagtaccataattaagattgcaaaaaggatcaatatgggaaacttttgcagttccctgtccagttaaaatcatatttatatactgtggcatgaagtgtaatcacatgcattccaccgatatttattgaacacctaacttgccacaaggggatgccataacggataagaccaaaacmatccctgccttcatgcagctcacagctgtgcaagcaagcgtgccggtcctgccgccattgtaagagtgtgcaacaagtcccatgggaaggaagaaaaccataacagacactttccaacctgagacaaagtacccatactactcctttacatctggtctccaaagtgaatgacatcttgagcttttcccatgagttactgattcccggatgaata

SEQ ID NO: 655760 - DNA, 622 bp, Homo sapiens
ggtgtttcgtggtgctaccggacaggcagaatgaccgacctcgccgggcgaccgctcccagccgcgagaatcctgtattcgtttatctgggagtgaccatcctcgctactcagctactcacgtgaggctccagcgttcacacaacgcgaaccctcaaccactatggacgtggaagcaaaagccccttcagagtttgttgtagcccagacagtttaggcaatatcccagctcagagtaccataattaagattgcaaaaaggatcaatatgggaaacttttgcagttccctgtccagttaaaatcatatttatatactgtggcatgaagtgtaatcacatgcattccaccgatatttattgaacacctaacttgccacaaggggatgccataacggataagaccaaaacaatccctgccttcatgcagctcacagctgtgcaagcaagcgtgccggtcctgccgccattgtaagagtgtgcaacaagtcccatgggaaggaagaaaaccataacagacactttccamcctgagacaaagtacccatactactcctttacatctggtctccaaagtgaatgacatcttgagcttttcccatgagttactgattcccggatgaata

SEQ ID NO: 655761 - DNA, 388 bp, Homo sapiens
gaattcattttcatccacacttgagtgtctttggtaaaaccccaggtgagcttatcggggctgcactgcaaacacatcacaaggaagctggtaagaaatacagaacctcagtccccacccagacctactaaatcagatctacatgataacattaggcccaggtaattcatatgcacattggagtctgagagctgtgatgaagagggagtggagtagcggtggtgtgagcaggtggattccttccattatctctttagctcttttacartttggctcccacactaccacttgactaaaatcactcttccaggccactagctaccactttgttgccaaatccaaagcctttatcttatttgacctgatgttggccatctacgctgttggc

SEQ ID NO: 655762 - DNA, 500 bp, Homo sapiens
caggagaggccaggctcctctcccctgcaaagggtgcagacttcccacagctccacccygttctcccagtgcacaggctggttggaggttctccggggacccctctatacttggctgtctcagaaggatgtgtttgcttctagttgtgccatgattgtaagtttcctgaggcctccccagccatgcttaaccgtgagtcaattcaacctctttcctttataaattacccagtcttgggtatgtctttattagcagcataacggactaatactttggatttccaacctctagaactgtaaagagaataaatttgtgttgttgaagacgctaaatttcaggcaatttgtaatggcagctaaacagaggatattcttggagtagagccttctttccagcatcttttggtcacagaagatagaggctacattaagacctccttaggatgcctttttttgccagccaattttgggtatctacacaggtatcagtggactggaatt

SEQ ID NO: 655763 - DNA, 498 bp, Homo sapiens
caggagaggccaggctcctctcccctgcaaagggtgcagacttcccacagctccaccccgttctcccagtgcacaggctggttggaggttctccggggacccctctatacttggctgtctcagaaggatgtgtttgcttctagttgtgccatgattgtaagtttcctgaggcctccccagccatgcttaaccgtgagtcaattcaacctctttcctttataaattacccagtcttgggtatgtctttattagcagcataacggactaatactttggatttccaacctctagaactgtaaagagaataaatttgtgttgttgaagacrctaaatttcaggcaatttgtaatggcagctaaacagaggatattcttggagtagagccttctttccagcatcttttggtcacagaagatagaggctacattaagacctccttaggatgcctttttttgccagccaattttgggtatctacacaggtatcagtggactggaa

SEQ ID NO: 655764 - DNA, 454 bp, Homo sapiens
agggtgaattctctgagattttcctgctgtgtataaagaaacctctgctcttttcggaggagaaaatactgaatgcttatatatcctagccagccaaacgtgttaaaaaggcttgaaaaactatcctagaaaaacaagtgttgtgtttccattcctcggggcatctgtttatcttttaaaaatcctggcattttgcacattgtcattctgattgatttcataatagtaacaattaggaacatctgggccccagtcttcctgtctaccttaactttcagaacacttttcatatattctaaacattttcttttgtataaaaattgaaaagttctaaaagaacatttaaaattagggtacaytgtgaatattaaatactaaaatcaaggagaacgtgtctgaatttcaactttttaaatacatctcttaattcacaaaaatgagattaaggaattta

SEQ ID NO: 655765 - DNA, 492 bp, Homo sapiens
ccacgtctgccctgcactggctgtttgaccaggcataagtcatcgaacctttcagtctccattttctcatttggaaaaagtgatgatacccacagcatgtgtgccaagctaagaactcaaataaaatcacgagcaagaaggtgcctttaaaccatatagcatcatataaatgacagacgatataactgttggtagttcagtaataactttaatcattttctacctcttagtttattaattcactcataagaggcaccctgacctggtctactctttatagayacatttttaaaaacctacaggatccctctactacaaaggacaccatggggccagcagtctgaaaacagagatgaatgaggccagcagcaatggtgccactctactcagaggaaggacggtcggagctgcttatttgtccttctcaggattgcagttgaaatccaacttggaaaaagtttaaactttttaaaaattattaaagcattacat

SEQ ID NO: 655766 - DNA, 457 bp, Homo sapiens
taaatcactctttaggacccttgattgtcccaggagtacattttgaaaaacctttacaaatggttttgaaactccactcaaagcttcagtgaccactaatttccaatgaaatattgtttggagaaagatgagctatttatgacactgattgtgagttgtaaaatcttgctaaggtgggtcttcacatttaacccatccacttacctcctccatttctgtaaatttcatgctgaaaaaggattttgaatcaaaacaatgccagccrtcttcagcccccttatccagtgattttcccatcagtattccccttttgcctaaagaatgccatttatagcatcttgtctctccagaaaaccttgggctgatcctaaaatttcagagaaatgagaaagttgttccttttctccaaagggttggaaagtacataaagatacaatgctaatatagaagactaagt

SEQ ID NO: 655767 - DNA, 537 bp, Homo sapiens
aagctaccaagcacctatatttcaaagatataggagtggataatttaaatggctcaataaaaataatcgcttattttatagagtgcttggcatgtgttagctctatgctaaacactttgtattatctatcaaatattatccttacaacaactgtaagggacggatacttttacagtctcagtttagctcaggaaatattgagaaaatatttaaataattcaaggtaaggacagctgacttaagactccataaagatgcagtaggtattctgaccactgttttttctttgtttgtttttaatttgggcacaatattaccctcaatttccactagaaactgggtatggttttaacaggctgagaccatcttctacaccaaatttcttcttattgtgttaattgacctccaaatttctagtttwttcttgggttaagattgttttagctgtactgccttagataataaactcaagtggcataccttaaactcaagaaggtttacttcttgagtttattattttcactcacttgagtttat

SEQ ID NO: 655768 - DNA, 530 bp, Homo sapiens
atctaaggaatgttattactcaaacaacaaagggaatagaacaacttaatgtattttatcattttacaggaggcaaactaaactgaataagtaccatgcatcataaaaagaaccatattttttaaaagcaaaatagagaggtgctaataaaaatgaaggcttttctatttcactcaatcccctgcagagaaagaaaaaaggaagcaatgaagctgaggggctctgcactctgagccagggatcccgcacagatgtctaggtattgcttttcagttttcccttccaaggtcaagggggaaacatgcctatatgggacagttgagaccttcctaaaggtttggtggattatgtgaacctatatcagaggacgaggagaaggggtgcttggggccaagaatgttcattgccaaaagtctggtgctcctgctgggagagcctgtccycagtctggtaatctctcagttgacttttccaaagcagcccagtgtctgtgactgttgccattagaaacactgagaaaatcccggcag

SEQ ID NO: 655769 - DNA, 588 bp, Homo sapiens
ttttaaaaacataggtcttaatagtattatttttgaaaggagaataaaagggttgggaaatagtaataaaaatattgctaccttatacattgaaagtttatgattcaagctgtgtttatagtttagcaaataaccagataatgaataaaactttatttaaatgcttagatgatttgatgtaacaatatcaaatagatatcagatatcaaacatgtttttaaacttctctgattttttcatccttagaaatgaaacttcagcagctttcaaaacaataaaataaaatcaaaatatttaagctgttattttaattctgtttggtcattctctacaaagatattttaaattatgtctttgctcatttttttctttctgayttcctcttttattccatctctacctttcaaaacttacttgaaaaccctatcatttctatgtgggaagcattttctcaattcctccaagggattatgatcatttgctcggttcctatagcaccaggtgtgtttccagtgttcctactctgtccagctctgttttatgtatttgtcacaagtaataaattttaatatacctgggagcaggtag

SEQ ID NO: 655770 - DNA, 490 bp, Homo sapiens
atataaattgtctattataattatttaaagtttattaatttgtgggttttttggagatagggtcttattctcttgcccaggatggagtgcagtggcatgatcacaaaacactgcagctttgaactcctgggcttgagtgattctcccacctcagcctcccaagtagctaggacctcagatgtgccaacataccacattaattttttwaaaaagtttttgtagagatgggatcttactaggttgctcagactggcctgaaactcctggcatcaagcaatcctcctgcctcagcctcccaaagtgctgggactacgggtatgagccaccatacctggcctaattttttgttttatgtttaatattttttgtgtcttaagaaatctttccttacattaagataaaaatatattgcctaatattttctctaaactttttttcatgttttggtcttttaatccatttagaattgatttttgtttatgacttgaaa

SEQ ID NO: 655771 - DNA, 602 bp, Homo sapiens
gttttggtcttttaatccatttagaattgatttttgtttatgacttgaaatagaaatctaatttcattttctcttaaatggatagctgtttgtaccagcaccattaacaaatggcataggaggtacagttctcccctcctcactaatctgcaaagcaacctctgtcatatcccaaagctccatatatgtgttggtctttttctagagcctctattctgtcccagtggtcagtttgtctatctctgcaccaatatcacactaccttatttgctcttactttatgaataagcctttattttaggacaaatctctaactaattcttcaagagtactttatccattcttgaccattttcttttccatatacattttagaatcagcttgtcaatttccacaaaatgacccagctgaaattgtcattggatcataacccccctttgggggcagattgacattgtcacgatattgagtgttcatatttataaacatgggctatctctycgtttacttaggtatttttaaatgtatttcaacagagttcaataagtctagagttcagtaaagtttaaggcataaagatcttatgcatttctaattagaac

SEQ ID NO: 655772 - DNA, 592 bp, Homo sapiens
agaaacagggtcacaaaagaatataagggattttgactccctccagagtgattaatttaaaaaatcaaagtgaaaagtagcaaaaggtttacatttgtgaattctagctattgggtaaatatggtaattatgttttgtcataacatttttgtgtctgttagtttgacttacaatttattaaaattatttttaagtgaatcagaaaaaaacttcccaaaagtttcccaaaattttagcacacatttttcattcctggtaacttgggttccttgctttgcaaactttttgtttaactagatgtgtagtgaaaaaagagggggaattcaacatctccataggagcataatggcatgcacacacatagcaacacagagttgtagcagaaaggaattgagagtgtataagcacagaacctgttaaaaagaactcactatatattaagtttaattaaacacacacacacatagacatatatatatacatatatatatacatatatatacatatatatatayatatatatacatatatatacatatatatatacatatatatatatatatatataaaatttgagcttcagtttgctcaa

SEQ ID NO: 655773 - DNA, 565 bp, Homo sapiens
gccacaagctttgaaatcctacttaaattgaagcccaatgtcatcctttaggagccaagtaatcttgaacaagtctcctatyctctcggagcctccatctcctgagggacaaaaccagcatctatttgaagattcaatgaggtaacccacatgcccaacatggcgcctggcaccttgtgatggcagcagctatccgcatgaactgataggacccagatgacagagtgggtggttctgaacagagaacttctccgggagtgtggagccctggctgggttctcgttccttgcagaagggctctctcaacacttctgttgcaccgggatcctaatagtctgtgaaaactgtggtaggaagagatattggggctgaggtctctgaggtttctgctctacaaacaggaatattttgccctactttgatttagaacaagtggaaaaaggagacaagaaatcaaatcgttcaaagccaacatatctcttattgttaccaggttcagggagagggcagagctcagagtgagaggcagatagacctgctaacggaactccaggaagaggcccat

SEQ ID NO: 655774 - DNA, 565 bp, Homo sapiens
gccacaagctttgaaatcctacttaaattgaagcccaatgtcatcctttaggagccaagtaatcttgaacaagtctcctatcctctcggagcctccatctcctgagggacaaaaccagcatctatttgaagattcaatgaggtaacccacatgcccaacatggcrcctggcaccttgtgatggcagcagctatccgcatgaactgataggacccagatgacagagtgggtggttctgaacagagaacttctccgggagtgtggagccctggctgggttctcgttccttgcagaagggctctctcaacacttctgttgcaccgggatcctaatagtctgtgaaaactgtggtaggaagagatattggggctgaggtctctgaggtttctgctctacaaacaggaatattttgccctactttgatttagaacaagtggaaaaaggagacaagaaatcaaatcgttcaaagccaacatatctcttattgttaccaggttcagggagagggcagagctcagagtgagaggcagatagacctgctaacggaactccaggaagaggcccat

SEQ ID NO: 655775 - DNA, 565 bp, Homo sapiens
gccacaagctttgaaatcctacttaaattgaagcccaatgtcatcctttaggagccaagtaatcttgaacaagtctcctatcctctcggagcctccatctcctgagggacaaaaccagcatctatttgaagattcaatgaggtaacccacatgcccaacatggcgccyggcaccttgtgatggcagcagctatccgcatgaactgataggacccagatgacagagtgggtggttctgaacagagaacttctccgggagtgtggagccctggctgggttctcgttccttgcagaagggctctctcaacacttctgttgcaccgggatcctaatagtctgtgaaaactgtggtaggaagagatattggggctgaggtctctgaggtttctgctctacaaacaggaatattttgccctactttgatttagaacaagtggaaaaaggagacaagaaatcaaatcgttcaaagccaacatatctcttattgttaccaggttcagggagagggcagagctcagagtgagaggcagatagacctgctaacggaactccaggaagaggcccat

SEQ ID NO: 655776 - DNA, 581 bp, Homo sapiens
tagaattagtgtctccttatgttaaagctctttcggattttacaatttcagaaagttcattgacaggaagatattatagagagttgtatgtaagaggtaccccattatctactttagtgagtggatgaaaaaagactgacaagatgaaccgggcggaggcagtttccacttctagttgcctggggaggaaatatatactggtacaaacagaaatgctgctaggttgtttagcaaactgactacagtgtcaagactatccagatgctgaaacttcagtgaaagtgggaactcagagagagcaacagaacaccagagcctcattttgtcttgagtgctctttccaaaccagaaggtgagcccagctctcaaggcccataggatcccagcagactagagacaaaggccaaggctttcagtgtgtccatatgtgtatatagcaagctgggatccaaaacatcctcagcgtaagaaygaactagacaccagacacaaatgtgcttttctagggacttctgtgaaaattgcctgtcttaaaccctgatggaaattgggagtaaaactaaaaaatctcatggaatata

SEQ ID NO: 655777 - DNA, 609 bp, Homo sapiens
cactgcagcttcaatctcccattgtcaagtgatcctcccgcctcagcctcccaaagtgctgggattgcaggcatgtgccaacgtccccagccagaatttcccttctttttaaggatgaataatattcattgtatgtatataccacattttgtttatccattcatctgtcatgatgggttttaagcagaggagtgacaaggtctatctatctagtgagctactggccattaattacacacaatgtatcatttaatttgtcccactgaaaaaggaaatcatttcctctagttaggraccttgaccttccctgtatgtagaagtttaaaggcagacttaagccaacagatttggtaatgaagggcatcaatcttgagtgaatatcattatctcctggagggcttttaaaggcacagatttcaggcccacctccagagtttgattcagtaggtatgggattcggcctgagaatttacatttctaacacctgcaccccatgtgatactgatgctgctggctcaggaaacaaattttgagaatcagtgttctgtggtattttgagtttcatcaaacttggcattttcctttaatttggtcacaagataaaaaatt

SEQ ID NO: 655778 - DNA, 263 bp, Homo sapiens
agagcatgaactctgaagcccaaaccacctggattcaagtcttggctccatcatttattacctgtgtgtccttagacaattgtgaatcatactggtgcatctaagctttgtcttttcaaatgtggagataactgtagttcctaactcttaccattgttataaagattaaatgaggttgtatatacaaagtgcttrtaacagtgcctgtatacagtaagtactgtataatattgctattatcctttttttttttaaatagcgat

SEQ ID NO: 655779 - DNA, 377 bp, Homo sapiens
cattcttaacacccttcccctaaatttttacaactcaggtaaggagagcaggttgcagattttcagaggtctggcgctttcactgctgcattcacacactgtttttccttccctgtagttttccattctgctataagcagggagaggagaaggaacactctgcaggcaaccttaagctgatggctctgtggcyccctgcctgcccgaggagaaaaggaaggatgaaagcaagatttccaacaattgccattgaatgccctgaaaggaagaggctgagtggaaggagggcagggaggggttttgcctttcaggacatcagcagcaaataagaaatttctgtgctagtgcagttaccaggagcctctcttctcttcctt

SEQ ID NO: 655780 - DNA, 377 bp, Homo sapiens
cattcttaacacccttcccctaaatttttacaactcaggtaaggagagcaggttgcagattttcagaggtctggcgctttcactgctgcattcacacactgtttttccttccctgtagttttccattctgctataagcagggagaggagaaggaacactctgcaggcaaccttaagctgatggctctgtggccccctgcctgccygaggagaaaaggaaggatgaaagcaagatttccaacaattgccattgaatgccctgaaaggaagaggctgagtggaaggagggcagggaggggttttgcctttcaggacatcagcagcaaataagaaatttctgtgctagtgcagttaccaggagcctctcttctcttcctt

SEQ ID NO: 655781 - DNA, 586 bp, Homo sapiens
tgttttctcttacccacccattcctttcaccaccaccacactagtgaggtctttatcacatcatccctgagaattctgacaagtctttttagtaggacttcctgctgttagtctatccattcttcattataccagaataatcttctttaaaatggatttcttattcttttcagaaatgatcaatgggttcctgtttctcactttatggatgggatataaattgaatcctgtaggatccaaggattttcataacatagaactctatcaattcaatgtttacatcagtcatccattagtcttaaactagtatttttattgttcaacaaatgcctttttctttccctattgtgtattagtcagggttctctagaaggatggaataggatatgtgtgtgtatacatatgtatatgtatttggaagtttattaagtattatacaatctcaaggcccyacaataagccgtctgtgagctgaggagcaaggagagccagtccgagtcccaaaactgaagaacatggagtccagtgttcatggagaggaatcatctggcacaggagaaagatgtaggctgggaggccaggccag

SEQ ID NO: 655782 - DNA, 536 bp, Homo sapiens
aaggaaaataaacattatagttatgttacaggtaaagaaacaaggtaaaccacattaaggagtatcccttcttatccaggcggcatttagtgttaagtgctggaatctgttaatccaataataagatttaggaagaagaatctaatatcttatatttaaatagtaatctttctccccatggacattacatatatttttgaaatttgtattttaaaaaatctacctgcaaatactttatgttcaacatgcttttttgatccctgagaaatttttttaaatattttgtttcagtgacatttcttccaggattcaattccttttcttgaagagtttggaatgaaccaattacacatgggtattctggcgaagagtggtaggaatctttcatatcagtcacctggcctccttcatttcaatttaaaaatacttctgtyaccttatttggcagcttgtctctgtatttcttcagcttgcataaagcagtaaattttgctctaggagaaaaattgagaagagattattactgaatttgagaa

SEQ ID NO: 655783 - DNA, 703 bp, Homo sapiens
atggtgcaaaggtttacatcttgtaccctctggagttgcagctcaagctatacctgggccttcttgggccacagctgaggctgccaaggggcactgcaccagagtgtggggacagagacttgatatgaacatgtgcaaatagctctgagatcgcatgggggccctaggctttttccttgaaataattcttccctcagagacctggtacttctgggccagtgatgagcatggcagcctcaaggatctctgagatgcctttggggacattctttcattgtcttaatgagtagcactggcttccttctgtctataggaatctatcaaagggtaactttaccacacccttggtttccttttctgaacactttttattctttatatggccagrctgagaattttctaagtctttggttggtttctctgttgataataaattccatatttaactaatttctgtttgcattttattataagcagataatagaaaccatgcagcaccctcaacaccttgcttaaagttttctcatgccaaataacctagtttatcactcttaaattcctcctttcccaaagcagaagggacacggacacaattcagccaagttatttaccacattttgtaacaagagtggactttcctccagttcccaataagataatcttcatttccctatgaagacctaatcagaatggcctttattgt

SEQ ID NO: 655784 - DNA, 450 bp, Homo sapiens
tcccaaattaagcttcactggaatggtcaattacttgactagggctagcacagctatttcaagaaaattctcagtcttttttttttttctgcaagttcgcagtttttacacgcatcatctgtttaattcttactttgtttttaatttgctttataaagttctaagaaatattacttaagaaggacacattacttaactttttcataatgtattatcttcaaaaatgtccacagaggtgtttttytcttttttttccccctaggactgtcctgccttttggtaaaaagagcctcccaactcccatcctacccatctttccactccatactacaaaagtcatggagacctcctatgctgtaggccagaaatcccttcctactgaatcaggctggggtgcaccacttaatagtttgatttttgtatcatgactgtgcttcatgttcatcttga

SEQ ID NO: 655785 - DNA, 502 bp, Homo sapiens
tgtacaactcaccgctttcatgtttttgcttggttacccaatgagaaagtggggccctgattaggttagaacagagttcrgagtgcaaatcagctccagtgaatggcagaagtgcagttctaagttattttttaaatcacaggtaaaaacggtttggaggcctaaaataggtaagggttgtaaaacataatataatgattgactctaatagtttctttttaaacctaaaatacatgtcaacacaataaaagatcattagatgttttttcactatgtgcttctaaaaggctagtctattcctctttttccttcattatatttctctccgtgtatttgaactccatttttctgcttcattaaccttcaaagaagccatgtaacaggtgcttggcgcatgtaatttcaggaccctaaaaagatgtcttaagtaattaacaatcacataaaatatgcattattaatgcattaaggatttttaaaggactgttagtaattaatgctg

SEQ ID NO: 655786 - DNA, 502 bp, Homo sapiens
tgtacaactcaccgctttcatgtttttgcttggttacccaatgagaaagtggggccctgattaggttagaacagagttcagagtgcaaatcagctccagtgaatggcagaagtgcagttctaagttattttttaaatcacaggtaaaaayggtttggaggcctaaaataggtaagggttgtaaaacataatataatgattgactctaatagtttctttttaaacctaaaatacatgtcaacacaataaaagatcattagatgttttttcactatgtgcttctaaaaggctagtctattcctctttttccttcattatatttctctccgtgtatttgaactccatttttctgcttcattaaccttcaaagaagccatgtaacaggtgcttggcgcatgtaatttcaggaccctaaaaagatgtcttaagtaattaacaatcacataaaatatgcattattaatgcattaaggatttttaaaggactgttagtaattaatgctg

SEQ ID NO: 655787 - DNA, 502 bp, Homo sapiens
tgtacaactcaccgctttcatgtttttgcttggttacccaatgagaaagtggggccctgattaggttagaacagagttcagagtgcaaatcagctccagtgaatggcagaagtgcagttctaagttattttttaaatcacaggtaaaaacggtttggaggcctaaaataggtaagggttgtaaaacataatataatgattgactctaatagttkctttttaaacctaaaatacatgtcaacacaataaaagatcattagatgttttttcactatgtgcttctaaaaggctagtctattcctctttttccttcattatatttctctccgtgtatttgaactccatttttctgcttcattaaccttcaaagaagccatgtaacaggtgcttggcgcatgtaatttcaggaccctaaaaagatgtcttaagtaattaacaatcacataaaatatgcattattaatgcattaaggatttttaaaggactgttagtaattaatgctg

SEQ ID NO: 655788 - DNA, 595 bp, Homo sapiens
cttcccaattgcattgagaataaaacccaaacaccgtatcatggcctttgatgccctaaacatctggcaattgtcyatatctctgtcctcaccttatgtcatattcccttcatgcagtgtgtactagtctcaagtcttggctgtgttctgataccctgaatccagcaaagaaatgctcacctcaggatccttgtctctcttgctgcctcttcctggaatgttcctccccatggcctctcagagatgctactgtcatcatttacattccagttcagtgtctccctcctgcaagaagactttcctgatgagcagatgtgaagctgttcagcccctcagctcacctcataacactccgccacattcatctggtttattttctttgtagactttatttatgactaaaagataactttcagagaaaggtaaaaatcataaccctcataaataaaaatgagcattttaaagattctattttatcccttaattaacatccaagcagatgttaagacgagttcaaaggacaatctgtagatctggcaaatttatatatagatcaggaacactgaaatgaatgtgcaaatggagactaaactgg

SEQ ID NO: 655789 - DNA, 505 bp, Homo sapiens
cctcagctcacctcataacactccgccacattcatctggtttattttctttgtagactttatttatgactaaaagataactttyagagaaaggtaaaaatcataaccctcataaataaaaatgagcattttaaagattctattttatcccttaattaacatccaagcagatgttaagacgagttcaaaggacaatctgtagatctggcaaatttatatatagatcaggaacactgaaatgaatgtgcaaatggagactaaactggctttttatttggggtggggagagatgagggagaagtcaattttacctcactaaacttcaggtatacagatgctcctcaatttacaagagttacacctcaataaactcataagttgaaaatgtcataagttgagaatgcatgtaatacccttaacctaccaaatgttgtagcttagcacagcctatcttaaatgtgttcacaaacttatcttagcctacatttgggtaagatcatccagca

SEQ ID NO: 655790 - DNA, 505 bp, Homo sapiens
cctcagctcacctcataacactccgccacattcatctggtttattttctttgtagactttatttatgactaaaagataactttcagagaaaggtaaaaatcataaccctcataaataaaaatgagcattttaaagattctattttatcccttaattaacatccaagcagatgttaagacgagttcaaaggacaatctgtagatctggcaaatttatatatagatcaggaacaytgaaatgaatgtgcaaatggagactaaactggctttttatttggggtggggagagatgagggagaagtcaattttacctcactaaacttcaggtatacagatgctcctcaatttacaagagttacacctcaataaactcataagttgaaaatgtcataagttgagaatgcatgtaatacccttaacctaccaaatgttgtagcttagcacagcctatcttaaatgtgttcacaaacttatcttagcctacatttgggtaagatcatccagca

SEQ ID NO: 655791 - DNA, 613 bp, Homo sapiens
gactattgtcctttgaaagacttgcttataaagctggctcttgtgaacttgatttcgggggactctcaccactaactgatgagtagctctctgtgccttaattgtctgttctaacaaggtgggttgatgctgaatatcaactttccttcccgaagtgtggaattttggcatatgtcaggaaaagatgcctttgtgaccatctccagtacaaaaccagaagcaccaagtccttcatgaacttccctggttgacagcatttctcgtgtgttgtcatactcttgtttgtgcctggcttcccccagactttgcccatgccccttttccctttgctaaattttctttgtatcttatgctgcaatagtcataaccatgaatatgatgatatgcagaattctgtgaatctgcytagtggattgtctgaccttggtatggacttgagggtaaccagtgctccatatataaaggttggtaggaaatctgtatcctcaaaggtcctcaaatcagcagatatattggtaatttcattgtaacctttttttccataaaagatactgaaacctacagacagtatgttttatgagtaaaagagaatgaaccatttaaaaataagtgt

SEQ ID NO: 655792 - DNA, 569 bp, Homo sapiens
cagctgtaatcctccaaaacaatcaaggactagagatgttaatggccagtacaatttgtttagccttagataaaaaatgatgcttttgtgtaaatcaactgggaaaagtataagacaacatcagacaactcctaaattgagcctccaatttacaggaacaaggctcccagagttggcaaaattggaaaggaacctggaaataattatcctggattcttctctttttggttccmctcattagtctgatttttgctcctttttggtccatgtcctctaaatctaataactccatttatctcctcttgccttcaggtcatcaagctccagatgatcctcagtgagggatgccatcctctcaatattcaagtcacccttctacagcggacccctagactgcccagcagagggacacgacagagataaaatcctgcccatttcccttggacctggctgaataccactttcaccaacccatggagccaccctgccctgacagctagcaagagtccaagacccacagaacaaccaccaccacccctctgtcagcaggaagcagttagagaagactg

SEQ ID NO: 655793 - DNA, 583 bp, Homo sapiens
aatgacacatcaaacattgtaggtgtgtcataagctggtgtgaggacatgcaggcagcaaagaagcaacttgtgtgtgtacacrtgtgtgtgtgtgtgtgtgtgtgtgtgtgtgtgtgtgtttgggtcggtccagacagaggcccaggaagaagaagagtggagatcctgccacatggctcctgatgctggaggcttagggacaaaccatcagtgtgactgtcccagtgtcctctggggatgggacttggggttacagattcagagagctgtgttagaaccacttgggtctctgcctgtctctcccaccaggctctcagctccttgtggggaaagatctctgagctgaggggagccctgagcagtctctcagtaagtggttaggggaggaaggaataaaccagcttcctgagtctaggcacagtctgggtactttcatacacagtcctattgtgttggcacagcagtagtctttatcacacaggtgagaaaggagaggttcggagaggtcagtgacctgtcctgggttactcagcaagtaattggcctagtaacctaacccaggactgttgaacaatcgggcc

SEQ ID NO: 655794 - DNA, 578 bp, Homo sapiens
gggaatcctcagcctgcaaatgttttggttctatgcttcaactgagaaaggcatggtaagagccattagcagctttctcaactgaaaacagatgaatgtggctttaaacctaggtgggagacttgtattttgtcatgtaaactacctcacgccattgttctgggacattcattttacagggcaatgtggaattttgaagagccctgacaatcactttctgwgaaatccaaagaaaaatacaattccttattttggttattaactgtgcctctttctagctgtgtgactttggacaagtcattttgcccctctgagtctcagtttccttatctctaaaatgaagatactagaccagatgatcttcaatctcattgattaagccaggggaagaaagcaaaaattccttagctgctactatacactcaggtatttaaatattttatttcaatgatgtatagttatttgacttagtgacaaccctgtgggtaagtactatcatcccattgtgcaggtgaaagaactgagttaaaacataagtctgtgttctcactatatccatcaataccgagatacagttc

SEQ ID NO: 655795 - DNA, 558 bp, Homo sapiens
ttgctggtgggaatataaattagtacaacctctatggaaaacagtatagagattccttaaagaactaaaagtagatctaccattcaatcaagcaatcccactattagatatctacccaaaagaagtcattacatgaagacacatgcacatgtctgtttattgagcacaattcataattgcaaagacatggaaccaacctaaatgcccatcaaccaatgagtggattaagaatatacggtatatatacaccatggaatactactcagtcataaaaaggaacaaartaatgtcttttgcagcaacttagatggagctggaggtcattattctaagtgaagtaactcatgaatggaaaaccagataccgtatgttctcacttacaggtaggagctaagctataggtatgaaaggcatacagagtgataaaatggactttggagagttagaagggggagggtcagaggagatgtgggacaaaaaactacatattgggtataacatacactacttgggtgcattagaattttagaagtcaccactatataattgaaccatgta

SEQ ID NO: 655796 - DNA, 595 bp, Homo sapiens
tatccaacagactacctcaccttttccacttaacttttcagaaaagttgccccgtgcttaacatttgcaagccgcagaacaaagggagaagcttagatattgatggtgtctttgggaatcaatgcaagagagctcaggggaaactggcagaggcacaacaccggaggaaaaagccttaggaaagtcagaaaagagatgttcttcctaaattagccatgtctggcagtggaatagggacaggggcaatggaaaatacctggatgggtggcctaatgccagagyctgcagcagacagctgctcccacccactgcccaaaccgtgggcattctcttgcatcaacaaccaaaaatcagagatgggagcctttgcatttgtcaggaatcgtgcactaacgctgatgaatttcttttgtgatgagttaaggaaggaaggaagaaacgagaaagagggaggaagaaaggaaggaggaatacccaacatagaaaaaacaaacaccagcactcaaaggtggcagaaagaaatggcaacctgcctagattctacatttaatcacttgacttctatactttttcaacaaatagatggcaatttata

SEQ ID NO: 655797 - DNA, 579 bp, Homo sapiens
gactcccctgcgaagcacagtaagataaaacttgccaaagctttctaaacttgcctccttgaagcagacaaaacatttcatggctggtgggaagatggtggtggcgacaggagcataagtactttacaaacaaaattctagtgcagaaattacaggctgaatctctccaaggatccatccaccccratatgtatgtagtctcataatatcttcaagggaacttggaaggtataagtataaaagttgccttctctaaaattgttctcatagattaggaatgcttccctgggacaagaatgctatttacctccaatattcttttttttttttaattaaaaaaaatcttaatttttagctagacatgtcgtctagtcaaaagaatttgctcttcaatctcccctgaagttaggcatagccaaatgattacagtctggccaatgatatataaaaagacatgttgtgtgcaacttttgggaagtgccctcaaagggagagggtgcactcttcttttcttggacatgatgcctgggaattgagcagccactgtggaacacaacacaaatgatggcagggcagcaa

SEQ ID NO: 655798 - DNA, 579 bp, Homo sapiens
gactcccctgcgaagcacagtaagataaaacttgccaaagctttctaaacttgcctccttgaagcagacaaaacatttcatggctggtgggaagatggtggtggcgacaggagcataagtactttacaaacaaaattctagtgcagaaattacaggctgaatctctccaaggatccatccaccccgatatgtatgtagtctcataatatcttcaagggaacttggaaggtataagtataaaagttgccttctctaaaattgttctcatagattaggaatgcttccctgggacaagaatgctatttacctccaatattcttttttttttttaattaaaaaaaatcttaatttttagctagacatgtcgtctagtcaaaagaatttgctcttcaatctcccctgaagttaggcatagccaaatgattacagtctggccaatgatatataaaaagrcatgttgtgtgcaacttttgggaagtgccctcaaagggagagggtgcactcttcttttcttggacatgatgcctgggaattgagcagccactgtggaacacaacacaaatgatggcagggcagcaa

SEQ ID NO: 655799 - DNA, 421 bp, Homo sapiens
tttgtggtaattcatttttcagtaatagaaaactaattcatttcccaaccaccatgccagcaartttctattctgactataaagaagatgcattctggccccaactcagtcacagaattgctccattccccagttttaccatcagcaattgacacatccccgcctctgcctacatttcctgctcacttatcttgaatgttcaccctccaggaacaaagtttcaaacaacgttaaataataacaaccacacatcaagcttctgcctgtgctgggaaacaaaatagtctgcacagctattggccaaagggataaacaaatgaagagaaacaacacagaaggatagtttctgattgaaagtgaaatttttagtaggcttgcttaatttcaagagtgacaatggaggactttggaaagtttcaca

SEQ ID NO: 655800 - DNA, 583 bp, Homo sapiens
tataatgcccataaatcataatatcaacacattcactctcccacttaaaaatcttctgtactctctttrcttaccaagtaagctcccttcccttcccctgattttcaaggtcttctgtgaccaagaccaatcttcccgaaaaaagggtttcccaatattggcactattgacatttggggctggataagttttgttgtggcaagccatcctgtgcattgtagggtatttagcagtatccctggcttctactcacccgatgtcaataacataccctcacctagttataacaaccaaaaatgtctccagacattgccaaatgtcccctgggtggcaaaatctcccctgattgagaaccactgctttaaagccttatcacctgctacttcccatactaggcctgtactctatctatatcggacacactcagagtgatcttcccttcatacttctgcttattctctttctctggtttgcgatgccctccctttcaccacccaactccatccacctaaaatcctactcagtcttttatggccagtctttactccataaaatattacctaatttcctcttaatcataact

SEQ ID NO: 655801 - DNA, 583 bp, Homo sapiens
tataatgcccataaatcataatatcaacacattcactctcccacttaaaaatcttctgtactctctttacttaccaagtaagctcccttcccttcccctgattttcaaggtcttctgtgaccaagaccaatcttcccgaaaaaagggtttcccaatattggcactattgacatttggggctggataagttttgttgtggcaagccatcctgtgcattgtagggtatttagcagtatccctggcttctactcacccgatgtcaataacataccctcacctagttataacaaccaaaaatgtctccagacattgccaaatgtcccctgggtggcaaaatctcccctgattgagaaccactgctttaaagccttatcacctgctacttcccatactaggcctgtactctatctatatcggacacactcagagtgatcttcccttcatacttctgcttattctctttctctggtttgcgatgccctccctttcaccacccaactccatccacctaaaatcctactcagtcttttatggccagtctttactccatraaatattacctaatttcctcttaatcataact

SEQ ID NO: 655802 - DNA, 526 bp, Homo sapiens
tttctgtcatttggtaggtgatggatgccagacccagttatgccctcattaaattctgtttgaggagaaacatgatttataggaaggaatagttaaacacatttagcactgcatttaaataagggctataaagatatagagtataacagctacagaaaaacgcagaagaaacagatattgggagtcagcttggcatggatttgtcagaagagactttytagatgagatagatctaagaaaatatttgaaataagagctgtggtgtcccaagggaggggaaaggttgggaatgtcagatcagggtgcaggcaaaatagaggtacattgtctggagagaatttaaaaacaaaactaactaaaagtcagttcgctttttattatcaccatacaccagaaattctagacaataaaagaccattccggtagtacttcatttattggtttagtaattctcagcaaacacaatgagttggtgacttagacatagagaaatcagtaagctatttgacctcccattgctcctatc

SEQ ID NO: 655803 - DNA, 525 bp, Homo sapiens
acatgtgtttttaaatatttgttttaatactaatgtcagattatttaggcccaatccattctgttgattggacctagtataagyggaaggataaagatttctatccctacattaacacattttatgggttgcaaagccacttttttgccactaaaacataaggtcatgaactaatagaatcctcactttctgagggtttcatttggcttaaaaaaaaaacagttttagaaaaattaatctgcagaataggcttgtaaaagtaaataagtcatctgaattttataaaatgttgctctcaaaccaatatctgttcctcaaaacatttatgttaaatgggatagaagtaaatgtcgagaagcactctgctcaaagctatttacataaatgtgctgtcacagattatagttaagcgacttgaggcaattcttccccccacccccaaaaaaaggctaaaagaaaagacttttggttctcttcatatccttttccccccccagataactaaaattccttatggtcattagt

SEQ ID NO: 655804 - DNA, 525 bp, Homo sapiens
acatgtgtttttaaatatttgttttaatactaatgtcagattatttaggcccaatccattctgttgattggacctagtataagtggaaggataaagatttctatccctacattaacacattttatgggttgcaaagccacttttttgccactaaaacataaggtcatgaactaatagaatcctcactttctgagggtttcatttggcttaaaaaaaaaacagttttagaaaaattaatctgcagaataggcttgtaaaagtaaataagtcatctgaattttataaaatgttgctctcaaaccaatatctgttcctcaaaacayttatgttaaatgggatagaagtaaatgtcgagaagcactctgctcaaagctatttacataaatgtgctgtcacagattatagttaagcgacttgaggcaattcttccccccacccccaaaaaaaggctaaaagaaaagacttttggttctcttcatatccttttccccccccagataactaaaattccttatggtcattagt

SEQ ID NO: 655805 - DNA, 525 bp, Homo sapiens
acatgtgtttttaaatatttgttttaatactaatgtcagattatttaggcccaatccattctgttgattggacctagtataagtggaaggataaagatttctatccctacattaacacattttatgggttgcaaagccacttttttgccactaaaacataaggtcatgaactaatagaatcctcactttctgagggtttcatttggcttaaaaaaaaaacagttttagaaaaattaatctgcagaataggcttgtaaaagtaaataagtcatctgaattttataaaatgttgctctcaaaccaatatctgttcctcaaaacatttatgttaaatgggatagaagtaaatgtcgagaagyactctgctcaaagctatttacataaatgtgctgtcacagattatagttaagcgacttgaggcaattcttccccccacccccaaaaaaaggctaaaagaaaagacttttggttctcttcatatccttttccccccccagataactaaaattccttatggtcattagt

SEQ ID NO: 655806 - DNA, 525 bp, Homo sapiens
acatgtgtttttaaatatttgttttaatactaatgtcagattatttaggcccaatccattctgttgattggacctagtataagtggaaggataaagatttctatccctacattaacacattttatgggttgcaaagccacttttttgccactaaaacataaggtcatgaactaatagaatcctcactttctgagggtttcatttggcttaaaaaaaaaacagttttagaaaaattaatctgcagaataggcttgtaaaagtaaataagtcatctgaattttataaaatgttgctctcaaaccaatatctgttcctcaaaacatttatgttaaatgggatagaagtaaatgtcgagaagcactctgctcaaagctatttacataaatgtgctgtcacagattatagttaagcgacttgaggcaattcttscccccacccccaaaaaaaggctaaaagaaaagacttttggttctcttcatatccttttccccccccagataactaaaattccttatggtcattagt

SEQ ID NO: 655807 - DNA, 458 bp, Homo sapiens
actttctttgctcatccataacaagcaacttctcattcattcaagtttgattatgagattgcagcaattcagccacatcttcaggctctacttctaattctcttgctatttctaccacatctgcagttacttccctcactgaagtctggaatccctcaaagtctccaggagggttggaataaaattcttccaaatgtctgttaatgttgatattttgaccttctgccatgtatcatgaatgttcttaatggcatctagaacggtgaatccttcccagaagactttcaatttactttgcccagatccatcagtggaatcactataagggcaactatagccttataaaaatgtatttcttaartaataagacctgcaagttaaaattagtccttgatttatgggccacagaatggatgttgtgttagcgggcatgaaaaccatattcatctccttgtaca

SEQ ID NO: 655808 - DNA, 639 bp, Homo sapiens
ctcgctctgttgcccaggctggagtgccatggcatcatctcggctcactgcaacctccacctctgaagttcgagctattctcctgcctcagcccccctagtagctgggattacaggcacgtgccaccatgcccagctaattttttgtatttttagtaaagacaggggctcaccatgttggccaggcttrtcttgaactcctgatctcaggtgatctgcccacctcagcctcccaaagttctgggattacaggcgtgagccactgtgcctagactggagtagcacttctaatttccttcaagaaattttcctttgcatttacaacttggctaactatttggtgcaagaagcctagctttcagcttatcttggcttttaacatgccttcctcactaagcttaatcatttctaacttttcatttaagagatgtgtaactctttctttcacttaaacacttagaagcctttataggattattaattggcctaatttcaatattgctgtgtccccaggatagggagtcctgaggagagggagagagacaggggaatggccatgagtggaggagtcagaacacacacaacatgtattggttaagtttccatcttacatggccacagttcctgatgcccccagaca

SEQ ID NO: 655809 - DNA, 233 bp, Homo sapiens
atagtttcgtaactagcacgattgccattcccagagtggatatcagtggattacaaaaaacaggacaggcatcctaggaactaaagatttcctaaaacattaacaggtgttcaatcacattttagacttatattcatcattatctatggatgctacaactgtctttgtgacctctgattctcattttctttaatgcgtgaagacttrctgcataggacttattcacatctcac

SEQ ID NO: 655810 - DNA, 225 bp, Homo sapiens
ttaccattcttactacgcacctatttttaacaagatttttccccttcttggtctaatcttctgtgtctgtaggtaggattgtgagtatctggagagcagaaatgatgtcaatagatggctatataaaggtgaaggttttactcttttaccttccatttctgcagtagaaaagaaatcmttcatgattctttactagaatgacagttcataaattgagaggaaaaa

SEQ ID NO: 655811 - DNA, 574 bp, Homo sapiens
taccatacacactcatcagagataagtcctaactcgtggtagctttagcagtctgtcagtctctttgtactataatatcttaccatctttgcctaactgttgatggtctgacgtgcgtcacaaacaaggagactcagaagctggtgaactaaaaagaggagaaaatacctctaaggtcaccaaccaaccagttttattatttaggtcaagtatatagtttctacagaaccgttacccaaggttcctcaaaaaaacctctgtctgtttattcatcagttaatgtaagtatgtagcatcattgcttctttaaatgatagtcaacaaggagagagaataatgaggacaggacctaagtgttctgcaggcatctaggagggtctggaattgtcagttgccatttgcaacattggttagcatcagaaacaagcatggaagaaaacatgtgctgagacacctcccaagtatatctctggactgagaacttggctcacttctcacacaaaggcccactcttaaatkccattttatgaattaatgatggcaaatggcaagcatgcatgtgtgtgtgtgtgtg

SEQ ID NO: 655812 - DNA, 630 bp, Homo sapiens
acaatttggaagtaaatgcaaatgagatgaaagagcatttgccttagataataactcttttgtayaagtcgcagactcgtgattcactccagctgtgggaatgtaaaactgtgattcatagaaacctccaaagaaggctgtgaactgcattcctatgcatttgcagccatttttgccaagatacatgtaataggggaatattgcctctccctactctgaagagttgacattgtgttagctgccagagacagagaaaaccattattaatttatctacagacactgacccaagccactcagtaaacaggatgatcaatgcaaggattatgtttcattgatgccattgtttactcttgttaatgctatttatatgctcagcaaaaactcccacaagatcccagtgcttcacagttttttaaaatctgattgattataaatggaagaaatatggtagctcatctaccggggatggttgggacagcagaaggggagacttcccctcagtgtggaattttgaggtatgcagagattttatttcaatttcacgtccactttctgttcctctccactcctcactcccccagaattccttttacttctggtttctaggatttacatacagctttgtttt

SEQ ID NO: 655813 - DNA, 664 bp, Homo sapiens
ttttctatccattgttcaataacttcaagtttgaagaatattgctgatagagcctactgatacatacttatttacatttattaaataccatatgtgtaacttttttaaaaaaggttttactttatttttttaaagtcagattcaaaatgaaaggagaggttgaggtatggccaaagctaaatactcaagggtgggacaaacattcaagaattatagctagggtgagctatgtggggaaaaaaatgctttcaattgtaatatgatagatttttaaatcrtgtatgcaagatcagtaggctataaactgatgacaaagaaaagttaacacatgttctatcaagaatagtattcaaatgagaaatagcagaacaaacataattaagagggaactggaagtgagtgagatgcaaaacaactgagtgtccagttccttgtttgatagagtgagtcacaggacatctgcttcatgaagatggactgggtgcacacatttatcttccattactcccaagatccaaataaaataaaaagtaccaaaaggaataaacctataacagggaagagaatggaattggggtttacaaaagaatgagacattttaataagtatctggaagaagaaaagtagtttagagtgagttgacagatgagaggcaagaaaaaac

SEQ ID NO: 655814 - DNA, 583 bp, Homo sapiens
ttgaactcgagagacagaggttacagagagctgatatcgcgccactgcaccccagcctgggaggtggagcgagactctgtctttacaaaaaaaaaaaaaaaagtgtcaatattaaagtcaaaatggacctgacacaaggtgggatatagaagggagaaggaaagatggggagtcaaaacgggatrtcaaattttgtgtaaaatgaaatagagatttaaatgttattttatgttatagtggttatcaatttaaaaaacttaaaaaaattaaaacactaagaagagagaggaatgaggtagtataaacaaaatccttgtctttcatattagggagtctattaaaattgctttcattgataaattaagaaacagcaatgtttcttaattttatccaacaaattatccagaggagacaacttccagaagaataaaaataaaaatattaaaagagtttgccatggatattccatttaccctgatgtgattattatgcactgtatatgtatatatatgtatcacatagttgtgtattaaaatatctcaggtaccccataaatatatacaccctaaaaataaaaacaccc

SEQ ID NO: 655815 - DNA, 583 bp, Homo sapiens
ttgaactcgagagacagaggttacagagagctgatatcgcgccactgcaccccagcctgggaggtggagcgagactctgtctttacaaaaaaaaaaaaaaaagtgtcaatattaaagtcaaaatggacctgacacaaggtgggatatagaagggagaaggaaagatggggagtcaaaacgggatatcaaattttgtgtaaaatgaaatagagatttaaatgttattttatgttatagtggttatcaatttaaaaaacttaaaaaaattaaaacactaagaagagagaggaatgaggtagtataaacaaaatccttgtctttcatattagggagtctattaaaattgctttcwttgataaattaagaaacagcaatgtttcttaattttatccaacaaattatccagaggagacaacttccagaagaataaaaataaaaatattaaaagagtttgccatggatattccatttaccctgatgtgattattatgcactgtatatgtatatatatgtatcacatagttgtgtattaaaatatctcaggtaccccataaatatatacaccctaaaaataaaaacaccc

SEQ ID NO: 655816 - DNA, 439 bp, Homo sapiens
ttgattacatgtggtccatgggccatgcattaggaaccatggytctaggctgtgagaaattacatccatgtcactgccaacatcatagatgtgagagcatcctctcccctcctctcactcttacagttttttgaaatgtggtgttcaaggctggctactcacttcctggagttagaagggtcttcagggaaaggtctgatgacctgtgcacagagatgagcctgagaagatgactccaccttagggccttccctatggtccgtggactgaggaggcttcagttgtaagtccagagacagtcttgtctgtgaccccagagagctgctccactgcacatgaccacagttactgtcctcatttagaatgagaaggtgactgccacttggagtagacatttggattaccctgacacatactctcgtcttctgacaaaaccatt

SEQ ID NO: 655817 - DNA, 539 bp, Homo sapiens
gggggccatcgctggaaaccgttaagagaccataactcccagcatccctggccagggacgcgcctctctatccttccctccagcgttacacaccgccccaatcccggtgcatgctggcattgtagttcggtagccttgcgatcaacgtgctggaaactgtttaaggactatgactcccaggacgccttgcgagggacccaccctgttgacccttcctccagggctgggaacctcccttaagcccagcgcatgctgggatcatagtccgactgccgcgacagaaaggctgggagtggatctgagactacagttccaacactacggggaaaatttcatcttctctgagactacagttccaacactgaggggataatttcatcttctcctccgcccctccatgtttccagtgcaattccgccctgctgaggggagcctatctgttcccaaacttctgcgtgcgaggagacagcgtggccagggcaggtggtctcacttgtaattgtgrcacagtctccccacgtgccagttgtacgactatt

SEQ ID NO: 655818 - DNA, 638 bp, Homo sapiens
atggagagacacggcgtgcctactaaaaacacaaacatcagccaagccaggcgtgggggtgcctccctgtmatccccgctaatcgggaggctgaggcaggagaagcgctcgaacccgggaggcggaaggtgcggtgagccaagaccgcgccattgcactctagccgtggaaacaagagtgaaactctgtctcaaaaggacgaaacagaaagaaagaaagaaaggaaggaaggaaggaaggaaggaaggaagaaagaaagaaaagaaagaaggaatgaatgaaagaaaagaaagcaagaaagaaagaaagaaagaaaaagaaaagaaagaaagaaaagaaagcaagaaagcacgaaagcaagcaagcaagaaagcaagaaaacaaggaagcaagaaagcaagcaagaaagaaacaaaagaaagaaagcaagaaaacaagaaagcacgaaagcaagcaagcaagaaagcaagaaaacaaggaagcaagaaagaaagaaacaaaagaaagaaagaaaacaagaaagcaagaaagcacgaaagcaatcaagcaagaaagcaagcaggaaagaaacaaaagaaagaaagaaagcgagaaaacaagaaagcacgaaagcaagcaagcaagaaagcaagcaagaa

SEQ ID NO: 655819 - DNA, 638 bp, Homo sapiens
atggagagacacggcgtgcctactaaaaacacaaacatcagccaagccaggcgtgggggtgcctccctgtcatccccgctaatcgggaggctgaggcaggagaagcgctcgaacccgggaggcggaaggtgcggtgagccaagaccgcgccattgcactctagccgtggaaacaagagtgaaactctgtctcaaaaggacgaaacagaaagaaagaaagaaagraaggaaggaaggaaggaaggaaggaagaaagaaagaaaagaaagaaggaatgaatgaaagaaaagaaagcaagaaagaaagaaagaaagaaaaagaaaagaaagaaagaaaagaaagcaagaaagcacgaaagcaagcaagcaagaaagcaagaaaacaaggaagcaagaaagcaagcaagaaagaaacaaaagaaagaaagcaagaaaacaagaaagcacgaaagcaagcaagcaagaaagcaagaaaacaaggaagcaagaaagaaagaaacaaaagaaagaaagaaaacaagaaagcaagaaagcacgaaagcaatcaagcaagaaagcaagcaggaaagaaacaaaagaaagaaagaaagcgagaaaacaagaaagcacgaaagcaagcaagcaagaaagcaagcaagaa

SEQ ID NO: 655820 - DNA, 638 bp, Homo sapiens
atggagagacacggcgtgcctactaaaaacacaaacatcagccaagccaggcgtgggggtgcctccctgtcatccccgctaatcgggaggctgaggcaggagaagcgctcgaacccgggaggcggaaggtgcggtgagccaagaccgcgccattgcactctagccgtggaaacaagagtgaaactctgtctcaaaaggacgaaacagaaagaaagaaagaaaggaaggaaggaaggaaggaaggaagraagaaagaaagaaaagaaagaaggaatgaatgaaagaaaagaaagcaagaaagaaagaaagaaagaaaaagaaaagaaagaaagaaaagaaagcaagaaagcacgaaagcaagcaagcaagaaagcaagaaaacaaggaagcaagaaagcaagcaagaaagaaacaaaagaaagaaagcaagaaaacaagaaagcacgaaagcaagcaagcaagaaagcaagaaaacaaggaagcaagaaagaaagaaacaaaagaaagaaagaaaacaagaaagcaagaaagcacgaaagcaatcaagcaagaaagcaagcaggaaagaaacaaaagaaagaaagaaagcgagaaaacaagaaagcacgaaagcaagcaagcaagaaagcaagcaagaa

SEQ ID NO: 655821 - DNA, 520 bp, Homo sapiens
ggtggttacagcctgctgtgtttctggtgcctattgagctttgctggagcagctggagcaagtaagagtcacacacctcatgttattatcaacaatttccacattgcccacttagccaatcttttttcccttgcactcaccctttgccagctaccctggtgggtccaacatgtggcacagaaaatgattacatcatgcctgcatacccctccaaggacagaacagtctgaagycagctcgacaaaagcactaaagcaagtatatataaaagaaaagagcaaggactattatataaagtagaatgttgagaagaagagctgcaaagtcattgaatggggggacccaaagtcctcactgaggtgatctttaatccatgatgagaatgataacagggaggcatctctgcacaagaatgtgtcagtgagaagccacccttggtgaagagtcttacaggtgtgagtttggcagagattagaaagggaccaatttggtacagacagcctgaggaagagataagcag

SEQ ID NO: 655822 - DNA, 520 bp, Homo sapiens
ggtggttacagcctgctgtgtttctggtgcctattgagctttgctggagcagctggagcaagtaagagtcacacacctcatgttattatcaacaatttccacattgcccacttagccaatcttttttcccttgcactcaccctttgccagctaccctggtgggtccaacatgtggcacagaaaatgattacatcatgcctgcatacccctccaaggacagaacagtctgaagtcagctcgacaaaagcactaaagcaagtatatataaaagaaaagagcaaggactattatataaagtagaatgttgagaagaagagctgcaaagtcattgmatggggggacccaaagtcctcactgaggtgatctttaatccatgatgagaatgataacagggaggcatctctgcacaagaatgtgtcagtgagaagccacccttggtgaagagtcttacaggtgtgagtttggcagagattagaaagggaccaatttggtacagacagcctgaggaagagataagcag

SEQ ID NO: 655823 - DNA, 520 bp, Homo sapiens
ggtggttacagcctgctgtgtttctggtgcctattgagctttgctggagcagctggagcaagtaagagtcacacacctcatgttattatcaacaatttccacattgcccacttagccaatcttttttcccttgcactcaccctttgccagctaccctggtgggtccaacatgtggcacagaaaatgattacatcatgcctgcatacccctccaaggacagaacagtctgaagtcagctcgacaaaagcactaaagcaagtatatataaaagaaaagagcaaggactattatataaagtagaatgttgagaagaagagctgcaaagtcattgaatggggggacccaaagtcctcactgaggtgatctttaatccatgatgagaatgayaacagggaggcatctctgcacaagaatgtgtcagtgagaagccacccttggtgaagagtcttacaggtgtgagtttggcagagattagaaagggaccaatttggtacagacagcctgaggaagagataagcag

SEQ ID NO: 655824 - DNA, 625 bp, Homo sapiens
cttaattagacagttaatcattttcaatatggaagcctaaacacgtagaatgtgrcaataacccggaactctcagttctgacaattgagtgaagtaatcaccccagattcaggttcctcattggctgacaatgagatcaaacacccacaccagcccagtgaacaccatgaggtgtcatcttccctggcccattagtgaaccaggaacagatatttagaaaatattcagtaaattggggagtcccacagagtcagaaagtttgcttgagatagtagagggtggcataaaatttctaccgaatatgaattttaatttttactttagtgccgtttctattttagtctaatttccttctagaatatgttatttctatttaccaagtggcctcctgtggtctttttcatagagttcaaatcgacccatctaaaaacagaaagatcaagctaacgacctccctcaggggtcagaattcagtttcacagctctgtagcaagctcattgttgacttacaaattagtgtaaccaatagtaacgtcatggtgaccataactccaacatcccaaaaagtacctcaagttagaggctgacttcatttatcagaggattcaaatggcaaaatcaagct

SEQ ID NO: 655825 - DNA, 625 bp, Homo sapiens
cttaattagacagttaatcattttcaatatggaagcctaaacacgtagaatgtggcaataacccggaactctcagttctgacaattgagtgaagtaatcaccccagattcaggttcytcattggctgacaatgagatcaaacacccacaccagcccagtgaacaccatgaggtgtcatcttccctggcccattagtgaaccaggaacagatatttagaaaatattcagtaaattggggagtcccacagagtcagaaagtttgcttgagatagtagagggtggcataaaatttctaccgaatatgaattttaatttttactttagtgccgtttctattttagtctaatttccttctagaatatgttatttctatttaccaagtggcctcctgtggtctttttcatagagttcaaatcgacccatctaaaaacagaaagatcaagctaacgacctccctcaggggtcagaattcagtttcacagctctgtagcaagctcattgttgacttacaaattagtgtaaccaatagtaacgtcatggtgaccataactccaacatcccaaaaagtacctcaagttagaggctgacttcatttatcagaggattcaaatggcaaaatcaagct

SEQ ID NO: 655826 - DNA, 552 bp, Homo sapiens
ctccccacctgtttcatgaacaccagtgggtcatacctttggtctctttacataatcttatatttttcagaggcttgggggtttttattactcttttttatttctgtctgtatgtctkacttcacataaacagtcttcaaactctgagattcttccttagctttgtctattctactattaatagttgtgaatttcttataaaaaaatttagtgtgatttttttagctctctcaggttagttatgctcttaatactggctcttttgtctctcagctcctgtatcatttcattatgattcttaacgtttttgaattgagtttcaagttacttctgcattttaatgatctttatttctattcatattctgaatttgatttctgtaattttagctatcttggactgatttataaccttactggagaggtactgtgaccatttgaaggaaaagaggaactcaggttttttgagttgtcagaggttttgtgcttgttctttcttatctttctggggtgatatttctttaatatttgaagttgtcaacttttggatttt

SEQ ID NO: 655827 - DNA, 552 bp, Homo sapiens
ctccccacctgtttcatgaacaccagtgggtcatacctttggtctctttacataatcttatatttttcagaggcttgggggtttttattactcttttttatttctgtctgtatgtcttacttcacataaacagtcttcaaactctgagattcttccttagctttgtctattctactattaatagttgtgaatttcttataaaaaaatttagtgtgatttttttagctctctcaggttagttatgctcttaatactggctcttttgtctctcagctcctgtatcatttcattatgattcttaacgtttttgaattgagtttcaagttacttctgcattttaatgatctttatttctattcatattctgaatttgatttctgtaattttagctatcttggactgatttataaccttactggagaggtactgtgrccatttgaaggaaaagaggaactcaggttttttgagttgtcagaggttttgtgcttgttctttcttatctttctggggtgatatttctttaatatttgaagttgtcaacttttggatttt

SEQ ID NO: 655828 - DNA, 552 bp, Homo sapiens
ctccccacctgtttcatgaacaccagtgggtcatacctttggtctctttacataatcttatatttttcagaggcttgggggtttttattactcttttttatttctgtctgtatgtcttacttcacataaacagtcttcaaactctgagattcttccttagctttgtctattctactattaatagttgtgaatttcttataaaaaaatttagtgtgatttttttagctctctcaggttagttatgctcttaatactggctcttttgtctctcagctcctgtatcatttcattatgattcttaacgtttttgaattgagtttcaagttacttctgcattttaatgatctttatttctattcatattctgaatttgatttctgtaattttagctatcttggactgatttataaccttactggagaggtactgtgaccatttgaagraaaagaggaactcaggttttttgagttgtcagaggttttgtgcttgttctttcttatctttctggggtgatatttctttaatatttgaagttgtcaacttttggatttt

SEQ ID NO: 655829 - DNA, 548 bp, Homo sapiens
cagcctattttgatatatagcatttcctttttgtgttgcttgtattgccaataaatctagtgccctcgatatttcattggttatgatttgaaggactgcctgcaacttcatgatgcggctgaggatacagattatggtgcagtaccctcatgacctgtcttgcacctaggtagctggcccatagcatgtcatgattctttcaggaggtcatttattayctttttagtctcctgtgtccacatcttttttgatatttttgttacttttgtgattatgctttttctagttcttcttttatttttattataaactggatattctaagaatttcccttgctttagaggaattagaaagaaggatggcttgattgcttttaacagacatgcccctgcccattttgctggcagttgccaatatgcccatgctccacagatccaatataggccagagggtgcctttcaagcatttgaatcatctacctgatgccaagtgcagcttagagtaaggaatccagagaaagtgtttggatctggtaagtaggagtcatt

SEQ ID NO: 655830 - DNA, 604 bp, Homo sapiens
attttaaaatatattaaaaattagtgctaactgtagttatcctactgtgctgtcagacactagaaattattcctcctatgataaaaagtttaggctgtatcccatgggtagtaggacaccacatgactgagtggtcatctgggaaattatctggatgactttggaacattcctggttgagccaggtggctgttgcaacaaactgtggggaagcccctcccctaatgccccctaagccagctgtcactacatggcaggaaacctccaaacctgagggccccaggaaacaatgacagtccccactcacatgcaacttgtgctgtgctcagtgccctccacattgagcctgatctagctttacccgagggctgtgaggtgggacaatcagtatccctttattttaaaaggctcagtgaagttttgggcttaatgtgagtgaagtgatcctaaaagctgactctgggatmccggctccaccactgaccagtcctgcaggtggcgagagttgcctctcctcccctcgatttcattttgtcctctgtgaagtgcagccgtgctgatgactcacatatcagggatacatgggaactgtcaatgaacggagt

SEQ ID NO: 655831 - DNA, 530 bp, Homo sapiens
accctacaagccaaaagagattgggggccaatatttaacgttcttaaagaaaataaactttaagccmgaattttatatctggccaaactaagcttaatctggggagaaataacatccctttcagacaagcaaattccgagttaattcatgaacaccagacatgcttttcaagagctcctgaaggaagcaccaatttggaaagggaaaattattaccagccaccataaaaacacactcaagtacacagaccattgacactataaatcaaccacataaacaagtctgaaaaataaaaataaccagctagcatcaagataacaagataaaatctacgcataacaatacttaacttaaatgtaaatgggataaatgccccagttgaaacacacagggtggcaattgtataaaaaccaagacccattggtatgctcttcaagacacccatctcacatgcggggacacacataggctaaaaataaagggatggaggaaatttcaccaagcaagtggaaaacctaaaaaagcaaggg

SEQ ID NO: 655832 - DNA, 530 bp, Homo sapiens
accctacaagccaaaagagattgggggccaatatttaacgttcttaaagaaaataaactttaagccagaattttatatctggccaaactaagcttaatctggggagaaataacatccctttcagacaagcaaattccgagttaattcatgaacaccagacatgcttttcaagagctcctgaaggaagcaccaatttggaaagggaaaattattaccagccaccataaaaacacactcaagtacacagaccattgacactataaatcaaccacataaacaagtctgaaaaataaaaataaccagctagcatcaagataacaagataaaatctacgcataacaatacttamcttaaatgtaaatgggataaatgccccagttgaaacacacagggtggcaattgtataaaaaccaagacccattggtatgctcttcaagacacccatctcacatgcggggacacacataggctaaaaataaagggatggaggaaatttcaccaagcaagtggaaaacctaaaaaagcaaggg

SEQ ID NO: 655833 - DNA, 446 bp, Homo sapiens
  misc_feature 1, 2, 3, 4, 5, 6, 7, 8, 9, 10, 11, 12, 13, 14, 15, 16, 17,18, 19, 20, 21, 22, 23, 24, 25, 26: n = A,T,C or G
nnnnnnnnnnnnnnnnnnnnnnnnnngaggtagagaaagtactctaggattggctggatagagctttagcttttcagtcaggagccaagggttctaggcctgactgtgagtccttaagaagtcatttacctctctttgtctcagaatcccccagaaacatagcaaccactccttcaaatggattttctcaaagtggaacttttttactttttaaaaacagataatatgtttacattttggatggtaagtctttaatgaagagatcttagtggtagcagtatgaaaggaacaccatgtgacaaagagaagataattcttaaacttttattacttgcttgccctcccttaggaaacaagggctcaggcccttctactattmccacactctttttcaacctttctccctctgttagaatctggtcagctctctaatgtctacatctgta

SEQ ID NO: 655834 - DNA, 506 bp, Homo sapiens
tcttctttctctaattgcaaatgttctcttttgtcttccactagaatgtaagatccacacaaactggcattaggccactcttgttcacttctctgtcctcagacattgaatcagtatgaagaatgtgccaacatagtcactgttcctgtgaaactttatagactcacagttccatataaatgaaggcctgtttatagggcaggagttaaaaatcatgactgacagtgaaattcttctgttgttagtaggctgyctattggaattcgaagtttcaaaatgcttgggaaaatgaatgcaaatagtaaattctcaagataactgcattctaagacgacatttggtctaatgtagattaatggatttttgggggaaaaaagagtttcactttttgatattcactaccagtaagtcatcacatacaaatagatatttcaggtttgggtcacaatcccaaaagatacagtctcaaatgtcataaacgtatgttctctctggattattactgc

SEQ ID NO: 655835 - DNA, 584 bp, Homo sapiens
gtcaagttacatttggaaactcatgaacagtattggagttattgcaaaggttagtgttagcaagatgaatggggtagaagaccaaagcaagaagaaactggagattttcataggattggtgtgggaaggattaactgttcaggctgagaagagaaggatgtgaaattaaatggaagtttatataccaaggtaagcttctcaatagtgatggcctagggtataataatcacttgcgtactatcttcaaattatacctccctgttgctgaaatatgcccaaaacattaaattatgcatttgcgacacacattcattaaaacctgtggaaaaaatactttataaaaacagaatacctacacaaagattttggggagagaaagagcaacagaaaaggagacagggataattacagtagatatgttaaataaatatgagtacwatttaactaggttacccagctatatgtcaaaaaaagtactataaaaattattagattcagatatatggttaaaacttcatatatattgtcaaaaataaacaatttaaatctaacagtatttaaaatctttaactttcattagaaat

SEQ ID NO: 655836 - DNA, 584 bp, Homo sapiens
gtcaagttacatttggaaactcatgaacagtattggagttattgcaaaggttagtgttagcaagatgaatggggtagaagaccaaagcaagaagaaactggagattttcataggattggtgtgggaaggattaactgttcaggctgagaagagaaggatgtgaaattaaatggaagtttatataccaaggtaagcttctcaatagtgatggcctagggtataataatcacttgcgtactatcttcaaattatacctccctgttgctgaaatatgcccaaaacattaaattatgcatttgcgacacacattcattaaaacctgtggaaaaaatactttataaaaacagaatacctacacaaagattttggggagagaaagagcaacagaaaaggagacagggataattacagtagatatgttaaataaatatgagtacaatttaactaggttacccagctatatgtcaaaaaaagtactataaaaattattagattcagatatatgkttaaaacttcatatatattgtcaaaaataaacaatttaaatctaacagtatttaaaatctttaactttcattagaaat

SEQ ID NO: 655837 - DNA, 488 bp, Homo sapiens
aaaaacatttgagataactaatgaataagagaatataaaagtatatgtatagttacaactatgtaaaaaaggcagcatatagaaaatgttgcaaaaataacgtgtaaaatggaatacgactattttatcaggatggcaggaatctaggcaaatttttttgtaaattattttcatcatttggaaaggtaaaattacatgtagaattgcccacacattccctgcactacstacgtacactcacatacacaaacagtgatactctaaggaactcataatgcttatgactggtatccccaaaacatcctcatttcatactacttactctatcctcagtgttgcaattattagcacccactacaaataaagtttagggaggagctgggcataaatggaagacgttaaactgtaaaaaaaaaaactcatcttaaagaaaaaagacactttttatagacagcaaaagaaacaatgtataacagttaacagtaata

SEQ ID NO: 655838 - DNA, 463 bp, Homo sapiens
cttttgtatttattttgtttcaatttcatttrgttctgctctgatttttgttatttgttttcttctgcttagtttggtttgttcttttttctctagttccttgtagtgtgaccttagattgtttatttgtgctctttcagactttttgatgtaagcatttaagtctatgaactttcctcttagcagcacctttgccatatccaagaggttttggtaggttgtgtcactactatcattcagttcaaagaattatttaatttccatctttattccatgtatttgcatggttttgaaggttcattttggagttgatttccagttttattccactgtggtctgagagagtacttgatacaatttcaatttttaagaatttattgaggcttgttttgtggactatcatatggtctatcttggagaatattccatgtgctgataaatagaatgtatattctgcagttgt

SEQ ID NO: 655839 - DNA, 463 bp, Homo sapiens
cttttgtatttattttgtttcaatttcatttggttctgctctgatttttgttatttgttttcttctgcttagtttggtttgttcttttttctctagttccttgtagtgtgaccttagattgtttatttgtgctctttcagactttttgatgtaagcatttaagtctatgaactttcctcttagcagcacctttgccatatccaagaggttttggtaggttgtgtcactactatcattcagttcaaagaattatttaatttccatcttkattccatgtatttgcatggttttgaaggttcattttggagttgatttccagttttattccactgtggtctgagagagtacttgatacaatttcaatttttaagaatttattgaggcttgttttgtggactatcatatggtctatcttggagaatattccatgtgctgataaatagaatgtatattctgcagttgt

SEQ ID NO: 655840 - DNA, 590 bp, Homo sapiens
ctgctgcacaaccacaaacctacctctgacccccagccccaagccttgtcactctggcacagactggtcccagtgtcaggcagacctctgagcctggtcacagactgaccccttccttctggatacaggctgatctttgtcacaggccacagacctctggacctctggtcccagccataagtggactgacctctctttatggccgtatccctgctcttctggatgctcctgggggcaatgcctatagctcagggtcatccagtgcctgagactcagctcctggggtctgagagttgtggccacagcgcagagggtccttggcrggggggcctgcgctgtccgctgcagcctgggctctgagcagtgctatccctagaccctactcaggggatcctctgaactctggccctgccctgcagcttgagctatttttgcacagctctgtggtgtgtggcttttaaatggctcataagcagcaggctttctgcggtgatttttttttttccatctcacactgtgtcccctccttgtctcccctaccctgtctctgagggtccatctctctgggtctcttcttgggcctcctcacc

SEQ ID NO: 655841 - DNA, 596 bp, Homo sapiens
agcaagtgatgactgtgacattcacttttgaacagctcatgagcattaatatatttaattgtggatctaaaccaaaaaccaaggkgtgggcaagatgacaaccacagaatgtcactggcatatgtttaggttcaaataccattatgagaagtggcaggtaaaggaggtaggaaaaagaaaacacatcatgtaactgactgtcatatggaaatatttgacgttgaaagtcataatttaaaatgtataaaccaaatattagaagtgtgtctagttcaaaggggggaaaactatgaaacatttttaatcaatatcaaacatgagctacacaacccttcctaaatgccagaggcacacacagacacacacacacacactctcacaaagaatataaatatctagaaccaagaaatggagtaaatgcattctgctacatatggtaaacatagcctacaaggtggaagagattagaaaataaacagggaaatggaaatgtttttattaattcacatcagtacccaccaaaaccaatcagcataacaaaagattataacactgaatgtaaaaaacaatccaacagtccagagtgataggcaaaa

SEQ ID NO: 655842 - DNA, 578 bp, Homo sapiens
caattgctgaaagttacctggggcatggtgggttttgatcttcttccccttcttttcttccccttctccttcttttcttcgttgatcttcttccccttcttttcttccccttccccttcttttcaatttctgcaataaattcagacatggacagacacattaagctgattcccctacacacataacaatccactgtctaaycctcacacagggacctcaggctcctcagcataagaataggagactgtgagagatatatttcaggaggcctgaaggctggtcatgatagaaattcctcggtttttctcccagaaactgtgggtaaaatgtccctattctagtagatcgttatcccaatatcatttgtcccgagtttgtgcaaacagttatgccatatttttccaatcaatttaaagcaaataccctcaaatgatttctaggagaaaaactgcaatatttagccctgtctcatcaaatactcagattgttcatggttgtgaggactttagacactgaaattagagtgaaaaaggaaatctacaaacccttgagtcaaaatcatagttctctgaatttgt

SEQ ID NO: 655843 - DNA, 537 bp, Homo sapiens
tctttttcagattgtttgctgttggcatatagaaatgctactgttttttgtatactgattttgtatcctgcaactttgctgaatttgtcaatcagctctaataattttttggtggagtccttaggtttttctaaattataagattatatcatctgtgaacaagaataatttgacttttcctgtcccaatctggatgccatttatttctttctcttgtctaattgttctgtctaggacttccagtgctatgatgaataatagaagtgaaagtgggcatccttatgttcttctagatcttagaggaaaagctttcagttttttcccattcagaatgttactagctgtaagactgttgtatatggctttattatgtttacatacattccttccttaccaatctttttkggagttttttttatcatgaagggtgtagatttttattgaatttttttcagaattatttgaaattatcatatggtttttgttgatatgatgtatcattctgttgatatgttgtatcacactgattgatttgca

SEQ ID NO: 655844 - DNA, 413 bp, Homo sapiens
cagcggctggaccgcctgctcagtctcacaaggctgaaataaagatgtaagttaatgttttcttccctagaccccaggctcctcttccaagcttactcctgctattggcaggattaaattcctggcattggaggactggggtcctggtttccttgttggctgccagccaggacctgtcttgcacccttcaggccaccctcattcctgctctcttggctccctccgtttctgaacagcagtacacactgcgtcattctcatactctgaatctctctgacttcttctaccagtcaaaaaaaacactctgcttcraaactgtgtgatgacattaagcccaccagatagtgtccctactctacagtcaactgtgccatatgacacaacatagtcatgggattccctattcttgtggg

SEQ ID NO: 655845 - DNA, 598 bp, Homo sapiens
tctcttaaaaaaaattgatgattctatggagatagggagggaataacctgtgtttattgaacacctaatattccacttacccaaatgtcatttattctatattctagttttttgttgagacagggtctttcttgctctgttacccatcctagagtgcagtggggttgtcacagctcacagatgtataccaccatgcctggcttmttattttattttattttattttattattttattttattttattttattttattttatattttattttattttatattttattttattttattttatattttaattttattttattttattttattttatttttgcagagatgatgtctccctatatttcccaggcttgacttgaacttctgggctcaagcgatcctcctgccttggcatcccaaagtgctgggattataggcataagccactgtgctcaggcaatattaaagtcttgataatagaagtgtctcagtgtactggaatgctttgtctaaattttgaaaaaatattaaaaaacacgttggttttatttggccaatactgatttctttgctccctcattatttattgtcattattagc

SEQ ID NO: 655846 - DNA, 593 bp, Homo sapiens
caaaaacagtggaaacagaacataagtgartggtatattttaaatgttgagagaaaataactgcaagcatagagttctacactctgcaaaaataccatttggatgtgaagtgagtgaaaaaaattgtgtgatgtatagcaaggaagcaaagagtaagatatttgatataatcatatctcaattatgacaagtaagacagaggtagaaagcaaaacttaattatttgcagtttacaatagacaaaccttaaatatatgaccagaagaaaaattaaaacactggaaaaatatgccacgtaaacacttcacaaaagaaagctggtataactgtactaacattggttaaagtagactttaatgcaagaagcattactagagaaagtttttttcataataaaaaggtcaattttgaagaagatttaaaaatgctaaatttcttgaggaatataattaataataatgtatactgaaaatttgttaagagaaattttagatgctcttaacacatgctcacacacacacataaaagtcaaccaaagaaagtgttggatttataaatttgtttgactgtagtaatcatgttactatgtatgt

SEQ ID NO: 655847 - DNA, 593 bp, Homo sapiens
caaaaacagtggaaacagaacataagtgaatggtayattttaaatgttgagagaaaataactgcaagcatagagttctacactctgcaaaaataccatttggatgtgaagtgagtgaaaaaaattgtgtgatgtatagcaaggaagcaaagagtaagatatttgatataatcatatctcaattatgacaagtaagacagaggtagaaagcaaaacttaattatttgcagtttacaatagacaaaccttaaatatatgaccagaagaaaaattaaaacactggaaaaatatgccacgtaaacacttcacaaaagaaagctggtataactgtactaacattggttaaagtagactttaatgcaagaagcattactagagaaagtttttttcataataaaaaggtcaattttgaagaagatttaaaaatgctaaatttcttgaggaatataattaataataatgtatactgaaaatttgttaagagaaattttagatgctcttaacacatgctcacacacacacataaaagtcaaccaaagaaagtgttggatttataaatttgtttgactgtagtaatcatgttactatgtatgt

SEQ ID NO: 655848 - DNA, 601 bp, Homo sapiens
tggtacattataattaatttttatcataccccaagggggtgttgctcatagactatgctaaaacttttcttaaaaatttcacagatgttttatattagaaagaaggaagtccccttggaacatcataaaatttagaaatatagctcaatacccaaatgctataaattcacacattttcttyggagttcctgagctttgtaaattaagtctaatccccaatgcataatatatgttgtcagcttccagttgctattaataacacgtggttttcctcttaaaacaagtgtaggatattattctctaacatcgaggcatgacagttccaagtttttgaagctgaatgggggtgatgattataaatgaattaatagaaatttttaaaatacaggaaaattcagaaaattagaaatgtactaggaagtaggctcatttgttaattggtgctaagccaaagtcacttagcatagtaaccccgttgaagtgaaaatttccctgagtggctgaagcagtgattaaaaacctgtgattaaaaacagatgaagttatgagagcaaattttgatcacatttttaaaggcattattttgatttatttaataaat

SEQ ID NO: 655849 - DNA, 601 bp, Homo sapiens
tggtacattataattaatttttatcataccccaagggggtgttgctcatagactatgctaaaacttttcttaaaaatttcacagatgttttatattagaaagaaggaagtccccttggaacatcataaaatttagaaatatagctcaatacccaaatgctataaattcacacattttctttggagttcctgagctttgtaaatyaagtctaatccccaatgcataatatatgttgtcagcttccagttgctattaataacacgtggttttcctcttaaaacaagtgtaggatattattctctaacatcgaggcatgacagttccaagtttttgaagctgaatgggggtgatgattataaatgaattaatagaaatttttaaaatacaggaaaattcagaaaattagaaatgtactaggaagtaggctcatttgttaattggtgctaagccaaagtcacttagcatagtaaccccgttgaagtgaaaatttccctgagtggctgaagcagtgattaaaaacctgtgattaaaaacagatgaagttatgagagcaaattttgatcacatttttaaaggcattattttgatttatttaataaat

SEQ ID NO: 655850 - DNA, 572 bp, Homo sapiens
aagcagtattaattcctattatttgaagccataattaaacataattaggaattatgctgctgtttctgaaacattttcatgtttgtatgaaatatataagctaactatctagtccaagggcatggatgaaaatgtaaatgacacatggtatagkcatgaggcagatttacttgggaatcttacaggcaggagatcggaggaacgtatgtagttacttacattctcatcatctcacagtgctatgcacaagactcaggcatgtggcagtactccaacagagacactctctatttcctgccactttgccttttgtacatttccagggaagttggtagaggacaagtgaaaacccaaaccatcttgtaataaaggaatctttcattactagggagtggctctttatgtttccatgttctttgttcagagttgtattttcagaaattaacatctatattttcagttttttatctagaaaaataattttacatgcatagtttaataaaaaacataaaagatataattaattgataaattttcttagttgaaaacagcaaaatccacaacagctggtt

SEQ ID NO: 655851 - DNA, 572 bp, Homo sapiens
aagcagtattaattcctattatttgaagccataattaaacataattaggaattatgctgctgtttctgaaacattttcatgtttgtatgaaatatataagctaactatctagtccaagggcatggatgaaaatgtaaatgacacatggtataggcatgaggcagatttacttgggaatcttacaggcaggagatcggaggaacgtatgtagttacttacattctcatcatctcacagtgctatgcacaagactcaggcatgtggcagtactccaacagagacactctctatttcctgccactttgccttttgtacatttccagggaagttggtagaggacaagtgaraacccaaaccatcttgtaataaaggaatctttcattactagggagtggctctttatgtttccatgttctttgttcagagttgtattttcagaaattaacatctatattttcagttttttatctagaaaaataattttacatgcatagtttaataaaaaacataaaagatataattaattgataaattttcttagttgaaaacagcaaaatccacaacagctggtt

SEQ ID NO: 655852 - DNA, 603 bp, Homo sapiens
aatctatcagctgaggagaaacaccatggaagctactcctcaactatgaagttccaccaacatttttcatgattctttgcatgtttcatgatgttcaatcttcaaggatgtcctcaagaccaatttaaataaatgaaattaactgtagcatattccagaccgactaagggtcactgctgttttaaaatatctctactgttgaaaagggaattgaggggaaaagattcagaatgttgaaatctaatgtcaataataacaaaaaaggaaattcagctaagatagctccctgtctggyaaattaataaacttcttatatctgctacccaggatatatcctagtcagtcatacccagctaagtctcatcaggtatttatgaccacatagataatacattcatggaagacattatcttcgacatcatgaggaattacccaataatacatttaaactgtctttccagatcggttatggaattttatatgctctatgtcttcattcctccaatagttagctcagtatcatgtatcctggaaaataatactgatatgaataattttctcaggtaagacaagaaatctttgttgttgctatgtccctgagtc

SEQ ID NO: 655853 - DNA, 659 bp, Homo sapiens
ggccccaaccctgtgcttccagcttaattggcctggaagggggttagtgcactgatgagctttttaatatctccaggtgattcaaatgtgcacccaggatctagaaccactgtttaagagcaaacaaatatggacaaccactcattttctagaaatgggcctcaatgcccaggrttggaggtaagctggaggtaatgcccagaatccttccaggctgcccagtttttgatatagcaggggcatctggctgaatatggctctcaatcttttaattaattaatttcagtttatattttgtttaaaatatttttcaattggttgagaaatttagaaactgggagatttcacaaaaaagtccagatttcagaattccctaagtatatcatagtatctggtaatacttggctggactgagctggggacagggttgtcctttccagttagccacatcctcaccgccttcccggcattcccgtcactggcctctgacgccacaggagtttgcagccagcacatttccttcattactgccccatgatgtcctctatcacaagtacacaaaaattgtgtactggtcttagttgcttttccagattgcaaacaccttaacgcagcgatttttaacctgagagtaattctgtccccccaggatatttggc

SEQ ID NO: 655854 - DNA, 610 bp, Homo sapiens
ctcagtgtctgactgaaagtagtgtaatagtattcatagctgtgacagggaacattttaggagtaaagaaagtcaactctttttattttatttatttattttttttttttgagatggagtctcactctgtcacccaggctggagtgcaatggcaccaatctcagctcactgcaaactcctcctcccgggttcatgccattctcctgcctcagcctcccgagtagctgggactacaggcrcccgccaccacgccgggctaattttttgtatttttagtagagacggggtttcatcgtgttagccaggatggtctcgatctcctgacctcgtgatccacccgcctcggcctcccaaagtgctgggattacaggcgtgagccactgcgcctggccatcaactctatttttataaataactggacactagggcaaagagaggcagcccaaaaagccccataaccagctggcagagaccagcttgagagtcaagaggagaacactgaaggttggactagggatgcaaaagaatacaggcactaggaactaggaccgcctgtactcaccaccagtcacaggatttagggcagagatattgaaaagtaaccaccatc

SEQ ID NO: 655855 - DNA, 610 bp, Homo sapiens
ctcagtgtctgactgaaagtagtgtaatagtattcatagctgtgacagggaacattttaggagtaaagaaagtcaactctttttattttatttatttattttttttttttgagatggagtctcactctgtcacccaggctggagtgcaatggcaccaatctcagctcactgcaaactcctcctcccgggttcatgccattctcctgcctcagcctcccgagtagctgggactacaggcgcccgccaccacgccgggctaattttttgtatttttagtagagacggggtttcatcgtgttagccaggatggtctcgatctcctgacctcgtgatccacccgcctcggcctcccaaagtgctgggattacaggcgtgagccactgcgcctggccatcaactctatttttataaataactggacactagggcaaagagaggcagcccaaaaagccccataaccagctggcagagaccagcttgagagtcaagaggagaacactgaaggttggactagggatgcaaragaatacaggcactaggaactaggaccgcctgtactcaccaccagtcacaggatttagggcagagatattgaaaagtaaccaccatc

SEQ ID NO: 655856 - DNA, 610 bp, Homo sapiens
ctcagtgtctgactgaaagtagtgtaatagtattcatagctgtgacagggaacattttaggagtaaagaaagtcaactctttttattttatttatttattttttttttttgagatggagtctcactctgtcacccaggctggagtgcaatggcaccaatctcagctcactgcaaactcctcctcccgggttcatgccattctcctgcctcagcctcccgagtagctgggactacaggcgcccgccaccacgccgggctaattttttgtatttttagtagagacggggtttcatcgtgttagccaggatggtctcgatctcctgacctcgtgatccacccgcctcggcctcccaaagtgctgggattacaggcgtgagccactgcgcctggccatcaactctatttttataaataactggacactagggcaaagagaggcagcccaaaaagccccataaccagctggcagagaccagcttgagagtcaagaggagaacactgaaggttggactagggatgcaaaagaatacaggcactaggaactaggaccgcctgtactcaccaccagtcacaggatttagggcagagataytgaaaagtaaccaccatc

SEQ ID NO: 655857 - DNA, 540 bp, Homo sapiens
acaatatgtgccaagtactgggtaatagtcttttacaatctactccaaggacacacagctgaaaaacaaaacaagaacaaaaccccggtccaactgacctcaaaggccatgagttaccctttttatgcctttctccttgagtgggaggtgaggtcacaccatgaggtccttctacatcttgatgggaccatattgtccaaccactataagtgacattaatgattatgtaytttttttactaaattgagatctattgtggtgtttatgctcttgaaaaagaacatttcaaagaatcaaactactccttaactttaaaaaaaaaaaaaaaaaaaaaaaaaaaaaagtagagaatcgcagttgttacggaacatggactcaccccggggagctgggaatagctcataacaaactgcatcatagcacaccactaattaagaatgcttaaatggcagctagtgcctcagagggccgccacaggctagaaccatgccgttccattaagcctggaaataagtactttgtcattaacctgacgtataa

SEQ ID NO: 655858 - DNA, 605 bp, Homo sapiens
tattttttgtaagcatggctatgacaccattatcactcctaagatactgacagtagtttcctaatattgaacaccttatcaatgttcaagttgccctgattcagattctctctctttctccccctctcaacactttatttgaatcatgattcaaacaaggatgttcacattgcattggttgataggtacacatatgtggtttttggatggtgggggattaagtctctcttaatctatacatctccctccctccccacatctgtccttttaacttatttgttattgggtcacttgttctgtagagtctcccagtttggattgtgctggttgcatctccattatgtaaacatgttcctctgaaccaatacttaaatttagagtcttgttgagatacaggtgattttttttggacaagtttagttcatagatggtgtgtgtttttactattgatgatcacagtgyacattcattatttcattaggggtttgtaaagtggtgatattctaattctatcattccatcctcatttattagagttcttctataaagaaaaacatttatcagcaactatgtggtgttctgaagtcacacttgctttttaaata

SEQ ID NO: 655859 - DNA, 540 bp, Homo sapiens
tgagtagttctgaagatccatttcttagcaaaactggtaaaaattattttttataaaaataaaaattaaaagccctggaaatgatcctaaggtcatacagcaaatgaagaaatatttattcaagaaaacttactaaacctcagtaagaacagtggcaatctataatatttgtgccaagacccaccccctccctctcccctcctagttcaaggagatggaaaacccaacccagagaagtgcagccaagaacacgaggtttgctcctcacccagttcctcagaggattatcgtctctggaggggcaggacatccccatttcccttgcagtccttagctacctattgctgaggctaagttctaggtgagtgaggccgagaaatgaaggcttctttcttccactyagcccccacttgtgggacagaggttctgccttgggtctggcagtgctgaaaattatccagccccagtcatccttgtctcagctggaaaggtagaggcttcacactcagagaagaaggccaagaagacctaaggccactg

SEQ ID NO: 655860 - DNA, 461 bp, Homo sapiens
agctgtatgatgatggggactgtgtatctggtcccctgctatgcccccagggtctgatgctacgtgagtacacagtcaacattatgaagtcatcacagccaactggaaggttgatatcattcctattttacagatgtggagactaaggcttgcccacagtcacagattaaataagtggtagagccaagacttcaacccagatctgtctgatccccaaacctgagagttttctattctatgaagctgcctgaggaaggtggctctttcacattatcctcacacaaaaggagagcccaggtgtaggcacagactcatggtggtctcaggactcatctggtaccctggttgtagaaagtatcarggtattcagattcagtggtggtggggagagtatggcttcacaaacactgtgcctttagcccattgacttttattgccagtatgttcttttccagattggg

SEQ ID NO: 655861 - DNA, 603 bp, Homo sapiens
aatttaattaaaatggatcttattaatatttcaagtaatgtctgggcttgattatgcactacaaaagaaacaactgtattgaggagaaaaatcaatagcccttgactagggctctgggtatgctagaaaaacacagatctcttgtgaattattgaggtccagctttagggttgggggcgagtaccaatattcatttggaggtaaattgagttatttttaaaatggcagaaaaggaaggagaaaaatcagctcaaattttccattataatgaaagtacaggaaacaagcctttctatattcattttaggcctaaataactctgcagagaataagggttttgcaatgtcagttgcacacacaacttcctgtgtgaatgctaagccattacaggtgtcctaaggcctccagtgaaacctattatcaagagattcctctggtctcctcgaagtcatccccagcgccccccatccgccgcccacacattattgcttctctcctccaagtgtcttgattaaggaccctctctcttctccgcactcccgaggttaaagtgcccccgttcccttggtgtagctrgttacaagctttcccgttagggaagac

SEQ ID NO: 655862 - DNA, 582 bp, Homo sapiens
cctgtgtggatccgtcttccatggaccagaatattaataaaccaaactcatagaaatcagagtatcagtttgctaagatgtaaaacaaagattggctcgaacattaaaggctgaagcagaaccactactctacacatctctaggggccaccaaggactgaagactttttttcaactctatayttaaagtgttaagagttgtgatttactctcttccatgaaagatgattaacattgtcctccctcatttccttgacttttactgtactgtttttatattatcaatattttaatagttaacttctgtaaatataacccctatggtttttaaaccatacttccacacttactacatttgctgtaccaccagtctctgaaatataggttcttcttttctgaatttattttgattaatcccttaggaggctggatttcatcactactggtattgtcaagaggcaatacagctatgtatggttgtacaggctgcacacagtgcaatttgaccatttgtagagaatatgttccctataatgcgaaagcagatggtcatcaagtgtcttgattcactgcggaagtgcta

SEQ ID NO: 655863 - DNA, 582 bp, Homo sapiens
cctgtgtggatccgtcttccatggaccagaatattaataaaccaaactcatagaaatcagagtatcagtttgctaagatgtaaaacaaagattggctcgaacattaaaggctgaagcagaaccactactctacacatctctaggggccaccaaggactgaagactttttttcaactctatacttaaagtgttaagagttgtgatttactctcttccatgaaagatgattaacattgtcctccctcatttccttgacttttactgtactgtttttatattatcaatattttaatagttaacttctgtaaatataacccctatggtttttawaccatacttccacacttactacatttgctgtaccaccagtctctgaaatataggttcttcttttctgaatttattttgattaatcccttaggaggctggatttcatcactactggtattgtcaagaggcaatacagctatgtatggttgtacaggctgcacacagtgcaatttgaccatttgtagagaatatgttccctataatgcgaaagcagatggtcatcaagtgtcttgattcactgcggaagtgcta

SEQ ID NO: 655864 - DNA, 549 bp, Homo sapiens
aataataatgacattgttaagttttagtatggaatactttgagcccagtgcccatacttctccatgatactctggaatttaaaggtgaatattgaaggctatttgcgagaaggtagcaactgtttatcaggaaacaaacagcttatttagaaaaaaaaaaaaaacattaaacccataatatgatttcttttttgacagctgccatttcataatattctttacaaataacttactcatctacttatttcatttttttgtctttcttgccaccaccaggtacatgaaagagaaagaaatatagaattccaatactgatgcaagggagctcatttttcattttgtcaaggggtttcctccttcccacagccatgatagtatttcctgatgattgttcattgctataaattgaaaaagaacagcttccaagtttatcaataatccattaagggtgttccaacagaagttgaattaaagttgagtccttcccctrtgcaaaagaaagatagattgcccttagaagcttgagtatagggaatggaagaaacaaaa

SEQ ID NO: 655865 - DNA, 629 bp, Homo sapiens
gagcttattctgtactataggggttcagtggtgaattaaacagacaagcatccccctcctcaaaaacgcaacattctagcaagtgcaaaggcaggtgcaaagttcagtggtgaattaaacagacaagcatccccctctgcaaaaacccaacattctagcaggtgcaaagacagggcaaaaacaaaaagtcaattggcagaatttcttcgayggtgataagtgacctgtggaaaataaagcagagaacggagaggggaggaggcttgtaggaagtgggggtgatgaaatggggagtgttgagtgcctagaaattttcaggctcctgtcaagtattgtacactactcatctcttagctcttattattactcttttatttagttttctctattctttgattatgaaaatgagagcaatgaatgttaattaacttgattatggcaatcattttacagtgtatacacatgtcaaaatgattcataccttgataaatctggaaaaagaagaacaagcagttaacttccaattacaagtcaatataactagggcccggtagcctgaggatttaaacttacatccttccaatttctaaccctatgtgatctcttgcaaaaaaaaaaaaaaaagaatt

SEQ ID NO: 655866 - DNA, 629 bp, Homo sapiens
gagcttattctgtactataggggttcagtggtgaattaaacagacaagcatccccctcctcaaaaacgcaacattctagcaagtgcaaaggcaggtgcaaagttcagtggtgaattaaacagacaagcatccccctctgcaaaaacccaacattctagcaggtgcaaagacagggcaaaaacaaaaagtcaattggcagaatttcttcgatggtgataagtgacctgtggaaaataaagcagagaacggagaggggaggaggcttgtaggaagtgggggtgatgaaatggggagtgttgagtgcctagaaattttcaggctcctgtcaagtattgtacactactcatctcttagctcttattattactcttttatttagttttckctattctttgattatgaaaatgagagcaatgaatgttaattaacttgattatggcaatcattttacagtgtatacacatgtcaaaatgattcataccttgataaatctggaaaaagaagaacaagcagttaacttccaattacaagtcaatataactagggcccggtagcctgaggatttaaacttacatccttccaatttctaaccctatgtgatctcttgcaaaaaaaaaaaaaaaagaatt

SEQ ID NO: 655867 - DNA, 616 bp, Homo sapiens
tgacttcacctgtaatctgaatgttgaggagaccccaatctacatcttagggctccaatcactcttctcaacttcagacccatgtatctccatgccagtaggtcaagttctcaagttgaaagtatctaaactctttttgttgttgttgttgttgtcattgttgagactgagtctcactctgtcgcccaggctggagtacggtggtgcaatttcggctcactgcaacctcctcctcccaggttcaagygattctcctgcctcatcctcccgagtgctgggactacaggtgcctgctgcctcgcccagctaattttctgtatttttggtagacatggggtttcactgtgttagcccggatggtctgcatctcctgacctcgtgatccgcccgcctcggcctctcaaagtgctgggattacaggcgtgagccatataaccttgttaatgtgttctgattcaagatgtacatttttatgttcaaaattaaattataatccccaaatgagtgtcttttactaggcttgaatttatcccagcattcaataatatatatgcatataacatatcccctgcaaattattttaaaataaaatggttaaattttaatagctatttat

SEQ ID NO: 655868 - DNA, 535 bp, Homo sapiens
tttttgtggaatctgcaagtggatatttggctagttttgaggatttcgttggaagcgggaattcatacaaattgcagactgcagcgttctgagaaacatctttgtgatgtttgtattcaggacacagagttgaacattccctatcatagagcaggttkgaatcactccttttgtagtatctggaagtggacatttggagcgctttcaggcctatgttggaaaaggaaatatcttcccataacaactagacagaagcattctcagaaacttatttgagatgtgtgtactcaactaagagaattgaaccaccgttttgaaggagcagttttgaaacactctttttctggaatctgcaagtggatatttggctagctttggggatttcgctggaagcgggaatacatataaaaagcacacagcagcgttctgagaaactgctttctgatgtttgcattcaagtcaaaagttgaacactccctttcatagagcagtcctgaaacactccttttttagtatctggacctggacttttgga

SEQ ID NO: 655869 - DNA, 546 bp, Homo sapiens
tgtgatgtgtgccctctactgacagagttgaacctttcttttcatagagcagttttgaaacactctttttgtagaatctgcaagaggatatttgcatagctttgaggatttcgtgggaaacgggattgtcttcaggtaaaatctagacagaagcattctcagaaacttctttgggatgtttgcattcaagtcacagagtagaacattccctttggtagagcaggtttcaaacactctttttgtagtatctggaagtggacatttggagcgctttcaggccyatgttggaaagggaaatatcttcccgtaacaactaggcagaagcattctcagaaacttatttgagatgtgtgtactcaactaagagaattgaaccaccgttttgaaggagcagttttgaaacactctttttctggaatctgcaagagtatatttgcctagccttgaggatttcgttggaaacgggattgtcttcagatcaaatctagacagaagcattctcagaaacttctttgggatgtttgcattcaagtcacagagtagaac

SEQ ID NO: 655870 - DNA, 543 bp, Homo sapiens
tgcaagagtatatttgcctagccttgaggatttcgttggaaacgggattgtcttcagatcaaatctagacagaagcattctcagaaacttctttgggatgtttgcattcaagtcacagagtagaacattccctttggtagagcaggtttgaaacactctttttttagtatatggaagtggacatttggagcgctttcaggcctacgttggaaaaggaaatatcttcccataacaactagacagaagcattctcagaaactagtttctgatgtgtgtcctcaactaacacagttgwacatttctttagacagaacagttttgaaacactctttttgtggaatctgcaagtggatatttggctagatttgaggatttcgttggaaacgggattacatataaaaagcagtcagcagcattctcagaaagttctttgtgatgattgcattcaagtcacagaattgaacattccctttcacagagcaggtttgaaacactctttttgtagtgtgtgtaagtggacatttggagcactttccggcctaa

SEQ ID NO: 655871 - DNA, 506 bp, Homo sapiens
gctttcaggcctacgttggaaaaggaaatatcttcccataacaactagacagaagcattctcagaaactagtttctgatgtgtgtcctcaactaacacagttgaacatttctttagacagaacagttttgaaacwctctttttgtggaatctgcaagtggatatttggctagatttgaggatttcgttggaaacgggattacatataaaaagcagtcagcagcattctcagaaagttctttgtgatgattgcattcaagtcacagaattgaacattccctttcacagagcaggtttgaaacactctttttgtagtgtgtgtaagtggacatttggagcactttccggcctaaggtgaaaaaggaaatatcttcccataaaaactagacagaagcattctcagaaacttactcgtgatgtgtgtcctcaactaaaggagtagaacctttcttttcatagagaagttttgaaacgctctttttgtggaatctgcaagtggatatttgg

SEQ ID NO: 655872 - DNA, 506 bp, Homo sapiens
gctttcaggcctacgttggaaaaggaaatatcttcccataacaactagacagaagcattctcagaaactagtttctgatgtgtgtcctcaactaacacagttgaacatttctttagacagaacagttttgaaacactctttttgtggaatctgcaagtggmtatttggctagatttgaggatttcgttggaaacgggattacatataaaaagcagtcagcagcattctcagaaagttctttgtgatgattgcattcaagtcacagaattgaacattccctttcacagagcaggtttgaaacactctttttgtagtgtgtgtaagtggacatttggagcactttccggcctaaggtgaaaaaggaaatatcttcccataaaaactagacagaagcattctcagaaacttactcgtgatgtgtgtcctcaactaaaggagtagaacctttcttttcatagagaagttttgaaacgctctttttgtggaatctgcaagtggatatttgg

SEQ ID NO: 655873 - DNA, 543 bp, Homo sapiens
tgcaagagtatatttgcctagccttgaggatttcgttggaaacgggattgtcttcagatcaaatctagacagaagcattctcagaaacttctttgggatgtttgcattcaagtcacagagtagaacattccctttggtagagcaggtttgaaacactctttttttagtatatggaagtggacatttggagcgctttcaggcctacgttggaaaaggaaatatcttcccataacaactagacagaagcattctcagaaactagtttctgatgtgtgtcctcaactaacacagttgaacatttctttagacagaacagttttgaaacactctttttgtggaatctgcaagtggatrtttggctagatttgaggatttcgttggaaacgggattacatataaaaagcagtcagcagcattctcagaaagttctttgtgatgattgcattcaagtcacagaattgaacattccctttcacagagcaggtttgaaacactctttttgtagtgtgtgtaagtggacatttggagcactttccggcctaa

SEQ ID NO: 655874 - DNA, 543 bp, Homo sapiens
tgcaagagtatatttgcctagccttgaggatttcgttggaaacgggattgtcttcagatcaaatctagacagaagcattctcagaaacttctttgggatgtttgcattcaagtcacagagtagaacattccctttggtagagcaggtttgaaacactctttttttagtatatggaagtggacatttggagcgctttcaggcctacgttggaaaaggaaatatcttcccataacaactagacagaagcattctcagaaactagtttctgatgtgtgtcctcaactaacacagttgaacatttctttagacagaacagttttgaaacactctttttgtggaatctgcaagtggatattkggctagatttgaggatttcgttggaaacgggattacatataaaaagcagtcagcagcattctcagaaagttctttgtgatgattgcattcaagtcacagaattgaacattccctttcacagagcaggtttgaaacactctttttgtagtgtgtgtaagtggacatttggagcactttccggcctaa

SEQ ID NO: 655875 - DNA, 625 bp, Homo sapiens
aattgaacattccctttcacagagcaggtttgaaacactctttttgtagtgtgtgtaagtggacatttggagcactttccggcctaaggtgaaaaaggaaatatcttcccataaaaactagacagaagcattctcagaaacttactcgtgatgtgtgtcctcaactaaaggagtagaacctttcttttcatagagaagttttgaaacgctctttttgtggaatctgcaagtggatatttggctagtttggaggatttcgttggaagcgggaattcatacaaattgcagactgcagcgttctgagaaacatctttgtgatgtttgtattcaggacacagagttgaacattccctatcatagagcaggtttgaatcactccttttgtagtatctggaagtggacatttggagcgctttcaggcctatgttggaaaaggaaatatcttcccataacaactagacagaagcattctcagaaacttatttgagatgtgtgtactcaactaagagaattgaaccaccgttttgaaggagcagttttgaaacwctctttttctggaatctgcaagtggatatttggctagctttggggatttcgctggaagcgggaatacatataaaaagca

SEQ ID NO: 655876 - DNA, 513 bp, Homo sapiens
atttgtggatcatatgatagttacatacttaattttttgaggaacctccatactgttttccataatggctctactagtttacattcccaagagctttcctttctccacattcttgccaatatttgttatttttttgtctttttggtaatagttattctaactaaggtgaaataatgtctcatttgatgtgtgctttcctgatgtttgtgatgatgagcatgtttttaacccatttatgcctgaggttgcaattgtttgaatttttgcaatcagaccttggtgatgaccttaagcagtgggatataaataactcccacacacttagcattccaataatggcacactagtcataaatgtgacacttattggctawttgcatatcttctgttgaaaaatatctattcagatctttcacccagttttcaacaggattattaggatttttttgctattgagttatggtccttatacattctaaacatgaatcatttgtcagatacatagtttgcaaac

SEQ ID NO: 655877 - DNA, 637 bp, Homo sapiens
gtacctatatagacacatacatatgtctgtatgtacctatatagacacatacatatgtctgtatgtacctatatagacacatacatatgtctgtatgtacctatatagacacaaacatatgtctgtatgtacctatatagacacatacatatgtctgtatgtacctatatagacacatacatatgtctgtatgtacctatatagacacatacatatgtctgtatgtacctatatagacacatacatatgtatatatgtgtatatacacatatactgatatcctgtacatatgtacatgtgtacatatatacatactgtacatatgtaatttttgatccacaaaattaagcatattaaaatacgtattaaatacatatattacatatactgtagacatactgtacatatgtacatatacatatgtatmcatgtacacactatatatagacacatttatatttatatatacacactaacatatattcaaggggcatagggtatatatgtccatatatggacatattgtacatatgtccatatatacataatatagacatactgtacatacatgtacacatacaggcatatactgtacacatgcacatatatagacaaatactctacatatgcacatata

SEQ ID NO: 655878 - DNA, 637 bp, Homo sapiens
gtacctatatagacacatacatatgtctgtatgtacctatatagacacatacatatgtctgtatgtacctatatagacacatacatatgtctgtatgtacctatatagacacaaacatatgtctgtatgtacctatatagacacatacatatgtctgtatgtacctatatagacacatacatatgtctgtatgtacctatatagacacatacatatgtctgtatgtacctatatagacacatacatatgtatatatgtgtatatacacatatactgatatcctgtacatatgtacatgtgtacatatatacatactgtacatatgtaatttttgatccacaaaattaagcatattaaaatacgtattaaatacatatattacatatactgtagacatactgtacatatgtacatatacatatgtatccatgtacacactatatatagacacatttatatttatatatacacactaacatatattcaaggggcatagggtatatatgtmcatatatggacatattgtacatatgtccatatatacataatatagacatactgtacatacatgtacacatacaggcatatactgtacacatgcacatatatagacaaatactctacatatgcacatata

SEQ ID NO: 655879 - DNA, 522 bp, Homo sapiens
tactattattaattataagaataataatcaatatgcccatcaaaaggtgatattatttaacttctggtaccctgtattaatgcttgaactttatacaaatgacttatgtgggtttttttgtgtgtgtctggcttcatttccataatgttatatggttaatctacattgttgtgttcattttcactgagcctaggatttcacggcacagacataccacaatttattcattctattgatgatggacattgagtggcttctaatatttggctattactaataataccgtgaaaaacattcttctatgtgtcttttgatgaacatatacacattttgttcaagttcatgcttakaattggtattgcaggcatgcaggttaagagaacgctctacttcagtagatactgacacttggtaaggcaatggtcctgggattcttgagggatgaaaggtatatctcacattcactcaaatgcaagagctaaacacaggtagaaagtgaagatggcattttgcttcacagca

SEQ ID NO: 655880 - DNA, 480 bp, Homo sapiens
attttaatcaacttataataaccagtaaaagtgtaattacggatgggcgtggtggctcatgcctgtaatcccaacactttgggaatccgagctgggtgtatcacctgaggtcaggaactctagcacagcctgaccaacatggtgaaaccccagctctactgaaaatacaaaaattagccaggcgtggkggtgcacacctgtaatcctagctactcgggaggctgaggcaggagaatcagttgaacccaggagacagaggttgcagtgagctgaggtcctgccactgcactccagcctgggcaacagagtgagactccatctcaaaaaaaaagaaagtgtaattacgtgaaaaggcccatatttttacatgtttaaattgttaatgtttttatttgtaaagtgctgaaggtgagactcacttctgtatcttctttctagtagtagaataaggtaatactgttctggattttgaatttaggg

SEQ ID NO: 655881 - DNA, 448 bp, Homo sapiens
tgaggcaggagaactgcttgaacccgggaggcagaggttgcagtgagctgagaccatgccactgcactccagcctgggctacagactgagactccatcaaaaaaaaaatctatctatatatatttgtatgtatgtgtgtgtgtgtgtgtatatatatatatatatatatatatatatctcaataaagctgtttaagtataaaagattttactgttcaagaagctgggtgtggtggctcatgcctgtaatccctggacttcggaaggtagaggcaggtggatcacttgaggtcaggagtttgagaccagcctggccaaaacagtgaaaccctgtctctactaaaaatacaaaaattatctgggcmtggtggtgggtgcctgtagtcccagctacttgggaggctgaggcaggagaatcgcttgaacctcagagacagaggttgcaggga

SEQ ID NO: 655882 - DNA, 562 bp, Homo sapiens
tgcatgtgatctcgctcatcatctagctttgatcatggagatgaggactatgcccctaggttatggcagaacaaaagatagaagagactgagttctcaaatgacagatctatcccaccaaactggaccgttacacagacttagttatgtgagaaaggtatgtgaacttaaattatttctgccagagaattttaggttctcattgttacagcagcttggtgttcaccccaatcagtgtagtaagtrtagttctagttcattcaacttaactgcccatgagtacccagatttacttgtttccttatttacaatgtttcccatttatagctcttatggaaaatgcagcattgtccatttttccagacatgtctttatacacctatgagagtttttctaaagctgtgatgaacaatacagtatcctttagccacaggtatgatttaaattttaattattgaaaatataaaaaagcattcatttgttacactaaccacacttcaggtactcataagctctattagtcaccttctgaactgtgactaccctattggacagtactaata

SEQ ID NO: 655883 - DNA, 562 bp, Homo sapiens
tgcatgtgatctcgctcatcatctagctttgatcatggagatgaggactatgcccctaggttatggcagaacaaaagatagaagagactgagttctcaaatgacagatctatcccaccaaactggaccgttacacagacttagttatgtgagaaaggtatgtgaacttaaattatttctgccagagaattttaggttctcattgttacagcagcttggtgttcaccccaatcagtgtagtaagtatagttctagttcattcaacttaactgcccatgagtacccagatttayttgtttccttatttacaatgtttcccatttatagctcttatggaaaatgcagcattgtccatttttccagacatgtctttatacacctatgagagtttttctaaagctgtgatgaacaatacagtatcctttagccacaggtatgatttaaattttaattattgaaaatataaaaaagcattcatttgttacactaaccacacttcaggtactcataagctctattagtcaccttctgaactgtgactaccctattggacagtactaata

SEQ ID NO: 655884 - DNA, 589 bp, Homo sapiens
tcttgaacactgtatccctcttcccctctccgacttcatttgctgccaccctccttcagcaacaggcctttgagagaacacattagacactcagtccttcctgagttttttcttctacaacaactgctctgtctcaccatcatccttggagtttcatgtttccaactgtggcacctacaaaatctaattgcttggcaccacatttctgacatcacagtctgttgccatgggaaagagccaccgattcagtgtgatgacttctctgccagaaggagggaatgcagtgagagggagacaacatttgtttaagcataaatatctttgatatttagcaaagcggcaagagaccctatggaagacaacagaggaagcaaaaattccaatttataggatgctttgctttcaggattctcctttagtgaaaatcagrtgttcagcttccttcagggcttcccattgtgcaagaatttcaaagtgattattcctttgactttagggttcattggaaataatatcagagtttgaaagcatgtggagttcaaaaagccgtatatcccttaaaatgctacatctgcttttccatgttgct

SEQ ID NO: 655885 - DNA, 522 bp, Homo sapiens
gaaggggcattccctggccctaaacttactaatgtcctcctgtggaaccattcctttagtaactattaataaaaaactgttaatatgtgccaggcattttataggtgctaagaatgtagatatgaacaaagcagacatggtctccacttttaaggaacttaatgcctaatggaaaaacttaagttataaataacttaaaattataaattgtgacaggtgctatgaaggaataacaggggaggccaactctagcttggctggaaagggtcacttaaccagccaggcaagggcaggggtacgagggactacctatgagaggaaaaagaagcatcaggggcaacccaggacttcaaggtgcttacaatctagtcagarcgacctaatgacatctgatgtttgtatagagttttaccacttacagattactttcattgcatcaatttatttaaggcagatatgacacacacatagagaagactaacaatactggtacttgatgactgagcacgtttcattggcaag

SEQ ID NO: 655886 - DNA, 598 bp, Homo sapiens
tacattttttattcattacattcatttggagtgttcaataatgtagatttataattattgttttatgcatttgtcttttaaattatgtgggaaataaaaagaggagttataaaccaaaatccagtatattggcttttatatttactttctagttaacttttctggagttccttaccttttcatattgctttgagttactgtctagtgcgctttcatttaagcctcaagatctaccttcatcatttcttaaagggcaactctgctagcaacaaaccctctcagattttggttttcagagaatgccttaatttttcttttctggatatagaattcttggttgataggggattttttttttcctttcagcattwaaaaaaagttatttctttcccttctgatctccctagcttctaataagaaattagctgttaattctactgaggatatattgtacatgatgagtcacttttctctttctgcttttaagattctctctttgtctttggcaatttgattatagtgtatcttagtgggaatctctttgcatttatccttctttgattcactgtgcttcttaaacatgtagatttttgtcttt

SEQ ID NO: 655887 - DNA, 479 bp, Homo sapiens
aactttgtgatgataaatacttaaactggtatcatagaaattaacacaaaattttgactgtcaggagtttttcatgtgctcaaaaaactggaaaaaaatatagtagcctaaagcaaaactgtcttacaaaataatataaataagtatatyggctaggctcaaaaaattctttcaattcttttgaataaacagcatgcttttcttttctactttaaatatgtcataactgtttttgacaattaatatttttcttctgtgcctgaattatgtaaactggatgtgtaaggtcctcaaggtccaggtaggcatttaggaagctacaaaaataatgaaataaatcaacaaagaaaccttaagtttctttaatcttcttggtttattttgaaaattacaaaaaataaattattttagcatcaattttgctattatgttattcatattttattttgctcaaaacaagtataaagttgcatgatttg

SEQ ID NO: 655888 - DNA, 562 bp, Homo sapiens
tggtgtacaagtgtctgttcaagtctctctttgctatcaattttttgggggtatatactcagaaatggaattgctggattatgtggtaattttatttttactttttaaggaaccactacactgttttccatagtgaccacaccattttacattttcacgagcaatgcacaaggattccaatttctctctctccctrccaagacttgctacttttaggggtttgttttgttgttgttgttatttgcttgtttgttttattgtagtcatcttaatgggcataaagtggtagctcattgtggttttaattggaatttccttaattattaatgatgagcaaacaaacgatgatttaatttgtttattggccaatttatatatcttctttgtagaaatgtcaattcaagtttttgcccatttttattttattttattttatttatttatttttttcaagacagagtcttgccatcttgcccaggctggtctcaaactcctgggctcaagtgaacctcctgccttggcctcccaacgtgctgggattacagatgtgagccactgcacc

SEQ ID NO: 655889 - DNA, 562 bp, Homo sapiens
tggtgtacaagtgtctgttcaagtctctctttgctatcaattttttgggggtatatactcagaaatggaattgctggattatgtggtaattttatttttactttttaaggaaccactacactgttttccatagtgaccacaccattttacattttcacgagcaatgcacaaggattccaatttctctctctccctgccaagacttgctacttttaggggtttgttttgttgttgttgttatttgcttgtttgttttattgtagtcatcttaatgggcataaagtggtagctcattgtggttttaattggaatttccttaattattaatgatgagcaaacaaaygatgatttaatttgtttattggccaatttatatatcttctttgtagaaatgtcaattcaagtttttgcccatttttattttattttattttatttatttatttttttcaagacagagtcttgccatcttgcccaggctggtctcaaactcctgggctcaagtgaacctcctgccttggcctcccaacgtgctgggattacagatgtgagccactgcacc

SEQ ID NO: 655890 - DNA, 562 bp, Homo sapiens
tggtgtacaagtgtctgttcaagtctctctttgctatcaattttttgggggtatatactcagaaatggaattgctggattatgtggtaattttatttttactttttaaggaaccactacactgttttccatagtgaccacaccattttacattttcacgagcaatgcacaaggattccaatttctctctctccctgccaagacttgctacttttaggggtttgttttgttgttgttgttatttgcttgtttgttttattgtagtcatcttaatgggcataaagtggtagctcattgtggttttaattggaatttccttaattattaatgatgagcaaacaaacgatgatttaatttgtttattggccaatttrtatatcttctttgtagaaatgtcaattcaagtttttgcccatttttattttattttattttatttatttatttttttcaagacagagtcttgccatcttgcccaggctggtctcaaactcctgggctcaagtgaacctcctgccttggcctcccaacgtgctgggattacagatgtgagccactgcacc

SEQ ID NO: 655891 - DNA, 524 bp, Homo sapiens
atcattctccttcttttatttagtgactggagaactatatctggctggtcatttacatttcttgttaaataaaaatgcaagaattgyactccagaatgagtcagtctataatgtttactgagtgaaaaatagctacagcttttaaaagtaggagtacaagaaaatagaatggaaataaaatgtatgcaacccttctaggcagctttcaatctcatagaaaaaatagagataaatactttttgctttatctaaactgcagaaattcacaactaagcatagtagttagtgacattatgaaattaatactatctggttctttatggttattggatcaactgaggctgtttggagtgtgatacggtttggctgtgtccccatccaaatctcaccttgaattgtaataatccccatatgtcaagggtggggccaggtggagataatcgaatcatggggacggtttccctcatactgttctcttggtagtgaataagtctcacgagatctgatggttttataaatgggag

SEQ ID NO: 655892 - DNA, 635 bp, Homo sapiens
tttacggattctgttacctattcagaaaatgctactttcctattgatgccattcacttttagatggagactctcatataattgggaggtttctatgatattcactttgggcaacacccactgcagacaggaacttgaaggtgtttcctaagtgttacctccacaagcagatgagtcaacttggcasgtcgctagctgtccctgtgggtcccctggtcatcaatagtatggtgccagctgagaagggattaaaattagatgtaaagtaaaaaatccaaatatttaagagtaaggagtgtgtgtaagagagagggagattgtgtctgaaaacatatgcctgtctttcatcatacctagagccacgtggtcttttttttaatcatctggcttatattttccatttttcattgcacaacaccaagagttggctacatagtcatgatgaagatgagcatacaaattccaagtgtcacaactggagagggaggcctcctaagttgttcatgggaatgaggatcagatcacctgactcgatacaggctttgggacatcttaggcatctaatctctctaatccactgaagagacacaataacgagccccagctatccctttccttttcatcaagaagactgca

SEQ ID NO: 655893 - DNA, 609 bp, Homo sapiens
tacttcctatgcctgtcccattagaacctgtctaatccctgccgccttttgtaccaaatcaaagcacagcacmgatgaaatgttaagtctttgcttccttgttttgctacaaaactgtcatgagttcctttagcaaaattttctgtttaagtattaattagccagagctggtgatttgggaaaataatcactgtaatgcaccacagttcctcgtcattgtctgaaaaatactatcattatcttctttgcatgcctgaggagtgaaaaatggcctggctgtctaattttagacatagttttagcttctttggattaaataattgatcagtagtaggaaagtacaagtgatttgtcttttttccatctcacttattttttttccaaactaaggtgtctcacttctctgaaaaagtgcatggtggagtgagggaggacacagagacctgggtatcaggctacctcggccctacctgagaactcacccctaggccttgacctcttcatcagtgagggaagtcaggggctaagatagataacctcttagcttctctccagcttgaaaaaaattagaatttgtttttcatttcttatatttggtatacaatttta

SEQ ID NO: 655894 - DNA, 609 bp, Homo sapiens
tacttcctatgcctgtcccattagaacctgtctaatccctgccgccttttgtaccaaatcaaagcacagcaccgatgaaatgttaagtctttgcttccttgttttgctacaaaactgtcatgagttcctttagcaaaattttctgtttaagtattaattagccagagctggtgatttgggaaaataatcactgtaatgcaccacagttcctcgtcattgtctgaaaaatactatcattatcttctttgcatgcctgaggagtgaaaaatggcctggctgtctaattttagacatagttttarcttctttggattaaataattgatcagtagtaggaaagtacaagtgatttgtcttttttccatctcacttattttttttccaaactaaggtgtctcacttctctgaaaaagtgcatggtggagtgagggaggacacagagacctgggtatcaggctacctcggccctacctgagaactcacccctaggccttgacctcttcatcagtgagggaagtcaggggctaagatagataacctcttagcttctctccagcttgaaaaaaattagaatttgtttttcatttcttatatttggtatacaatttta

SEQ ID NO: 655895 - DNA, 609 bp, Homo sapiens
tacttcctatgcctgtcccattagaacctgtctaatccctgccgccttttgtaccaaatcaaagcacagcaccgatgaaatgttaagtctttgcttccttgttttgctacaaaactgtcatgagttcctttagcaaaattttctgtttaagtattaattagccagagctggtgatttgggaaaataatcactgtaatgcaccacagttcctcgtcattgtctgaaaaatactatcattatcttctttgcatgcctgaggagtgaaaaatggcctggctgtctaattttagacatagttttagcttctttggattaartaattgatcagtagtaggaaagtacaagtgatttgtcttttttccatctcacttattttttttccaaactaaggtgtctcacttctctgaaaaagtgcatggtggagtgagggaggacacagagacctgggtatcaggctacctcggccctacctgagaactcacccctaggccttgacctcttcatcagtgagggaagtcaggggctaagatagataacctcttagcttctctccagcttgaaaaaaattagaatttgtttttcatttcttatatttggtatacaatttta

SEQ ID NO: 655896 - DNA, 514 bp, Homo sapiens
aagtttgttttgccaagcttgaggacatgtgcctgtgacacagcctcaggagatcctcacgacatgtgcccaaggtggtcagggcacagcttacttttatacattctagggagccatgagatagcaatcaatacatgtaagatgtacactggtcctggctaacatgatgaaaccccatctctactaaaaaaatataaaaaattagccgggtatggtggygggtgcctgtagtcctagctactggggaggctgaggcaggagaatggcgtgaacctggaaggcggagcttgcagtgagccaagatcaggggccactgcactccagcctgggcgacagaatgagactctgtctaataaataaataaataaaagacatacactggttctgtcctgaaaggcaggacaactgaagtaaggagaaggcttctaggtcacaggtagatgagagacaaatggttacatccttttgagtttctgatcagcttttcccaagggaggcaatcagatatgcattt

SEQ ID NO: 655897 - DNA, 576 bp, Homo sapiens
tatagactggctgaatggattttaaaaaaagcacaacccaactctatgctgcctacaagaaactttacctcacctgtaaagacgcacatagatggcaagaaaagaaatggaaaaaaaatattccatgtaaacagaaacaaaaagcaaacaggaatagctgtacttatgtaagataaaacaagagaatataataataatatctacatatatagaataaagaattgggtacacatatatacatatatatgtatgtagggtgagatgataaatagatgaaagaaagaaagaaagagaaagaaagagagaaagaaaaagaaagatttgggtgtctttgtgtgtttatacactgaacatcagatcacccagatgtataaaacaaatattatcagatttaaagggagagataactctaatacaatagatggacctataacgtatacaggacatttcatttaacaactgcagaatacacattctttttaccagcacayggtacattcttcagggtagaccatatgttaggccacaaaacaagtctcaatcagtttttaaaaatccaaattatatcaagtatct

SEQ ID NO: 655898 - DNA, 601 bp, Homo sapiens
accaatggattacattgtgtcagagatgtggacagttgatgttgtcctgactcagaacacgaagatttgctggtgccctgaccaggtgaaagaaacagtgtttggtgttttctgaatattagactagagaaaatcctttatcaaatcaacaagtatatgttagatgacaggttctggattgmtttgctccaggaaggatgacatatctggaactacaaactaatcactgaataagttgttaagtgtacaataaaccattgtacatatccatttgtcttctgcacttggcaaactatagagcaatatagacatgtagcttataatctctaaatttttgaactgtttggtagtggtttttaaatctgaaattaccccagggctgggctggcctgggccattgctttgagttgcaattttagtatggcagggtcacttcgcagtcttccattttgcattttgtaccataacagttggggcaccaatgtgagaattctagaaaattgatgggtatttccatgataacaacatacttagatactaggtaaataactttgggaaaggattagatttcttttgggtttaccatgaagaattaggtttc

SEQ ID NO: 655899 - DNA, 574 bp, Homo sapiens
gcaataataattagtccatctctttccaggcttgccgcttgcaacccatttataacattgtgggcagagtgagatttcctttttcttaggctatcttaaaaacatgctatggtctgcatctctctaaaattcatatgttgaaatcaaatcccctgtgcaaatagtatgaagaggtaggtcctttaggagatgatcaggtcacaagggcwgagtcctcatggatgggataagtgcctctataaaagaggcccaagggagtttgctttctctttccaccacatgatgacgtacctgtttgttatttataagccacccagtttatggttttttgttataacagctcaaacagactaagaaaaactacaaatctaactatgtgacttttcaactaaatctcttcagaggcatccttctttttcctcagaaagcgagattcctacatatggcttatgggatcctttagaactggctggctcttccagcctcactccttttcctctcctttcctgtcgtctacattctcactctattgagctattgttggtttctccattctgccatgctgaccccagtg

SEQ ID NO: 655900 - DNA, 525 bp, Homo sapiens
aagatttaatctgagaagtatgctgattgttgcatttggactcttttgtatgtcatgtatttcttatctcatgctgctctcagaatttttctttgtctttgatttttgatagtttaattgctatgtgtcatagtgaygtcttctttgggttgaatatgtttcaagatctcttttttcctgtaccaggatgttggcttctttctacaaataaggggggttttcatcaattatttctttaaatacattttctggccctttttttccttcttttgctttaattcctatatgcatagcttaggtctctcaatggcatcacataatccccataggctttcttagttcttttttttctttttgctcctctgattcaataatttcaaatattctgccttgagttcactaattctttttttcagcttgatccagcaggctgctgaagctttctattacatttttcagttcagtcattgtgttgttcatttctaggatttctatttgggatttaaaaaactatttgtatttctt

SEQ ID NO: 655901 - DNA, 698 bp, Homo sapiens
ttcaacttctgtgtttacatgccagaggaagttttaatatgtgtacgaggagatagttacagatatcttcattgaagtaatttttaatagtaaaaaattggaagcaatctaaatgtccatgaatgggagattagataaattttagataaataaatttgggtgacagagcaagactctgtctcaaaaaaaaaaaaacacaaaaaactgaaaccatggaatactatagagcagttaaaaccaatatactagatctatatgtattaacatagatacatttaaagaattttagatgacagatgcagttgccaactaatttacaccatatgaatatatttacaaaatactaaaaacagtgcaagaatatattacatggtttatgagaatatttccatatgtaatgaaagcataaaatgtggactggaaatgtatgcacmaaattcgtaatgagaattgccttcagaggtggtgaaagggaatgagactagaggagaatgaaaaagacttcaaatttgtccataacattctatttctttgatacaaaaaactgaagggaaatgataaaattatcatttgttttttactttggttggtgggtacagaaatgtgtatattggaccctttatacttttctaaatgtttaaaatgtttccaaataaaaaatgtgtttctataacagacaaaatcaaaattttgttaag

SEQ ID NO: 655902 - DNA, 562 bp, Homo sapiens
gtaaccatttttaaatacactcagatctttctgttcttgttaactaagacccaatctcaaaaagacccgattttaccagagcctaaccatcatgagttttacctaagccaaaccaacaatagaagtgggaaatacccagccattttgtttcaactaagagaggaagggagtgagctgggaagcacttgggaaggtcacagcacagwagcacaggcccaccaaaagactgatacttgatcataagtaaacaggctccctctaccccaataccttacaacattctatattctcctatatcataacagattactgttgaaaagaactgcaaggctcagactctattcaagaagaagtctctagggaaatttgaagacaacagtagagacaaaaacaaaagagaatactaaaggaaattttagcctctgacacctataactataacaaacaataaataaacagtctaactgctagccatataaacataaaatctcatactaacagttgatttaccttagtttcttttatccaatgcatcaggtacagctttcaaaaaaaaaaaatt

SEQ ID NO: 655903 - DNA, 556 bp, Homo sapiens
gaacacataagtctgtgctaattaaatttctcccaaaagcccctgatgagagcagtaactagaagatgcaaatgtaaaagcctgttaaaactcttcagggctttttctagtccttacaacagagctacatctggtgacagctggtagcagaggcctgaagaaggaagaaaacatttgtaaggaaagccacaagccactrctaacagagtggttatctaactccaggaactggtcaagcaattaacaagcatgttatgggctgtgtcctcctagaatacacatgttgaagccctaacctactatgggaggtggtggggttgcggggaaggcagtatttggagatgagtgcctttgggagaaattgatttagatgaggtaatgaaggtggggtctctatgatgggattaatgcccttaagagaggagacataagagagctctctatctctctctccatgtgtgtgcaccaagaaagaccatgtgggcacacattgagaaggcagctgtctgcaagccaggacaagagccctcatcaaaacccaaaccctgcagaactg

SEQ ID NO: 655904 - DNA, 621 bp, Homo sapiens
gaaacaggaagccgacagagcatcgcaatcgctttattatgatttccactgtgcccagcctcagggcatcagcttcttctggagcgctgtgaaggctgggccacgcagaggagcatgcagctgtagagacagggagacagggcttggggacgttcccctcagcttgctgtcaagttaccttctgcagaaaagcacatgggaagggcatgagggaccagagcgcattggattcccaagtgttrctcaagtgttctcagagtccctctcacaaacttgggtttggctgggggacagatcacaggccaacccatgatggcaggaggctaatcttgagggcctttgtgtcaccatggctatgaaaaggcctggctacttataacttgatgttcttaactgtgggttgtgcctacccagtgctatagaaactggaatgtgattgggcttcttagtcactggcccagaccagagctgaccccctttccatgctctgggtcactggggcatgtggcccagaggaaaaagctttcccttagtgctagccgaaattctgtaacctgtttattttctttccaaggttgccaaaaatagtggtagcagaaaagtaacagcagagaaaatgcc

SEQ ID NO: 655905 - DNA, 621 bp, Homo sapiens
gaaacaggaagccgacagagcatcgcaatcgctttattatgatttccactgtgcccagcctcagggcatcagcttcttctggagcgctgtgaaggctgggccacgcagaggagcatgcagctgtagagacagggagacagggcttggggacgttcccctcagcttgctgtcaagttaccttctgcagaaaagcacatgggaagggcatgagggaccagagcgcattggattcccaagtgttgctcaagtgttctcagagtccctctcacaaacttgggtttggctgggggacagatcacaggccaacccatgatggcaggaggctaatcttgagggcctttgtgtcaccatggctatgraaaggcctggctacttataacttgatgttcttaactgtgggttgtgcctacccagtgctatagaaactggaatgtgattgggcttcttagtcactggcccagaccagagctgaccccctttccatgctctgggtcactggggcatgtggcccagaggaaaaagctttcccttagtgctagccgaaattctgtaacctgtttattttctttccaaggttgccaaaaatagtggtagcagaaaagtaacagcagagaaaatgcc

SEQ ID NO: 655906 - DNA, 457 bp, Homo sapiens
gggttgtcataagaaagaaattggtatatgtatgtatggtatatatatattagaatagtacctaacattggaagttaaatatgtgttacctactattatcattcacttaaaattctagccctcattcttattttagcagtatcagtttgcccctcttatttattcattcgtcattccttctgtccatccttccttccaaatgtatttattcagtatctaatatgtgccaggcactgtgctgggctctgggatgcggtggtaagcaaaaatagaatccttgccttcatggagctcacagtctagtggggagaccaggcagaagtcasatgatcatgtgagatcatgtaagtgccctgtgaagcattccatgaagaattcatgagctggctgatggtgcaaaggagtttacaacataggaatttggcttaagcaggaagcagaggttcttcctcaagtg

SEQ ID NO: 655907 - DNA, 574 bp, Homo sapiens
aaaagttttatgtctttcaggctcttgcttttccttccctcttttagttccttcacctggtaccattggactctcccagccccaaagctgttattaggaaaccaccatcttacattgtaaagttgcactaagacttatctccaagcgtggaataaagaaacttagatgacagcatgtacactgttgagactcccaagcccaagtgccattgagctcagcttctgtctcagggacctccaactgcagataaacaggtacaattatggtactcacttcatagatctgttacaaggataaaaaagactttatacacacgaagtatacacaggacttagaatggtgcccagcatagagtaagcaattagcattagctgccactgtcttttatttttaccacttataaaaggaattgctattaattatcagaaattagaggaatagagatgagtaaagaaaacaagtaaaaccatgaccrttcctaacatccaaatataatccattgtcagtatgttggtatatttacccttagtgtacatatacatatatttaaacaaaagtagtgcagtactatata

SEQ ID NO: 655908 - DNA, 602 bp, Homo sapiens
ttttagaaagctcattaataatcctcccctgattcagcatataattagaagtaggtgtaaatatagctagccagcaatccaggagtgctactctgcctgtgggatacccctgctctgtctacggagcagcaattttgctgcaygctatcgctctaataaaatcgctttcttccactgttggctcactcttgaattttttcctgagtgaagccaagaaccctcccaagctgagccctgatatgggggtttgcctgcatcaaaatgtcgtgcaataagttgtaaactgctttgctgctcctagtgtgcaccttggactttcagcattggtaccacctaagagtttgttgaaaaagcagtattttgcactccacccttaccgattcagaacctacattttaccaagatctctaggtggttgagatatacataatataagtagctttgggataaagaatgagcctggactttttagtcccacagagaagatctcagataagttcacgacttttgactttagacaaatttccagacttctttaaatgtcatattcttcttttgtacaaagagtacagtaacatgcattaccaaagaggataaagaca

SEQ ID NO: 655909 - DNA, 576 bp, Homo sapiens
ttcttcctggtgctgaactttgccatgaacttggcttggtttctttctttctttccaaattttgagtaaatgggaaccattctaaataggcgagtcattgggtgagttgtcatatgcaaaggttaggcactttcctactctagcccttaggccttccctttgacttgatttaagctacatccacagtgtgtggggagaatttgcttctgagctgatgttagtgggtccaaaaagtgaagttgtaraaacagagaatgtaggtaggacgcatttttctttgccaagttgccttccacatgcatggaaggccatgttcagcttttacctctccaagtgaaaactgctgttccctgtctgcccactttctagttgtgcatattgcttcctcaagagaacgttcgagaccaggcatgatggctcatgcctgtaatcccagcactttaggcagctgaggcgggaagactgcttaagcaaaggagatcaagaccagtctgggcaacataatgagaccttgtctcgattaaaaaaaaaaaagagagagagagagagagaaagagagagagagaacattagaag

SEQ ID NO: 655910 - DNA, 616 bp, Homo sapiens
ttcacacttttctttcctcagtcttagcttataaagatctaattttccctcctttttgcatcatttttcatatcttgacacagggcatctctcatatttctgctcagatcaagggcagagctaggcagatcaaggtataataagttttagctaaatgtttatgccagttttgaaaatttacagcttgcatggaayacttgcagaggtcatagaaaaaaattatttttttcttacttaaattactttaatttagtctaacaaatcaaaagtcaaatgcaatgcaacctattctatggttcatagatttctaaaataatattgaaattgatcccagaggactagaaggtattgcattgttttgaagatgagcgataaaaataattgttcattcttaccaagcaaaatattatttatgggaagaacaatgagaaaccgggagattccacagccagatgggtggccttgtgtagaaaaaacacatctgattaaattttgtactttggtgtcaggtagacacagcaaatattgataactcattccataatggattccttgtctttttaggattcatatggtcagccttcttatgaaaatttaaaaacaaagtttgtttttt

SEQ ID NO: 655911 - DNA, 616 bp, Homo sapiens
ttcacacttttctttcctcagtcttagcttataaagatctaattttccctcctttttgcatcatttttcatatcttgacacagggcatctctcatatttctgctcagatcaagggcagagctaggcagatcaaggtataataagttttagctaaatgtttatgccagttttgaaaatttacagcttgcatggaacacttgcagaggtcatagaaaaaaattatttttttcttacttaaattactttaatttagtctaacaaatcaaaagtcaaatgcaatgcaacctattctatggttcatagatttctaaaataatattgaaattgatcccagaggactagaaggtattgcattgttttgaagatgagcgatraaaataattgttcattcttaccaagcaaaatattatttatgggaagaacaatgagaaaccgggagattccacagccagatgggtggccttgtgtagaaaaaacacatctgattaaattttgtactttggtgtcaggtagacacagcaaatattgataactcattccataatggattccttgtctttttaggattcatatggtcagccttcttatgaaaatttaaaaacaaagtttgtttttt

SEQ ID NO: 655912 - DNA, 603 bp, Homo sapiens
caacttagatgaaccttgaggacattatacaaagtgaaataagctagtcataaaaaagacaaatattgcaggattctacttgtatgaggtaagtagaatggtggtcgaaggggttaggggaggggaaatggggagttgttcaatggatatagtgtttctgtttttcgagacaaaaaagttctagagatctgttgtacaagaatgtaagtatagttaacattactggcctgtacagttaaaaccagttaagatagtaagttttatggtatgtatgttttcaccacaattttctgaaaaggtggtgaattttactgtatatamattatattccaacaaacctttttgaaaaaaatgaccaaaattcttgattttattttagtttcacactttataattcttcaaatcaaaaggtggagtttatgtttccgctcctagatgcagtctgagtgatatgaattgatttggccaacagaatgtacagtagtaatgatatgctaatcctaagcctaggcctcaagagaacttgtctatttccactctattggatttctgagcctgccacgttaagaagccagactagcttgctggaaggtgagagagtta

SEQ ID NO: 655913 - DNA, 603 bp, Homo sapiens
caacttagatgaaccttgaggacattatacaaagtgaaataagctagtcataaaaaagacaaatattgcaggattctacttgtatgaggtaagtagaatggtggtcgaaggggttaggggaggggaaatggggagttgttcaatggatatagtgtttctgtttttcgagacaaaaaagttctagagatctgttgtacaagaatgtaagtatagttaacattactggcctgtacagttaaaaccagttaagatagtaagttttatggtatgtatgttttcaccacaattttctgaaaaggtggtgaattttactgtatataaattatattccaacaaacctttttgraaaaaatgaccaaaattcttgattttattttagtttcacactttataattcttcaaatcaaaaggtggagtttatgtttccgctcctagatgcagtctgagtgatatgaattgatttggccaacagaatgtacagtagtaatgatatgctaatcctaagcctaggcctcaagagaacttgtctatttccactctattggatttctgagcctgccacgttaagaagccagactagcttgctggaaggtgagagagtta

SEQ ID NO: 655914 - DNA, 603 bp, Homo sapiens
caacttagatgaaccttgaggacattatacaaagtgaaataagctagtcataaaaaagacaaatattgcaggattctacttgtatgaggtaagtagaatggtggtcgaaggggttaggggaggggaaatggggagttgttcaatggatatagtgtttctgtttttcgagacaaaaaagttctagagatctgttgtacaagaatgtaagtatagttaacattactggcctgtacagttaaaaccagttaagatagtaagttttatggtatgtatgttttcaccacaattttctgaaaaggtggtgaattttactgtatataaattatattccaacaaacctttttgaaaaaaatgaccaaaattcttgattttattttagtttcacactttataattcttcaaatcaaaaggtggagtttatgtttccrctcctagatgcagtctgagtgatatgaattgatttggccaacagaatgtacagtagtaatgatatgctaatcctaagcctaggcctcaagagaacttgtctatttccactctattggatttctgagcctgccacgttaagaagccagactagcttgctggaaggtgagagagtta

SEQ ID NO: 655915 - DNA, 535 bp, Homo sapiens
gtgcctttgtgacttaaattatgggatggtttggtctcactgggttcttagatgcactcttacagaaagaccatgcatttttctaatcaatgagtcactcagggaagaaatttatgctcagatccatggttcttaactcagggatggatttctagaatgatctttggacaccttaaaactttaagttttttcatgttagtcctggtgagaggatggttgtgtaagatgaacacagatggccatagtccataaaagattatagtaacttataaacagttttctctttcttaacatctagcattatctctgagccttacatgtatacaaatattcaaatcataattgttataaaaattcaattagtaatttttgatgtcaataacatggacaaaatccgtgattttgaacacggatttgaayatgtgatatgaacaagtgattttcataagaatacctggatataatatgctgtcacttaaccataaatagcaaacattcaaaggataaattcatgtgacctagtgggtttcaaatt

SEQ ID NO: 655916 - DNA, 616 bp, Homo sapiens
tttgttttgttttttttcttttgagagagacaagagatggcaggggaaatgagaaaggaaaatagtattgtatcagaaaccagaaatgctgacatggatttcacyttcatgcaaaccaatttaagaaacttttaaaaactgggataaaaataaggaggaaatggaatattatgtatggtgctatctcaaactaaaaacaaattaacaactataataaagcaaatcctgacaagaaaattattctaagatatctaaagagaatagacattttgaaaatagtgatatcttgtgaatgcctaggactcacttgcatgttaatggtaattcaaatatgtcaaaacttactgggtatatacccaaaggattataaatcatgctgctataaagacacatgcacacgtatgtttattgcagcactattcataatagcaaagacttggaaccaagccaaatgtccaacaatgatagactggattaagaaaacgtgccacatatacaccatggaatactgtgcagccataaaaaaggatgagttcatgtcctttgtagggacatggatgaagctggaaaccatcattctcagcaaactatcgcaaggacaaaaaaaccaaacact

SEQ ID NO: 655917 - DNA, 616 bp, Homo sapiens
tttgttttgttttttttcttttgagagagacaagagatggcaggggaaatgagaaaggaaaatagtattgtatcagaaaccagaaatgctgacatggatttcaccttcatgcaaaccaatttaagaaacttttaaaaactgggataaaaataaggaggaaatggaatattatgtatggtgctatctcaaactaaaaacaaattaacaactataataaagcaaatcctgacaagaaaattattctaagatatctaaagagaatagacattttgaaaatagtgatatcttgtgaatgcctaggactcacttgcatgttaatggtaattcaaatatgtcaaaacttactgggtatatacccaaaggattataaatcatgctgctataaagacacatgcacacgtatgtttattgcagcactattcataatagcaaagamttggaaccaagccaaatgtccaacaatgatagactggattaagaaaacgtgccacatatacaccatggaatactgtgcagccataaaaaaggatgagttcatgtcctttgtagggacatggatgaagctggaaaccatcattctcagcaaactatcgcaaggacaaaaaaaccaaacact

SEQ ID NO: 655918 - DNA, 616 bp, Homo sapiens
tttgttttgttttttttcttttgagagagacaagagatggcaggggaaatgagaaaggaaaatagtattgtatcagaaaccagaaatgctgacatggatttcaccttcatgcaaaccaatttaagaaacttttaaaaactgggataaaaataaggaggaaatggaatattatgtatggtgctatctcaaactaaaaacaaattaacaactataataaagcaaatcctgacaagaaaattattctaagatatctaaagagaatagacattttgaaaatagtgatatcttgtgaatgcctaggactcacttgcatgttaatggtaattcaaatatgtcaaaacttactgggtatatacccaaaggattataaatcatgctgctataaagacacatgcacacgtatgtttattgcagcactattcataatagcaaagacttggaaccaagccaaatgtccaacaatgatagactggattaagaaaacgtgccacatatacaccatggaatrctgtgcagccataaaaaaggatgagttcatgtcctttgtagggacatggatgaagctggaaaccatcattctcagcaaactatcgcaaggacaaaaaaaccaaacact

SEQ ID NO: 655919 - DNA, 616 bp, Homo sapiens
ttttcagtattctttctttgaaaaaaatcaaagggattctacatggtgatatttttatgagtgttctattagcactattagagacttgtttcatttttacactcacacaaagaaacagatacatgattcaataaatagtttcatgtatatgtttcaataattcactgaaaagcaaaacacatgccatactcatcaaattgcttttagctggaagcttgtcttttatcaaaattggaagagctcgtaagaacacttttcaatgaaaaagcaaaacttgcagaaccagtcaccaagaatattgaagttgttagtactcataacactcaatgatggcaacattttcttttattttcagggtctgtatataaaaagaagcagacacttatgattctagtcatgctttcattactgatacccattttttccctaccactatgagttgaggaggaaattgaggaggaaaacagaggctaaaagtgttttctttttaccctcagcatcctgcctttactcctcyggcaatgagtaaattgctggtgtgaaaacaaaaaggaattagagaaacaagaatgtggaaaaatggtagcagaagaaagggaagaggaaattattgctt

SEQ ID NO: 655920 - DNA, 586 bp, Homo sapiens
ccacctgaagccttccctgatctatagagaaaaaagtagattagttgttgtcagaggctgaggcataaggcaggtgatatggtttggctgtgtccccacccaaatctcatcctgaattgtatttcacataatccccatgtgtttcgggaggggtccagtggagataattgaatcatgggggcagtctccctcatcctgttctaatgataatgagttagttctcatgaggtctgatggttttgtaaggggcttcccccttctctgggcactcattcttctccttcctgccgctatgtgaagaaggacatgtttgctttcgcttccaccacgattgtaagtttcctgaggcctccccagccctgtggaattgtgagttaattaaacctctttcctttataaattacccagtcttgggtatgtccttatagccatgggagaacagactaatacagtggggaaatggctatgactgctaatgggtatggrgtttcttttttggggagatgaaaatgttctgggatttgacagtggtgatggatgcatgatttttatcaatatactaaaagccatgaagccttcccatctc

SEQ ID NO: 655921 - DNA, 586 bp, Homo sapiens
ccacctgaagccttccctgatctatagagaaaaaagtagattagttgttgtcagaggctgaggcataaggcaggtgatatggtttggctgtgtccccacccaaatctcatcctgaattgtatttcacataatccccatgtgtttcgggaggggtccagtggagataattgaatcatgggggcagtctccctcatcctgttctaatgataatgagttagttctcatgaggtctgatggttttgtaaggggcttcccccttctctgggcactcattcttctccttcctgccgctatgtgaagaaggacatgtttgctttcgcttccaccacgattgtaagtttcctgaggcctccccagccctgtggaattgtgagttaattaaacctctttcctttataaattacccagtcttgggtatgtccttatagccatgggagaacagactaatacagtggggaaatggctatgactgctaatgggtatggagtttcttttttggggagatgaaaatgktctgggatttgacagtggtgatggatgcatgatttttatcaatatactaaaagccatgaagccttcccatctc

SEQ ID NO: 655922 - DNA, 497 bp, Homo sapiens
ttgctttgggtagtatggacattttaacaatataattcttccaatcgatgaattgattggaaggggtatctttccatttgtgtctttgattttttcattaacattttatagttttcagtgtataggcccttctcctgggttaaatttattcctaagctttttttttttttttttggtggctattgtcaatgggattgttcttttgatttcttttccagatagactgttgttagtgtatagaaatgctgatttttgtgtgttgattttgcatcctgcaactttatttaatctatttattagtttcaatagtttttttgagtctttagatttttctmtatataagaccatgtcatcaacaaacagtgacaatttcaccttttccttttctctatggatgtcttgtttctttttttgcctaattgctctcataaagacttccagacaggaaaaacgagagctgtgaattcccaggcaattcccttgaactcaagctggaa

SEQ ID NO: 655923 - DNA, 658 bp, Homo sapiens
gggtgtgtagcccagaaacacagagctgaacaggctcaggaagcccccaggtccactgaaggtgctgaaacagtgtcactgggactgggatgaaactatagctgggtgctaactaactaaggggcaacctttacagttgaagatgtgtcaacaggagaatggcctgccagggtccaggaaaagggacttggcaaagcgagaacttaggtctatccccagtactgcccatataggttgtgtgagagcaaacctgcagctggagccacaggtaacagggccctgtgcagttataaccaggaacctctgttttaaaaatcacccatttccttttcttccttcccttccctcttaccccttcattccttccctctctagacaatcccctcaccagtgcatgcttatctaattatgctcttacctaagaaatcccagaggctaatattgaaacaatccaggtgccccactcctcccacttagggggagttgtgaacaattgagccaaaatcaagctaataccaaccagacctcctgatgagcaattaaccaagagagccawcggaacaagacacacaagtccagtaccctgtaccactcccacatgtcccctataccacatatccctttaaaaactctatggtaagttataaaatgtaagatg

SEQ ID NO: 655924 - DNA, 579 bp, Homo sapiens
ggtaacagctctctcccaaaacaaacctccttcttgcctggggtctagactgcctttgtaagactaacgagttagccacaagattcgaaattatggtttaggagtcatgctgctggaggctacaagattctgaccctccctaaactgctcctaagatcagtgcttgagatattttgcagaccctgggtcagctggcaccaccccgatggataagctggctcatctgaccttgtggctcccacacaggaactgactcagcgcaaacggacagcttcaatccctgtgattttcatctctgacccaaccaatcagcaytgtcaactcactggtttccccctgtcccccaaactatccttaaaatgtctgatccccaaatgcttggggagactgatttgagtaataataaaacttcagtttcccacacagccagctctgcatgaattactctttctctattgcagtttccccatcttgataaataaagctctgtataagcagtgggcaaggtgaacccattggacggatacatcaccactagaggctcttttcttcctcttcctttggaaccagaccttcagc

SEQ ID NO: 655925 - DNA, 398 bp, Homo sapiens
gcctaacacaatcatgtataaaatatgcatgccatgtataaaatataagcaaaaggattacttatatactgctaacaaaaaattcataggaaaatataacaaagctgaacttgtgtgtgttyaaaaacatagcccccaaatgcaaaaaaacaaaatatttaattaaacacatagagaaatttataaatagtgcattccatcagagttcatcacatgaacaaacatttctcaagagaagacatacaagtggccaaaaagcattaaaagaaatcaacatcactaatcatcagagaaatgcaaattaaaaccacaatgagatatcatctcacactggtcagaatggctattactaaaaagtcaaaaaataatagatactggtaaggctgtgtagagaaggt

SEQ ID NO: 655926 - DNA, 490 bp, Homo sapiens
agaataaactaaggaaaaagaagtgacaactgctaggaatggatcctgaatagcatctgacatcttcaagagttttactttattaacctgggttatttttattagcacatttagccagaaaaattccatatttgaaatataatttcatttttgtaggaattataaaagttcttagtatatcctgataaagatatttcacagtattttagagctgtgaagaaaagttgttaagtaatagatttatgtgatagctaatgtttccatctttaattggcttgctctatagtcacataatagccctgaattttggaaaaccaaarcaaattcagttcaaggaactaaaatatgtttatgctcacatggaaatgttataacataagggaataatattttaaaaaataatttttgccttcaactaaaaactgtcatgcctatttcctctcaatgaacccaagatttacaaaacatcaaattaatatgagtaggggct

SEQ ID NO: 655927 - DNA, 490 bp, Homo sapiens
agaataaactaaggaaaaagaagtgacaactgctaggaatggatcctgaatagcatctgacatcttcaagagttttactttattaacctgggttatttttattagcacatttagccagaaaaattccatatttgaaatataatttcatttttgtaggaattataaaagttcttagtatatcctgataaagatatttcacagtattttagagctgtgaagaaaagttgttaagtaatagatttatgtgatagctaatgtttccatctttaattggcttgctctatagtcacataatagccctgaattttggaaaaccaaagcaaattcagttcaaggaactaaaatatgtttatgctcacatggaaatgttataacataagggaataatattttaaaaaataatttttgccttcaactaaaaactgtcatgcctatttcctctcaatgaacccaagatttacaaaacatmaaattaatatgagtaggggct

SEQ ID NO: 655928 - DNA, 568 bp, Homo sapiens
gagcaagtgagatgtgaattcctgctgtgtgcactacacacraggccctgctaacatctgatttgtgggaaatgtgtgagcacacctgggattaactagattgtcatagaatatttaccattcagctattcagctacaaaagagaccagcattcatgtaagtcagaaaataaaatcattaaatacatgtcttttcagggccagaaaaaccccatctctcatatataaagacaaataaataagcaaaagtaccttgatgcaacaactttcttctgtttttccagaacaggatccacccaggacacaagcacagactgagatgacataacccggacgctgatgtcgtcaggtacatccaattcgtcctcttctgaaatgacaacgagacccagagaaaggctttctctcacaacaggttctgccctgagctcctcagtccttgacaggctattattcaccctgcataagttttagattgcttgtgtgtaatgtagacaaaatgaaattgatagaaaggtaaacaattattggattggtcagtgtagaaaaacaaaaatctcagtcttgca

SEQ ID NO: 655929 - DNA, 568 bp, Homo sapiens
gagcaagtgagatgtgaattcctgctgtgtgcactacacacgaggccctgctaacatctgatttgtgggaaatgtgtgagcacacytgggattaactagattgtcatagaatatttaccattcagctattcagctacaaaagagaccagcattcatgtaagtcagaaaataaaatcattaaatacatgtcttttcagggccagaaaaaccccatctctcatatataaagacaaataaataagcaaaagtaccttgatgcaacaactttcttctgtttttccagaacaggatccacccaggacacaagcacagactgagatgacataacccggacgctgatgtcgtcaggtacatccaattcgtcctcttctgaaatgacaacgagacccagagaaaggctttctctcacaacaggttctgccctgagctcctcagtccttgacaggctattattcaccctgcataagttttagattgcttgtgtgtaatgtagacaaaatgaaattgatagaaaggtaaacaattattggattggtcagtgtagaaaaacaaaaatctcagtcttgca

SEQ ID NO: 655930 - DNA, 568 bp, Homo sapiens
gagcaagtgagatgtgaattcctgctgtgtgcactacacacgaggccctgctaacatctgatttgtgggaaatgtgtgagcacacctgggattaactarattgtcatagaatatttaccattcagctattcagctacaaaagagaccagcattcatgtaagtcagaaaataaaatcattaaatacatgtcttttcagggccagaaaaaccccatctctcatatataaagacaaataaataagcaaaagtaccttgatgcaacaactttcttctgtttttccagaacaggatccacccaggacacaagcacagactgagatgacataacccggacgctgatgtcgtcaggtacatccaattcgtcctcttctgaaatgacaacgagacccagagaaaggctttctctcacaacaggttctgccctgagctcctcagtccttgacaggctattattcaccctgcataagttttagattgcttgtgtgtaatgtagacaaaatgaaattgatagaaaggtaaacaattattggattggtcagtgtagaaaaacaaaaatctcagtcttgca

SEQ ID NO: 655931 - DNA, 592 bp, Homo sapiens
tgggttgtcaatgtgagaggcaattggtggtgtctttgttgtttgtgttgctataacaaaataccacagactgagtgatttataatcaatagaaatttatttctaacagttctggtgcctgggaagtccaagttcaagggtgtggcattcagtgtctggtgagggtctttatgtggcagaaggggagaatgctgtgtccccatggcgtggaaggtggaagggcaraaaagggtctgagctagttcccttcagcccttttgcaaggcactaatccactcaggagggtggagccctcacgacttaatcactccccaaaaggtctcacctcttaaccccgccacaatgggagttcagtttcaatacatgaatttggggggacattcagaccatagcaggtaggctatggaagggatgtattggttaaaacatagattaggagtcagacagatttgatttcaattctatcatttaatgtacttctgggggcttggacacgttatttatcttgtttgagcctcatctgcagaatagagataataatttctatttcacagggattctgcacagcacatgcaaagtgcccagcacagtg

SEQ ID NO: 655932 - DNA, 539 bp, Homo sapiens
gtggttgctacagaccacagggctctgagcagcgggtccatttatttccccagctttgggcagatattgaattattccagatacatgaggttctacatgttttaaaagtttcctaaagaaagtgacccctctgtggccgggcgcrgtggctcacgcctgtagtcccagctactcgggaggcaagagaatggcacgaacccggggggcagagcttgcagcgagcagagatcacgccactgcactccagcctgggtgacagagcaagactccgtctcaaaaaaaaaaaaaaaaaagaaagtgacccccctgttccctgaaagcagtgtgtaaccattgggaaattatttttaatagctaatccaagtactgcacctgacaatcttgacattacttctaactatttgctccttaggtagaaatggacaaagagtcgcccgcttgatacaggggatcacacttgtcctgccggattgtcttggaagaaggactatggtggaggaaaggactcccggccttcagggaagggtagagggtgaggg

SEQ ID NO: 655933 - DNA, 564 bp, Homo sapiens
tggactgtggggagggcgagaagagtttagacagctgggtggttaggtgccaggagccttttttcactcctctcaggcctgagatctgagccatcaagttctcttgggagaagttttagacagtcgggcatggtgtgggggaggctgcaggtccctatgaacacttatatcacagtgatcccaaagtgaattccccataatcccaggaagtgcccagcgtaggactccacagacacatttgtttggcgaacactccatactgcacagtcctgtaagacaatgcttgatgtgcatgcagatcacctggggatgatgctagctcagtaggtccatgtggggcctgagcatccgcattcctaaccagcgctccagtgacgcgatgctgctggtccataagccctattttgagcaacgaggcttctgagattctttctgcctcttggtgtattgaaggcactaagacatcttttcatgaacccaactktatttgtctaacatggtcatttacaaagtgactacagcacaactatgggagcttttgggagcatttcaggaaactttgca

SEQ ID NO: 655934 - DNA, 538 bp, Homo sapiens
cctaggcagcacagccttctccatcaggtgaccccagagtacacagagtgtggatatcagacacaccccaatgacaatgacgtagaacaccctccaatgtagtacaagaaactgatcatacaatatactcacaaatacatttctctatcctgagagagagaccggtttatctcactttctatctctccatttataatttttggccaggtgccaatggctcatgtctgtaacctcaacactttgggaggccgaggcaggaggattgctkgagcccaggagctcgagaccagcttgggcaacataacaagaccccattatggctcacacctgtaatcccagcactttgggaggccgaggtgggtggattgcttgaggtcaagagttcaagaccagcctggccaacatggtgaaaccccatctctactaaaaatacaaaaaattagccgggcatggtggcgcacacctgtagtcccagctactcaggaggctgaggcaggagaatcgcttgaacttgggaccagaggttgcagtgagctga

SEQ ID NO: 655935 - DNA, 538 bp, Homo sapiens
cctaggcagcacagccttctccatcaggtgaccccagagtacacagagtgtggatatcagacacaccccaatgacaatgacgtagaacaccctccaatgtagtacaagaaactgatcatacaatatactcacaaatacatttctctatcctgagagagagaccggtttatctcactttctatctctccatttataatttttggccaggtgccaatggctcatgtctgtaacctcaacactttgggaggccgaggcaggaggattgcttgagcccaggagctcgagaccagcttgggcaacataacaagaccccattatggctcacacctgtaatcccagcactttgggaggccgaggtgggtggattgcttgaggtcaagagktcaagaccagcctggccaacatggtgaaaccccatctctactaaaaatacaaaaaattagccgggcatggtggcgcacacctgtagtcccagctactcaggaggctgaggcaggagaatcgcttgaacttgggaccagaggttgcagtgagctga

SEQ ID NO: 655936 - DNA, 538 bp, Homo sapiens
cctaggcagcacagccttctccatcaggtgaccccagagtacacagagtgtggatatcagacacaccccaatgacaatgacgtagaacaccctccaatgtagtacaagaaactgatcatacaatatactcacaaatacatttctctatcctgagagagagaccggtttatctcactttctatctctccatttataatttttggccaggtgccaatggctcatgtctgtaacctcaacactttgggaggccgaggcaggaggattgcttgagcccaggagctcgagaccagcttgggcaacataacaagaccccattatggctcacacctgtaatcccagcactttgggaggccgaggtgggtggattgcttgaggtcaagagttcaagaccagcctggccaacatggtgaaaccccatctctactaaaaatacaaaaaattagccgggcatggtggcrcacacctgtagtcccagctactcaggaggctgaggcaggagaatcgcttgaacttgggaccagaggttgcagtgagctga

SEQ ID NO: 655937 - DNA, 441 bp, Homo sapiens
cagcaagagaccctggtcgtccggaggaagcaccaaggctgctctgtttctttccagttggagaaggtgctggtgactgttggctgcacctgcgtcacccctgtcatccaccatgtgcagtaagaggtgcatatccactcagctgaagaagctgtagaaatgccactccttacccagtgctctgcaacaagtcctgtctgacccccaattccctccacttcacaggactcttaataagacctgcacggatggaaacagaaaatattcacaatgtatgtgtgtatgtactacactttatatttgatatctaaaatgttaggagaaaaattaatatattcagtgctaatataataaagtattaataakttaaaaatacttcaggtgtttgtttgcattcccagcttgtactcacagactgtgtagccctacacattttggaat

SEQ ID NO: 655938 - DNA, 578 bp, Homo sapiens
gtaactctctgcatataccctgttcctaagtggtcactctgaaaagacattgcccttggagacttcttgggatgttgggccacggtacaacagtaacgatgcatgttgattgagtgtgaagggtccagcgattgctatagctagtcagggttgttggggacagstggacttagcattggctcttcaagtgttacataccatgttgtggcagatatcgggggatctgggtggccaaggtgacccaaatgaagtgctagaaattttccatacaatagacaagggatggcaggctcttggcccattggtgtcttctgtataatactcatcacctcactgatttttctttatttctggttagtgaaatagatccgtctcaataatatagtacaattttataattttcaaagaacatggtaaaacttaatcatgtagaatctcagaagagcaacatcaaaaatctagacccacagattggaaacctctgggctggacagtttgtagttagttaacttgggcgcaatggccaatttaatatgtcaatttgactaggccatgaagtgcccagatatttggtcaga

SEQ ID NO: 655939 - DNA, 637 bp, Homo sapiens
ataattttttgtgtggcaaaaattaggagtaaggtgaaaggtagaaagtacagagaaagagagacacatatacacacacacgcagaaagagagaaagagagagactattaaccatatggagttaagatcttacttcaaattacatttattcttattttataccttgtcatcatgatattgagcagtttgtatgcatgaagctctcctctgacattctactctaactgcaatggtttattgttttacaacccttaaccctgagactatgatgcttgtttattgtagaaaattgtatttactccttgtaagttcgttataaggaattgaactttccagcaaccctgtaatatttcacctgaactgagtatgacttcagtgctcttgttttatttaaaccaaacwgcagtacaaggctggtatagtttcttggtgttgggaaaaaaagtatttgtaaagtgtttttttttcccccttgcataagttatacaagaaaaacaaatactggttataacggactcacattaaaagcacaatgcacaatttaaactttcttccacaccctgggcttttgagttatgtcaaccaatatattgtcctttcttgttcaggtgcaacagaaagaatcttgagtaatgca

SEQ ID NO: 655940 - DNA, 637 bp, Homo sapiens
ataattttttgtgtggcaaaaattaggagtaaggtgaaaggtagaaagtacagagaaagagagacacatatacacacacacgcagaaagagagaaagagagagactattaaccatatggagttaagatcttacttcaaattacatttattcttattttataccttgtcatcatgatattgagcagtttgtatgcatgaagctctcctctgacattctactctaactgcaatggtttattgttttacaacccttaaccctgagactatgatgcttgtttattgtagaaaattgtatttactccttgtaagttcgttataaggaattgaactttccagcaaccctgtaatatttcacctgaactgagtatgacttcagtgctcttgttttatttaaaccaaacagcwgtacaaggctggtatagtttcttggtgttgggaaaaaaagtatttgtaaagtgtttttttttcccccttgcataagttatacaagaaaaacaaatactggttataacggactcacattaaaagcacaatgcacaatttaaactttcttccacaccctgggcttttgagttatgtcaaccaatatattgtcctttcttgttcaggtgcaacagaaagaatcttgagtaatgca

SEQ ID NO: 655941 - DNA, 590 bp, Homo sapiens
ttgccattttacagggaagtgagacaaggaacaaagaattccaagagaggtacatatttcaaagactttgagactctactgtagcccaaaaaggcagtgaagagtgccatgctcaagactaagtggggtggggttgtttgatctcaggtgtcctacctcccagctcagggctttctccacctctcttcactgccctccccttatttttccacctacccccagctgctgccaattgcactgtcattcactgtcattcattcaatgagcttggccaatgataagatcctgtgctgacttcctgttgccaaaccaggggacaaaactgaagctcttggcaatcttgagagaaggccaagccatggataactacaacagcttatcaaccttccttagcctcccactctagctggcaaagtcgggctccaccctgagrctcctgacacctggggtgaggccaggttaaagggacctgaaggtggagtgctgtaagctggggctggggagggaattacctgccttgaagaggaaagctgtgggtataactgtgtttaggatgtagagggaaccaatcaactttggacccctcctgt

SEQ ID NO: 655942 - DNA, 622 bp, Homo sapiens
catgggggcagaggggcaggtctttctcatgttgttctcacaatagtgaataagtctcatgagttctgatggttttcaaaaggggagtttctctgaacagctctcttctcttttctgacatcaygtgagatgtgcctttcacattctgccatgattgtgaggcctccccagccatgtggaactctaagttgactaaactttctttcgtaaattgcccagtcttgggtatgtctttatcaacagtgtgaaaatggactaatacataggctgatatggtttgtctgtgtctcagcccaaaatctgatcttgaattataatccccacatgttgggggagggatcttgtgggtggtgattagattatggggcagttcccccatgctgttctcatgatagtgagtgagttctcaagagatctgatggttttataaggggattccccactacccgctttgctctgcacttctccttcctgccgccatgtaaagaagaacatgtttgcttttccttccaccacgattataaacttcttgaggcctcccaagccctgtagaactgtgaattaattaaacctctttcctttataaattacccattcatgggcagttctttatagcaacatg

SEQ ID NO: 655943 - DNA, 566 bp, Homo sapiens
gaactaaccttgcaaaagttctttttgggggcagatttataactgtagagaatctatattgatgcagccaggtttttttctgaagccttccctagtcctgatctagaaaagaattagctgagagcctgaaacctttaaaggtctgaaaaaaaamcatttatcatatattcactttgagggttgctacctgtgaggtttaatctacataacaaaaccacctttgctagccaagtctcctcttctctccctcccataaactgtcttgtcacgctaacctgatttaccaccttaatccattttgggccatgctcaggatcctcattctttctgtaacctcaaaatggtacaaaagtttctgaatctcattaggggcttgggataattactctggttctccctcttatgcacattaatataattgtatgccttttctctaattaatctgccttttgtgagttgatttttcagcaaaactttagagggcaaaggggaagtttttccttggctcctacactgcttgcttctgaaaacattgtactagtctatagggaaattggagtattcat

SEQ ID NO: 655944 - DNA, 521 bp, Homo sapiens
ttggtctcttttgtcggtatctttactttgattagcattaaagattcgagaattatttgtagcctttgtcaagtctccctggaaggcaagatgcctgtgcaatatttgctaggtgtcccctattcaagttcttgggtatgcgtgggcagtggggcggagggtccatatgatatcacttatagttctttgcacatattaaattctcaaaaaaagtctattaaatgataaaaatgaataaatgaatgattgaaacttctataagtagactagtatgtgtgtgtktgtgtgtgtgtgtgtgtgtgtgtgtgtgtgtgtgtgattttctatagcttcttaactggtctctctgcttctgcccttgactttcgcaattcattctcaataagcagtcagagtgatcctgttaaacagacttagttacccggcatgattgtgtctgataacgtaattgattccaggagtggctccaaaattcacatccctgtaaggagattctgacatccagcattcacagataaact

SEQ ID NO: 655945 - DNA, 586 bp, Homo sapiens
tggcatacagaaagtgtgcaataattgctttttgaatgagtagatagtaagctgaccgatccatttggtgggtgacaatggtgatcataatagctttggccaaataaagcaaagcaactctcagggaaagaggctacatgttttaaaaaatattttaaaataacaatagctactgtaatcaaatagtagattttgatgtatttggctttagcagaagtgtaattcgatcggaagtcttgaacaacatagatgatgctgttttatactccaagggccaagctgccaaactcacatgcttcttctcatttctagaaaacagcaataatcaactcccaacaaatcctcaaaaaacagtttttccaaggttaaagcacacacagagatcaggawtaaagaaaggatgtttctgtctttcattagtgcactacatttctaaggcacctacaattatattttctagaattcataaaagtattatgctaaatataaaaattgattgcaaattggatcctaattttcaaaacattaaaatatgcattctagaagcaaagaaatagagtctatctgtttgcacttttcagctcat

SEQ ID NO: 655946 - DNA, 553 bp, Homo sapiens
atccacggggagctgggtgagcaaaacgccagtgtctgacttygccttgattgcatctgtgccctacaaaccccaacagaattgaactcacagctcctcctaattaggggagaaagaaagacaagaatgatagcagaagaatttcttcctgcttctgaccgcaagctcttcagggacagcccattaagcccccagcctccaacttctgtttcctgactcatatctggagtacctaacacggtgccaggttctccctgggactatagccccgagtgtgacaagagtgatgaacaggggctggtttgaagagccagtccctgctctgggggcctgtctctggtatactgtgaggcaatgccaagtggcggcccaggggggatctgggaggcctcaagccagacaggtgaaggctggtccagggccttgcaggggtgggtgggaccttgcccgggaaggaggctgggagagtgaagtccaccactccatgcaatttggaggggggcgctgtttaagcaaatcaaatatcctgacatccaggtgcaaaccacagtgc

SEQ ID NO: 655947 - DNA, 553 bp, Homo sapiens
atccacggggagctgggtgagcaaaacgccagtgtctgacttcgccttgattgcatctgtgccctacaaaccccaacagaattgaactcacagctcctcctaattaggggagaaagaaagacaagaatgatagcagaagaatttcttcctgcttctgaccgcaagctcttcagggacagcccattaagcccccagcctccaacttctgtttcctgactcatatctggagtacctaacacggtgccaggttctccctgggactatagccccgagtgtgacaagagtgatgaacaggggctggtttgaagagccagtccctgctctgggggcctgtctctggtatactgtgaggcaatgccragtggcggcccaggggggatctgggaggcctcaagccagacaggtgaaggctggtccagggccttgcaggggtgggtgggaccttgcccgggaaggaggctgggagagtgaagtccaccactccatgcaatttggaggggggcgctgtttaagcaaatcaaatatcctgacatccaggtgcaaaccacagtgc

SEQ ID NO: 655948 - DNA, 596 bp, Homo sapiens
taagtgtaagtatttccaaatctccttaaagtcaagcaacatttctccctacaaactcattaagttggttgttatttttggaattagttaatgaatattttcctatgattatacaaaaccagaatctcaccctcttggattcttcttaatattcatagccctctcttttcaggaagtgaatggccattatcactaaaagaagtaaaaggaatataaaaactgaaatctgtktttagatgctatgtctcatgcatactggtaatgctcagtgcaacttatcaaaggctcagaagggaattctttcagaatgctgccaccaaatgggttgtaaagggtttccttatttggggttcctggggaagcagttttgtggattgttgtgaaaggaaaaaaaggtgtaagcctcaacatcttcaacctccttaagctctctgttatgagcggaatgtttatgtccctcccaaaggtcatgtgttgaaaccctaacccatagtgcaatgatataagatggtgaggcctttgggaggtaattaggtttagatgaggtcatgaggatgcagacgccaggttgggatttatcttattataagaacagg

SEQ ID NO: 655949 - DNA, 610 bp, Homo sapiens
ggaggattccttccactccagttcttcagcattatcccagagtggaactgcggtgctataaccgtcctcttttggttagtgccgacacatcatgcagaatcatctgtaaaacaagcacaagacttttcttcctaagtcaactagtcatgcacaactccctatgagtccatagttatatgttgagaaacagaaagtaatgcaacagaaatcgtaacagtgaacatctgggccactttctcatgcaacttactttagcattgtggacttgtttaaacactacactgtatatactatttccatttgatgatgcagtgtagttgtgcacatccagttttatggtttggtaggtcaggtatcacatgcagcccatgatgggcagttcagaccacttggtaacttgatggtccatagtcaagtggtcagtgtcagtccccgctgcagatcaaaagctgttacttacttctttctctccctctcttctttctttctttctctccctctcttctttctttctttytctttctttctttctttctttctttctttctttctttctttctttctttctttctttctttctttctttctctcttttcccttagatcagtga

SEQ ID NO: 655950 - DNA, 527 bp, Homo sapiens
ggtattgattgatatttattggtaggatagatgtccatgctatgttgataaatgtagtatgatcccagtgaaaaatcaagatacaggtgcacatatggtcatagaaataagaccagaaggatgcatgccaaaacatcaatagtattatcctgaatggttgagatgtcttttaaaaaaaagtatttccattttttctgaatttttgtaataatcaaatattattttcattgtctaaatgaaaaaaaaaaacattcgaaagcatttccttttgagagtagaatatggygtgaagaagagaaagtggcatgctcccaaggacaaggaaaaagaacatgtggagcaataactagaaactttccatacacctttcactaaacttattatagcaccaccagaacataaaagtttattttccttttcattggataaactgaaattatcctggcttcactgcagttaaaatttatatctgctgggtttctgtatgcttgggttttaaacagctcagtattccggttttacatgac

SEQ ID NO: 655951 - DNA, 592 bp, Homo sapiens
agtttatttcataattggcctataatagggaggtattacatactgactttttattctgaatcttatgccaaggagataggacccattacataatagctagaaaggtttttttgttttgttttgtttcgttgttgttgaagcaaaattaagcaaattgatttaaaattgttgaggtttacacaatgaagaagtcataagattataatttactaacaaagaccattaaagcaaattccaatartccatttaagatacttattttacaaaatttcaactcatacttctaaggaacatgtctatagtgtaaaataagacaaaactacataactgtgtttccttttgccaactattgaatatataacaaatagtaaagaagaaaactgacatttgccagacaatttctgtatgctggatgagcacccagaaaagacccttttcctccagttttgtaaatacgtttttagttatcatctaccttgccctgaattcacttgactttttcactttcagtgattttatgattcctttggttaccacaagtcactttcatgttgtaatgattgattaaacatgctaatttttaatattctac

SEQ ID NO: 655952 - DNA, 515 bp, Homo sapiens
ctagaatgctactccccatggtaagatgctcttattattagagaagctgaatctgagacccaatgagaaaatgtaaaaaaacccatattcgtataaaaacatatgcatattattagatggtaggcaatattacctgtaacacttaaataaactcctctattattgattcatcttcttctgtgctcaacttcaattccatgtataactaaatattaatagttgcragttatctaaatacaaatatgattaaactatggtatattaatatcactaaaaattatgaaacagaagtaatcctatagaattattcatactaacagagaaaatgttcctcatcatgtcaattagagaacaaaacaaattgcagttcaatgtatagagtatgaccccataaacaaaagcctcaaacccaaactaaatagctagtagaaaaaattagcaaataatctggaatggttagctccctgatgggaactgaaattggacaaatgctttaaaatacactgtcacatttt

SEQ ID NO: 655953 - DNA, 515 bp, Homo sapiens
ctagaatgctactccccatggtaagatgctcttattattagagaagctgaatctgagacccaatgagaaaatgtaaaaaaacccatattcgtataaaaacatatgcatattattagatggtaggcaatattacctgtaacacttaaataaactcctctattattgattcatcttcttctgtgctcaacttcaattccatgtataactaaatattaatagttgcaagttatctaaatacaaatatgattaaactatggtatattaatatcactaaaaattatgaaacagaagtaatcctatagaattattcatactaacagagaaaatgttcctcatcatgtcaattagagaacaaaacaaattgcagttcaatrtatagagtatgaccccataaacaaaagcctcaaacccaaactaaatagctagtagaaaaaattagcaaataatctggaatggttagctccctgatgggaactgaaattggacaaatgctttaaaatacactgtcacatttt

SEQ ID NO: 655954 - DNA, 553 bp, Homo sapiens
aaaggtggtataccagaggccatcgctattgtacggaggctgcgaaggccccatgatctgggagcccatggtatttattggtaatccaacaaagaaacaggtgggcagaatgtggaggtcaaaaggacacgttgcatcaagcacatgatttacagctgtgacggtttaacatttatatgaaacatattctgctacctgagataatgggaataggagcctaggaggctagaagcaaggagccaggaagtctagacacatttcagaggacattatgcaagccctgcctcagtttccctcccmacactcagctttttcctgaaaaatttcctattaacccacatgtatgggtattcatttgacacttagaccatgatattgtgatatatatttggtggtatgctttcctgtgggattactcagtgaatattttatattgttatcattagcatttacctagttcttttccttccccttccatacaaacatctgctgcatcctacctcaatcatgcattctcacttttcattttactttttaaaaatattttattctt

SEQ ID NO: 655955 - DNA, 553 bp, Homo sapiens
aaaggtggtataccagaggccatcgctattgtacggaggctgcgaaggccccatgatctgggagcccatggtatttattggtaatccaacaaagaaacaggtgggcagaatgtggaggtcaaaaggacacgttgcatcaagcacatgatttacagctgtgacggtttaacatttatatgaaacatattctgctacctgagataatgggaataggagcctaggaggctagaagcaaggagccaggaagtctagacacatttcagaggacattatgcaagccctgcctcagtttccctccccacactcagctttttcctgaaaaatttcctattaacccacatgtatgggtattcatttgacacttagaccatgatattgtgatatatatttggtggtatgctttcctgtgggattactcagtgaatattttatattgttatcattagcatttacctagttcttttccttccccttccatacaaayatctgctgcatcctacctcaatcatgcattctcacttttcattttactttttaaaaatattttattctt

SEQ ID NO: 655956 - DNA, 617 bp, Homo sapiens
ggatcttagcttgctgggcgccgtgggtgtgggacccgccaagccagaccacttggctccctggattctgccccttatccaggggagtgaacggttctgtctcactggcgttccaggcaccactggggtatgaaaataaaawctcctgcagctagcttgatgtctgcccaaatggccacccagttttgtgcttgaaaccccgggccctggtggcataggcaccgcttgttatctcctggtctgtgggttgcaaagactgtgggaaaagcctggaccagagtgcactgttcttatggcacagtccctgacggcttcacttggctagaagagggaccccttgcacttcctgagtgaggcaacgccccaccctacttctgctcaccctccatgggctgcacccaccgtccaaccagtcccagtgagatgaaccaggtacctctgttggaaatgcagaaatcacctgccttctgcattgatctcactgggagctgcagaacggagctattcctattcagccatcttgccagcaaaatcctcttcttttcctttttttcgagatagggtctccctctgtcacccagactggagtgcagtggtgcgatcactgctcactgcag

SEQ ID NO: 655957 - DNA, 573 bp, Homo sapiens
cccgcaatggagcccagggcaataatgaaaatcaaggacaagttcacagagcccattgactcttgggcatcgagagcaggggacaagtagattaggacgagagcagaggcagagagagatgtcttgccgtggtcgtgagccaccacgataagctcataggaggacttggagctctccccgaaggtgcgggtggttctgacttcgccattgacctggtctatttcaaagaagccgcggtcgccctcggtcatgtcgtaggtgactcggccattttcgccctcatcgtagtcttctgccttgacaacagtcaccaggtagcctatgccagagttgcggggtatgtagacctcggcagtgccgttaatcagaggtggggctgtgatgaccggggtgttgtcgttgacgtcgaggatgatgacccgcaccgtagcgttgctttgcartgagggaaggccgccgtccttggccagcaccttgaattcgaacgccttggtctgctcgtggttaaaggatcgcagcgcgtagatgtcgcctgagttgggattgatggagacataggtgaagacaggcatg

SEQ ID NO: 655958 - DNA, 588 bp, Homo sapiens
tgctgttgatctcctctaataaaattttcaaattagttattgtacttttcagctcaatatttttttttataatttctttgttgatattctcattttgttcatatgttttcttgactttcctttgttctttgttcatgtttttctacagttctgcgagtatatttgacatttgtggtttttttttgttgttgttttgagacagactctcactctgttgcccaggctgaagcrcagtcatgtgatcttggctcactgcaacctctgcctcctgggttccagtgattctcatgcctcagccttctgagtagctgggattacaggtgtgcagcaccatgctctgctaatttttttgtatttttagtagagatggggtttcactatgttggccaggctagtgtcaactcctggcctcaagtgatctgactgccttggcctcccaaagtgctgggattataggcatgagccatcgcacctggctgacagttgttttaaagtctagtaagcctgatgcctgtgtttcttccagaactgtttctggagatgtgttttgttcatttcagtgggccatctttccctggttctttgcat

SEQ ID NO: 655959 - DNA, 611 bp, Homo sapiens
aaaattttctttatagctgcatcccatgcagtttctggaactacaatgatttccacgtttttgttttgttatccttgccttgtttatatattttttggaggatatgatggaattggggagcttataatacttgtaacctcccttggaattaaccttgcagacagatggactcaggtaaggaaattagaagtgtctgtgaacaagagaggaaacatagctgatacatggggacaaactaggtgctcctggggacaaagtggaggctaatcsgaaggccttaaccacattgaggcttgaaagtcatgtctcaattcttacaaatgatggacttcagtctgcccggggcagaaacaaactgtgggtcattgtgggaaaatcagacattttagagttgaaaatgttccaaaccacccaaaaaagcatttattatgaggagaaacaatctgatgcctatcataagtccagcttcactcagactcattgatatacaaaataattcactccaccttagcattaatcgacttgaattctatttttttataacttcacttataaacagaatctccctgacccctgaatcactcattttggaaaggaggcaatcagcacat

SEQ ID NO: 655960 - DNA, 573 bp, Homo sapiens
gtgttcatgacgattgcaatacttcccttctggcagagggaagctggcttctctagagctgcggaaagtaacgcttgtttctgaattggttagagttcaatctcaattatgtctggaaacaacacacactcctttcccccttctgtatgactgcagtgttaatttcaagtgaacttgtgcaagttactttaaagttgaaatagccacacaacactgacatttattgggcactccctttggagccttcctggcagcatggccacagaaggtgttgcctctacgccaggggyttggagcctcactctttccagtcttcatgtcccaccctacagcaaggctggaagagattatttgcacaggatcacattcaattctgcctctcctccacccacacaaagcctaatttcaacttttccccaagtggtatgaagctggaaccccagatcaagtccaagaaagaaaaaaaagatattataatttaatttgcttgccatttaaaaggcatttttattatgcagatggctggattcttggattttcatgaggtagtacgcttaccagcattaacataac

SEQ ID NO: 655961 - DNA, 573 bp, Homo sapiens
gtgttcatgacgattgcaatacttcccttctggcagagggaagctggcttctctagagctgcggaaagtaacgcttgtttctgaattggttagagttcaatctcaattatgtctggaaacaacacacactcctttcccccttctgtatgactgcagtgttaatttcaagtgaacttgtgcaagttactttaaagttgaaatagccacacaacactgacatttattgggcactccctttggagccttcctggcagcatggccacagaaggtgttgcctctacgccaggggtttggagcctcactctttccagtcttcatgtcccaccctacagcaaggctggaagagattatttgcacaggatcayattcaattctgcctctcctccacccacacaaagcctaatttcaacttttccccaagtggtatgaagctggaaccccagatcaagtccaagaaagaaaaaaaagatattataatttaatttgcttgccatttaaaaggcatttttattatgcagatggctggattcttggattttcatgaggtagtacgcttaccagcattaacataac

SEQ ID NO: 655962 - DNA, 610 bp, Homo sapiens
caggcacaaactcaataatacatctccctgttagcttttttcgccatccctgtctcacyttggccaccctttcacccctactttcacatcaactccagtataaactactcacacctaggtctttgtctcaagggaatacaaactaagataggttactttgttaacaacttgctattcctttagaacagggatcagcaatttttttctctaaaggggcagattgtacatgtttgtggttcatatggtctttgtggccgctactcaattctatcattttagagtgaaaacagccataaacaatgcacaatgaatgggtgtgactatgttctaattaaaatatatttatgaaaactggtggtggaccgcatgctgtccgtgggccatagattgccaatctctatgaagcggaaattatttctgtaatgcattagaatatgcttagtttcccctaggcttcagtatcctaatgataataattggtgaaactaacaattacattttattaaaatgattacatatgaggcattatttctagcaggtgttttacatatattatcatgtttgactccacgtttttatattatttatgcagaaactgaagctcagaaat

SEQ ID NO: 655963 - DNA, 516 bp, Homo sapiens
taatttctccttttaaggttcaaactgaatttagttctttgaaaaaaaaaacaaaaaaattaaatatattaaaaagttgaatttttttgcatgctaagaaagtctaaagtgacaggaaaagataaatgtgaatcagaaaacttgaccaccgtccagcgagtatactatgagaaaacagtaactaaaatatttaagataaatgttgaattttttaaattctaagaaatttggtttgtataactcaaggcattacaaaaccttgaatatttacaggtctaagacaagcaatgaaaacgagtgaagcaaggacaatatgaaagaaaatggagtgattgtaatgtcattaagccagcaagcccattcctcgctgagaaaagcctgtattatcatagcctagtgccacagactactgccatgcaggaaggtgcaaaagaactaaaaaatctgtatttttctrtgaaattccaagacttttaagtgttagtaaccaatttttcaatatcacatcgtacaggt

SEQ ID NO: 655964 - DNA, 568 bp, Homo sapiens
aaaaaaaatcctctttgtacttsataatttaaaaattgaagcagaaaaaggaaaatgcgctggcaattcattttcttctgccagacttgaaagggtttgtaatttagaattataatgattgaactgccctgcatcagaaagcagcacctgttgactcttctaattgggattatgcttatattctttatattttctcttttgaaacagtatctcaaaaggtatagtaaaactagcaaaatagtttatccaaggtttaccaaatgatcagctgcttaattatgagttcaataaaatctgataattttaatgtttttagtaattttgaaatgagtggttaaaaaagaattctgattttttttttaggattctagatttaattttcatgacaatgaagcaatccttttttagtgagaagggagtgggtgaagagaaaaaaatcattaggatttttctaaaataacttgtctaagtttccaagaaacacaaaaataagtatctctgaaatataatttggtattatataaaaaactaaacaactatatatccagctcttctacgtatatacata

SEQ ID NO: 655965 - DNA, 578 bp, Homo sapiens
taccaatttttatcattttatgtgctcattattgtattctacatctcagtcactacttttttattcttcagaatttctgaactctgctatgtgtctaaaatatgttttatgttttgtgtccttcaaagtgcatgtgttggaaacttaatccccaatgcaatcatactgggaggtggggctgatggcaggtgtttaggtcgtgaaggcaccactctcatgaatggattaatgctgattgctaaagagcttgargctacaagttcgatctcttgttctgtcttgcccttccacctttatcgtggaataatacagcaagaaggctcttgctaggtgctgacttttcaatcttggacttccaaacttccagaaccatgggccaataagtttatattcgttataaattactcaggctgtgggtgttctgttatagcagcacaaaatggacaaagacaatgtctaagtgtgggtttagttttcttttttctgatcactaattaatgttcattttctttttcttttttttttgttttgttcattcagagtcttgctctgttgcccaggctagagtgcagtggaaa

SEQ ID NO: 655966 - DNA, 470 bp, Homo sapiens
gttgaggatttttgcacctgtgttcatcagagatactggtctgtagttttcttctcttttcttttttgttttgtcctttcctggttgtggtattacggtgatactagcttcatagaatggtttagggaggatttcctctttctctatcttttgaatagtgtcaataggattggtaccaattcttctttgaatgtctgatagaattcagctgtgaatctgtccggtgctgactttttttattggcaatttttaaattaccattttaattttgctgcttgttattaatctgttcagtttctatttcttcctggtttaatccaggagggttgtatagttccaggaatttagccatctcctctaggttttctagcttgggcgtgtaaagatgttcatagtagccttgaatggtcctctgtatttctgtggtatcagttgtgataactcccatttyatttctgattgaggttgct

SEQ ID NO: 655967 - DNA, 610 bp, Homo sapiens
taatcacataaaccatcttcttctaaaaatcatcttaatttttaaaatgaagtaaccatgacatagaaggctaaattggactaaacaaaatgtggcagtattcatagttatagcatttgaataaccccagtcctctgatctaggcatgatgaactgtataatatgctctgttttatagttgcactgaggtagaatataaaaaagttcggaagccataacatgctgaatcatttgaaggtttatttatttaatactagtgataattaggtatttcaaaaaagattttttcctcatgatatcatttctttgtagttatagttattctgatcaatcttagttaaatgaattcttgaagaatattttaacattaacaaaatgcraccacgataaattttacatcaccaaataaagagcaaatcctacaagacaaaaacaatgtcagagctgtcctgttatcatgaatacccttcaattaatgcgtttatagccatgcatgctcatagataacagtcctaaaaacccacctacaacttccaaggaaacactcctatagccactcacatacacaaatggagagtgaaaaaatactctaaagctccaagtataatgg

SEQ ID NO: 655968 - DNA, 581 bp, Homo sapiens
tctaacccattcattgttgtataaggctactaaatttgaatgaggcccacaacagaaaaagggtttgttaacaactctaaattgtgatataaaaggacccactgtttgggttatataagatcccatggcacctgaggcatctgtggtagaaaaaatatgtcatgtggattaccaagtgtttgctaagattgacaagtattggtaaaacagtcatagtgtacagaaatgcaagggctctagaataaggaaagtccatctgcagcagaaaactagaaaatatttgcacatcagctcttggcatatttctgtgacctactggaaagagcatctgatcaygggacagcaagcggccacatgtcctaaacttttcatatgaggtagacactggcagatccacgaagtcgtaagtgtgggtctgcagcaatccatcccaaaatggaagagagctcaagcatacccagagaggacaagtaagctgcctaaacatggccccaaaccccacgtcgcccgttttttgttttttttgtttgtttgtttgttttttggtagaggtggggtttcaccatgttggccaggttggt

SEQ ID NO: 655969 - DNA, 538 bp, Homo sapiens
ctgcctgcagtctccagctgggggatttgaagaagatgcccataagctaccagcaaaacctcacatctgtcatctgtcaaagccaatgtgcttactcactacggctgcaggggcaaacctggcttctatttcactttccaattctttacacaagtgtcttttaacggcagaatttaaactggaaactttcaggcaaaacagctttccagcccctgtaatatagtaaaatgcttataaaggaggaaattgtcatgagtacaaacaggcaataacatgccactcagcatttctaaatacccttccactcataattaaamgtaaaagaagattagtactgtctcaaatctttgcttattgtactagtttcctggggctcctgtaacaaagtataacaaactgggttgcttaaacaacagaaattcattgtttcatagttctggaggctaaaatttcaagatggaggctcagcatgcttgtttccttctgagagctgtgaaggagaatttgttccatgcctctccctatggtctccatataa

SEQ ID NO: 655970 - DNA, 446 bp, Homo sapiens
caattagatacctgtgtggtgatgtctatgaggctctcagacatttaggaatgaaggtagcagacaggtctggatttgagcttaacatttaacattcatacacacagacttagagcaacactcaaacattatcaaggragagtgaaagacaggaaaaggagagtactggtctttgaggagcaacaccatgaagaggcagcaaggatgtcctttttcatagtaaaaccggaagaggtcggtgtcatgtaactaaataaaaaaagaaaaacaagtggtgttatgtgtcagtgtacacttcagtaaactttgatcatatttagattgcaggctctttgaaagtaaaggctatagcttaaagaatatttttaattaccaaatttcttagcaaaatccagtagatagttggctctgaaaaaaatatttgcagttttgatttttcttgatcc

SEQ ID NO: 655971 - DNA, 500 bp, Homo sapiens
tggttgatacaaaccttcaatttgtaaaaaatgcaatatctgcaaagaacagtaaagtgaaacacaatcaaatgagatatgcctgtaccgtatttaacatcatactaatctgtataaatttgctagggctgccataacaaagtaccacagactgggtggcttaaacaacagaaatttattttctcacagttctaggtgctagaaatccaagattgaggtgtcagaagggttggtttcttctaagccttctctccttggcttgtagatggctgttttcccccatatcttcacctgatcttccttctatgtattctatgttctaatctacttttcttataatgataccactccaaatggattaggacccatcctaatgatttagggctagctttcattacctctttaaatacccagtcttcaaatacagtcagttctgaggtactgggggttggaaattcrgcatataaattttggagttggggtagggacacatttcagcc

SEQ ID NO: 655972 - DNA, 555 bp, Homo sapiens
tggggggcacagttgagacagggtctcgctcgtgtcgtccaggctggagtgcagtggtgccatctcaattcactgcaacctctgcctcccaggttcaaccaattctcctgactcagcctcccgagtagctgggattataggcacccactaccacacccggctaatttttatatcatggggtttcgccatgttgaccaggctggtctcgaactcctgacctgaaatgatccgcccaccttggcctcccaaagtgctgggattacaggcatragccaccgagcctggcctgtcttttttcaaggagaggctgtatatggatggtgtgcagggacactgtcttctgacgatgttgggaaggggaaaagaggaatcagtccttgtcccacggaggtagccagcaaggatgaaggggaagaccaaggacttctctctacggctcggacactggtccaaggcacagggtgccagccccagtggtgggcggctctgtaagttggtgccaggtggccgtgcatagtggcccgtggtgagcgtcacttggggaggaggtgggcc

SEQ ID NO: 655973 - DNA, 607 bp, Homo sapiens
ctggattccacatgaatgtcgggaatcctctccaccaccactgagaaccatggctaaagtatatctgaattttttaagagaagaatttcagtacctccttggacttcagttgtttgtgaggactgctaaatagccattttctaaagctgagagtgtctgtttgaatgtggagtatcataaaaagtcacttaaggagtggttttaatggaaacagaaccagcactcagaatgccctaaatctttcctgtctttaccactgactgttatactatataataaccatatggcctgcatttccaggagagttccaatttcatgtatcttattacattaaattaataaataggcttatactgattcttaaagattttctttttttaatattttccaaatgttatacaataaagcacgttttttcataatcagaaacaaataaatttcatttatatattatgtgaatatacatttatatttatattctgtgcatacaaaaacccrcatgtgaatgcttatagcaattttattcataattgctaaaactaggaagcagccacaatgtccttcagcaggtgaagggataaataatcaatggtatatcacacaaagg

SEQ ID NO: 655974 - DNA, 587 bp, Homo sapiens
atatcactcttcagctaaagccttaattggcttccatcatgctttgaataacatcccaaatcctctctatggcctctgtgacttgcccttgctcaccttagtcttcatccccaccactcttccctttgctcactgtagtccagccacactgacactcttscattctcaaacatgccaagcttaattctgcctcagagacttctgtgattctgattctctcttctcagacctcagatgtttgcattcagggtcccctcgtttttgaggtttctgcattctgttctcctatttaaaatagacatgtaattacccagctaactctctatccaattaccttgttttaattttttcatagtactcatctctaagctccataggttggaaattgtatgttttgttatagtgtcttcagcaccaataactgtgtctgtcagagagatagttggtactcaataaacatttatggggttaaggcatgtataagataaaatttctcatctttggagtaggttatttttatatgtaaataataatacaaaatagaaagtggcaaatttttgtaggaaagccagatgtaaaatgctatg

SEQ ID NO: 655975 - DNA, 483 bp, Homo sapiens
ttttgttggatcaatccctttgaaggtgtattttatactattttaaattgtataggtgtttttgtttgaatttctgattgttagtgtacaaaaactcagtagattgtactgtatttattttagaacctgcaatatctaaactgtttattttagaagctgcttctgtttatttactttgatttgttttttgtaatctccacagaatttttttgaaaaaaagaataaattcatatgagaattaaattttagtttttcatctctaaactggatgccccttattattattattattattggctaattgcatgattagaacttccagttcaatactgaatagaagtggtgagacctcacatctccaytgttgtcctgatatgtggaagaaagtattcagtgtttcaccattaaatataatattttttgtcaggatttcatagatgcccttgatcagtttgagatattttctgtttctactttgcttaa

SEQ ID NO: 655976 - DNA, 569 bp, Homo sapiens
ttcataacaatatgggaatttacataagttcaataaaaatctgttttcttttgtaacaggacatattggagacactggtaattttcccaaggctttgactggaatgacatcttttcagatatgaccagacgggtttgaggaattaaagttgacttaaagaactggcctgataccttgtctacatggttctcttacaaggttcctgaccttgtggtaagtgaaaaatgttgttttttgatagggccaggaacctcaagatatttggggacctcaaaaagaaaggaattcacccaattcatacaggtattaaaggcacagtctgatggtgaatccttggcttggctttataacttcaagaggcttttaaaagtctaatctgaaattacttatgaaagagttccagcaaagccaacttaaaaaggagmcttgtgaatagactgtaaggacagaaaaaaaataaaaataaaaaatgaaaaaagaagcctatatggccaatcactattcttgttatactttgtgcaaataatcaggccaaacataatactaaaacttattttacaagtaaattg

SEQ ID NO: 655977 - DNA, 567 bp, Homo sapiens
ttgccccagctgccacattagctgttgaaggtttacaaatgtgtccctgcctcagaaatgcctttggccaaagagagctccttgcctcaatttaagacaattctgaaaggccatcccagctccagagctccccaaaggactgactgtggccttcattgctactgaattgcagatcagcttctttctctgccagttcttccttcactctctcctgggtcttactcccaaaagtcccacaataaacttccagtacacaaatctctggctctgggtctctctcccacgaaatccaacctaggaagtcaacagtggacactgaattgtaacaaatatgtcttgcatttttcaaatggacaatttacagtgtattcatttgctaaacgttcagttttctgcttacttttactgtagccatagctgcaattaccttyacttttactcatacccagtgagaacctgttattttagtgttttacactgtggagtctctttctgtaagtttggtggctcagctcttgctgagctggagaaaccgtaattcctaaacaaaccaggaaccccttttac

SEQ ID NO: 655978 - DNA, 567 bp, Homo sapiens
ttgccccagctgccacattagctgttgaaggtttacaaatgtgtccctgcctcagaaatgcctttggccaaagagagctccttgcctcaatttaagacaattctgaaaggccatcccagctccagagctccccaaaggactgactgtggccttcattgctactgaattgcagatcagcttctttctctgccagttcttccttcactctctcctgggtcttactcccaaaagtcccacaataaacttccagtacacaaatctctggctctgggtctctctcccacgaaatccaacctaggaagtcaacagtggacactgaattgtaacaaatatgtcttgcatttttcaaatggacaatttacagtgtattcatttgctaaacgttcagttttctgcttacttttactgtagccatagctgcaattacctttacttttactcatacccagtgagawcctgttattttagtgttttacactgtggagtctctttctgtaagtttggtggctcagctcttgctgagctggagaaaccgtaattcctaaacaaaccaggaaccccttttac

SEQ ID NO: 655979 - DNA, 617 bp, Homo sapiens
tcttccctgttccttcacatatctcttactatctcagtctgtgcttctcctgtggattataaagggctgcccaggctggaagaatttactggcaccctctcacatgtgctagggtgcaggctgatgaaacaaatgctttgtcacttccctgtttacacaaaagctttttctctcagcaggaacttgaaagaaactaaggtgaacataatcagtttatcttcttagacccacttaaaaggattgaccctgtgatatactggaaagcaaaatacaagtctgtttataaatggctttttaaggtgattaacaagtaacattagcaggtagaaagatttccatactgtttccccaagagtagggttgccaaatkttgcaaataaaaatatggaatgccagttaaatttgaacagcagatagataatgaataattttggggtataaatatgtccaaatattgcgtgcaccctaaattttatcaggcaacactacctcaaagggaaaaggctgtacataacccttgtggggagaatgtcttcccattggctgaaaggtatatattaataaaaacataggcccgaaagttgagatatctgagttctcttctagattagtttttc

SEQ ID NO: 655980 - DNA, 617 bp, Homo sapiens
tcttccctgttccttcacatatctcttactatctcagtctgtgcttctcctgtggattataaagggctgcccaggctggaagaatttactggcaccctctcacatgtgctagggtgcaggctgatgaaacaaatgctttgtcacttccctgtttacacaaaagctttttctctcagcaggaacttgaaagaaactaaggtgaacataatcagtttatcttcttagacccacttaaaaggattgaccctgtgatatactggaaagcaaaatacaagtctgtttataaatggctttttaaggtgattaacaagtaacattagcaggtagaaagatttccatactgtttccccaagagtagggttgccaaatgttgcaaataaaaatatggaatgccagttaaatttgaacagcagatagayaatgaataattttggggtataaatatgtccaaatattgcgtgcaccctaaattttatcaggcaacactacctcaaagggaaaaggctgtacataacccttgtggggagaatgtcttcccattggctgaaaggtatatattaataaaaacataggcccgaaagttgagatatctgagttctcttctagattagtttttc

SEQ ID NO: 655981 - DNA, 617 bp, Homo sapiens
tcttccctgttccttcacatatctcttactatctcagtctgtgcttctcctgtggattataaagggctgcccaggctggaagaatttactggcaccctctcacatgtgctagggtgcaggctgatgaaacaaatgctttgtcacttccctgtttacacaaaagctttttctctcagcaggaacttgaaagaaactaaggtgaacataatcagtttatcttcttagacccacttaaaaggattgaccctgtgatatactggaaagcaaaatacaagtctgtttataaatggctttttaaggtgattaacaagtaacattagcaggtagaaagatttccatactgtttccccaagagtagggttgccaaatgttgcaaataaaaatatggaatgccagttaaatttgaacagcagatagataatgaataattttggggtataaatatgtccaaatattgcgtgcaccctaaattttatcaggcaacrctacctcaaagggaaaaggctgtacataacccttgtggggagaatgtcttcccattggctgaaaggtatatattaataaaaacataggcccgaaagttgagatatctgagttctcttctagattagtttttc

SEQ ID NO: 655982 - DNA, 589 bp, Homo sapiens
cggtgggagtcatgagttattcatgagagattaaataagttcccaagatcacatgttagcatatacatatctaccttttaacagctgatagtacttgacagtgttgatatattacagtttacctaaccattcccattgtgatggacattttcaacttgtgattatgtttttaccatcacaaacaagaaacatcctctcacaaagatcttggcatacatgtgtagctacaatttgcaggatgaattcttaaaattggattgctaggacaaagtgtagagcaatttaaattttgatagatcatgtgaaatatatctttygggaagttcttgctgattgatgctcctgcccttggggaatgaacatgctgtgtccccagaacctcttctacacctcgcccttaacctgcaacagctgtgcctcagatccgtgtgtaccaaacacattcccaagaatagtctcattgagcaccgtttgggaagggctgccatgtggacagcaccccacttttttgtccctgatggtttaatgctttatgttttcacacagagtgcatttggggagactggctggaggcgggctttgttctgct

SEQ ID NO: 655983 - DNA, 557 bp, Homo sapiens
tcacagcttatgctctatcaaacaaaacaaatctctttccagatgaagacaacagcattaaatgtaattctctgtgtgttttaaaatgaataaccaattagcaattattcagtcatgaacaaacagaacttactctgttcctcttcctgaattctcagaaatacttggaatttaatgggatgtaatttatgagacaaagcccattttttctttcacatgacaaaatggactgcaatgaacaatttctgtgatcacagagaatggtcactattgctggttgtgggctgcagaggtaacaggagctggccagggtaggttaataccacataccgggccttgtcagtcaacagccttcagagcacacaattccacctgctgttcttgcttcctaggctgtgcttgttgagaaagactcagcccaagcacaagtagtgaatggttcatggtacccgccagcaatggggataggaaacatgggtgctgataacttgtgggggaggcagagktcaatcaaaattcataatcgaaacagttatgtaacagtcaccaaatcatca

SEQ ID NO: 655984 - DNA, 588 bp, Homo sapiens
tttcttttcaacatttataatgtctgagacatcaaatgacatgtcatctcattcagctccatccctcctgggcctacttaggccaccctcaatctacaaccattttgggaaaggagatttttttttttttttttaagttatggcataraaagtagcctcaatcccaaatcctatcactctccttataattcagcagctggtgaattcccttccaggtttcatttggaatgctataaccttgaatccctcagccacttccataaaggcaagtaaaatatgatctcatcggacacaccaagaagccagttgaaataatcaaatgatctctcaaggaagtaaagatatcaagccttaacacttaggaatttcaacttgattgtgctctgtagttaatgaagtttttaaagtttggctctcactcttcagatctggctattgaaattgctgagggctatggttgtgggaagtgtcaatatcactaaaatgtgcttatttgctctatcatgattagggtaatttaagcttgggactccaaacattcaaacgcttcaaataaaaggaaacaatatggctgtcattaaaatggta

SEQ ID NO: 655985 - DNA, 526 bp, Homo sapiens
tagatacttttaaatgtgagccaaattctgttagaaaacatttaaaacaacaacactggtaatccatttttattagtcctactcaagagaatgtaaagctaaagtgagtgagtagcactgaaaaggggttgaatacaaccttaccccagtgaataaataatttaaaagagcagaaatagatttttttttttttttttaggtcatatgaagttttctaagtcagataagatgactaaagaaattaaacttcaaaagccattagagagactaagaggacttaacaaaacacaacatgttaaattttgccttggattctggtttggggaaaatagttaaaaagctattttgggtacaattgacaaaatgtgaataaacgtttaatattggatagtacataactactattttgtctttttggttgtaataatggtaccactgattggtaaaacaatgtcttgttttcggagatgygtgctaaagtacttagagataaaatgtcataatgactaaaagttactttcaatta

SEQ ID NO: 655986 - DNA, 520 bp, Homo sapiens
cactcactatcacaagaacagcatgaggggaaccrtacccatgatccaattaccttcacccttggtccccgcccccgcccctcgccgatacatggggattatggggattatggggactacaattcaagatgagattttgggtggagacagagccaaaccatatcaattgatgatattggaggaaaaccaacagagttcagtgttttttggaagccaagagatggaagtgatggtaaatggaggaaaaggtcaaccagccaacaactggagtggttgatgctgcttaaaggtcaaatctaatgaggccagagaacagccctttggatggacagcatggaagccattggtacctacccttaaggagaatggtttcagtggacagaaaaaacatttaagtgggagtgctggggagaaacttgactgaagttaaagtatgaatgagagataaagaaatggaggcagtaagtacagataatgcattccaaaagtttctctatttaggcgagctgaaaagtggagt

SEQ ID NO: 655987 - DNA, 376 bp, Homo sapiens
aacttacagtgtctaagccaaatgttatagaattgtgaggtggccttgggtcagtcatytgactttgatgctgccatttgcctcctcaattgtcccagctccctcattcctaaaccacaggaggccacgccaagacagtggctgaagtgtatctacctgactgccatgaacacatgcaaaatggtgtggaggaagactgttcaataaccatgaaatatatacatccaaatgtattcacagtaagaacactatttccttgaggaaaaggggggatagaaaaaaatgttttaaagtttacacattatagccagattatgagtgatttttttccttgtgattgctgaattatctaagttggctacaataagcatgtatt

SEQ ID NO: 655988 - DNA, 589 bp, Homo sapiens
tgtacattggaatggggccagtgactggtgggtgcatacatccaggtttgcccgggatagtcctagtttacacctgttgtcccagcatcactattaatagcaactgtttaatctcaggtgtcccaggtttgaccataaattatacrgtcctcttaccaacgacctaactctggggaccatcaaagagtgaaagagacagggctgggaaatcaaaaggttggaggaaaccaggaaggagagcatctttaatcatgcagggaatagtctctaattaaatgtataaattctacactatcaaataaaaaacccaacaaaacttttattggaacttgatcatttaaactaaagtcatcctttaaaaaaaaaaaattaagcataagagataagccatgaaaattcccagacagaagcaaaagaagcaagaacttcaccatgttttaaattaattataaaccttcaccaataaaagagtttggtactgatggaggaattgacagaaacatcattgaaatagaataaagggtataaacgtagaaccaaacacatatgggagtttaatacatggtagacatgacatttctgatggatg

SEQ ID NO: 655989 - DNA, 589 bp, Homo sapiens
tgtacattggaatggggccagtgactggtgggtgcatacatccaggtttgcccgggatagtcctagtttacacctgttgtcccagcatcactattaatagcaactgtttaatctcaggtgtcccaggtttgaccataaattatacggtcctcttaccaacgacctaactctggggaccatcaaagagtgaaagagacagggctgggaaatcaaaaggttggaggaaaccaggaaggagagcatctttaatcatgcagggaatagtctctaattaaatgtataaattctacactatcaaataaaaaacccaacaaaacttttattggaacttgatcatttaaactaaagtcatcctttaaaaaaaaaaaattaagcataagagataagccatgaaaattcccagacagaagcaaaagaagcaagaacttcaccatgttttaaattaattataaaccttcascaataaaagagtttggtactgatggaggaattgacagaaacatcattgaaatagaataaagggtataaacgtagaaccaaacacatatgggagtttaatacatggtagacatgacatttctgatggatg

SEQ ID NO: 655990 - DNA, 469 bp, Homo sapiens
attgcacccaccccatcatcaactgtgcagcagcagaaagtggccaggagattctttcttctacagtgtcctccagtgccctctaataagaaagcctaatagtactcattgtaaagaaatgaatacaggaattccatccattacagcacgtatggtagacattgaaagttgcagggtgaattggggactgtaaggcctatatattgataattaacrtggctttcatggcagaggcaagtcagattggaagagatggaatggtgatcagagtacagtcgcctacaaatagccctgctcagctcccagagaaagtgtttgcctgtgagggtgatgagggaatctgagagagtattttgaacttcaaatcaggagcaacagagaacagactccctataatggcagggtggcatagacagcccactgcttcctccctcctggacctttcttggtattatttctatgtatagaa

SEQ ID NO: 655991 - DNA, 352 bp, Homo sapiens
tgtgccatagcccctagaagagtcccttgcatgcaatataggcactcaatatttggtgactgaatgaatgagtgaatgtggtaaacatgtctactgctctgactccygcacccagggcagacattactaatcaactgtgactgtttttcatgcaaaaagtagatgcagtgtcagaattctgcttagcataactctccagacaggcacaaccaatctattagagatcacatgtgaaatgttatctatttgccgttcctgaatgagctctagtatttttccacattaaactttcctagtaagggaaatactaaaagatagatggattgtcactcagagaaaataaacacaattg

SEQ ID NO: 655992 - DNA, 620 bp, Homo sapiens
tgtgtgagggaaaggctgcagagccacccggccaacaggaagccatggaggagtctgtctgcactcagtaatagtcataaagcctgtgctctggattttaatgagaacgaagagcaagtgacaaggactttctgtgacaactaatgaacgtaagcatgcygaactgctgcagagaaacaggcttcaagaggtgatgtgttatttcagatgccaggaaatggatcctacctcagtgatcagattctaataacttgctttgccactggcccaggtgctttacaggtcttctaaggtaggaggaggaaaggatagggactgagctcattgtccatctgttaagctcagtggtaggcttcacgcatgggccaatgcatttgacctcccacatggcccttagttgtaggtattagtgtgctaattattcaaaggagagtaataaggccccaggagtcaagccagtaacttgcctaatatcacctgatggtaaggagttaaaaatcaggtggccaacaagctacctgatatatctgcagaaagatattattaggttttatctgtggaaagaaacaactgcctttacctcatgggaaattaatgacaaatctgtgggtcattagtaa

SEQ ID NO: 655993 - DNA, 603 bp, Homo sapiens
ccccacaaatggtatcatctataaacagagcacaaaaataggcttctgaatatttgggttttggaatgagttccagtgagtctcatttagaagtttccaggtatttataccaatatgaaaaataatattgactctggatgcaaacagatgactactgaagtgctaagaaatttaaatatctttgaatatatcttcttcaggtagcaatgaaactggtagyagcaaaatcatgagtaatctccatgccctgtcatgtttccagaagcatccctagtgagtgattgttttaaacagaaactctgtagccactcaaaagtaacaacttgtatttatatagtcgggttttccagacacttcaaccaagactagcaaaacaagattagtttgctagactaacaaggtggcagaataaaaatgaattatctaaataacaaaattaggcatatctgattcataagattgttacatctctgcattttctgtttatatgctatggcaccacatcagtgtgcttgaaagctgcaggttaaaacacatgcattcatggcatacaattaggtttaggacatacaacgattttctgtctgagtttaagaaaggtgg

SEQ ID NO: 655994 - DNA, 531 bp, Homo sapiens
atactgtggggtttcagtttcaacccaggggggtcctggttgggttagaaccctgaatctkgtttgagttcgtatcctaaagaataaagggaataaaggctgtagccactgagctactcaatctggtctggttctggcttttgtgtgtctgtctgtatttttggtctaaatatttggcccaacagaggttaaaggctttgatgttctcagcaaaagccttgtgagatctctagtttatctgtgtgctcaactggaacaaagagactccataaactagaaaaacctaaagaaaatggcacgcgtgaaaaaatgagagccaactcctgttggttgttctgtccacctccctctctcactcctccttctgcctttgctgtggtcccatggtgtttctgtctttctggggacctgagattcagtgtaggagtgaagtccatgattttaaagccttcatgtctctgctttttaactctgcctgctttgctgagctcttataatgagaaataaaccattcagaacagaaaaaacagg

SEQ ID NO: 655995 - DNA, 531 bp, Homo sapiens
atactgtggggtttcagtttcaacccaggggggtcctggttgggttagaaccctgaatcttgtttgagttcgtatcctaaagaataaagggaataaaggctgtagccactragctactcaatctggtctggttctggcttttgtgtgtctgtctgtatttttggtctaaatatttggcccaacagaggttaaaggctttgatgttctcagcaaaagccttgtgagatctctagtttatctgtgtgctcaactggaacaaagagactccataaactagaaaaacctaaagaaaatggcacgcgtgaaaaaatgagagccaactcctgttggttgttctgtccacctccctctctcactcctccttctgcctttgctgtggtcccatggtgtttctgtctttctggggacctgagattcagtgtaggagtgaagtccatgattttaaagccttcatgtctctgctttttaactctgcctgctttgctgagctcttataatgagaaataaaccattcagaacagaaaaaacagg

SEQ ID NO: 655996 - DNA, 531 bp, Homo sapiens
atactgtggggtttcagtttcaacccaggggggtcctggttgggttagaaccctgaatcttgtttgagttcgtatcctaaagaataaagggaataaaggctgtagccactgagctactcaatctggtcyggttctggcttttgtgtgtctgtctgtatttttggtctaaatatttggcccaacagaggttaaaggctttgatgttctcagcaaaagccttgtgagatctctagtttatctgtgtgctcaactggaacaaagagactccataaactagaaaaacctaaagaaaatggcacgcgtgaaaaaatgagagccaactcctgttggttgttctgtccacctccctctctcactcctccttctgcctttgctgtggtcccatggtgtttctgtctttctggggacctgagattcagtgtaggagtgaagtccatgattttaaagccttcatgtctctgctttttaactctgcctgctttgctgagctcttataatgagaaataaaccattcagaacagaaaaaacagg

SEQ ID NO: 655997 - DNA, 531 bp, Homo sapiens
atactgtggggtttcagtttcaacccaggggggtcctggttgggttagaaccctgaatcttgtttgagttcgtatcctaaagaataaagggaataaaggctgtagccactgagctactcaatctggtctggttctggcttttgtgtgtctgtctgtatttttggtctaaatatttggcccaacagaggttaaaggctttgatgttctcagcaaaagccttgtgagatctctagtttatctgtgtgctcaactggaacaaagagactccataaactagaaaaacctaaagaaaatggcacgcgtgaaaaaatgagagccaactcctgttkgttgttctgtccacctccctctctcactcctccttctgcctttgctgtggtcccatggtgtttctgtctttctggggacctgagattcagtgtaggagtgaagtccatgattttaaagccttcatgtctctgctttttaactctgcctgctttgctgagctcttataatgagaaataaaccattcagaacagaaaaaacagg

SEQ ID NO: 655998 - DNA, 457 bp, Homo sapiens
ctgtaatattaaaaacatagtgataaaaaactaaaaattttggttaaaacaacaaggttttcttaakgtatttatttgctcataataagaggtaataaatattgacttttaatcctgaaatctgttactataaaaacttttcagatttgtatatcagaagttcaacttttcctgtactttcatgttacacatgactcacagatcacatcattgtctcctgttccttcttgagaaggaataaaaggtttgggtttcctgcttggctgcgatgataactccttcagatttttcatcaggtctaattttgtactcttggcttttaaatatgtcttaattacttcatgtaaccaggaaacttccatgctatcattgtgagctatggatccccactgctctatgctctggttttcctgtttacattcctttgtaatattatgctcactcatgaccctggaca

SEQ ID NO: 655999 - DNA, 457 bp, Homo sapiens
ctgtaatattaaaaacatagtgataaaaaactaaaaattttggttaaaacaacaaggttttcttaaggtatttatttgctcataataagaggtaataaatattgacttttaatcctgaaatctgttactataaaaacttttcagatttgtatatcagaagttcaacttttcctgtactttcatgttacacatgactcacagatcacatcattgtctcctgttccttcttgagaaggaataaaaggtttgggtttcctgcttggctgcgatgataactccttcagmtttttcatcaggtctaattttgtactcttggcttttaaatatgtcttaattacttcatgtaaccaggaaacttccatgctatcattgtgagctatggatccccactgctctatgctctggttttcctgtttacattcctttgtaatattatgctcactcatgaccctggaca

SEQ ID NO: 656000 - DNA, 291 bp, Homo sapiens
acatgtactttaacctgtctctgttaccagtaaaccaaagccttaactttcagaatctgtcagggacactgtgtggtccctggatcaaccacccatgggcttatgaatgtgttgacygctggcatatgagaagtaattgtctattaggttatgtgactcttcctctttctatttataactccaatgtttctgaacactgaagtaattcatcgaaattactttccaggattagacaaaccttacctgcacaccaaggagatgaattttggcctatgtttggcagaagtcact

SEQ ID NO: 656001 - DNA, 558 bp, Homo sapiens
aagttttcctacgatgagtgcttttgtgattattttgaataacaaagtaatatttaaagaaactctcttgccctgaatgtactttaatttatgtcaattgaagttgcatatagagatcatcaaagtcaagctacaagaaaaagaggaasataacttagcaaagacttagaggattagtcctaatagtgtgaaatcaaaatttcaagtgagggaataaattcagcttttaatgattacttaaatgaagtttaactctagcaggatctacaagaaattggcaacctttggcttcagtaatagaaactcaggatatatgctcttcagtgcttttgcattctgcatcatattgagagacactcctttaaacaagcaataagaaacttcctgtgacaacataataaattcaaaaagttctgtaactcagacaatttagatagaagtcataactttggcctataaagccctgttcaccctaaagatggattaaacaatgaaaaagatattgatatcaaaaattcaatcaggaatttgattaaagcatttcattaaatgtgataa

SEQ ID NO: 656002 - DNA, 558 bp, Homo sapiens
aagttttcctacgatgagtgcttttgtgattattttgaataacaaagtaatatttaaagaaactctcttgccctgaatgtactttaatttatgtcaattgaagttgcatatagagatcatcaaagtcaagctacaagaaaaagaggaacataacttagcaaagacttagaggattagtcctaatagtgtgaaatcaaaatttcaagtgagggaataaattcagcttttaatgattacttaaatgaagtttaactctagcaggatctacaagaaattggcaacctttggcttcagtaayagaaactcaggatatatgctcttcagtgcttttgcattctgcatcatattgagagacactcctttaaacaagcaataagaaacttcctgtgacaacataataaattcaaaaagttctgtaactcagacaatttagatagaagtcataactttggcctataaagccctgttcaccctaaagatggattaaacaatgaaaaagatattgatatcaaaaattcaatcaggaatttgattaaagcatttcattaaatgtgataa

SEQ ID NO: 656003 - DNA, 475 bp, Homo sapiens
ggatccaggcttttctttgctaggagttgttttattatgggttcaatctcatttatccatttcttctaggtttgttttttggttgtttttggttttttgtgggtttttttgtttttgtttttgttttgttttgtttttttttttttgagatggagtctttctctgtcacccaggatggagcttgatacaatctcagctcactgcaacttctgcctcccatgttcaagtgattctcctgcctcagcctcaggagtagctgggagtagaggtgcacaccaccatgcctggctaatttttgtatttttagtagagatggggtttcaccatgttggccaggctggtcttgaactcctgacctcagatgatcacctgccttgtcctctcaaagtgttgggattacaggcatgggccacggtgcctggccattacttgcaggtttttcaatttaytggaatatagttggtcatagtagttt

SEQ ID NO: 656004 - DNA, 558 bp, Homo sapiens
aagttttcctacgatgagtgcttttgtgattattttgaataacaaagtaatatttaaagaaactctcttgccctgaatgtactttaatttatgtcaattgaagttgcatatagagatcatcaaagtcaagctacaagaaaaagaggaacataacttagcaaagacttagaggattagtcctaatagtgtgaaatcaaaatttcaagtgagggaataaattcagcttttaatgattacttaaatgaagtttaactctagcaggatctacaagaaattggcaacctttggcttcagtaatagaaactcaggatatatgcycttcagtgcttttgcattctgcatcatattgagagacactcctttaaacaagcaataagaaacttcctgtgacaacataataaattcaaaaagttctgtaactcagacaatttagatagaagtcataactttggcctataaagccctgttcaccctaaagatggattaaacaatgaaaaagatattgatatcaaaaattcaatcaggaatttgattaaagcatttcattaaatgtgataa

SEQ ID NO: 656005 - DNA, 558 bp, Homo sapiens
aagttttcctacgatgagtgcttttgtgattattttgaataacaaagtaatatttaaagaaactctcttgccctgaatgtactttaatttatgtcaattgaagttgcatatagagatcatcaaagtcaagctacaagaaaaagaggaacataacttagcaaagacttagaggattagtcctaatagtgtgaaatcaaaatttcaagtgagggaataaattcagcttttaatgattacttaaatgaagtttaactctagcaggatctacaagaaattggcaacctttggcttcagtaatagaaactcaggatatatgctcttcagtgcktttgcattctgcatcatattgagagacactcctttaaacaagcaataagaaacttcctgtgacaacataataaattcaaaaagttctgtaactcagacaatttagatagaagtcataactttggcctataaagccctgttcaccctaaagatggattaaacaatgaaaaagatattgatatcaaaaattcaatcaggaatttgattaaagcatttcattaaatgtgataa

SEQ ID NO: 656006 - DNA, 511 bp, Homo sapiens
ttctcattgtaaacctaaataacaaacagagaaaggctctctaaaggaaaaagacacatcttagggaggagggcactgyaatgggaatatgcatgacaaagcaaactatatagattcaaatggtaaaggaagacaaggtctttaaaagaaaaatgatcaacctggaagtacgggggagtagaaaaaaataaataagggaaaaatgaaggggcttctataatagttttgatatagttacctttgactataaagatcaacaacaaggtcaatatcagttgaagtttgggcaggcggttgctggatagatgtcctcacagaagtgtattttgtgtaaggttgctatggcctttgtgcagggttgtggttttgtggtattttgtgatagtttttatcaggcctagaagcatgagaaccctctcttcaaggccttctctgaatctatttgttcaggtttcttcttctctttttaaacattattgacagttttgattctgataactttcatatcatg

SEQ ID NO: 656007 - DNA, 388 bp, Homo sapiens
tatttatgatgtatttgataggcttggatttgtgaatcacctctactgtctatagtggtagatatatctgagcctgcttacacaggacttccatcagattctctcttcagtggaatggaagagggggttttggagaagggratgaaggaattgtgctgcatcagaggtccccacctaacagccacagggactttttctctgctctggccaggccgttgtattaggctgatacaaaagtaattttggttttgtcattgaaagtaatgagaccatctgacttacaatgtctgtgccgtaaccagctcctaatagcctcctaggacagctttgccctgacatacactgtcgtgtagccacgtctgctttgtaactcctgaggtagctgcca

SEQ ID NO: 656008 - DNA, 343 bp, Homo sapiens
catccccaaaagttggcagcttaaaacaactcattattacttgttgtttggcttagagagtcttggtggccagctcatctcacacacatttgcagccaagctggattgtgtgaaagcacagtggggtggtgtgcagggtggcccactagtggttgggagtggatgttgctggaggctcactagttgttgggagtcggtgttgctggaggctcagtgggggatgtcaatgcgtgtagctagtcatggactggccatgtggtttcyatcatgaggtctcaggggagtgggatttcctgcctggtgactggctttctcctggataagtgttctgttttctcagcct

SEQ ID NO: 656009 - DNA, 599 bp, Homo sapiens
cttcatatgttccattaaatcttgtgaatttttttataagtttttttcaaggaagtcaccctttcatccaagtaatgaaaatttgtatataatgtttcacaatattccattatcttgttaatgtctcttgtgtttacaactgtacaatctcattaatccctgatatgtataatttgcgttttctttctttctcacagaactaacttttggccatgttgattttctcctgtttctgttttctgtctcattgatttctaatttctgttttatttcctttcctctacttgttttggacttaatttgctctcttgttttagattttctttttaaggtagaaaattagttcacttgttttgaacttctcttttctagaataagcatttatacaaaaaatttactctgggtctgcttaactttatcccatacatttttatatagtatatttttatttgtattcagttcaatgtatttaaargtgtttcttatgatttcttcattgagctaaagggcattttaaggtgtatttaaatcttccaatagtgtagactttcctgggtagcttgtttttacccatttcaactcattttcattatggtcag

SEQ ID NO: 656010 - DNA, 396 bp, Homo sapiens
tagtttcctgtgaacctgctaattaatatgactttygcagacatttccttaacctaaacagtttgggtttcctgtatatagactgcatgtattctcatctttaacctttccataatcttccctaattacagatgtcattggttcttaatagcaaaagaacagcagtagcttataaagttatattatttgttttttactaatatgtgaagtgattttgtctttcatttcacctctagagctaattatgtcttctaggttaacaaaatttccagatcataccatcattagtttaaactttacaatgaaatcattatttccatttattactagcctgaattatagcaatatttagctaatgaattctcaaaatatttcttgaaaggtgaaagagtacct

SEQ ID NO: 656011 - DNA, 544 bp, Homo sapiens
gtgtaatttatttatttatcagaattttaaattaattgttctgtttaatctcaaaggggtaccaatgaagtcagggcataaggactccgtggttaataaaatggcaagaattaaaaaggattattacattttttcctcatactatgatgsctataattttttaaaacagtagaaatgtttaatttttaaaggctactagtgtctatttcattcaaagatgtgagctcttcagttcaacttgttgtttgaaatttgaacagctttttcttgctcttgttcaatacagttatttaacagtccaggcaggcctctggagttacatatatgtatgtggctatgtgtgtatatatacacagaagtacaaatagcatataaacaatttacataagacttttgcttttgatgaaaattcttctaaaagtgaatataaattaatagcatatggagcctacaaaaattgtctaatagggaactaggaaaagataatttgtgaagaaagagttcgctaaaacagactttttatttttacatgtaataacattat

SEQ ID NO: 656012 - DNA, 544 bp, Homo sapiens
gtgtaatttatttatttatcagaattttaaattaattgttctgtttaatctcaaaggggtaccaatgaagtcagggcataaggactccgtggttaataaaatggcaagaattaaaaaggattattacattttttcctcatactatgatggctataattttttaaaacagtagaaatgtttaatttttaaaggctactagtgtctatttcattcaaagatgtgagctcttcagttcaacttgttgtttgaaatttgaacagctttttcttgctcttgttcaatacagttatttaacagtccaggcaggcctctggagttacatatatgtatgtggctatgygtgtatatatacacagaagtacaaatagcatataaacaatttacataagacttttgcttttgatgaaaattcttctaaaagtgaatataaattaatagcatatggagcctacaaaaattgtctaatagggaactaggaaaagataatttgtgaagaaagagttcgctaaaacagactttttatttttacatgtaataacattat

SEQ ID NO: 656013 - DNA, 544 bp, Homo sapiens
gtgtaatttatttatttatcagaattttaaattaattgttctgtttaatctcaaaggggtaccaatgaagtcagggcataaggactccgtggttaataaaatggcaagaattaaaaaggattattacattttttcctcatactatgatggctataattttttaaaacagtagaaatgtttaatttttaaaggctactagtgtctatttcattcaaagatgtgagctcttcagttcaacttgttgtttgaaatttgaacagctttttcttgctcttgttcaatacagttatttaacagtccaggcaggcctctggagttacatatatgtatgtggctatgtgtgtatatatacacagaagtacaaatagcatataaacaatttacataagacttttgcttttgatgaaaattcttctaaaagtgaatataaattaatagcatatggagcctacaaaaattgtctaatagggaastaggaaaagataatttgtgaagaaagagttcgctaaaacagactttttatttttacatgtaataacattat

SEQ ID NO: 656014 - DNA, 573 bp, Homo sapiens
ggtcacctggtatcaaaaggggcaaaatggtagattataaagacctgtactttcttgtcacttcctaaacatagcaagcattggtctatcttgaacatttctgcagttataaatgagccttgggtcatgattttctgcctttttatcatagacaagatttaatttaggagatgtccttttaatgtgtaatgtgaatartaagtgacacttatgaagcctattttcttccagccattttaattgtcaaatctgtccagtcaagatgcaatgttagaggtttcactgacaacaccgtctgtgtgtgtgtgtgtgtgtgtgtgtgtgtgtgtgtgtgtgtgtgtgtatacatacatatgattgagcaggatttattgtaagtcaaaacagtctcaaatttcttaggacaatacagcttccttggccattcccttggagctctgagttgaggagctggtgatgtgtatttcttttgcatgttctccacattatccctatgcaggccttccatgggcttggttttggaaccagtgatgaggaagatcattagaattgtttttctcaaaaagattcctc

SEQ ID NO: 656015 - DNA, 362 bp, Homo sapiens
cttgaacatttctgcagttataaatgagccttgggtcatgattttctgcctttttatcatagacaagatttaatttaggagatgtccttttaatgtgtaatgtgaataataagtgacacttatgaagcctattttcttccagccattttaattgtcaaatctgtccagtcaagatgcaatgttagaggyttcactgacaacaccgtctgtgtgtgtgtgtgtgtgtgtgtgtgtgtgtgtgtgtgtgtgtgtgtatacatacatatgattgagcaggatttattgtaagtcaaaacagtctcaaatttcttaggacaatacagcttccttggccattcccttggagctctgagttgaggagc

SEQ ID NO: 656016 - DNA, 466 bp, Homo sapiens
tgtcttaggctgggaattagctccttgtaggcaggggctagaatttatttactcttatgtccataatgcctgacacaggaactattctcayatacaaattgtaaggccataattcctgagaacatatgtacattgtagtgactcataaaggcttgaaataaatttttaaaatgataaattgggaagtccatgaacttgacatcttgatgtagaagaaaagcaagggcagatgaagaagttatacaggatacttgaaataccagaagaatataatcagagagcaataaattaatcctagatttttagatgtgaagaagttctgagaaatatttgaagacatggctctagggatgagtacataacagagaccattagccagagtcagagcttttcagagtgaagaaattccattgcagggggcaggactcttgtatactaaatagaaattgtcattaaatggagacta

SEQ ID NO: 656017 - DNA, 488 bp, Homo sapiens
attattggcttgcaatctgtcttaggctgggaattagctccttgtaggcaggggctagaatttatttactcttatgtccataatgcctgacacaggaactattctcatatacaaattgtaaggccataattcctgagaacatatgtacattgtagtgactcataaaggcttgaaataaatttttaaaatgataaattgggaagtccatgaacttgacatcttgatgtagaagaaaagcaagggcagatgaagaagttatacaggatacttgaaataccagaagaatataatcagagagcaatamattaatcctagatttttagatgtgaagaagttctgagaaatatttgaagacatggctctagggatgagtacataacagagaccattagccagagtcagagcttttcagagtgaagaaattccattgcagggggcaggactcttgtatactaaatagaaattgtcattaaatggagactaagcaa

SEQ ID NO: 656018 - DNA, 579 bp, Homo sapiens
tgtagttgccctgggagggcggggaatggggagtcactttttaatgggtacaggatttcaattttacaagacaaaaagaattatggagatgggtggtggtgatgcttgcacaacattgtgaatacgtttaatgacactgaattgtatacttaacagtggttaagatgyaaattgttgagtgtgttttgccacagttaaaaaacggaaaacaatagtatttgaagatatagcccatttcatctggtagctagctgtatgtgtctgctcagctgtggatagatatttatgctgtttctgaactggaggttactggtattctctaaggtataggaaaattgatcttatgtggctaactgaggtggatatagttgtatcagtcagacagtaatgatataatcatgatagtttacatttaacacaacttacatgtgttatactttagaaagcacttcattcatattattacttcataccattttccccttaccatatttgtctctcctttctctgctgacttcagaaaatgtctcttccacactactcaattcatctccttattttgtcaaaattttaagtctc

SEQ ID NO: 656019 - DNA, 507 bp, Homo sapiens
atttacaagaaagtgttaaatttaatccataggaaagcaaaatcaaaaatcaatgaattttccatttgtagttttccctaggggctccactctctagatggcttaaatgcgttagaattaaatgactaggcacaattgtttgttagtgacataaaagcaaggtaagcatttctgctttatgagtccaagcacagggaaacttggttttctttggaaggatatcataaaggcaatgtttatgagtaatccctcattgtctttccttctgtakcattcaatggtatgtactataatttagaaatgaaaactacttaaagaccacttgctaagtttcatgtatttcaaattctcagatcctgagtgtttaaatatgcctatatttcttcatgaaaaaaacataatctttgccaagttagaaaaagaaagtcatattcccatttttaactcaatgtaatcagaaatttggacagtttttagccttcaatacattatgtaatttaggtaaca

SEQ ID NO: 656020 - DNA, 611 bp, Homo sapiens
ttaccatacttcgctaatttgattaccaactacttgaacacagggaccaatgtgcttattaaaaattttgcatattatgagggcattaacttttaagtattcgattgttaagacaatgtatattattataaaccatagaaggcacacttattacctccttaagamccagtctctatttctctggttcatagaactccaaggtcatagagggattggacattcgtgtcttcaattggccctcttcagccctaggataaatagtgattaatctaagccaatggttttcggctctgtctgacccaatgcctctacttcataagaaattcttcaaagaccccttcactattctaaactattagtgagaacacaatgtatgcattcaagttgttgaaaatattaatggtatgctgaagctaacaaaggagaaataatttactgtcaatatatgatccaaaatgtatataattgtgccagaacatttacatatcaaatacaatagaacataatgaaattttcatatcttcgcccataccttgaaacactgtaaataaaaagctacaaatatagtttcattgaataaccaaatgccaaaactgccatttctgtttttg

SEQ ID NO: 656021 - DNA, 597 bp, Homo sapiens
tactggcttttgtccaagtggaatggtccatattgaatatctcaatctgttcccttgctcattgccttctatgcatgttcatgagattaaagggaaggaggaaatgggattggggtttattgcctaaactccctctctgctaggtctccttgaccaatctttttcataagaaaattagtgtttccttgcgtgatcagggaagtttactccccagaaytctgcctgctgctactaacccagagttattgtggggtgtgatttctgtgattccttcacccttctcccctgacattttcgtaagtagtctctttggaaataaacctatgttaaattatcttagtttgagtgtgttctgtttttcctattgagactctgaaatgagtatctaaatgaaaaaatctaccatcttttctcatatacatagtagtttcattcttgcaaaattcatggcatattaaaaccatgcaaaagtacttggcacttaggcagttacatttgggattgtataattaaacaaagcaggttattcaccttcattacattagaaagtcattcaggacatacagcaatccttaattaggagaggctatcccatgt

SEQ ID NO: 656022 - DNA, 597 bp, Homo sapiens
tactggcttttgtccaagtggaatggtccatattgaatatctcaatctgttcccttgctcattgccttctatgcatgttcatgagattaaagggaaggaggaaatgggattggggtttattgcctaaactccctctctgctaggtctccttgaccaatctttttcataagaaaattagtgtttccttgcgtgatcagggaagtttactccccagaattctgcctgctgctactaacccagagttattgtggggtgtgatttctgtgattccttcacccttctcccctgacattttcgtaagtagtctctttggaaataaaccyatgttaaattatcttagtttgagtgtgttctgtttttcctattgagactctgaaatgagtatctaaatgaaaaaatctaccatcttttctcatatacatagtagtttcattcttgcaaaattcatggcatattaaaaccatgcaaaagtacttggcacttaggcagttacatttgggattgtataattaaacaaagcaggttattcaccttcattacattagaaagtcattcaggacatacagcaatccttaattaggagaggctatcccatgt

SEQ ID NO: 656023 - DNA, 643 bp, Homo sapiens
cctagtagctgggattacaggcacatgccaccacactcagatgatttttgtatttttagtagagatggggtttcaccctgtttgccaggctggtctcaaactcctgacctcaagcgatctgcccacctcagcctaccaaagtgctgggattacaggtgtaagccactgaccctgcccaaaaacaytttaaccaatagcaaagcacattatttcattacattttttcaaaagttgccagtaatttcaattaaaaatatatataacatgtttaatgcaatacaaatgcttttcaatgtacaatggggttaagtcttgataagctgattataaattgaaaatacagtaagttaaaaatgtatttaatacctaacttactgaatatcacagcttagcctggcatactttaatgtgctcagaacacttacatcagctgacaattgggcaaaatcattgaatacaaaacccactttataataaagtattggatattttatgtaatttgttgaatattgtactgaaagtgaaaagcagaatggttatattctattcaaagctatcacttttgcttcatcataaagtaaaaataatcataaattgaaccattataatttgttgaccatctgtgtatatgtatgtgtgtgtg

SEQ ID NO: 656024 - DNA, 643 bp, Homo sapiens
cctagtagctgggattacaggcacatgccaccacactcagatgatttttgtatttttagtagagatggggtttcaccctgtttgccaggctggtctcaaactcctgacctcaagcgatctgcccacctcagcctaccaaagtgctgggattacaggtgtaagccactgaccctgcccaaaaacattttaaccaatagcaaagcacattatttcattacattttttcaaaagttgccagtaatttcaattaaaaatatatataacatgtttaatgcaatacaaatgcttttcaatgtacaatggggttaagtcttgataagctgattataaattgaaaatacagtaagttaaaaatgtatttaatacctaacttactgaatatcacagcttagcctggcatactttaatgtgctcagaacacttacatcagctgacaattgggcaaaatcattgaayacaaaacccactttataataaagtattggatattttatgtaatttgttgaatattgtactgaaagtgaaaagcagaatggttatattctattcaaagctatcacttttgcttcatcataaagtaaaaataatcataaattgaaccattataatttgttgaccatctgtgtatatgtatgtgtgtgtg

SEQ ID NO: 656025 - DNA, 584 bp, Homo sapiens
ataaattgaaccattataatttgttgaccatctgtgtatatgtatgtgtgtgtgtacctatataaacatgtatgtttatatatatatttgtgtgtgtatatatcctcggtgtgtgggtatgtrtgtttgagagtgtgtgtgtgtgtgtgtgtgtatgaaattgtaggaaagtaaaatttcttatcttatagatatagcatgttaacatgttggtacctatcttcctgagatgtaaaattttacatggatagatgtgtacatttaccgttgtacacaaagagaaacatattctgtaggctctttgtttttctgtaatttaattcaacactatctggtttatatggatgattacatatataatgctaggatgaaggttcttctctataactttgaaacttccttgattatcaaccctcggtgtattcttagaataggattttattttagaattaagatccttgtttcaggactctagactgttaacacacagaaccaacaattattcagaatggttgggttagttcacattcccacagatgagacatcaaatgtccaggctgcacagcctcattaacactagattt

SEQ ID NO: 656026 - DNA, 584 bp, Homo sapiens
ataaattgaaccattataatttgttgaccatctgtgtatatgtatgtgtgtgtgtacctatataaacatgtatgtttatatatatatttgtgtgtgtatatatcctcggtgtgtgggtatgtgtgtttgagagtgtgtgtgtgtgtgtgtgtgtatgaaattgtaggaaagtaaaatttcttatcttatagatatagcatgttaacatgttggtacctatcttcctgagatgtaaaattttacatggatagatgtgtacatttaccgttgtacacaaagagaaacatattctgtaggctctttgtttttctgtaatttmattcaacactatctggtttatatggatgattacatatataatgctaggatgaaggttcttctctataactttgaaacttccttgattatcaaccctcggtgtattcttagaataggattttattttagaattaagatccttgtttcaggactctagactgttaacacacagaaccaacaattattcagaatggttgggttagttcacattcccacagatgagacatcaaatgtccaggctgcacagcctcattaacactagattt

SEQ ID NO: 656027 - DNA, 480 bp, Homo sapiens
attgatgcctcaggattctgtaacacttgtgccctttgacctctcagagcagctggggatcrtggtaaattctctctcggatttcagagctccatggatttgtgttttgagctctgagtttctttgagcaaatttctgttccaaactgctatccagccatgactggctggatgttttagaagttatgacagaaacgggaccgggtccaggatcagatttgatccagtagttaactggcttgaatccagttccagttagaggcctcctacatctgaatgggtcagaaggaaagtggtagcaaatgataacattggagggttgtaaaatttggcttttcaaaattcacagggatttttgtgttctacccctttgtttcattttcctcgcatacttaggtaggaaaaaaaaatcattggctaagtcaatcaagggaacctgggagtaaagccaatatattaggtaaaaataggatccttaatt

SEQ ID NO: 656028 - DNA, 480 bp, Homo sapiens
attgatgcctcaggattctgtaacacttgtgccctttgacctctcagagcagctggggatcgtggtaaattctctctcggatttcagagctccatggatttgtgttttgagctctgagtttctttgagcaaatttctgttccaaactgctatccagccatgactggctggatgttttagaagttatgacagaaacgggaccgggtccaggatcagatttgatccagtagttaactggcttgaatccagttccagttagaggccycctacatctgaatgggtcagaaggaaagtggtagcaaatgataacattggagggttgtaaaatttggcttttcaaaattcacagggatttttgtgttctacccctttgtttcattttcctcgcatacttaggtaggaaaaaaaaatcattggctaagtcaatcaagggaacctgggagtaaagccaatatattaggtaaaaataggatccttaatt

SEQ ID NO: 656029 - DNA, 480 bp, Homo sapiens
attgatgcctcaggattctgtaacacttgtgccctttgacctctcagagcagctggggatcgtggtaaattctctctcggatttcagagctccatggatttgtgttttgagctctgagtttctttgagcaaatttctgttccaaactgctatccagccatgactggctggatgttttagaagttatgacagaaacgggaccgggtccaggatcagatttgatccagtagttaactggcttgaatccagttccagttagaggcctcctacatctgaatgggtcagaaggaaagtggtagcaaatgataayattggagggttgtaaaatttggcttttcaaaattcacagggatttttgtgttctacccctttgtttcattttcctcgcatacttaggtaggaaaaaaaaatcattggctaagtcaatcaagggaacctgggagtaaagccaatatattaggtaaaaataggatccttaatt

SEQ ID NO: 656030 - DNA, 583 bp, Homo sapiens
cattgttggacatttgggttggttccaagtctttgctattgtcagtagtgcctcaataaactccttctttctttgcctagttacacctcaatgcaacctcctggcaggccagccttaagcccagcagtacaaccatgcatctaagctgagttctcatcagagccaacttcaattataaacaactgagatgatgccagaggccagaatccctgagaacccaatttgctgtcatcaccgcagctgaaacaaggcgcttggcatctagaaaagctgatctgtaggaaatttccaatagagttcaattttttttctaagtttaaagtgtacaatatcatcaaggtcagacactcgagrtaaaactaggcttgtgtttaaatataataaaaatatttgaggaatagtaagagtggtgactacttttacacaggaatgtttcaaataaattgtttttttcttgtgccttttaaattttgtgatttgtcaatgagatgctgacatatttttaatgaagcatgccttgtaaaataataagtgaatgaaaactacacagtaatatttacatcaacaaagctagaagactgta

SEQ ID NO: 656031 - DNA, 479 bp, Homo sapiens
gtggtgactacttttacacaggaatgtttcaaataaattgtttttttcttgtgccttttaaattttgtgatttgtcaatgagatgctgacatatttttaatgaagcatgccttgtaaaataataagtgaatgaaaactacacagtaatatttacatcaacaaagctagaagactgtatgtctcaagaggctccattatctacccagtggccacttgaccaaattaagatccaaataccaaaaagaaaagtaattaaaatttgtgttgtatgccttataagaccaaacctataaaatgaggggaaacttcacaattacttgtaatttgctctgtggaattgtaacagatggattataaagatgattccatgataaacatstaaatgtggttactaccttctgtgctttcttggttcatatttttattttttttctttataaacagacaattcattcttatctatggcaatgcaaactttt

SEQ ID NO: 656032 - DNA, 577 bp, Homo sapiens
aagagtggtgactacttttacacaggaatgtttcaaataaattgtttttttcttgtgccttttaaattttgtgatttgtcaatgagatgctgacatatttttaatgaagcatgccttgtaaaataataagtgaatgaaaactacacagtaatatttacatcaacaaagctagaagactgtatgtctcaagaggctccattatctacccagtggccacttgaccaaattaagatccaaataccaaaaagaaaagtaattaaaatttgtgttgtatgccttataagaccaaacctataaaatgaggggaaacttcacaattacttgtaatttgctctgtggaattgtaacagatggattataaagatgattccatgataaacatctaaatgtggttactaccttctgtgctttcttggttcatatttttattttttttctttataaacagacaattcattcttatctatggcaatgcaaacttttcagatgtattgaatatgtcatagtttttttctattgtaggcatctctaaaaarggtatagaaaacaaacagagaaaagtctggtgttggaaagg

SEQ ID NO: 656033 - DNA, 640 bp, Homo sapiens
tgactactaataagccatctacctttgactctattccaattaaaaatgggttaggaaggtgctttgaaaatcaagtgtgttcatcagggaatcatttacctaagtcttcttaacactgcttagtgaattttaagcctgatatagtaaatacacgctaaccactaaattgaaggggaaagagggagaacaaagagacacgtaaagtacacttactttttctagtaggaaaaagccaattaaaactatcacctattagttttattggaatcagtcttacaggaggtcaaacttcctactgtygctacctattctcaatatttttcttatttcttcctaaacttctagagccgtgctgtccaataaatatgtgagccacatatgtaattttaaatgtactagtaagccccattaaaaggtgaaattaattttaaatatacttaactcagtatgtcccaaatagtaatcatagtaataattttaacatgtaatcaatataaaaaattatcaagcagatattctacgctgttcttcccactccaatgacaaaatccagtatatttaacacaacacatctcaattaggactagccaggatttcaagtgctcaacagttacaggtggctagcgcctactgaattgga

SEQ ID NO: 656034 - DNA, 640 bp, Homo sapiens
tgactactaataagccatctacctttgactctattccaattaaaaatgggttaggaaggtgctttgaaaatcaagtgtgttcatcagggaatcatttacctaagtcttcttaacactgcttagtgaattttaagcctgatatagtaaatacacgctaaccactaaattgaaggggaaagagggagaacaaagagacacgtaaagtacacttactttttctagtaggaaaaagccaattaaaactatcacctattagttttattggaatcagtcttacaggaggtcaaacttcctactgttgctacctattctcaatatttttcttatttcttcctaaacttctagagccgtgctgtccaataaatatgtgagccacatatgtaattttaaatgtactagtaarccccattaaaaggtgaaattaattttaaatatacttaactcagtatgtcccaaatagtaatcatagtaataattttaacatgtaatcaatataaaaaattatcaagcagatattctacgctgttcttcccactccaatgacaaaatccagtatatttaacacaacacatctcaattaggactagccaggatttcaagtgctcaacagttacaggtggctagcgcctactgaattgga

SEQ ID NO: 656035 - DNA, 640 bp, Homo sapiens
tgactactaataagccatctacctttgactctattccaattaaaaatgggttaggaaggtgctttgaaaatcaagtgtgttcatcagggaatcatttacctaagtcttcttaacactgcttagtgaattttaagcctgatatagtaaatacacgctaaccactaaattgaaggggaaagagggagaacaaagagacacgtaaagtacacttactttttctagtaggaaaaagccaattaaaactatcacctattagttttattggaatcagtcttacaggaggtcaaacttcctactgttgctacctattctcaatatttttcttatttcttcctaaacttctagagccgtgctgtccaataaatatgtgagccacatatgtaattttaaatgtactagtaagccccattaaaaggtgaaattaattttaaatatacttaactcagtatgtcccaaatagtaatcatagtaataattttaacatgtaatcaatataaaaaattatcaagcagatattctacgctgttcttcccactccaatgacaaaatccagtatatwtaacacaacacatctcaattaggactagccaggatttcaagtgctcaacagttacaggtggctagcgcctactgaattgga

SEQ ID NO: 656036 - DNA, 499 bp, Homo sapiens
ctgggaggaggtgggggcacagagtcaggctggtgggaccagggtaaagcaaaaagaagaagcaaataagctacaatacaattctgcctttcttcatggtccaggacacatagctgtcctctgcaaacaactcacaaccttcctgtgaccagttatcactagaccctcagctgacagaaaaattgttaagttagctcactgcaaccttggcattgatactgcacaaagccctcttcagcacagagcacaagctccattctataaaatcctgtaaaatttccagcaggcctttgtctcttcrcagttagctcttctcttgctgacttgcctgttgctttcttgcaatgtattttcatactttctgtaataaatctgtctttatttatctacaactgtcttggtaaatttttcttaaccctacgttaccagccccagatagtcactgttcattcaccagagtaaagatatcacatgacttggccaggcacggtggctcatc

SEQ ID NO: 656037 - DNA, 499 bp, Homo sapiens
ctgggaggaggtgggggcacagagtcaggctggtgggaccagggtaaagcaaaaagaagaagcaaataagctacaatacaattctgcctttcttcatggtccaggacacatagctgtcctctgcaaacaactcacaaccttcctgtgaccagttatcactagaccctcagctgacagaaaaattgttaagttagctcactgcaaccttggcattgatactgcacaaagccctcttcagcacagagcacaagctccattctataaaatcctgtaaaatttccagcaggcctttgtctcttcacagttagctcttctcttgctgacttgcctgttgctttcttgcaatgtattttcatactttctgtaataaatctgtctttatttatctayaactgtcttggtaaatttttcttaaccctacgttaccagccccagatagtcactgttcattcaccagagtaaagatatcacatgacttggccaggcacggtggctcatc

SEQ ID NO: 656038 - DNA, 630 bp, Homo sapiens
cctgaagttactcacatctgttcctgtttacagctgtcaaagccatcttgaatatgttgccatctgcacaccaaccttgtgatgagggcaggaaggcattatgattggtgtcattttacagtccaggtgctggtaagaccataaagtgatcttctgacctctttcttctyatgtttcacagtctgatctgggtgtttaaactgactacttcacactacctctcttagaaaaggaagaaccaatttagaacaatgtgcttggagaaatgaagactccctacgttccctccgctctctacctcccacacacccactaacccctactacagctatgccccggtgtcttcagggagctcacccaacaggagcaagaggacttctttaagctgagactgcaaaggtcagagacaccactcagcaaagagccaggaggtgtgcattctaagcagcaaagcggttctcaatattcaggaaaagaccagatgtgggggctcatgcctgtaatcgaagcactctgggaggccaaggcgggaggatcccttgaggtcaggagtttgaggctgcagtgagctacaatggcacccctgcactccagcgtgggtaacagagcaagacttgtcattacataaat

SEQ ID NO: 656039 - DNA, 630 bp, Homo sapiens
cctgaagttactcacatctgttcctgtttacagctgtcaaagccatcttgaatatgttgccatctgcacaccaaccttgtgatgagggcaggaaggcattatgattggtgtcattttacagtccaggtgctggtaagaccataaagtgatcttctgacctctttcttctcatgtttcacagtctgatctgggtgtttaaactgactacttcacactacctctcttagaaaaggaagaaccaatttagaacaatgtgcttggagaaatgaagactccctacgttccctccgctctctacctcccacacaccsactaacccctactacagctatgccccggtgtcttcagggagctcacccaacaggagcaagaggacttctttaagctgagactgcaaaggtcagagacaccactcagcaaagagccaggaggtgtgcattctaagcagcaaagcggttctcaatattcaggaaaagaccagatgtgggggctcatgcctgtaatcgaagcactctgggaggccaaggcgggaggatcccttgaggtcaggagtttgaggctgcagtgagctacaatggcacccctgcactccagcgtgggtaacagagcaagacttgtcattacataaat

SEQ ID NO: 656040 - DNA, 630 bp, Homo sapiens
cctgaagttactcacatctgttcctgtttacagctgtcaaagccatcttgaatatgttgccatctgcacaccaaccttgtgatgagggcaggaaggcattatgattggtgtcattttacagtccaggtgctggtaagaccataaagtgatcttctgacctctttcttctcatgtttcacagtctgatctgggtgtttaaactgactacttcacactacctctcttagaaaaggaagaaccaatttagaacaatgtgcttggagaaatgaagactccctacgttccctccgctctctacctcccacacacccactaacccctrctacagctatgccccggtgtcttcagggagctcacccaacaggagcaagaggacttctttaagctgagactgcaaaggtcagagacaccactcagcaaagagccaggaggtgtgcattctaagcagcaaagcggttctcaatattcaggaaaagaccagatgtgggggctcatgcctgtaatcgaagcactctgggaggccaaggcgggaggatcccttgaggtcaggagtttgaggctgcagtgagctacaatggcacccctgcactccagcgtgggtaacagagcaagacttgtcattacataaat

SEQ ID NO: 656041 - DNA, 576 bp, Homo sapiens
tggccaccgaaagattgctccttaacacaggctaaggaccagcttctttgggagagaacagacgcaggggcgggagggaaaaagggagaggcagacgtcacttcctcttggcgactctggcagcagattggtcggttgagtggcagaaaggcagacggggactgggcaaggcactgtcggtgacatcacggacagggcgacttctatgtagatgaggcagcgcagaggctgctgcttcgccacttgctgcttcgccacgaagggagttcccgtgccctgggagcgggttcaggaccgctgatcggaagtgagaatcccagctgtgtgtcagggctggaaagggctcgggagtgcgcggggcaagtgaccgtgtgtgtaaagagtgaggcgtatgaggctgtgtcggggcagaggcacaaggtytcatacttacctggcaggggagataccatgatcacgaaggtggttttcccagggcgaggcttatccattgcactccggatgtgctgacccctgcgatttccccaaatgtgggaaactcgactgcataatttgtggtagtgggggactgcgttc

SEQ ID NO: 656042 - DNA, 625 bp, Homo sapiens
tgcccaggtccaatgtcatgagagtagaatcagagtgccacaggcatggcctgagactaggaagagagccatgctcactgacccatcccatgtctgggcttccagttagaactagagtttcattcaacctacatgtgcctataggtcctcactgcagcaatgacatctctcagctcagtaatggccacttggagcaggaatatgatctttatatggaagactcagtggatccttatcaccttcatagaaaggtactcacctcccacgtcaagagaaaagccaacatgtttttcctccaatgcataaaaggaacttccatagggcaggcaggagtcaggctgttcaagacaactggaaggagttgaataacatctatccagtgagtcctgcaagacttcaggctctactgcctccagcagctccctgctgagcctggaaaaggaggaaaaagtaaagaataagccaggggaaatcagacacaacagagccccaactaggtttcatgggtagcataaggaagtggttaaaaaagtaaaaggakagatccattaatgaggtaacaaattattgccttcatgttgggacagaacagggccaaatggaaaagaatgaaagagaaagacag

SEQ ID NO: 656043 - DNA, 420 bp, Homo sapiens
ggtcttggtcttcttccacttcttggtacttttcaatttctgcaataagttcagacatggacagacatattaagctggttctcctacacacataacaatccactgtctaatcctcacacagggacttcaggctcctcagcatgagaataggacackgtgagagatcttcttcaggaggcctgaaggctgatcatgatagagattcctgggtttttgtcccagaaactgtgggtaaaattccctattctggtagatcgttatcccaagatcatttgtcccaagtttgtgcaaatggttatgccatatttttccaatcgatttaaagcaaatgcccccaaatggttgctgggagaaaaactgcaatattcagccctgtctcatcaaatactcagattcttcatggtagcgaggattttagat

SEQ ID NO: 656044 - DNA, 606 bp, Homo sapiens
ctcactctttcactcaggctggagtacagtggcaagatcacacagctcactgcagcatggaattctcaggccgatgacatcctagggcctcatccactgagtacctgggactacaggctcacaccaccacagccggataatttttctgattttcagtagagatgaggtctcactatgttgcctaagctagtttcaagcttctgagctcaagcgaccctcctgccacagccttcctaagcgctaggatttgaagctgmgcctggctggctttcacatctttgctatgtagtttatatttcttggtgttattgtaaatgtttatgaaaggaatcttttaaaaattttgtattaaaattatatatttaaggaattacatatattatatatatttaaggaatacaacctgaggactacatatacatatacacatacacatacacatacatacacatacacatacacatacacatacacatatacatatacatatacatatacatatacatatacatatacatatacatatacatacacatatacgtatactatacataatgaactaatgcctactaggtgaggggctgccttgtgagcaaacccaaagtc

SEQ ID NO: 656045 - DNA, 593 bp, Homo sapiens
tgaacttttacagggctgagatttgcaaggaaggtgggacaaaggggtaagataactggggatgttggtgaaggattgaaatgatcaacagttgggtttaggcttgaggggcaaacaagtgaagccaaagagtatctggtagtttgagagaggatgtaatggtccagagattggaggtctcactgtaattgtagaattcttttagtttaagagagcaactgcttcacacccattaggatggctatttttttttttaaagtaacccaaagtaagtgttgacaaggatgtgaagatattaagacctgcattgctggtaggaacgtaaaatggtgcagctgcagtagaagacagtaggacagttcctcaaaaaaaaagttaaacatagaattatatatctaacaattccactcctacgtatataccccaaagaattgaaaacagggattcaratacttttacaccagtgttcatagcagcatcattcacaatagttgaaaggtggaaacaactccaatgtccatcaacaggtgaatgtataaataaaatgtgctatgtacatacaatggaatattattcaatcttaaatgaaatta

SEQ ID NO: 656046 - DNA, 568 bp, Homo sapiens
gtccaataacagtaataaaattgaaaccatagtttattgtacattgatgaaaagtttcctggcctagtaaagcccaggactcaatggtttcactgctcaattttacaaaacatttaaagaaataatacygatcctactttaactatttcaaaaaatggaggaggagggaatacttccaaactaattctgtgaggctaatattaccctgataccaaaaccagacaaaaacacatcaaagtaagaaaactataggccaatatccctgataagcattggtgcaaaaatcctcaacaaaatactagcaaaccagatttaacaacacattaaaaagatcattcatcatgactaagtgggatttatccctgggatgcaaggatggttcaacatatgcaaatcaatcaacgtgatacaacatatcagcagaatgaaggacaaagccatatgatcatttcagttgatactgaaaaagcattggataagtcactattacttcatgataaaaaccctcaaaaaactgggtatagaaggaacaaacttcaacacaataaaagccacatatgacagacct

SEQ ID NO: 656047 - DNA, 553 bp, Homo sapiens
cacctgccatgggtagcagacatggctgctgccttgtccaggttccccgagattcgcaacttctgttggtataggtgggatgcgccagctcctgtagaacttcaggtcactgccctcagactatcgagccactytgtcaacaaatgcagagtcagaagtgcctaaatgttaatttttattcccccctccttatttaccctcctaaagctattaactaatgactgttgggtgaaaaactgcaaatctgccttaagttaaaccaactatgaggtgtatgttataattaaaaatccccaaccataatcatgcctaagttccggtccctgccggtatttctgcctaagactgaacagttatcttttctacctcctgtcctccttctacttcgatgtcagtctcccctgggagcacttgtttttaaaattgcacacaaatattcatctcacagcctgcttctgggaaatttaaacaatgatgaaatatcaaataagaaaaccattatttgagtccaaaaatttagttacgaagatttattacaccaattgtgtgatgt

SEQ ID NO: 656048 - DNA, 545 bp, Homo sapiens
ttgcagccgggcatggtggctcccgcctgtaatcccagcactttgggaggctgaggtgggtggatcacctgaggtaaggagttcaagaccagcctagccaacatggtgaaacaccgtctctactaaaaatacaaaaaaattagctgtggtggtgggcacctgtaatcctagctactcgggaggctgaggcaggagaattacttgaaccctgggcgcagatgttgcagtgagctgagatcgcaccattgcactctggcctgggcaacaagagtgaaactccatctcaataaataaataaataaataataaaataaatcaataaaagtratttgcattctcttttctaagaactctgttcatttcctttgaccatttaaaaaatcggattgttgggctttatttcttattgacttagagaagctatgtattatagaaattaacctttatgtgtaatataaagatacttttgtcatttgtctttctattttacttctgttcatgtatttttcatgtagaaatttttaaatttctgatttttgacacag

SEQ ID NO: 656049 - DNA, 590 bp, Homo sapiens
aatatattaaatttgtagaaacctcattccagaacatcaaggcaattttaccgaggaaatgtaagaactaagctcttctacctctgcaagaacttaaaggtattgaatggctgcagttacaaattgatttgatatacatcatacttggagatataacccttctgtctaaaataaatcaataattttgctcagtctttgctttgtgcctagtgtgctctctatagaaagacaaactcctgtttgattatcaaagttggtctggcaatggaatgttctgkttactcaaatattttacttaattgagaattcctatccataccacacagcgctgaccaatttcagagaactacaagtaagtgaaataccgtataatttccattgaaaatgacttttctcttacctaatgattcagaaggcccttgcatttccagtgcccaagggcaccgttagaaacctggaactgtagacgcaggaagcccccaaaactgggacatttgcgttaagtctgtttcaattccagagttgtcgtgtagaagtcatccctcatagcaagttgttcatttatcatttttctttgattttcatacaag

SEQ ID NO: 656050 - DNA, 583 bp, Homo sapiens
ccacactttggaaatacagtcaggcgtggtgactcacgcctctaatcccagcactttgggmggccaaggcgggcagatcacctgaggtcaggggttcgagaccagcctggccaatgtggtaaaaccccatctctactaaaagtacaaaaattagctgggcatgtggtggcacctgtaatcccagctactcaggaggctgtggcaggagaattgctagaacccaggaggcagaggttgcagtgagtcgagattgcgccattgcactccagcctgggcaacagagtgagactctgcttccaaaaaacaaaaacaaaaacaaaaacaaaaaacccccgaaatactagaatgttaaggggacctagaaaactttgattattgacatcactcaacttcatccttgaagaatgagaaagagctcagcctccctgaaaggaagtgactgtttagataaggatgagcaaaacagaggtactgttagcaagaaagaaatggggcaatgcatattggagagggaccctagagcataggtctcaatggcaaagtcagtaataattaaaatgaatcatcaaaaaaaaggtgcaag

SEQ ID NO: 656051 - DNA, 574 bp, Homo sapiens
tgttaccatggctttgtaatcttagttttgaagacaggcaaatgtactagtcaaatatgccaaactaacttattaagagcattccaaacaacattttggatccaattctttttaaatgcacttagatctttcttatatcagaatcaagcatatttgtcaattacttaatgtttattattaataactaaaatgatttgttattaataggaatagcttttttaaagtaccttgatctttgtgtttctaagatttgtcctagtccatttatggatctgaaataaataataaatgaggaagacaaagtttaaaagtaaaaattaactttttaaaaaagtatacaaagtatattgtttctaaaacaggaaataagcatacccaaatacatctggaaccagaaaaaaattaaaaacagaaaaacaaaacttgctttaaaaaataattatgattttccttcaaacaataaatcacatatattccactcatacatcaataaaacatatatgcaaaaattcrcacaactgtcagattaagggctactttgtggttaataaaaagacgcttcactttagaaaaa

SEQ ID NO: 656052 - DNA, 474 bp, Homo sapiens
atatgtgtcagcactgtgcaaagtttaccaacattgtctcatgtaatactcaaagcaaacttatgataggcattatgccttttacagaggaggctttaaaagggtaaataagctccctaagaagacaatgagaaacagaccaaggattagaacccaagcagattccaaggtctgtgatcttcaacactacgcaacaatacctaccctccacatggagacattatatttttttatagtaaagtttaaggacattactattaaaataagatgaaatatgtggaaaaaatrtgaatttctttcttccacaatcattaatcatggcaaataatctcctaatgagccttacctttattgattcaatttataatatatactataagaactgagatgacagattcaaaatctaatgtcagtagaacttataaatactaagaatagtaattttgagccatcacactcaaagcattgtacaca

SEQ ID NO: 656053 - DNA, 474 bp, Homo sapiens
atatgtgtcagcactgtgcaaagtttaccaacattgtctcatgtaatactcaaagcaaacttatgataggcattatgccttttacagaggaggctttaaaagggtaaataagctccctaagaagacaatgagaaacagaccaaggattagaacccaagcagattccaaggtctgtgatcttcaacactacgcaacaatacctaccctccacatggagacattatatttttttatagtaaagtttaaggacattactattaaaataagatgaaatatgtggaaaaaatgtgaatttctttcttccacaatcattaatcatggcaaataatctcctaatgagccttacctttattgattcaatttataatatatactatawgaactgagatgacagattcaaaatctaatgtcagtagaacttataaatactaagaatagtaattttgagccatcacactcaaagcattgtacaca

SEQ ID NO: 656054 - DNA, 556 bp, Homo sapiens
gttttattaatgagaacgatatctgccaaagcaacttgcctaaaatagcaaacaaaaagaaatgttaagaaattttaaataatatacatgcatgcagattaatacatcaaaagagaaatgttaacaaattaaaaataaataaaaacacctcatgtaaatcaatatatcagttaagaattatatagtgctctataggagtgattcagtttactcctaatccgctaayttttcaatgtgaatgaattgtattcattactatgcaagttcagatttcacattacccatttgcaaagtatttactaagttctgttacttgctactcttgtgctacaaagataagtctcaaaaagtttacaatcaaaaggatgattttaaactcataattttctttgtgaagaaaagcataaaattcagatatccaatatggtaaaaagaagagtttacctactaaaatactgtaatatttaccaaaattttcaaagaaatagaataacttcacttaatactaaaaactgtattaaacagggtttttttaaaactatacttcagagctggg

SEQ ID NO: 656055 - DNA, 480 bp, Homo sapiens
tggtttcctgatacctattgatttttttcccaaaaacttaatagttttccaatttgactcaaatagcatttgtgagtaacaggggctgaatcaatgtccgttcttttcaaggaaattactttaccatgacaattatttaacttagaactggagagtgtcagtctccaaaacgggaaacaactgaattgccaataagaattttgttcactttcttggctaaaacatrattttaattaatgagggggaaaattaaatctactgtatcactactccaaacaataagtcatttaaaaaagcatgaattttttcactcagtaaaatatctaacatacataaatcattttgtaatttttaaaaattcattgatttttagtctaataaatagtttacaaatcctactgttaatatttgcctcttaagttgaaatgtaagagtatattaatgctttattctaaaactggtatttatctttgatataat

SEQ ID NO: 656056 - DNA, 549 bp, Homo sapiens
agagtctgggaacacccagaccagcaatcctagcctcactgaagaaaataattaaagagcaggccagtcaacactgttctaataagacaaagttgtttttacaatgttaacattgcctaattaacaaactttttatgttgttaatttcatcatgtacgagttgctatttcctggataaaaattgaaacatacatgytaacttacataatgtcgataacagtgggaaataatatagagcaaaaatattttctcctacgtgtactattttcacctttggttggcctaagagaaaaatccttatatggtgatatgagaacattcttcatcagatacagaggaatctttaaccaagcatacagcagcctcttattgaatagacgtacattttaggactatcatgagagagaacgcgttttattcaatatatttatagtatatttatagctcttctacagtatatatgtgaattactaggagaaatgagaaaaaaataggtgactatctagtcctcaaggattttaatgcctggaaagaaagattcaatgtata

SEQ ID NO: 656057 - DNA, 611 bp, Homo sapiens
caaactccatgcagttaactactattccatattgcttttctaagtaccaggtacttgatcacagaattcttaaggctcactttcaccagcatgctcagaaaaaagcctatttctattaccttccctttttatttcctatgctgtttggcacagaaactccaaattcgtttgagttgcaagagagcaatgagagatggtaagaaagactacacagatactatctctgttatatcgagatatatgtgattttgcacatacaaagatgcttgcagttgccttaaacctactatttttttgtgcctgtaatttttaggacatcctgagctgactgaaattacaattctattaaagtgtcaggaaattaaagcatgtaaaacatcataaatattccccctaatatkataattacaccatgctcttcctttagcaagttactgtttattttttaaaaaaatattcttggccgggcacggtggctcaagcctgtaatcccagcactttgggaggccaaggcaggtggatcacctgaggttaggagttcgagaccagcctggtcaacatggtgaaacctcgtctctactaaaaataaaaaaattagccaggcgtggtgg

SEQ ID NO: 656058 - DNA, 599 bp, Homo sapiens
taataaaaagattggaagtacataaaagtgtgtattgtaattatttctgagggtcatcttgtgtaaaatacttttcttttttacacttttcagtgtttctctgtatgagcatgtawtacttttgttaaaataccaagagttatataaaaaaaaaataataagatgaattccttgatatgtaggcagcagtttcaaaaaatgttttaagactaaagaatagcctagaggcagttaaccaattgcagttacttgaagtgaatgaggggagaggctaacttgggctggaccatagaattaactcttgaaataggccataagcagtagttcagacagctggtcagggaatgtccctcacctttaccacctatctcaatagatctaggaagtggctttttctttgcttaacaataggtccagtgataagcagaactgccctccttcaaagctccctgaagtgcaaaaagactaaggaagatcaaaggaaccattaggcactccctgaatttcaaaggtttctcctatgggaactctgagaagcagctgtgtgtttgtacattacatagaaacttccattactgtgcataaatataacatgacaa

SEQ ID NO: 656059 - DNA, 599 bp, Homo sapiens
taataaaaagattggaagtacataaaagtgtgtattgtaattatttctgagggtcatcttgtgtaaaatacttttcttttttacacttttcagtgtttctctgtatgagcatgtaatacttttgttaaaataccaagagttatataaaaaaaaaataataagatgaattccttgatatgtaggcagcagtttcaaaaaatgttttaagactaaagaatagcctagaggcagttaaccaattgcagttacttgaagtgaatgaggggagaggctaacttgggctggaccatagaattaactcttgaaataggccataagcagtagttcagacagctggtcagggaatgtccctcacctttaccacctatctcaatagatctaggaagtggctttttctttgcttaacaataggtccagtgataagcagaamtgccctccttcaaagctccctgaagtgcaaaaagactaaggaagatcaaaggaaccattaggcactccctgaatttcaaaggtttctcctatgggaactctgagaagcagctgtgtgtttgtacattacatagaaacttccattactgtgcataaatataacatgacaa

SEQ ID NO: 656060 - DNA, 544 bp, Homo sapiens
gcagagccaggatctgaactccaattttacttagatactccttcatcccccagccacatacatcaggagaagctcacctcatactcmatctcagacaggcctgattgacataagagtaaatccagcccctttccagtgtctggctcaggaataggccagtgatccaattctggtctggcttctgaccaccaattcatagggttatcataagaactaaatgagctattatttataacatgcttaatacatgggaagaccacaataaatggtagctattgttattattaaaagcttctattatcaagaacaactgagaaagaatgtccaaaggagggcaagagagagtggagaagccaagggaagagtttctggaaggacacagcaggatgaaatgccacgatggaataaagtgatgtgagaactggaagagtctagttaggacataacaggtgattttttgccagagtgttgtttgaagaagggctgagattgaagccaacccaccaatgaagagtgaacctgcacctgagtagagacagtggat

SEQ ID NO: 656061 - DNA, 544 bp, Homo sapiens
gcagagccaggatctgaactccaattttacttagatactccttcatcccccagccacatacatcaggagaagctcacctcatactcaatctcagacaggcctgattgacataagagtaaatccagcccctttccagtgtctggctcaggaataggccagtgatccaattctggtctggcttctgaccaccaattcatagggttatcataagaactaaakgagctattatttataacatgcttaatacatgggaagaccacaataaatggtagctattgttattattaaaagcttctattatcaagaacaactgagaaagaatgtccaaaggagggcaagagagagtggagaagccaagggaagagtttctggaaggacacagcaggatgaaatgccacgatggaataaagtgatgtgagaactggaagagtctagttaggacataacaggtgattttttgccagagtgttgtttgaagaagggctgagattgaagccaacccaccaatgaagagtgaacctgcacctgagtagagacagtggat

SEQ ID NO: 656062 - DNA, 587 bp, Homo sapiens
ggaataaaacacattttaaactgycctgtttacctagaggatttgtaaaaacttgtaaattagatattaatttgttatatttcattttatttttctttatctaaataatgattttatagtttctaatattttgggaaaagatactcttttgagacaaaatgatacaatcacttcaaataatggctgtgagcttctgcagaagacaggtaaataaaaaccaactgaaacagaaataatccccaacaaatgagctccagtacccctgggattggtccaggcatctgggtgaattgtgtagcaggtgggatttggcttcaaatgtcagtgatagatcctgctcacaagagagccccaaaccctccttccaatgatgctcattttcaaggaccactccaatctacccattccctttctaggttgagagttcttaaaatgtatagctagctgcagagaacccattaaatatttattggggtgaatgcgtttaaagctcttgctttgcttccttggaatccagtgtcccgaatttaaacaaccagttaacatctagaacaataaaaggttaaagatagaaggactatagaaat

SEQ ID NO: 656063 - DNA, 641 bp, Homo sapiens
ggttagtaatatttgtagcttgttaaccaactggagcaaaaggactttttaatatgaataacagtggtctcgtgccataagtatttctctcatacatattaaaatagcatgttattttatttaatattgaaggcctaaacacaattgaacataaggtatggcttggaatttagaactgctgagcaatatggttgagagggagaccttaatttagtcaataaaaattcataattaatgttaagctttgtgctcatattatatgccactctgggattagacaaaagacraaaaacagttccatattttgaacgatatattctacctcctgcagtgtattagcattgtagcgtaggagactatttctgtatgttattagtacagaaactgcccaaaaaggtgatggttgaagttccccagccagttaaagggcacaccgtgggggcagcatatctccatgggtctatctctagcaaacagaatcccagaaacttgagcacctgatatagcagaaggaaataaagattatagtaagtatattcatgagagagaattttttttgcctccagatgtttggggtttggatatgtagggtaaatataaatgtctaatgaaagtaattactattatatttgatttgatat

SEQ ID NO: 656064 - DNA, 579 bp, Homo sapiens
ggaggcaggggtaagggaagggattcattaacaagaggggaccaggcacagaggaagagggagtcctacaggcataaagaatgctaaatttgaaaagagcaaagagttttcaacaccgtaagaaagaaaaaaagtttaccaaatctgatggcctttttcctttcatagttacaccaatactatacgtgtcatacttaagaatatttgttcttataagaaaagaacacaatagacttgaagtctggagatcraatgttattcctgttttacttcaactaaccactctggttgacctggtactttcctttgaggttttcttttatgtatttgttttactgtatatttaaatacacacatgtgtgtatgtatgtgtgtatctgttcctgctaacaaaagcaatttattcttattttgaaatttcaactattagtaagacatataatggaaaaaataagtaaagatcccccataatatctctcctagagaaaaaccactcagtgatttggtgtccattccttcattttttttttctattaacatttagtttagtctttttaacaactgcatagtattccacta

SEQ ID NO: 656065 - DNA, 514 bp, Homo sapiens
gaattcataggaaaagagctccaatatatattatcaagtgaatgtaaataaaaaatacaatggaatatataggatacttctatttggggtgaagaatgtataatgtaatatataacatacatatgcttatatataatacgattattttgaaatgatatgtaagaaaccaataactgtagttatctttgggaggaagattgacaattttggttggaaggaagattacttttaattctataaactttggtattattggaaattttaccagatacatgtataactatttacaattttaaaagttaataaaaatttattagctgggtgtggtgacacatgcctggagtcctagctgctcaggaggctgagatgggaggatcacttgagcacaggagttcaaggctgcagtgagctaccatagcaccactgtactccagcctgggtgacagaatragaccttgtctctaaataaaaaaatttttaaaaagttaacaaaaatttttcttggagaaaagct

SEQ ID NO: 656066 - DNA, 515 bp, Homo sapiens
gaaaaaacaatctaagaagatgaagttaaagacagttttgtaaaagttgtaaattcaaatagggttcccaaagaaactgaaatttgagaktggtgaaagggagaaacatggagttttctagtagaaaaacattccaggcagaggaaacagcaagtgaatggctctgaggcaggagcctgcctggtgtgttcaaaaagcagctaacaaggtcgatgttgcccaagtgaagtgatttgaaagggagaagaagtaggaaatgaggtcagataagtaatgtagggtatgagggtgtgcaaatgacatggtacctagtaggtcattgtaagtttggttggttcatactttgagaaactattaaagattttgggcagaggagtgacatatattttaaaaggattctggttgtcatgttcagaacaaaccgaaggggagaaagcaaagaacgaggacgactatttaagatgctattgaaataagccaagtgagagaagagagtagtttggactgtggtggtt

SEQ ID NO: 656067 - DNA, 515 bp, Homo sapiens
gaaaaaacaatctaagaagatgaagttaaagacagttttgtaaaagttgtaaattcaaatagggttcccaaagaaactgaaatttgagagtggtgaaagggagaaacatggagttttctrgtagaaaaacattccaggcagaggaaacagcaagtgaatggctctgaggcaggagcctgcctggtgtgttcaaaaagcagctaacaaggtcgatgttgcccaagtgaagtgatttgaaagggagaagaagtaggaaatgaggtcagataagtaatgtagggtatgagggtgtgcaaatgacatggtacctagtaggtcattgtaagtttggttggttcatactttgagaaactattaaagattttgggcagaggagtgacatatattttaaaaggattctggttgtcatgttcagaacaaaccgaaggggagaaagcaaagaacgaggacgactatttaagatgctattgaaataagccaagtgagagaagagagtagtttggactgtggtggtt

SEQ ID NO: 656068 - DNA, 515 bp, Homo sapiens
gaaaaaacaatctaagaagatgaagttaaagacagttttgtaaaagttgtaaattcaaatagggttcccaaagaaactgaaatttgagagtggtgaaagggagaaacatggagttttctagtagaaaaacattccaggcagaggaaacagcaagtgaatggctctgaggcaggagcctgcctggtgtgttcaaaaagcagctaacaaggtcratgttgcccaagtgaagtgatttgaaagggagaagaagtaggaaatgaggtcagataagtaatgtagggtatgagggtgtgcaaatgacatggtacctagtaggtcattgtaagtttggttggttcatactttgagaaactattaaagattttgggcagaggagtgacatatattttaaaaggattctggttgtcatgttcagaacaaaccgaaggggagaaagcaaagaacgaggacgactatttaagatgctattgaaataagccaagtgagagaagagagtagtttggactgtggtggtt

SEQ ID NO: 656069 - DNA, 559 bp, Homo sapiens
aggcaggagcctgcctggtgtgttcaaaaagcagctaacaaggtcgatgttgcccaagtgaagtgatttgaaagggagaagaagtaggaaatgaggtcagataagtaatgtagggtatgagggtgtgcaaatgacatggtacctagtaggtcattgtaagtttggttggttcatactttgagaaactattaaagattttgggcagaggagtgacatatattttaaaaggattctggttgtcatgttcagaacaaaccgaaggggagaaagcaaagaacgaggacgactatttaagatgctattgaaataagccaagtgagagaagagagtagtttggactgtggtggtwttgggggttgggggggataaaaggtggttgttttccagatatattttgaaggcagacgtatcaggattgaaaaagaacactcaaggataatatcaagactttcagactgaggaacagaaaggatggagttgcaattaactgagatggaaagactgtgagagcagcaggctttggggaaagggagagaaggaggaaggtaaagcagcccaa

SEQ ID NO: 656070 - DNA, 585 bp, Homo sapiens
ttgttagtatgtctagagaacacagggggtctcccatgaccctcactaaacctaggctctgggaatcacatctcccacacttcagtgcccaatcccatcagacaagctagagaatgacacgcctcccaccacactggggaaaatctgtcctcttttgttcaccaagagggaaaaggtaaagaagcagcagtaacatatgatttgaaagcaacaagtccaaggagatgtttaaaagrtgaactgagacataataacattctttaagagtttatttgcacaaacagcaattcaggcatctggcagctccaaaccagaagtagcttgggagctccataaaggaaacatatagatgaataggaaagtaaagcaaaggaaatatttgatgggttacctacacacagttggcttatttggtctatcccattggaaagtctctagttgtatcattataagttagttggctacttttgattggttgagactaagttctgttgttcttcaagatagacatttacaagaaatagctcaagttaagttttgcttatgtttggaaatcaagcaaggttaaggtcatgtatgaagctt

SEQ ID NO: 656071 - DNA, 605 bp, Homo sapiens
tcttcatttttagggtatgtagcaattcctcacaatgttttagaaaccattgtgttaaaactggaaggttattagagattacaactcatacactttaagggatggaacgcttgattaatgttcttttatgtgaatttcaaagttcttagctgtgttactgcagactataaatgactaatgtctctggattttagaaccctaagaaagctgraaataatttcatctaaacttctccttttttagatgcaaagtcaaagcctagaaaggcttgagtttcacaagttacatttctagctggttacacactagggcttagtgcagtattcttcctgcaggaaaatatcaaaacctatgtttgaccactgttatatctgccttctcttgctccatatgctgtctacaaaattcattcatgttgacatgtgtgtcagtggtttcttttaattgctcagtaatattctattgtataaatacaccatgacctattcatccattttccttctgatatgaatttgaattatcaccagcctttggctgttgtgaatatagcttttatgaacactcatattcaaatatttctatgggaatatgttggtatttttcct

SEQ ID NO: 656072 - DNA, 557 bp, Homo sapiens
atcatttcctgacctcagcagaggcctccttgcagcaaaccctccagtgcatcagctacagaggtcagaaacacacaacacaggaaatgtgaaaaaatgggacggcgcagtggctcatacctgtaatcccagcactttgggaggccaaggccggtgaaccacctgaggtgagaagtttgagatcagcytggccaacatggtgaaaccccatctctaccaaaaatacaaaaaaaaaaaaaaaagaagaagaaaaaaagaaaatcagccgggcgccatggcatgcacctgtaatgtcagctactcaggaggctgaggtgggagaactgcttgaacccgggaggttgaggctacagtgagctaagattgtgccactgcactccagcctgtgcgagagagcaaggctctgtctcgaaacaaacaaacaaaacacacacacacacacacacacacacacacacacatacacacacaaaacaagtggggcaggccagaagttagtgcctaagcaaacaccctgtggttggtggaacttgaggaaagggaacacagcctgttca

SEQ ID NO: 656073 - DNA, 547 bp, Homo sapiens
gctctgtctcgaaacaaacaaacaaaacacacacacacacacacacacacacacacacacatacacacacaaaacaagtggggcaggccagaagttagtgcctaagcaaacaccctgtggttggtggaacttgaggaaagggaacacagcctgttcaaaggggattttgccagtgagctgtagctgcatgttacaggcaggtttgtgagacaggttgtagtttcacacacctataacaygtctctagtcttatttaattttccgatgagaatattttttgacatttgtaataatctaacctgatgtttagtacactataagaaatagggatggctatgagcaggacttttacacaaagtggtctctgttattccaataatgattcccatgaaacaagttggttagttttggtttgctttttactttgtctcaaagatcagcatttattattttcaaaagctatttcttacttaatttctaatctctctcaaactaccactttttaaaagaaagttttcccactttaattacaaatactctttaggag

SEQ ID NO: 656074 - DNA, 547 bp, Homo sapiens
gctctgtctcgaaacaaacaaacaaaacacacacacacacacacacacacacacacacacatacacacacaaaacaagtggggcaggccagaagttagtgcctaagcaaacaccctgtggttggtggaacttgaggaaagggaacacagcctgttcaaaggggattttgccagtgagctgtagctgcatgttacaggcaggtttgtgagacaggttgtagtttcacacacctataacatgtctctagtcttatttarttttccgatgagaatattttttgacatttgtaataatctaacctgatgtttagtacactataagaaatagggatggctatgagcaggacttttacacaaagtggtctctgttattccaataatgattcccatgaaacaagttggttagttttggtttgctttttactttgtctcaaagatcagcatttattattttcaaaagctatttcttacttaatttctaatctctctcaaactaccactttttaaaagaaagttttcccactttaattacaaatactctttaggag

SEQ ID NO: 656075 - DNA, 539 bp, Homo sapiens
aacctaaaatataataaatgaaaagatatgcttaaccaagacagttaaaaaaattatttctatttcaatagtttttggagtacaggtggtttttggttacatgggtaagttcttcagtggtgatatctgagattttggtgcacctgtcacctgaacagtgtatactgtacccaatatgtaatctattatccctcacctctctccccgtctccatcattgagtcccaaaagtccattatatcattcttatgcctttgcatctacatagcttagctcttgcttataagtgagaacatatgatatttggtttttcattctgagttacttcatttagaataayggcctccacctccatccaagttgctgcaaaagacattatatcattcctttttatggctgagtagtattccatggtgtatacatatcacatattctttatccactcattgattgatgggcacataggttggttccatatctttgcaattgtgaattgtgctgttataaatgcacgtgcatgtatctttttcatataataac

SEQ ID NO: 656076 - DNA, 659 bp, Homo sapiens
ttctcccattatttaggttatctgtttaccatgttgatagtttattttgctgtgaagaagctctttagtttaattagatcccatttgccaatgtttgcttttgctgcaattgcttttggtgtcttattaatgaaatctttgcccatttgtrtgtcctgagtggtgttgcctaggttgtcttccagggtttttatagtttggggttttacatttaagtctttaatccatcttgagttgaattttctatattgcataaggaaggcatccagcttcagtgttctgcatatggctagccagttatcccagcaccattattgaatagagaatcttttccccattgcttgtttttgtcagctttgtcaaagatcagatggttgtagatgtgtggtcttattctggcctctctactctattccttgaccaatgtgcctatttttgtaccagtactatgctgttttgtttactgtagacttgtagtatagtttgaagtcaagtagcatgatgcctccagctttgttgtttttgcttggctattcaggctttttggttccatatgaattttaaaatgctcttttctacttctatgaagaatgtcgttggtagcttgatagaaatagcattaaatgtgtaaattgctttgggcagtatcaccattttaa

SEQ ID NO: 656077 - DNA, 659 bp, Homo sapiens
ttctcccattatttaggttatctgtttaccatgttgatagtttattttgctgtgaagaagctctttagtttaattagatcccatttgccaatgtttgcttttgctgcaattgcttttggtgtcttattaatgaaatctttgcccatttgtgtgtcctgagtggtgttgcctaggttgtcttccagggtttttatagtttggggttttacatttaagtctttaatccatcttgagttgaattttctatattgcataaggaaggcatccagcttcagtgttctgcatatggctagccagttatcccagcaccattattgaatagagaatcttttccccattgcttgtttttgtcagctttgtcaaagatcagatggttgtagatgtgtggtcttattctggcctctctactctattccttgaccaatgtgcctatttttgtaccagtactatgctgttttgtttactgtagacttgtagtatagtttgaagtcaagtarcatgatgcctccagctttgttgtttttgcttggctattcaggctttttggttccatatgaattttaaaatgctcttttctacttctatgaagaatgtcgttggtagcttgatagaaatagcattaaatgtgtaaattgctttgggcagtatcaccattttaa

SEQ ID NO: 656078 - DNA, 598 bp, Homo sapiens
ttccttcagttcagctcttatttttgatatttcttatctcctgtgagccttggggctgacctgtccttgcttctctaattctttcagtcatgaacataggttgttaatttgagatctgattttttaatctgagcatttagtgctatgaattttcctcttaacactgccttatctgtgccccagagattctggtatgtggtacctttgttctcattattgtcagagaacttattgatttctgccttaatttcattatttacccaaaagtttttcaggatcatgttgtttaatttccagtaattacatggttttcagcaatttttatagttgacttctatttttattgagctgtgtttggtatgattttagttcttttagatttgttgaggattgttttatgtccaattatgtggtcaattttagagtacaggccatgtggcaatgataagaatgtatactctgctgttttgggggagagagttctataaagctctatcaaatccatttggtccaatgttgaatttagttcctgaatatctttgttaaygttatgccttgatgacctaatactgtcaatggagtgttgaggtctcccatt

SEQ ID NO: 656079 - DNA, 598 bp, Homo sapiens
gagtgacagtgaggaaaaatgaggttgggacttgatgggctgccttcacagaaacttaggtattcctaacctctagatatttatagttaaaggaaaagatagataacttttactaagcagacccagatttgggagtgtcccaatatccctatatctagagaatgaagaattcctaattttgctctaaagataataatattgattattrcaaaatacagcaattaagaaaattaatcctttattacaaacccttgtagcagagcacatctcttcataatcttttcttatcctttatataaacaggtattgtatctatggtggacacgtttgggaatgccctactctgtctatggagcagttgttctttcaccacttgactttcttaataaactcatttttgctttgcactgtggattcatcctgaattctttcttgcacaacatccaagaactctctcttggggtctgaattaggatccctttctggtaacagaactgtgcaacctgcagataaggagatccccatcaggagcctatatcaccagggccctgggtcctaagcacaaagttgtgcagattctcagtggccacttggctga

SEQ ID NO: 656080 - DNA, 598 bp, Homo sapiens
gagtgacagtgaggaaaaatgaggttgggacttgatgggctgccttcacagaaacttaggtattcctaacctctagatatttatagttaaaggaaaagatagataacttttactaagcagacccagatttgggagtgtcccaatatccctatatctagagaatgaagaattcctaattttgctctaaagataataatattgattattgcaaaatacagcaattaagaaaattaatcctttattacaaacccttgtagcagagcacatctcttcataatcttttcttatcctttatataaacaggtattgtatctatggtggacacgtttgggaatgccctactctgtctatggagcagttgttctttcaccacttgactttcttaataaactcatttttgctttgcactgtggattcatcctgaattctttcttgcacaacatccaagaactctctcttggggtctgaattaggatccctttctggtaacagaactgkgcaacctgcagataaggagatccccatcaggagcctatatcaccagggccctgggtcctaagcacaaagttgtgcagattctcagtggccacttggctga

SEQ ID NO: 656081 - DNA, 689 bp, Homo sapiens
tgttcaaaaatttctaacttgtcttaacccaatattttttataataaaacaaaaataaaccatttccttaaaattttcaataattctaatattttgaccctgaaatcatgttgaaaatagctcccaaggctagaaaaggaaattttattttaaaaaattatcttcgttgaccctcttttgaccaagagttgtcgatttgggggaaggataggagacaaatatgtttctgaaccacgtaagaccgatgagctccccagcgtgtttctttctgcattctgcatcttctccatccttctatgcatttaattttgtgtttcatctgttgcctcatagcccttcctgctgcttctcttactagaatactttctgccacacatggaggaaatattttcccttaagaacctacccttcctgggtgccgtggctcatgcctgtaatcacagcactktggggggccaaggccagcagattgcttgagcccaagagttagagaccagcctaggcaacatagtgagaacccatctctaacaagaaaaaggtacgccaggcatggtggggtctctgcctgtagtcccagctactcagaaggctgaggtgggaggacggcttgagcccaggaagccaaggttgcattccacttcatgccagcctggatgacagagagaaaccctggatgacagagcaaaacc

SEQ ID NO: 656082 - DNA, 604 bp, Homo sapiens
gttcactgtgaatactatttaaatcaatgcctcagcaaaattacaaactaccacatgtcacagatttaacaatcacttgtaagtggtcaactttaaatccataaatgccaacagtctactgaacttgatctgcctttttyacagttgagtactaaattgaagcttaaccttttttttttttttctaaaaagggacacacatcttttattcaagtacctggacaatactgtaattgagattgaaaatccaatggcaatgtccaaatgcaaagatcaagcttttatttaaatttctagctgaataactgtttctatgtattagcactaaaatagtcatttgttttaaatctgtgacagtgtggcaagaatcgtatagtagcaacttttgctagattgtttgctttaagaaacacttccaaattttcactggcttacaacaataagatgtatgtcttatccatgttataagtagcctgtagatagctcctgttctgctctctcttctcattctgggacccaggtgacaagccattgtcatggtagaggaagggagaaatggctgaagcttactatggctcttatgcttctgccttgacatggtgtat

SEQ ID NO: 656083 - DNA, 633 bp, Homo sapiens
atctcctcctttttttaaggttgaatacaattctattgtatatgccatattttctttatccattcatctatcaatggacatttaggttatttccagatcttggctattgtgaataatgctgtaataaacatgggaatataggtatatttacaaggcagtgatttcatctcctctggatatatacccagaagatggattgctgggttgtatggtagttatatttttaatttcttcaggaatctamatactattttccatagtggctgcaccaatcaacattcaccacaacagtgtactggggttccttttcttcatacccttgccaacttgtgttatctcttgtctttttgctaacagccatctttatgggtgtgacgtgctatatcacagtgattttaagaacagctatttcttatctacacactattagaaaaaaaatacaaggccaagtgatcaacaaactgaaaaggaaagagcattactatagttctgggcagtccattcctgaaaatagaaagtattagccaagttctttgcttttccatctgtaatgcagaattagaaaacatcccataaccctttagggatattaaggataatatgaggatttattatttttcagagaggctaagt

SEQ ID NO: 656084 - DNA, 557 bp, Homo sapiens
tttacattcccaccagtagggtagaagtgttcccttttcaccacatccacgccaacatctattattttttgattatggccattcttacaggagtgaggtagtttcacactggagttttgatttgcattttcctgatcatttagtgatgttaagcctttcttcatatgtttgttggccatttgtatatcttcttttaagaattgtctattcatgtcctttttgatgggattgtttgttatgttctaggtaatttgagttctttgyagattctggatgttagtcctttgtcggatgtacagattgtgaatattttctcccactctgggaggtaaatgtccatttaccctgctgactgttccttttgctagtacaatcactgtggaaaacagtgtggagattccttaaagaactaaaagtagaactaccatttgatccagcaatcccactactgggtttctactcagaggaaaataagtcattacacgaaaaagattcttgtacatgcatgttgatagcagaattgcaaaaatatggaaccagcctaaatgcccatcaat

SEQ ID NO: 656085 - DNA, 628 bp, Homo sapiens
atatcaacagttagattaatgtcattttacaactgactcttaggatgcatttggcatgttttgactttaaaagtatcaatctaaatctttaattttgcaatattcatcatagcagtgacaaatgatgattaaaacaaactctatcttgaatgttgccatttgccctattttctactgaagataaacttcattttatgtagtttttatgtggcagatactatgccaaatgtgttacatatctcaataactacaagagctctttgaagtaaatataagctctatgagggtaaatacgtaaatgtaagttctatgagtctgtctgttttgttcacagatacacatctagtacttaatactgtgtctgccacatgrgggggttcaatatatatttattaaattgaataaatgttaccgatggggtaagtgaaagtgctatgtacataaacacaaagccatatttttgtttggctagattcttaccttgcatctttgtggtactatagagaagactttctgagaaaaactttctttttcttccaaatgtagaaagagcaatccataattcggcataattttttagctttcttctgtgggtttacaacagcaaggcttccaagctgcagatcag

SEQ ID NO: 656086 - DNA, 464 bp, Homo sapiens
ggcaacattggtgaatccagaaagcgaaaacccaaagatcatgccgaaagtctctctttatggccattttccctgtctgcacccaaggtgtccactgctatttctttagcacaggttccacatattttggaaacatattctcaaaactaggtagctgatttctgatagaatgactactagcaaacttaaggaagacaactaagttagtaaaatgctttaatatcaaaaacagcttcactgaaagtacaagttcacacgctagtgttagttttggggttatagtttctgttgataatccacagctctaagaatgctccttaccatattcagaacmattactttatctcattttattttattgtagtaggaacacttaacatgaaatagatcctctttactcattttttattctcctggtttttttagtcttgtgggactcagcacttcatctgtaggatctggtg

SEQ ID NO: 656087 - DNA, 464 bp, Homo sapiens
ggcaacattggtgaatccagaaagcgaaaacccaaagatcatgccgaaagtctctctttatggccattttccctgtctgcacccaaggtgtccactgctatttctttagcacaggttccacatattttggaaacatattctcaaaactaggtagctgatttctgatagaatgactactagcaaacttaaggaagacaactaagttagtaaaatgctttaatatcaaaaacagcttcactgaaagtacaagttcacacgctagtgttagttttggggttatagtttctgttgataatccacagctctaagaatgctccttaccatattcagaaccattactttatctcattttattttattgtagtaggaacacttaacatgaaatagatcctctttactcattttttattctcctrgtttttttagtcttgtgggactcagcacttcatctgtaggatctggtg

SEQ ID NO: 656088 - DNA, 528 bp, Homo sapiens
gcccagtcatggtgctggccactggaaaaggctcctgttgctatggaaaggtgaaagaagagtgggaaggactttgtcctatggtttgagggccagtttagctgcagtagaatataacaccagatagatttgtgaggtttttkactccaatatctggtccccagatggcatctctggtccccagatggcatctctggaccctcctggggcctgggtgaactcaacgcctagaagggaaggtcacaaacctggttggcttccccacctgctgattgtggagccctagggctttgaatgaatataagtgatagccaggtagtggttacagcaagccttgggtaagacccagtgctgtgcaggcttgggtaagacccagtgcagtctcagtggtggaagccacagaggtgcttgcatcactccacctgcagtttcaggaagctcagcacagagagagagagagagattccatttgttttggaaaaataaagggacaaaacaagagcccctgcctgataatccagagaattc

SEQ ID NO: 656089 - DNA, 528 bp, Homo sapiens
attatccttgctcacagattatataatgttatatttggagaaagataaagattccacaggaaaactgttagaactgataaacgaattcagtaaagttgcaagatacaaaatcaacatacaaaaatcagtagcatttctatatgtcaacagtgaacaattcaaaaaagaaatcaaaaagtaatcccatttacagtagccataaatcaaattaaatacctaggaattaacttcaccaaagaagtgaaagatgtctacaatggaaactataaaacactgatgaaataaattgaagaggacagaaaacaatggacagatagttcatgttcatggactggaaaaatcaatattgttaaaatgtccaaactrcccatagcaatctacagattcaattcaatcattatcaaaataccaatgacattcttcacagaaatagaaaaaaaaatcctaaaatttgtatggaaccacaagagatgaaaatagccaaaactatcctgagttaaaaaacaaaactgggagaatcaaattacc

SEQ ID NO: 656090 - DNA, 608 bp, Homo sapiens
tagtggaaaaactggaaaatccaaacaaagtctgtagtttggctcctagtattgtaccaatatccatttcttagtttcaatagattcactaaggttatataagatattaacgttaggggaagctgggtgacatatatacaggatctgcatggtatctcagtaacttttctacatatttaaaattatttaaaaataaggcatctattcaaaacaaaacaaccaccatttgcttcccgcatcacacctagtaaagccagaggccttaccatattctrcaagtccctatgtgttctctgatctcaactctaattgctcccttccatgctcactgctctccagccacactggccttcttgctctttctccaacacaccaggcatgatcccaatccagggccttggcaggtgtttcttctctccttaaaacatctccctccagatatccacaaggctcactcatatccttccagtcttgccctagaacttaaagtataataataatttttaaaaaaagacatcagtgaggccatgcctggccttgaatgatctccctgctagaaagtaaactctaagaagctagggaaattagtagatttttttgttttctgc

SEQ ID NO: 656091 - DNA, 347 bp, Homo sapiens
gaggtaattgaatcatgggggcaagtctttcccatgctgttcttgtgacagtgaatgagtctcatgagatctgacagttttaaaaagaggcattcccctaaacaagctctttcattttttgcctgccaccatccatgtaagatgtgacttgctcctccttgcctttcaccacgattgtgaggcttccccagccacrtggaactgtaagtccaattaaacctctttcttttgtaagttgctcagtcttgggtatgtctttatcagtagcatgaaaactagtacattaaattggtaccagtagagtggggcgctgctgtaaagataccccaaaatgtggaagtgacttt

SEQ ID NO: 656092 - DNA, 347 bp, Homo sapiens
gaggtaattgaatcatgggggcaagtctttcccatgctgttcttgtgacagtgaatgagtctcatgagatctgacagttttaaaaagaggcattcccctaaacaagctctttcattttttgcctgccaccatccatgtaagatgtgacttgctcctccttgcctttcaccacgattgtgaggcttccccagccacgtggaactgtaagtccaattaaacctctttyttttgtaagttgctcagtcttgggtatgtctttatcagtagcatgaaaactagtacattaaattggtaccagtagagtggggcgctgctgtaaagataccccaaaatgtggaagtgacttt

SEQ ID NO: 656093 - DNA, 347 bp, Homo sapiens
gaggtaattgaatcatgggggcaagtctttcccatgctgttcttgtgacagtgaatgagtctcatgagatctgacagttttaaaaagaggcattcccctaaacaagctctttcattttttgcctgccaccatccatgtaagatgtgacttgctcctccttgcctttcaccacgattgtgaggcttccccagccacgtggaactgtaagtccaattaaacctctttcttttgtaagttgctcagtcttgggtatgtctttatcagtagcatgaaaactagtacattaaattggtaccagtagagtggggcrctgctgtaaagataccccaaaatgtggaagtgacttt

SEQ ID NO: 656094 - DNA, 606 bp, Homo sapiens
ttgcttttgattttgcaggctcataggtaaaakactttgtactgtggacttttgagttaatgctgaaatgggttaagactttaggggacttgttgggaaggcatgattggttttgaaatgtgaggacatgagatttgggaggggccaagggcagaataatatggtttgactgtgtccccacccaaatcttattttgaattcccacatgttgtgggagggacctgctgagaagtaactgaagcatgggggcaagtctttcctgtgcttttcttgtgatagtgaataagtctcacaaaatctgatggttttaaaaagaggtgttattcccttacacgagctctttcatttttttgcctgccaccatccacgtcagatgtgacttgctcctccttgccttctgccatgattgtgaggcttccctagccatatggaactgcaagtcatgtcaagcctctttcttttttaagttgctcagtcttgggtatatctttatcagcagtatgaaaaccaactgatacaaagagtattcctcttttcattattccaccactcaacatgttgtttaagtaatggcttctatttattattattgataacaaaaatgaa

SEQ ID NO: 656095 - DNA, 624 bp, Homo sapiens
gtactatatttatatatctatatgtatattcctatcttccagactctggtgcaaatttgcaaattsagcagactattttttattggacattctaagctgctatacagctactatatattgaagctttatttaacttaaatagatgagataggtggaatgaatgattttcattttacatttaggaacctgaatcatctttgagaaagcaggagagaaacttggccacagagttagagggaaggaagctattttcctgaattccaattccatgttctttggagatcttccttgataatctttgtcgcctttctcctcaactagaaagtgcttagcgttactatccctcatgtgagacatcctgtgctctgacaatggaaaatgaaaaatcatactcaaagatctatttttgttcacttccaagcaaagtatagataaagaagatccaaagaggtgcttgaatggaattttcagttcatgtaagtgtccacatttctctctcctgactatttcaaaagtgattgctagttgaatgtgcctttgtagcatgtcagtataaaccattttgatagaattatatgtttccttttcacctaagatcctcctttcccctaaaccttttgttct

SEQ ID NO: 656096 - DNA, 624 bp, Homo sapiens
gtactatatttatatatctatatgtatattcctatcttccagactctggtgcaaatttgcaaattgagcagactattttttattggacattctaagctgctatacagctactatatattgaagctttatttaacttaaatagatgagataggtggaatgaatgattttcattttacatttrggaacctgaatcatctttgagaaagcaggagagaaacttggccacagagttagagggaaggaagctattttcctgaattccaattccatgttctttggagatcttccttgataatctttgtcgcctttctcctcaactagaaagtgcttagcgttactatccctcatgtgagacatcctgtgctctgacaatggaaaatgaaaaatcatactcaaagatctatttttgttcacttccaagcaaagtatagataaagaagatccaaagaggtgcttgaatggaattttcagttcatgtaagtgtccacatttctctctcctgactatttcaaaagtgattgctagttgaatgtgcctttgtagcatgtcagtataaaccattttgatagaattatatgtttccttttcacctaagatcctcctttcccctaaaccttttgttct

SEQ ID NO: 656097 - DNA, 585 bp, Homo sapiens
gcttctcagtcctcccactgacaaaataagaaagctaaatgtgattattaagtctccactccaggtagaaaattctgcaattttacaattatgagcgaataagacacaccagtgttgctaaaaacctgctgaaaggctattagagtaaaggtgctattttctcctgtagggagaggtaacttaatcagatttgactgaaacccagtccgaggctgtctggccacttggcacagggttgctactactttcggatcagcttgtgattgccataatcagggactatttgattggacaaacaagttcatttcaacagacttaagcattccttatcctagtaacacagggatatcttactgaagcagagaacaccagggcaggaagtccaaacaggaaaactgagaactggaaaaccaaaaagtctctctccctgtctgtgrtcaaagtggtacaatcaccttggcctcctcctcctatttctcactactgttaagctcctttgctgcaggtcttatatggtagaaatatgaaaatggctttcccagctctacataatctctctttcaagctagtacatgtgtttcactg

SEQ ID NO: 656098 - DNA, 605 bp, Homo sapiens
caacacacataaaacaaggttacacggttttgtttggggggttttatggctttaaatagtggaagggagaaatggggagaagttggtcaaagtgtacaaaatttcarttatgcaaaaatgaattaagctctagagatctaatgtatagcatgatgatcatagttaacaatactataatgcatacttgaaacttgctaagaggtagatcttaagttttctcacctaaagaataaaagaaagaaaatggtaacagggttatatattgattgattaataaaaattttgtgaccagagggctcgcaggaacctagctccatatttcctctaagaccaattatccagtatttgctaaatcagtgttcaaagaaacattatagaacataagtatcacaaataaaaattatgtctagagaatatatatatacatacacaaatatatgtatacagaaaatatatatacacatatgtatgtatacagttttaaatgttactatttggttaaaaaaaagtcaataatgggccaggcgtagtggttcaagtctgtaatcccagcattttgggaggccgaggtgagtggatcacctgaggtcaggagtttgagacca

SEQ ID NO: 656099 - DNA, 605 bp, Homo sapiens
caacacacataaaacaaggttacacggttttgtttggggggttttatggctttaaatagtggaagggagaaatggggagaagttggtcaaagtgtacaaaatttcaattatgcaaaaatgaattaagctctagagatctaatgtatagcatgatgatcatagttaacaatactataatgcatacttgaaacttgctaagaggtagatcttaagttttctcacctaaagaataaaagaaagaaaatggtaacagggttatatattgattgattaataaaaattttgtgaccagagggctcgcaggaacctagctycatatttcctctaagaccaattatccagtatttgctaaatcagtgttcaaagaaacattatagaacataagtatcacaaataaaaattatgtctagagaatatatatatacatacacaaatatatgtatacagaaaatatatatacacatatgtatgtatacagttttaaatgttactatttggttaaaaaaaagtcaataatgggccaggcgtagtggttcaagtctgtaatcccagcattttgggaggccgaggtgagtggatcacctgaggtcaggagtttgagacca

SEQ ID NO: 656100 - DNA, 605 bp, Homo sapiens
caacacacataaaacaaggttacacggttttgtttggggggttttatggctttaaatagtggaagggagaaatggggagaagttggtcaaagtgtacaaaatttcaattatgcaaaaatgaattaagctctagagatctaatgtatagcatgatgatcatagttaacaatactataatgcatacttgaaacttgctaagaggtagatcttaagttttctcacctaaagaataaaagaaagaaaatggtaacagggttatatattgattgattaataaaaattttgtgaccagagggctcgcaggaacctagctccatatttcctctaagaccaattatccagtatttgctaaatcagtgttcaaagaaacattatagaacataagtatcacaaataamaattatgtctagagaatatatatatacatacacaaatatatgtatacagaaaatatatatacacatatgtatgtatacagttttaaatgttactatttggttaaaaaaaagtcaataatgggccaggcgtagtggttcaagtctgtaatcccagcattttgggaggccgaggtgagtggatcacctgaggtcaggagtttgagacca

SEQ ID NO: 656101 - DNA, 605 bp, Homo sapiens
caacacacataaaacaaggttacacggttttgtttggggggttttatggctttaaatagtggaagggagaaatggggagaagttggtcaaagtgtacaaaatttcaattatgcaaaaatgaattaagctctagagatctaatgtatagcatgatgatcatagttaacaatactataatgcatacttgaaacttgctaagaggtagatcttaagttttctcacctaaagaataaaagaaagaaaatggtaacagggttatatattgattgattaataaaaattttgtgaccagagggctcgcaggaacctagctccatatttcctctaagaccaattatccagtatttgctaaatcagtgttcaaagaaacattatagaacataagtatcacaaataaaaattatgtctagagaatatatatatacatacacaaatatatgtatacagaaaatatatatacacatatgtatgtatacagttttaaatgttactatttggttaaaaaaaagtcaataatgggccaggygtagtggttcaagtctgtaatcccagcattttgggaggccgaggtgagtggatcacctgaggtcaggagtttgagacca

SEQ ID NO: 656102 - DNA, 558 bp, Homo sapiens
atactaggtatcttcacatagtgaacaaatacattatgatagccaagatgcacttactctgtcttccaccaaagatgaaatatgaaagggaaaataacactgtggttgattcagggctaccactgcaacaacaatctgaaaaaaaaggaccccgcaaactcaaatctagtttcccttctctcaatctccttccctaaagaagaagagwtctcactaagagggtaggaggccagactggtctcattataaagagatcaagaagaaggttatgggactggaggagcaggagagaaatactcctgggggttggggttttcacctgcacggagctctaagactcctcctgtgctcaagaaaattgaggaatggaaggatctaggatgaaaagtgctagtataggttttgacttggctctttcttaattgccagtaagaaatgagatacttttataattatctgttgatctgagtctcttcaaacaaaattccacctagaattgccttgataattcatttggattatttatgtcatggctccattatctgaggccatgatcta

SEQ ID NO: 656103 - DNA, 585 bp, Homo sapiens
aacagcatattagacattgcagaagaaaagaagagtgaactttcagatacggcgatagaaaatacccaaatgaaacacacagaggaaagatttagatggaaaaggcatccatgtgctatgggacaacttcaagcactcgtgtacatgtaattggagactctgaaggagcagtatccccttgttcatggatcagaaaactcaaaattgttaaaatttgaattcrccacaaattgatctgtagattcaatgcaatcccaatcaaaattccagcagacttttttgttagaaattgaaaagcggattctaaaatctatatggaaatgcagagaagctaaaatagccaaaacaacttaaaaaatatagttggagggctggctcttcctgatttcaaggcttattaaaaagctgtgaaaaaaaaagctatcatgtcatattgactgcaagatagacaaataggttaagtgaacgagaatcaggagctcagaattagagccacaaaggcatacaaacttgactttcaacaaaggtgcaaaagtgagggaatggaaaacggcattttcaacgaatggtgctggatctattggg

SEQ ID NO: 656104 - DNA, 589 bp, Homo sapiens
cgaaggtatggaagaagaaagcaaagaacaaataaaagggggtaaatagaaaaccagcagtaagatagtaaacttgaacccaaccgtatcaatcattttattaactgcgagtagactaaaccccctaattaaaatgaaayatctccactccagataataaaagataggcgtgggatttctgctttcaggcgtggtgaggcaataccctactgaaacactcccacccctacacacaccctacagaaaacaattgtaaaacctggacataataaagaattttgaaggtactggggaataaaaacaagcacaaatatctggaggaagtgctcagaaaacacgtccatgtggtgcagaattttgataatgggcagggggattatgtgtgtgggggcagggggtatatgggacctcagagcttccaactcaattttgcaatgagtctaaaatggctctaaaatataaaatctatgaaaaaaattatgagcacttgccaaaaaaacaggaaccagatgaaagaagctaccactggccaaattcaggataattagagcacaaagataaataatgatagtaatgagtttcaacccat

SEQ ID NO: 656105 - DNA, 589 bp, Homo sapiens
cgaaggtatggaagaagaaagcaaagaacaaataaaagggggtaaatagaaaaccagcagtaagatagtaaacttgaacccaaccgtatcaatcattttattaactgcgagtagactaaaccccctaattaaaatgaaacatctccactccagataataaaagataggcgtrggatttctgctttcaggcgtggtgaggcaataccctactgaaacactcccacccctacacacaccctacagaaaacaattgtaaaacctggacataataaagaattttgaaggtactggggaataaaaacaagcacaaatatctggaggaagtgctcagaaaacacgtccatgtggtgcagaattttgataatgggcagggggattatgtgtgtgggggcagggggtatatgggacctcagagcttccaactcaattttgcaatgagtctaaaatggctctaaaatataaaatctatgaaaaaaattatgagcacttgccaaaaaaacaggaaccagatgaaagaagctaccactggccaaattcaggataattagagcacaaagataaataatgatagtaatgagtttcaacccat

SEQ ID NO: 656106 - DNA, 589 bp, Homo sapiens
cgaaggtatggaagaagaaagcaaagaacaaataaaagggggtaaatagaaaaccagcagtaagatagtaaacttgaacccaaccgtatcaatcattttattaactgcgagtagactaaaccccctaattaaaatgaaacatctccactccagataataaaagataggcgtgggatttctgctttcaggcgtggtgaggcaataccctactgaaacactcccacccctacacacaccctacagaaaacaattgtaaaacctggacataataaagaattttgaaggtactggggaataaaaacaagcacaaatatctggaggaagtgctcagaaaacacgtccatgtggtgcagaattttgataatgggcagggggattatgtgtgtgggggcagggggtatatgggacctcagagcttccaactcaattttgcaatgagtctaaaatggctctaaartataaaatctatgaaaaaaattatgagcacttgccaaaaaaacaggaaccagatgaaagaagctaccactggccaaattcaggataattagagcacaaagataaataatgatagtaatgagtttcaacccat

SEQ ID NO: 656107 - DNA, 586 bp, Homo sapiens
cagtatttgctgcttcttgcatccattgatcactcactgggcacccagtaggcaccagaggagtacaggcatgacagagacacagccccaacttccaacagctcgtgggtggtttgggaagaagaaaggtcagagcccagcgtgagacccatctctcacccacctgatcagcacacagcaagtgcctggacttcttctgggacttctgggctctacctggagttctctgcctcttcagggaccaccccatttgcttgataattgagtgactcctggtagcctcccccatcccattgcctcacagtacttctgagggctggagacagtttctttctacagatgagagcaccaagaccctctgaggaacggtcaccttgaaggagtggccagcctcctctgagaccggggtggcaggaggcacgcttggagacccactttcactggrtggcctggtccttaggaccagcccatttctgccctttgaacatcagcagattcattttagggcacttggtccttggggttggctcttgctgcaaaggcaccattttctccatttagaaacttggtccttttggaagctgga

SEQ ID NO: 656108 - DNA, 557 bp, Homo sapiens
aaaaaatgcccacaaatttggtaacctagaaaaaatgtacaaattcctataaagatgtgaactactggccaggagtggtggctcacgcctgtaatcccggcactgtgggagtcccaagcaggcagatcacttgaggtcaggagttcaagaccagcctggccaacatagtgaaactctgtctctactaaaaatacaaaaattagctgggcrtagtagtaggcacctgcaatctcagctactcaggaggctgaggcaggggaatcacttgaacccacgagacggaggctgcagtgagccgagattgtgctaccacactccagcctgggtgacacagtaagaggccatctcaaaaaaaaacaaaagacatgcactactgaaaccaactcagtaagcaataaaaatgttgagtaaatctataataaataaagaggttaaattcataataataataacaacattatatttgccacaaagaaaggcccaggacttggtggcttccttgaatcttaaagaagcgttaacaccattcacaaagtcttttaaaaatagaaggacaa

SEQ ID NO: 656109 - DNA, 557 bp, Homo sapiens
aaaaaatgcccacaaatttggtaacctagaaaaaatgtacaaattcctataaagatgtgaactactggccaggagtggtggctcacgcctgtaatcccggcactgtgggagtcccaagcaggcagatcacttgaggtcaggagttcaagaccagcctggccaacatagtgaaactctgtctctactaaaaatacaaaaattagctgggcgtagtagtaggcacctgcaatctcagctactcaggaggctgaggcaggggaatcacttgaacccasgagacggaggctgcagtgagccgagattgtgctaccacactccagcctgggtgacacagtaagaggccatctcaaaaaaaaacaaaagacatgcactactgaaaccaactcagtaagcaataaaaatgttgagtaaatctataataaataaagaggttaaattcataataataataacaacattatatttgccacaaagaaaggcccaggacttggtggcttccttgaatcttaaagaagcgttaacaccattcacaaagtcttttaaaaatagaaggacaa

SEQ ID NO: 656110 - DNA, 544 bp, Homo sapiens
tttcatgcaaatggtaaccaaaaygtagcaggggtggccacacttagatcagacaaaatagagtttaagtaaaaaagtaccacaagaaacaaggaaggaaattataaaatgataaaagggagtatatatacgtgtgtatatacatatatatgtacatacatatatataataaatgtgtatgcacctaatatcagagcacctaaatatgtaaagcaaatactgacaatttgagaggagaaatagagagcatacaataagagcaggagacttcaataccctaatttcagtagcagatagatcatccaaacacaaaatcaataaagaaagagcagtgtcaaacattatagggtaagtggacctatcacacacacaacattctacccagtagaagtagaacacacattcttctcaagcacacacaggaaattctccaggagagatcacattctaggtcacaaaagaagtcttaacaaatttaagaagattgaaatcattccaagttccttttccaactacaatggaacgagaccagaagtcagtaaca

SEQ ID NO: 656111 - DNA, 428 bp, Homo sapiens
gtggggctgagtccaggaccgagcctctcggctatggggccactttggtgctctcagtatccacccgagaagaccctcatggaggagctgggcagccttgcctcagctctgctggagaggcctcggaggctggctgctcagaggctgcacaggcgagttgctatgctgctcccggatgcgttcagcacaggcctgggcatccctgcccagcttctgccaagacccagcaggacctgcccacaccccaggtgtacaacctgggcacacacgaagcgccaccccagggacccacaggaaggcctcttcccgccgcaggttcacgctgcttccctgatatccttcaaggcctcagagagcaaagactygagcctcaaggtgcctggtgagctcaggaccacctgccctctcctcactggcctcattccttc

SEQ ID NO: 656112 - DNA, 588 bp, Homo sapiens
gaaaaatccccatatatgtgacagttgataccacgaaaacagataaagtcacccaggtttttgttgaggcaaagatttgaagggagagctmggcacaatggctcatacctataatcctagctacttggggggctgaggcaggaggatcacttgagtccaggacttcaagactagcctgggcaacatgacgagacccagtctctgaaaatattttaacattttagaaattaaaaataaattgttttttaaaaattcaagatgtggagggagtattctgtgcacagattaagaatgtgtttgccttggaaggagccttctaatgaccagcgtgaaaagggccatgagcccagaagagcacacgtacaaatactatgggggtgagaattcaagggagataagccgaccaaaggcttataatcagggctgggactaaggatcacaggaatatgattaacttgccttagaattcagacagaaccctggcacaattggtttgtgtccactcttgacctggtacatttgtatatgtcagtgtggctcacatgctatggattagtccatcaaaaacacattcctgctttattgcat

SEQ ID NO: 656113 - DNA, 588 bp, Homo sapiens
gaaaaatccccatatatgtgacagttgataccacgaaaacagataaagtcacccaggtttttgttgaggcaaagatttgaagggagagctcggcacaatggctcatacctataatcctagctacttggggggctgaggcaggaggatcacttgagtccaggacttcaagactagcctgggcaacatgacgagacccagtctctgaaaatattttaacattttagaaattaaaaataaattgttttttaaaaattcaagatgtggagggagtattctgtgcacagattaagaatgtgtttgccttggaaggagccttctaatgaccagygtgaaaagggccatgagcccagaagagcacacgtacaaatactatgggggtgagaattcaagggagataagccgaccaaaggcttataatcagggctgggactaaggatcacaggaatatgattaacttgccttagaattcagacagaaccctggcacaattggtttgtgtccactcttgacctggtacatttgtatatgtcagtgtggctcacatgctatggattagtccatcaaaaacacattcctgctttattgcat

SEQ ID NO: 656114 - DNA, 588 bp, Homo sapiens
tgttttcctcagctgtgtcaaatcaattcatgagtccccaaggggcattcttcatttatgttactgtattttttcccttatgatacttgcttgtagtttctatccctctgctcacattgtgcctgtttttgcatattgtctagttttttccattatagcccttaacatattagccatagttattttaaatacactgcctgataattctagtatctgtgccatatctaagttagtttcagattattattttttctatagacttcttgccttttggcatgcatygtaattttttgttgaaggctggagatatattatcaagtaatagaaactgaagaatcaaataggtcattagtgtgataattttggttaatctggtgaattatttcattcccacactgttataaagatactacccaaaactgggtaatttataaacaaaggaggtttaattgactcacagttctgcatagcttggaggcctcaggaaacttataatcatagcagaaggggaagcaggctctttcttctcaaggtggcaggagagagtgtgcgcatgattgaggaagtgccacactttaaaaccatcag

SEQ ID NO: 656115 - DNA, 588 bp, Homo sapiens
tgttttcctcagctgtgtcaaatcaattcatgagtccccaaggggcattcttcatttatgttactgtattttttcccttatgatacttgcttgtagtttctatccctctgctcacattgtgcctgtttttgcatattgtctagttttttccattatagcccttaacatattagccatagttattttaaatacactgcctgataattctagtatctgtgccatatctaagttagtttcagattattattttttctatagacttcttgccttttggcatgcatcgtaattttttgttgaaggctggagatatattatcaagtaatagaaactgaagaatcaaataggtcattagtgtgataattttggttaatctggtgaattatttcattcccacactgttataaagatactacccaaaactgggtaatttataaacaaaggaggtttaattgactcacagttctgcatagcttggaggcctcaggaaacttataatcatagcasaaggggaagcaggctctttcttctcaaggtggcaggagagagtgtgcgcatgattgaggaagtgccacactttaaaaccatcag

SEQ ID NO: 656116 - DNA, 621 bp, Homo sapiens
ttggtaggagattaacaaagagactgcttagtaaagtgagcaaactctttatctagctcattctttgatctatttgattttaggaggtttggtttaggaggaccttgggtaaggagcatactctgaactcttggtattatcttcccaatagtcataataataatctccctggtgtgctgtctcaaaggttttaaatgcttgcctgcagccatctctagaatgtcaaatggtctctcttcagctggaataatggagccgaaagaaatgttcaaccatgaggacaccagaacctacaaatgacgtgctgagaccagaaacccaaaatgatggtaactgagagtggcactagggccctaagttttggtcacactctcacctgaccaaacctgaccaaaaawggagaattttttaaacaaaattccgggaggccatagtttttgactaatctcatgcactaggccccaacaaaccaaaccaaaatggagttgcttgtgctaagaaacacatagattctagaacaaaccacattttttctcctgcaaatctctgtaacaaacatttctaacagcataggtatccaccacctgaagtctccattaaatcttttaatcaaattcattt

SEQ ID NO: 656117 - DNA, 547 bp, Homo sapiens
ctaaaggatgacttcaggctaagaaggttaaaaactgctggtgaataaaaggttaagatgaccattcattgaagaatgtggtttccgtggttattttgtattatacactgaagacatttttcctaaagttcttatctcaagatatggcacattccaggctctatcctcacatgacaacctatrttttacagaatccttaattagtgagtgaagccctatgacatattgtaaggttttgatgacacagaatgtacaagtaaaagcctttctcagtgacaagggagaaggtctacttatgagttgcatttgaattagcatattttttctcattcttgaaaacaacttttgtccatgtgattaaaatctagctaccacattaaagaagaagaaaaagaaggaaggaatgagaatgaagaagaggaagaggaggtgaagggaatgaaagggaagggaaggatgtagaacataagagttggtataaggctgtgggaatgaagagaagtgaggaatacagggacccagttttgcactaattagttttgtgctt

SEQ ID NO: 656118 - DNA, 593 bp, Homo sapiens
aaatagaaaaaaagataattctagcatgtgcaaaattttttattattgtcattgaaatgagaaaagacttgttccagtaaaaatattccaaagaaaaatttaatgtcttattctattcacaagttttcctgtaatgaamagtggtaaggttaggacgatattaagtagagaatactttgtaaaagatatgtgaaaagaaggattttaagctacttgatttgattgaaaggaagtctatgctagaaagtgtagaagcagaaaaggtgtaataccttttcttacccatcatgagaggtatggctgacatttctgtaacaaaaggcaggcaaataatggaaaagcataactaatatatttaatcaaagttttacatgacacaggagacttcagaaatgaagacccaagacgcagggaaaactggttttatgcttaggttttatgaagaatggacagccatataaaaatgtgatttgacaaaagggtataatccaatggtaacagattaagaggggaatcctggaaaggcctatttgtttagattcttcttggcctttctacacagcatacttcccccaggtataagacagaacacc

SEQ ID NO: 656119 - DNA, 633 bp, Homo sapiens
gtttctacgtctctctatggttctaaacttccttaggggaggaggccctcttcctggggyaaagttctaccatattactgatttggacacctcttccagttaagtgtctcaaagacagatttaatttttattgagtctagccatataagatattacattaaatatttattaaggaataatgcctttattactttttaattaattcttgaagaacaccttttggtgttttaaaattggttaacagtaataaaaagccccagaatagaaagagcaaaaatgaaggatattatagacaggcagtgacaggagtacaggttcctttcagcttccttgggtttttctgaagccaagcttctggatttatgctttggttccctgaggaagctcttatttgcagaattatagtactattatctgggaagaagtgcttggtaaataaaagagactttctggtcagaaagacctgggttccagtcctggctcagataaagtaaccactctatgcctcagttgtcttctctgacaaatgggggaaaatctaacacttaatttaaatgtttgtttttaaaaagaaataggataaaacattaaaaagcacaataccaggtatgtagtaagcactcaactaatatt

SEQ ID NO: 656120 - DNA, 579 bp, Homo sapiens
tctctcaggaatagacacaatagtgcgtatgatgcgattacaaacaccacatatgtcttttcttttttgatgggaatcatgcaaagtagaattaaactgaattcctatggttaaagggtacaaatctatagctgtcctacaaacagagagtatgtctatatatttattattatcaaaaayacaaaaaagtatcaatcggcccctctagaggaaaacagaattatctttatattcttccaataaaaaatagtattacaaaatgctgttatgtgaagaaatagcatgcagaaaagatgtatgatagacaagtggcaggctactaaataatgtagaaatcattatctttgaggatttctttgtgtttatggcatttgtcaccttttttaaaaaatgtatacgtggttgtggtttgtttccagataaatattcacttttatgtctaataacatattcataaaatttgattctttttcttacagaggcctccactcaaattgtataagctttagagtctacattgttctgccagttggcttcatatacagtaatgtaaattctaagttcgatgtaaattctagc

SEQ ID NO: 656121 - DNA, 633 bp, Homo sapiens
gtttctacgtctctctatggttctaaacttccttaggggaggaggccctcttcctggggcaaagttctaccatattactgatttggacacctcttccagttaagtgtctcaaagacagatttaatttttattgagtctagccatataagatattacattaaatatttattaaggaataatgyctttattactttttaattaattcttgaagaacaccttttggtgttttaaaattggttaacagtaataaaaagccccagaatagaaagagcaaaaatgaaggatattatagacaggcagtgacaggagtacaggttcctttcagcttccttgggtttttctgaagccaagcttctggatttatgctttggttccctgaggaagctcttatttgcagaattatagtactattatctgggaagaagtgcttggtaaataaaagagactttctggtcagaaagacctgggttccagtcctggctcagataaagtaaccactctatgcctcagttgtcttctctgacaaatgggggaaaatctaacacttaatttaaatgtttgtttttaaaaagaaataggataaaacattaaaaagcacaataccaggtatgtagtaagcactcaactaatatt

SEQ ID NO: 656122 - DNA, 561 bp, Homo sapiens
tttcatagccttaacttacacaattgcccaaatggccatctttttctcttcttctttaattacagtacatatttttaaaaaatccttgggagggcaattctgttcttccatcatttatgaaagtccatctcggaacaaaacggggataaaaacagactgataattggttttgtgccaacrgtaaaatgtccccactctcctctttaccctcagctacttctgtagttatcctcagtcagggctgtgtgaatggcgaaatgtactaatttcaaaagtcatgctggcctttggattaaatgaaggtaaactaaatatgcctccagcccacccattctctagtcccatggacactgaggaccaccaagtactctacaatttgcagtgtaggatatgagacgctgaaaaacttggaaatgaatgcaacttattctgctctaaccatatgggttcctgccaatttcatccagggaggcggagcgtaagagaaagggggaaatggcaaggcaaggagaaatttccttcatgtcagaaatgtaagtttataattagtcacagagaaca

SEQ ID NO: 656123 - DNA, 561 bp, Homo sapiens
tttcatagccttaacttacacaattgcccaaatggccatctttttctcttcttctttaattacagtacatatttttaaaaaatccttgggagggcaattctgttcttccatcatttatgaaagtccatctcggaacaaaacggggataaaaacagactgataattggttttgtgccaacggtaaaatgtccccactctcctctttaccctcagctacttctgyagttatcctcagtcagggctgtgtgaatggcgaaatgtactaatttcaaaagtcatgctggcctttggattaaatgaaggtaaactaaatatgcctccagcccacccattctctagtcccatggacactgaggaccaccaagtactctacaatttgcagtgtaggatatgagacgctgaaaaacttggaaatgaatgcaacttattctgctctaaccatatgggttcctgccaatttcatccagggaggcggagcgtaagagaaagggggaaatggcaaggcaaggagaaatttccttcatgtcagaaatgtaagtttataattagtcacagagaaca

SEQ ID NO: 656124 - DNA, 558 bp, Homo sapiens
tttcttcaaaccaattataacatctgcctggtttccgctgttaagaaggacaaacttttctactaccaccttagttttctcctggggccctgaaaattaaactaaaaaacaaaggttaacaggagaaatggtacacaattttattaaaatctatgtgcatgacagttcatagaaaagaagtgaaactcaaagaaatagttagactcagggacttatatatcattttaagaaagaaagcgagggttgggcttcaaggaatgataaatcatgggaaaatgactaggaaatatatgggggaactaatagaagataaagtttattttagtaaggtttgtttatgtgaactcatcttggtgtcagctctccatctcagggaataagagtgctcttctcttcctggtasacaagaggataacttgacaaagggaaatgcatgccctgcttttaagcagctaagggaagagttctctgcccttcccttcccaatgcccttcaactcaaaataatccttataccaaagtgatatattctagggtggcatattctgatccccttcaa

SEQ ID NO: 656125 - DNA, 558 bp, Homo sapiens
tttcttcaaaccaattataacatctgcctggtttccgctgttaagaaggacaaacttttctactaccaccttagttttctcctggggccctgaaaattaaactaaaaaacaaaggttaacaggagaaatggtacacaattttattaaaatctatgtgcatgacagttcatagaaaagaagtgaaactcaaagaaatagttagactcagggacttatatatcattttaagaaagaaagcgagggttgggcttcaaggaatgataaatcatgggaaaatgactaggaaatatatgggggaactaatagaagataaagtttattttagtaaggtttgtttatgtgaactcatcttggtgtcagctctccatctcagggaataagagtgctcttctcttcctggtagacaagaggataacttgacaaagggaaatgcatgccctgcttttaagcagctaagggaagagttctctgcccttcccttcccaatgcccttcaactcaaaataatccttataccaaagtgayatattctagggtggcatattctgatccccttcaa

SEQ ID NO: 656126 - DNA, 561 bp, Homo sapiens
tttcatagccttaacttacacaattgcccaaatggccatctttttctcttcttctttaattacagtacatatttttaaaaaatccttgggagggcaattctgttcttccatcatttatgaaagtccatctcggaacaaaacggggataaaaacagactgataattggttttgtgccaacggtaaaatgtccccactctcctctttaccctcagctacttctgtagttatcctcagtcagggctgtgtgaatggcgaaatgtactaatttcaaaagtcatgctggcctttggattaaatgaaggtaaactaaatatgcctccagcccacccattctctagtcccatggacactgaggaccaccaagtactctacaatttgcastgtaggatatgagacgctgaaaaacttggaaatgaatgcaacttattctgctctaaccatatgggttcctgccaatttcatccagggaggcggagcgtaagagaaagggggaaatggcaaggcaaggagaaatttccttcatgtcagaaatgtaagtttataattagtcacagagaaca

SEQ ID NO: 656127 - DNA, 527 bp, Homo sapiens
atagtgagcacaaaaaaagtattactatttgtttttactttgtcttttatatcatgctttctcttctctgcttcaatccaactttattttaagaaaataaaatcttaacgctgaaatttaccaagaaaatgtatttcagttcaaataaaaaccagcgagactgctggttctttcatcaattgtatagatatcccactgagtaacaagtttaatggatgacacaggaatgttttagcagatagattatcytaaaacattaccatcttctagtgcacattaacataactttctcaagctgtggaattcatgacgagttggaaagtttgctgactccatgttttcctaagacggccttaaaggaagactccacataccattagctctttccttttatgtagtggttatgcttcaccatttagaagctattttctcttccaaaacaataaaataaaataaagctgctttcttagtctcctaaactgggagggaccatcggctttgatgataccaaccagcataaatgtcaa

SEQ ID NO: 656128 - DNA, 527 bp, Homo sapiens
atagtgagcacaaaaaaagtattactatttgtttttactttgtcttttatatcatgctttctcttctctgcttcaatccaactttattttaagaaaataaaatcttaacgctgaaatttaccaagaaaatgtatttcagttcaaataaaaaccagcgagactgctggttctttcatcaattgtatagatatcccactgagtaacaagtttaatggatgacacaggaatgttttagcagatagattatcctaaaacattaccatcttctagtgcacattaacataactttctcaagctgtggaattcatgacgagttggaaagtttgctgactccatgttttcytaagacggccttaaaggaagactccacataccattagctctttccttttatgtagtggttatgcttcaccatttagaagctattttctcttccaaaacaataaaataaaataaagctgctttcttagtctcctaaactgggagggaccatcggctttgatgataccaaccagcataaatgtcaa

SEQ ID NO: 656129 - DNA, 527 bp, Homo sapiens
atagtgagcacaaaaaaagtattactatttgtttttactttgtcttttatatcatgctttctcttctctgcttcaatccaactttattttaagaaaataaaatcttaacgctgaaatttaccaagaaaatgtatttcagttcaaataaaaaccagcgagactgctggttctttcatcaattgtatagatatcccactgagtaacaagtttaatggatgacacaggaatgttttagcagatagattatcctaaaacattaccatcttctagtgcacattaacataactttctcaagctgtggaattcatgacgagttggaaagtttgctgactccatgttttcctaagacggccttaaaggaagactccacataccattagctctttccttttatgtagtggttatgcttcaccatttagaagctattttctcttccaaaacaataaaataaaataaagctgctttcttagtctcytaaactgggagggaccatcggctttgatgataccaaccagcataaatgtcaa

SEQ ID NO: 656130 - DNA, 563 bp, Homo sapiens
gtaaactcttgcctctttcaagaaattactagcacataattagatctcattcaccaagcaaaaaacttttcaacatttattttcaaaaggcaaatggagaagaggaaatctttatttttaagaatgatgaaaatagagaaaagtgtgctacatgagttctcctccatgaagttttttcttcctttgatgcctaagttaaaaaagaaaaaaaaatctctctttctattcaattatttcacattttgttcctgtttttctgtcttatttaaaaactagtaaaaatgtttggaagagaaaaaggactggccttcaaggagtttgtaataactaactcaaatacagggagatgacataataatatacataactcgatgaaagcacttaaatgagrgagtatttaattgtgacagaatatcaaggaaggattcacagagaaagtggcattttagcacttaaggatgtgaaaaatttacataagtggcaccatgaacaaaggcacaaggcatgacccaaatgtcataataatagtaagaattccattgcaattaagctaaagtgggaat

SEQ ID NO: 656131 - DNA, 382 bp, Homo sapiens
ttcctcactgaatgactttattcaaataatttyattcattcatttgcttaataaatgtttcatatgttcttcctctgggccacgtcctaggcaaagtcttgggaatcattcattcccctggccacagttccttcatatatatatatatatatatatatatatatatatatatatatatatatatatatatattccctttagccacaaccactttcttctgccccatctcctcattaattccaggaaactaataatctgctccctgtaactataattttgacatttcaagaatgttatataaatggaatcatatagtatataatcttttgggaaatttttagcataactctctagagattcatccaggtggctgaatgtatcc

SEQ ID NO: 656132 - DNA, 581 bp, Homo sapiens
ttgactcttatagtataaaagtatgaatcttatatagtgatattctattttaaatgctttatatgtttaaataatttagaagaagggaattatagaaaaactgaaacaaaatgcttgaattaatactataaacatgatgttagcatttataattgatattttaaattgttacataaaratgtatgagtatggataaaaacatatatattagtctaaatgaaattaatggcttcttttatacactcacaatatttatacttttctttaagtatatcagatgttgataagtgttctagagaaaagtaagtacattagggatggtaataaggaatgttggaattgggaagatgccatttttatatagaatggtcagggaagatttcactaagaaggtgatagttgagtgatgctctgaatttggtgagggacatagctgtggggatattcggataagtgtgtttcagacaagatcaaaagccctgtgttgagtgcaggctctgcatatttagaaacataagaaatttaactgtgcatggcacaaggtggtcttatatgttaaaaaaatacatttttttggtttc

SEQ ID NO: 656133 - DNA, 556 bp, Homo sapiens
tttaacatctaaaaggccgccgctacttgctttgggataagtatccccggtatgtactttaaaatgcccaagcctagagaaatgattcttgtcttaagggcaccatttcgctctcccaccgtaaagcgccccaggcttgggatctgggtcccaaggctacagggaagagtttggaacgggaagctcatcttccggccctctgattggccggctcgcactccactcacgcggcgcgcagctctgattggcctcggcggcacccctcgtcccgcgactactttgtgtgctggggcggcgcgctccggtcctcccgctcagctggcggtctgggctgctctggggcagcccttcggtccactgctctgcatcgcgggcgccgggaattttccgagtccgagcgggtaggacgcatcctagggcaaagcctctcccctctccccgtgctgttctctttcccgtactaaataaacttccgcctcagaggggctgtcgcagcygcgggtcgggagaggccgggcatcgaactcaggccctcgtggggggggtctttctcttc

SEQ ID NO: 656134 - DNA, 489 bp, Homo sapiens
caaggctacagggaagagtttggaacgggaagctcatcttccggccctctgattggccggctcgcactccactcacgcggcgcgcagctctgattggcctcggcggcacccctcgtcccgcgactactttgtgtgctggggcggcgcgctccggtcctcccgctcagctggcggtctgggctgctctggggcagcccttcggtccactgctctgcatcgcgggcgccgggaattttccgagtccgagcgggtaggacgcatcctagggcaaagcctctcccctctccccgtgctgttctctttcccgtactaaataaacttccgcctcagaggggctgtcgcagccgcgggtcgggagaggccgggcatcgaactcaggccctcgtggggggggtctttctcttcgagtgaatgtggaaacagctcttacaagataaagtagggcttygctgagtctcctgggggagcgatgccattgtaggatcgcgc

SEQ ID NO: 656135 - DNA, 553 bp, Homo sapiens
agacaataataaaataaaatacatctgatatctgcacaatattttaagcacagtactcataaatattgtactrtttgatccttgcagtatccttgtgagataagtagaagggatattggtgagtagaaactattaaatataatatgtgttaaggtagtgtgctagaaatcactaagggatataaaggtgaataaccacaggctctgttctcatggtgtgcccaatcttttggggatggggtgggaaaaataaacagttacaatgtataggaagttgaaaaggatttagaaattcaagctgtgtcccatgggaatttagaaagagtgatggtattgtaacaggaattttggtattttgccttcttaattcagactaactgaaaggataatgactgtaaaagcatcttgactgtaatagatactgatacgattttcctttataattttcagattattttttattttaggtgattttacacagctatttatatgaatgaatttatgaattaaggatgacagaaatcacttaaattgttttagtgatttttggcata

SEQ ID NO: 656136 - DNA, 601 bp, Homo sapiens
aatccatcagacaaaaaaacttcataattcaacaggtatgtcaggtagaggacttccaacgttctagtttttatttctagatgttcaacttgggtcttttttgtctgtgtcttaatatacttaacctttcttctggcttttagtacatatggaacagatatataataacttttaatgtcctagtctcctaattctatcaaccctgtcatttctgggttggttttgattgattgatagctttccttctggctctgttttcttgccttagtttttttaacctgctagttaattaattgatgcatatcaggcatgtaaaataagacactgtaaattgtgccctgttgggtgctggacatttttatattcctatattcttttttttttttttaagagatggggtcttgctctgttacctgggcagtagtgcagtagcatggtcataggtcatggcagtattaaactcttgggctcaagtgatcctcctgttgcaacttcttgagtagttgggactacaggtgtgtaccaccagccctrgtgcctgcagatatttttgaactttttcctggtctgtattgaagttatttgaaagtgttttttaact

SEQ ID NO: 656137 - DNA, 488 bp, Homo sapiens
gtcgatttgctaatgaagctcagtgtgttttaaggattgacagatacaatcatctgaaattttcttcccttaaattagtgtttttmaccagatacacatctttcatattggataatatattctttaagttcaagatagttggacaaaaagaaaagaaaaaaaaggcaaccaacacattttaaagtaataatgcaatattatagctatcacacttcctggagaattcagcctactttatgggcacaatttagcacaaacccataagaaagctaacaaagctcaaaaccacttaacaatagcctggagaggtaaaggtcaaaaatgatcattgccaggcccaagatacagcagacctacaaaaaaaagcacagcacaggaaaatctggaaacttgtgctctaattacagttatttcagtaatcattagtgtgatctgagtgaactcaatctgccctactttttcaattataaaatcctatatcatcctct

SEQ ID NO: 656138 - DNA, 553 bp, Homo sapiens
acacaaaaatcaattcaaaataggtaaaaaacctaaaaccacaaaactctaagaaaataacatagattaaatattaattaaaattttaaaaattagattaaatgataataaaaccatacaatagtcaaatttgtggtatctggctaaatagtatttaaagagacatttatagtgcatacattagaaatatagaaattgtgtagatgaatttcctaaacatctaacatagaaagttaataaagaacaacataatatacccaaaggaaatggaaggaagaagataatacagatcagagaagaagctaatgtaataggaaataaatataaaatagaatctataaagtaaaaagtgaaaaaagttacctgaaaatattaagtattgaagtgaatatagtgctatgattagagtactcatgtactgcaggtgcaagtgtaacttggtacaaccactttggaatacaattagrcatatatactatagttgaagatgaacatactgtacaacccaagagttctagtactagttttttgtataatacagaaactatggaga

SEQ ID NO: 656139 - DNA, 529 bp, Homo sapiens
tgaatgggctgggagaaggtatagcagatacatacagattatgaaagtttcctgtgctttgagtatttacccagacaattgtttgtgggttcctagatctccagaggaaaaaaggatgcggtccacaaggacatttacatactagggaaaccaggccctgtccacagaggattacacattctacatcccyggagaaactaaagataaatgatataaaatggaaatagtgcagaagggacagagaaggaagctctagaagagtgattcttaacctgtgctgattgtgtccttctcctacccccaggaggggatatttggcaatgtgtggagacattttaattgtcacaagcagaggttgctactggcatttagtgggcagtggccagggatactactaaacatcttataatgcacaggatcatcttcacaacaaagaattatctagcccaaaatgtcaaagtagtgccaaagttaagatactgcaccattactgtctgcagttgtttttatgtgaagaaacaaaagaaat

SEQ ID NO: 656140 - DNA, 557 bp, Homo sapiens
tgttcttttccctccccaaaggccattttgcatgggatctggagctttcagaataattaaggagrtgagaataaagctagaagactgtagagttgtatattttccaaatctgattgtaagagctctgtgagttcttcattcaaataaaaaaaaaaaaaagaggttttgttggtggagcagagatcaagaaacttgaagcaggaggatcttgcatgtctgcaagcattatgaataaagtcaaagatgtataatggtcttaagggatcagacaaggcttatcagtctcccacatcattctttgatagactagtttagtttatggatgggattatactgtaaccagttttgttgatgggctgagctcagcagtgcacactttatttttctctttcattgctttgaaataggttccataagatctgtcagcacttggctaatgtcataattttagattacttttaggtgtaaaaaacatattcattatcagtaaaatcttaggctactttaaatacattctatgattattccctttttagagcccaggtttgatccagaga

SEQ ID NO: 656141 - DNA, 557 bp, Homo sapiens
tgttcttttccctccccaaaggccattttgcatgggatctggagctttcagaataattaaggagatgagaataragctagaagactgtagagttgtatattttccaaatctgattgtaagagctctgtgagttcttcattcaaataaaaaaaaaaaaaagaggttttgttggtggagcagagatcaagaaacttgaagcaggaggatcttgcatgtctgcaagcattatgaataaagtcaaagatgtataatggtcttaagggatcagacaaggcttatcagtctcccacatcattctttgatagactagtttagtttatggatgggattatactgtaaccagttttgttgatgggctgagctcagcagtgcacactttatttttctctttcattgctttgaaataggttccataagatctgtcagcacttggctaatgtcataattttagattacttttaggtgtaaaaaacatattcattatcagtaaaatcttaggctactttaaatacattctatgattattccctttttagagcccaggtttgatccagaga

SEQ ID NO: 656142 - DNA, 623 bp, Homo sapiens
agggttggtgattcccacgcttacaggcagttgtggaaactacaaggggaagggcgggccacagggcttggacaccgtgggtcccttgtctgacgactcatcatgcccagggtctctggactctaggcctggggtggaggcagtgtcagccctcaaagtggaggagctctcccttctccctaagtcctggggccgacgtttgtgttattggaggttctgcactgagcaccttctctctcctccactgaagtctccatcttttctggagacgtgtctatatcctctgctttacacactccaaccaagccasagggtttctgcttaaaatacttatgggctctatgctaaggaggggagccataggcgtttaaaaagtacttataatggcttgttttgagaaatagactaaactttccctactaatttgttggtcatatgaactttcaggctttttcaggtctgcttccttttctttctttcctttctctatctttctatctttttccttccctccctccctcccttcttccttcctcccttccttcctccctttcacttccttctccttccctccttccttccctcttccttccttcccttccttcccttttcttcccttcctt

SEQ ID NO: 656143 - DNA, 664 bp, Homo sapiens
atgtcagtggaccatttggtgatggtcaggaagttgttaaactgtctcactaaagtaataattagtcccagctggtgccagggaaaggcagtctcccaatagattaaaaaaagctgaaactgtttatcagcagtttcccagtaagagctcaggaattgggcaagttggctcaagcatgtgcactaagaggcaaaaggttgaagtttaactggtctatgatcttcctctaggaatggtaactgataagggaagaacacttcaagtgagtgtgcacagaactccagtaaacaaattgtgcatgtggcccctcccaagtgctaacaggccactgtgtatgtggatagcccacctcaagggaagaatcaggygagaagggacacaagacctcagaagcataccaacatataaaaccctaagtcaagggtcaaactgtgtacaagtcacccacttgtccttcttccaagtgtactttacttcctttcagtcctactctaaagtttgttagtaaactttcactcatgctctaaaagttgccttggtctctccttctgctttctgcccctcagtcaaattattttttcctgaggagaaaagaattgaagttgctgcagacccctatggatttgctgccagtgacaatctgaataattgaaggaaaatagat

SEQ ID NO: 656144 - DNA, 664 bp, Homo sapiens
atgtcagtggaccatttggtgatggtcaggaagttgttaaactgtctcactaaagtaataattagtcccagctggtgccagggaaaggcagtctcccaatagattaaaaaaagctgaaactgtttatcagcagtttcccagtaagagctcaggaattgggcaagttggctcaagcatgtgcactaagaggcaaaaggttgaagtttaactggtctatgatcttcctctaggaatggtaactgataagggaagaacacttcaagtgagtgtgcacagaactccagtaaacaaattgtgcatgtggcccctcccaagtgctaacaggccactgtgtatgtggatagcccacctcaagggaagaatcaggcgagaagggacacaagacctcagaagcataccaacatataaaaccctaagtcaagggtcaaactgtgtacaagtcacccacttgtccttcttccaagtgtactttacttcctttcagtcctactctaaagtttgttagtaaaytttcactcatgctctaaaagttgccttggtctctccttctgctttctgcccctcagtcaaattattttttcctgaggagaaaagaattgaagttgctgcagacccctatggatttgctgccagtgacaatctgaataattgaaggaaaatagat

SEQ ID NO: 656145 - DNA, 510 bp, Homo sapiens
ttttttgctcacaattaggccaccctatcttccaccattgttttgttcagtactgacaaaaagcattatggaatgaactgcatccctttaaaatatacatgtttaagctctaatctctaacacctcaaaatgtgactgtcttttacaatagggccttcaaagaggtgattaattcaaaatgaggttattaaggtgggcccaaatccaatctacttgctgtccttataaaaaaaaaaaagaaagaaatttgaktacacagagagataacagggatgtggacagacagaggaaagactatgtaaggacacagagagaaggtggtcatctacaagccaacagaagaggtctcagaaaaaccaaacctgtggacactgatttcagatactgagaccttgagttaagcctccagaactatgagaaaataagtttatgttgtttaagccacctagtctgtggtagtttattatgacagccctagcaaactaatacagtgagttctaagtaagagtg

SEQ ID NO: 656146 - DNA, 510 bp, Homo sapiens
ttttttgctcacaattaggccaccctatcttccaccattgttttgttcagtactgacaaaaagcattatggaatgaactgcatccctttaaaatatacatgtttaagctctaatctctaacacctcaaaatgtgactgtcttttacaatagggccttcaaagaggtgattaattcaaaatgaggttattaaggtgggcccaaatccaatctacttgctgtccttataaaaaaaaaaaagaaagaaatttgagtacacagagagataacagggatgtggacagacagaggaaagactatgtaaggacacagagagaaggtggtcatctayaagccaacagaagaggtctcagaaaaaccaaacctgtggacactgatttcagatactgagaccttgagttaagcctccagaactatgagaaaataagtttatgttgtttaagccacctagtctgtggtagtttattatgacagccctagcaaactaatacagtgagttctaagtaagagtg

SEQ ID NO: 656147 - DNA, 510 bp, Homo sapiens
ttttttgctcacaattaggccaccctatcttccaccattgttttgttcagtactgacaaaaagcattatggaatgaactgcatccctttaaaatatacatgtttaagctctaatctctaacacctcaaaatgtgactgtcttttacaatagggccttcaaagaggtgattaattcaaaatgaggttattaaggtgggcccaaatccaatctacttgctgtccttataaaaaaaaaaaagaaagaaatttgagtacacagagagataacagggatgtggacagacagaggaaagactatgtaaggacacagagagaaggtggtcatctacaagccaacagaagaggtctcagaaaaaccaaacctgtggayactgatttcagatactgagaccttgagttaagcctccagaactatgagaaaataagtttatgttgtttaagccacctagtctgtggtagtttattatgacagccctagcaaactaatacagtgagttctaagtaagagtg

SEQ ID NO: 656148 - DNA, 555 bp, Homo sapiens
tttcctccaaatgatcacaacacttctccagcaggggctcagaactgggctgaggctgacctggctgaaatgacagagttaggcttcagaatctggataaaaacaaactttgttgagctaaaggagcatgttgtaacccaatgcaaagaagctaagaaacatgatacaacaatgcaggagctgacagccaaaatagctagtatagtaaggaacataactgacatgatagagctgaaaaacacactgcaagaacttcacaatgcaatcacgagtattaatagcagaacagaccaagcagaggaaagaatctcagagcttgaagactgtctttctgaaataagacagacagataagcatagagagaaaagaataaaaaggaatgaatgaaacctccaagaaatatgggattatgtaaagagaccaaatctatgcctgattgggctaygtgaaagagatagggagaatggaaccaatttggaaacacatttcaggatatcatccgggagaacttccccaacttagctagacaggccaacattcaaactcagaaaatgc

SEQ ID NO: 656149 - DNA, 647 bp, Homo sapiens
gtgatagttatgagttccaataaaaaaacctttgaatttcagagagtttccaccattgagtttttttttttattattctgaagaagttcttgatttatcatggtggagttcaaagtggagagagttgcttcagtgtctacttacacagaacaaatttctctatttttaaaatttagtttccgtttgttgatttaaagaaattattggaagtggtttaccttgccattccttggagccccattagtattgacagttatcataggagtcagaaagttcagaatctcccttttgtttccagtctgatagtctagattgctgtgttaaggggtttaatgggtaattcttccaatgtcctatttgtttacaataatgaaaaatgtctttattgaaagagttgttggataaaggtattttaaagttaggctgaggcccctgcaatgactgtaattacaaaatcatcaatttatttktctggtggttactttatttgttctaagtttttcccaaaatgttttgctaaatattgtaatactgtcatgggagtcacttcgctttctactttatgtttctttcatacgtcacttatctgtatgtgcagcccattaacaaaatgggctgacatagccacttcatcattttggccacta

SEQ ID NO: 656150 - DNA, 595 bp, Homo sapiens
tgatggttacatgagttatgacctatttcaaagcttattatgctgtgtgaaaaagaagaaaaccagaggacttgcacaacctgagtttcagactcactctaagctgttataatcaaggcagtgtgcaagtggcattgggagacacaaatacatcaacagactgactttggagacctgaaactgacccacagctataaggttcataggttttttgtttgtttgttaatttctttttgttttctgagacagggwcttactctgtcatccaggctagagtgcagtggcgcgatctcggctcactgcaatctctgcttcccaggctgaagcgatccccgtgcctcagcctcccaggtagctcatactacaggcacatattagtagacatgaggtttctccatgttgcccagactggtctccaactcctgggctcaagtgatccacaggcctcagtctctcatagtgctgggattacagtcatgagccaccatgactggccataggttttcaataaaagcagtttaatggggcaaaggaaatagtttcaattaattgcctttcataaaggagaaggggtagacgaacaaggttatttctc

SEQ ID NO: 656151 - DNA, 565 bp, Homo sapiens
actttcagttataagatgaataagttctagagatctgatttacagcattaactacagttaatgatgtattttattcttgaaatttgctaagagaatatatcttaactgttctttccaaactaaaactcacttacaaacaaaagtaactacgtgaggtgatatatctgttagcctgactgtggagatcattacacaagatatacatatactaaaataccaggttgtacaccttaaatatatactttttaaaatgtgtcaatcatagctcataaagctaaaaaattaaattaaattaaaaatgtatatttatgtgtttattagtaagagaaactgttcactgcttctttgtayggacagaatgaaaaagtcatcttggaattatctttgttcttcagaaggtcacttgagtgacttctcttagttatgaaaatatgctttcttccttcctcatgtttattgggatagaggaagactaacttgctttaagagaaggaagagataagacctcaaacttttctccctgagattttaatttaggatagatcagattgactctgaactaggt

SEQ ID NO: 656152 - DNA, 580 bp, Homo sapiens
ccagggatgctactaaacaccctacagtacacaagatggccccacttttttttttctatttctatttttattttttttgaggaagagtcttgctctgtcamccaggctggagtgcagtggcaccatcagggctcactgtagccccacctcccaggctcaagcgatcctcctgccttggcctcccccaccccaagcagctgggactacaggcgtgtgacaccacgcctgactaattgttttttgaattttagttaagacaaggtctcgctaggtttcccaggttggtctcaaactcctgagttcaagtgatccttctccttggcctcccaaagtgctgggattacaagcgtgagccactgcgcctgccaacagccccactttcaatgatgcagaggttgagaagccctactttgggggcccaaagctgcaggggtgggtagcactgctctgcaagtccaggggatgtcatgaggctctatgtggaagtgcgttcccccagccctgctcctgggacaggacccaggatctcaaatctgctctcatctgaggcaacagctcagacttcagagaagacagacag

SEQ ID NO: 656153 - DNA, 580 bp, Homo sapiens
ccagggatgctactaaacaccctacagtacacaagatggccccacttttttttttctatttctatttttattttttttgaggaagagtcttgctctgtcacccaggctggagtgcagtggcaccatcagggctcactgtagccccacctcccaggctcaagcgatcctcctgccttggcctcccccaccccaagcagctgggactacaggcgtgtgacaccacgcctgactaattgttttttgaattttagttaagacaaggtctcgctaggtttcccaggytggtctcaaactcctgagttcaagtgatccttctccttggcctcccaaagtgctgggattacaagcgtgagccactgcgcctgccaacagccccactttcaatgatgcagaggttgagaagccctactttgggggcccaaagctgcaggggtgggtagcactgctctgcaagtccaggggatgtcatgaggctctatgtggaagtgcgttcccccagccctgctcctgggacaggacccaggatctcaaatctgctctcatctgaggcaacagctcagacttcagagaagacagacag

SEQ ID NO: 656154 - DNA, 689 bp, Homo sapiens
cccagggtcacttgccagctatgtgacctggacagattattcatcctttctgaccctccgtgttctcatctgtaaagtgcagggtgtcacgtacctttctcatggggtatttgtgtgagggttaatgagactgaactggatatagattgtcttttttgagcattccagtaggactgcctatcattgaaccccacctccaccccactacacccgcagaggtgggcaagtgatgggtgtctggccaatcacaaaatcccatcactctggaagcactgattggcccagagatgggcttatgctccagaggagagccaatcacaggccttccctggaatgactatacagattttgrgtgagagatgatctctattccactggggtgaataagtcagaagaatggaaatctgggggcagccccacagaaaaagtctatttcccataggagggaatgcagtcacacaggaaagttgaatgaagaaaactgaaagcaggattcgagcccctggatctggctgttcagggatccagccctggatttaacaattctatgagccaataaataacattttacttgaaccagtttgagtggaatttcttcacttgcaaatgaaaaggtcaccactgatgaagagacattgcaagtaaaatcacctagaataatgcctgacaaacaggagatgcccgataaa

SEQ ID NO: 656155 - DNA, 498 bp, Homo sapiens
agaaatgttatttccagcttagttaaattgaccctgcacaaaaccaccgtaggctaccccctgtcaacatggcacacccacacgcttcttttaactatatttaacttccaaattaagcatgcaaaagcatgcttcctcctaacataatgcaactgtcccttgtaaaactgaaaacacgctacactaaccttcttttcaaaatatgacacaaagtctcttttgtacctcctctttgggtgaggttcattcctttcctagctgagtcaaattccttcttagacctcttatttaaattctgaatgataaggttagctaytgttaacaaatcctatgttagatggtaggggaatgagagaggaggagaagaagtaattaacatatgcacaaatattttcatatcaaaataaggaagaaatactcactgtctattactgtcctcttttcttcaactggtcatgtggttgtagttggtatttataatttccttctgctgcccat

SEQ ID NO: 656156 - DNA, 498 bp, Homo sapiens
agaaatgttatttccagcttagttaaattgaccctgcacaaaaccaccgtaggctaccccctgtcaacatggcacacccacacgcttcttttaactatatttaacttccaaattaagcatgcaaaagcatgcttcctcctaacataatgcaactgtcccttgtaaaactgaaaacacgctacactaaccttcttttcaaaatatgacacaaagtctcttttgtacctcctctttgggtgaggttcattcctttcctagctgagtcaaattccttcttagacctcttatttaaattctgaatgataaggttagctactgttaacaaatcctatgttagatggtaggggaatgagagaggaggagaagaagtaattaacatatgcacaaatattttcatatcaaaataaggaagaaatactcactgtctattactgtcctcttttcttcaactggtcatgtrgttgtagttggtatttataatttccttctgctgcccat

SEQ ID NO: 656157 - DNA, 564 bp, Homo sapiens
ctataacatttacatattaattaaatgtactattatgtatggtttgcaatattgattgacttgtggaaaggcttgggcttatgcacccttggctctgagtaccaagtgaatgggaagtactaaggggaattgcctccttgggaactccaaatagcatgtggcttttatgatggaaatagcatcagtaaaagtccaacattgtggaaagacacaaatgtgttgacctggttatctctgactttgcattgttcatgagactgggtcacatatttatattaatttacatgaatagaatgattgtttgtatactaaacattactaataatatatgtagaaactctgtgctctgttacattcatctagaaagtgttagatgtgtcatctacttttaatcactatgaacttgagtagatttggtttacaaaaatagggcagaygtgtctataaagctcatgatgttttccatgaccctgtaacatggtgagactgtcaacttccaaactgtgtgcccatcagttcttctcaaaacttgtatttagacttccttagggcaggtctagagaa

SEQ ID NO: 656158 - DNA, 560 bp, Homo sapiens
acccactgggtaaggaatcccaattatgtgagtaaattytcaggggccgtaataaataataataataaataaataaatgctgatatgtaaacatgaggagttggtagaagaaaaatagtggagttaattatatttccagctttgtaatatttcctccttgttttggaacaattatacatacagtgtttatcatggacaactttaacattgacttcataatttgcagattagcacaatttagttataagtgaaatgataaaaacaaatcttcaaataagcatataaaaagataatacaatttcattagggaattgcaaattaaaacaaccatgggatatcactacacatttattagaaaaggtagaatccaaaacgctgataatacccagtgctgatttggatgtagaacaacaggaatacttctttgttacaggtcagaatgcaaaattgtacagccactttggacaacaatttggaaatttcctacaaaactaaacatactcttactatatgaaccagcattcatgctccttggtatttacccaaatgagttgaaaacg

SEQ ID NO: 656159 - DNA, 560 bp, Homo sapiens
acccactgggtaaggaatcccaattatgtgagtaaattctcaggggccgtaataaataataataataaataaataaatgctgatatgtaaacatgaggagttggtagaagaaaaatagtggagttaattatatttccagctttgtaatatttcctccttgttttggaacaattatacatacagtgtttatcatggacaactttaacattgacttcataatttgcagattagcacaatttagttataagtgaaatgataaaaacaaatcttcaaataagcatataaaaagataatacaatttcattagggaattgcaaattaaaacaaccatgggatatcactacacatttattagaaaaggtagaatccaaaacgctgataatacccagtgctgatttggatgtagaacaacaggaatacttctttgttacaggtcagaatgcaaaattgtacagccactttggacaacaatttggaaatttcctacaaaactaaacatactcttactatatgaacyagcattcatgctccttggtatttacccaaatgagttgaaaacg

SEQ ID NO: 656160 - DNA, 530 bp, Homo sapiens
tttcaacaactaattccccactttagaccttgttatcaatatgaactcttcgagggttgaaatataaaactccatacttctcttgtccttggataggcttacrtatctctcagtttcactatttttgtgctcatatattattatgctcttctagtcccttagcttttctttccccttgctcttatgtttctattccctctgcccttttctttcttttctcccgacgtgtacactttgaggcattgctttaactaagatcctcagctctgactgtcaactctccactcacacatctgaaaaaataatattgtccacatttgtgattatttccctgttctgttgtaaagtattcctaatggttagcattctttaatttcaaaatctacctctaaaaaactattctcaaggactatttccttggggaaataatgatcatctctcatgacactaatcaattaactttcttttagatattgaattactttacatctttgttcacaattatctgttttcttatgcagaaaggacta

SEQ ID NO: 656161 - DNA, 547 bp, Homo sapiens
ggaatacttccaaactcattttagaaggccagcactgcccttatgccaaaggcagacaaggacactataagaaacctataagccaggctgggtgtggtggctcacgcctgtactcctagcactttgagaagccaaggcgggtggatcacctgaggttaggagtttgagaccagcctggccaacatggtgaaaccccatctctactaaaattacaawaattagccgggtgtggtggtgcatgcctgtggtcccagctactcgggaggctgaggcaggagaatcacttgaacctgggaggcggaggttgcagtgagcctcagtcgtgccactgcactccagcctgggtgacagagcgagattccgtctcaaaacaaacaagcagaaatcctcgacaaaacattagcaaaccaaattcaacagcacattaaaaagtttattcaccatgttcaagcatgatttatccctgtgatacaagaatggttcaacatacataaatcagtaaatgtgatacaccatattaacaaaacgaaggacaaaaaccacatga

SEQ ID NO: 656162 - DNA, 547 bp, Homo sapiens
ggaatacttccaaactcattttagaaggccagcactgcccttatgccaaaggcagacaaggacactataagaaacctataagccaggctgggtgtggtggctcacgcctgtactcctagcactttgagaagccaaggcgggtggatcacctgaggttaggagtttgagaccagcctggccaacatggtgaaaccccatctctactaaaattacaaaaattagccrggtgtggtggtgcatgcctgtggtcccagctactcgggaggctgaggcaggagaatcacttgaacctgggaggcggaggttgcagtgagcctcagtcgtgccactgcactccagcctgggtgacagagcgagattccgtctcaaaacaaacaagcagaaatcctcgacaaaacattagcaaaccaaattcaacagcacattaaaaagtttattcaccatgttcaagcatgatttatccctgtgatacaagaatggttcaacatacataaatcagtaaatgtgatacaccatattaacaaaacgaaggacaaaaaccacatga

SEQ ID NO: 656163 - DNA, 547 bp, Homo sapiens
ggaatacttccaaactcattttagaaggccagcactgcccttatgccaaaggcagacaaggacactataagaaacctataagccaggctgggtgtggtggctcacgcctgtactcctagcactttgagaagccaaggcgggtggatcacctgaggttaggagtttgagaccagcctggccaacatggtgaaaccccatctctactaaaattacaaaaattagccgggtgtggtggtgcatgcctgtggtcccagctactcgggaggctgaggcaggagaatcacttgaacctgggaggcggaggttgcagtgagcctcagtcgtgccactgcactccagcctgggtgacagagcgagattccgtctcaaaacaaacaagcagaaatcctcgacaaaacattagcaaaccraattcaacagcacattaaaaagtttattcaccatgttcaagcatgatttatccctgtgatacaagaatggttcaacatacataaatcagtaaatgtgatacaccatattaacaaaacgaaggacaaaaaccacatga

SEQ ID NO: 656164 - DNA, 547 bp, Homo sapiens
ggaatacttccaaactcattttagaaggccagcactgcccttatgccaaaggcagacaaggacactataagaaacctataagccaggctgggtgtggtggctcacgcctgtactcctagcactttgagaagccaaggcgggtggatcacctgaggttaggagtttgagaccagcctggccaacatggtgaaaccccatctctactaaaattacaaaaattagccgggtgtggtggtgcatgcctgtggtcccagctactcgggaggctgaggcaggagaatcacttgaacctgggaggcggaggttgcagtgagcctcagtcgtgccactgcactccagcctgggtgacagagcgagattccgtctcaaaacaaacaagcagaaatcctcgacaaaacattagcaaaccaaattcaacagcacattaaaaagtttattcaccatgttcaagcatgatttatccctgtgatacaagaatggttcaacatacataaatcagtaaatgtratacaccatattaacaaaacgaaggacaaaaaccacatga

SEQ ID NO: 656165 - DNA, 355 bp, Homo sapiens
tggccactatacagtaatccatgtgaccaggacaggcttctctaggggacaaaacataaaaactcttgtcctatgtctctccaagctagtaaaagaaaaaaaatgctgtgaataaatactttatgtgaaacaggtaaacataagttccayagccattcattcttttcactaatagctaagtatacaaagattcaccggtgtcaactttctatatgccaatttagaagagtgattagctgaggtgtgaaatatagaaagggaaatgctaggaagatactattttaagcttacccccaagtccattcccttccaaaaaaatcaaatccaaggttttccttcaaaagctaaatatgca

SEQ ID NO: 656166 - DNA, 555 bp, Homo sapiens
tctgaaacagatattttcccaaaaacataatggttaggaggttcctagattagtccctaaaaacccactaatttcataatttgtcaaaaagtgatacagatagtatattattcctcactataaattatagagcatttcctcacccgtgttcctttaaacacttggtatttctgatttagcacttggtatttctgatatagcatgtgggtgactcatatcatcaaactatgccccaaatggtaaacttttaagtcacttatttggggttctctttcaaataacagaaaaaaaaaaaagttacacataatctttgattattcaaggtctgactagttataggttttggtgakcttttttttcttttaaagagacagggtcttactctgtcacctaggccaccatgcaatggtgtggtcatagctcattgtaacctcaaattcctgggctcatgtgatcctcccaccccagcctctgggactacagttgcatgccatgatgcctagctaatttttttcttttttaattttgtagagatggggttcttgctatatgttg

SEQ ID NO: 656167 - DNA, 585 bp, Homo sapiens
gcacaaagaatgcttgagggactttgtgcgacataggtataaatatgttaaagcgtgtttataattgctttttgaagkgtttaacactgggtgcttttacctttttatccaggttcagaaacctttttctaataaggaacttagagatgtgtggcaggttgaggataaatttttgctcttattagtatgtactgaaaataagtaattttagcctctatcagttttcctaggtttgttctacgctacctatgggtacaacttacccccatgacacatttacccaggaggttggtccatacctgatttgtcaagtgattcattgaacctcatgataagttaatggtttatcatcattaggaacaatactattatcatcatgattaatatttttgagcaaccatcaaataatatgcatggaacttgttaaaaggcataaatgaggttgcatggaaaagaacagctttctgttctcaaatatttctaaataacacttacatggtcataaaaaggcacagataaaacatgattacgctgcttatgcatttctaggagaaacttaattcagtagtcaagtaggcaattcca

SEQ ID NO: 656168 - DNA, 618 bp, Homo sapiens
catgcattttacctgaaccaccctaaccttagactttttcttcctctggcctccttggggaccacaactatgacagagcaaagacaatcagctccttgtgattgttatacatcagtggcttttaaacatgagtgtgtgtgaaaatccttcagggagcttgataaacatgaagtcttacaggcctgctgatttattaagtcgggcaagagtggagattgggaatctaaaggtactccaaacaattctgttgcaggtgacccctggactccactttaagaagcactcctgcagccagtgagcgaggtggtggggacagttaggaagatggctctcgcactaggcctcagtgtgtctcacctcctctggtctctgaaatctgaggtctctgaagtgcgttgtgaatactccaggtggtttgtagggagactcattttgattcagaaaggaaataatgaaacttctgtttatatttatttttgactttgccatgtaaaatttattttttatttgtgttttgtcacacacatgctgtatcagtacagttttatatattcgtactttagaaatggartggtacacatgtattagaggcctgttctagaaaatgtcttactgata

SEQ ID NO: 656169 - DNA, 604 bp, Homo sapiens
tggcagttcaaacaaattctatgctctattttattttaaaatcttaggactttttaatctattagtcattctgtcattgggagaaaattgccatgtctagaatttaggagcctctcaaatatttgaagggtatccagttttactctagagcyagtgcatttctgataacagaatccccgtgggatccccagtgtgagaaggtaccactgggacccccagaggctctgggtaaggatgttaatgactatctatattacctctctatccacagtaattgagcaagaaatccacacttctcctttttcctagaagaccactgaaagttctaagaactggagttaatactatcatttccttgatcatctcatcctttaagtaatgcaggaatgaaagcctcttctcagggtaatcccaaatgagaaatttggaaatttgatgtttccgtcaccatggcactgtattttctcagacattagaaactttagtaaaagtatatcaaaaagagtggggtctttggtgtaatcacatcacccaaaataaaaatagtctatttccaaacttattagactataacacctgtattgaattggctttaactagtttt

SEQ ID NO: 656170 - DNA, 604 bp, Homo sapiens
tggcagttcaaacaaattctatgctctattttattttaaaatcttaggactttttaatctattagtcattctgtcattgggagaaaattgccatgtctagaatttaggagcctctcaaatatttgaagggtatccagttttactctagagctagtgcatttctgataacagaatccccgtgggatccccagtgtgagaaggtaccactgggacccccagaggctctgggtaaggatgttaatgactatctatattacctctctatccacagtaattgagcaagaaatccacacttctcctttttsctagaagaccactgaaagttctaagaactggagttaatactatcatttccttgatcatctcatcctttaagtaatgcaggaatgaaagcctcttctcagggtaatcccaaatgagaaatttggaaatttgatgtttccgtcaccatggcactgtattttctcagacattagaaactttagtaaaagtatatcaaaaagagtggggtctttggtgtaatcacatcacccaaaataaaaatagtctatttccaaacttattagactataacacctgtattgaattggctttaactagtttt

SEQ ID NO: 656171 - DNA, 604 bp, Homo sapiens
tggcagttcaaacaaattctatgctctattttattttaaaatcttaggactttttaatctattagtcattctgtcattgggagaaaattgccatgtctagaatttaggagcctctcaaatatttgaagggtatccagttttactctagagctagtgcatttctgataacagaatccccgtgggatccccagtgtgagaaggtaccactgggacccccagaggctctgggtaaggatgttaatgactatctatattacctctctatccacagtaattgagcaagaaatccacacttctcctttttcctagaagaccactgaaagttctaagaactggagttaatactatcatttccttgatcatctcatcctttaagtartgcaggaatgaaagcctcttctcagggtaatcccaaatgagaaatttggaaatttgatgtttccgtcaccatggcactgtattttctcagacattagaaactttagtaaaagtatatcaaaaagagtggggtctttggtgtaatcacatcacccaaaataaaaatagtctatttccaaacttattagactataacacctgtattgaattggctttaactagtttt

SEQ ID NO: 656172 - DNA, 396 bp, Homo sapiens
catgatcaaagaagtttggaggacgctgctttaaacratttacaaggccaaaatccatatctctttccagctgtctgcaagagtttattgttccttagttgtttttcatttaggtatcaacattagccagtgcttcttttactactgtatgcatacacacagagcacagcaaaagattgaggacaaaaagagtttgcaattaaaggcaagtagaagtatctgtgtgctaaggttagttatctgacttaacacctttatttgaacaaactcctactgagaaatcagaagaatcaaggtaacttcagtctctcaggttctggccctcgcttcagctgtgaatagacttaccttctagtaacggtgactcagtggcccaaaagtggatataaataaatg

SEQ ID NO: 656173 - DNA, 585 bp, Homo sapiens
aaaagaaactacaaatttcttctgtggctttttatttttaaaaactactgagcattttagtgaaaacatcttacattcagagaacatgtgaaataaaagtgtattagccagaggccaaaatggaacattagtggcttgtgtgcctgtactgacgtagtgttggatgccagttggccagacatggraacatttagattttgtttctgagaggaagcagtgcatagccgtaagccacattaagttcattaggtgcaattgctacatcacacagttaatatagtgagagaaataaactcttcagtgactcaattctagtggcaccaattttaaccaatttgtcagacaattgagtatgttctgcatttagtatggatttaaaaaaatatggtgcccattttcatgtttggtttgtttggctttccagacatagttcagtttatgaagaagcagctattcactaagcaagtcagcattgataatgggggttgcgtttgttgctgatgtgtaaggaaggttttactagccaacataggaattttggaatatatctaggagagggttcatgatgtgggaaagcatctacta

SEQ ID NO: 656174 - DNA, 525 bp, Homo sapiens
gcaattcaaaagatgtctttgtttccacttaacctgctattaaatgccaccttctccattgttttaattcagtttgagtttatcccaggtttgtgagtcaagctgatcctaaactggactagagtaaaattttcaaaattgctatcaaaattttttgtgaatcagaatacattgataaattaaaggagaagcaaatcattatcccaacaaagtggttgactaatcagttgaacttttgaaaagttgtgaatgagaccaccttagtcttccactggagccctgctcttaaatgaggagaaaagctgttatctttaagtacaagctaatgagaaacaataatctataattttaaaagatcacyttatttccagaacataatttgaagaggcagatattaatgatctacttaccgcagaactgatgcacgggaagtctaaacaacttgtcttggttcatactataaattatgataaaaccaagaacaccacatgatttcctagtgtttcaattctgaatgctgctaga

SEQ ID NO: 656175 - DNA, 616 bp, Homo sapiens
ttttaatacaaatgatgatttcattcgtaatttttgtttcttttttttttttcgcagaattgaggacaaacatttccttacctttcttgctataattatatttcagtgttagccctttttaatccctttcaccctttaactgcatccaaaaaataaatacttatcagttactgagataatggaatgkaagctcaattatgctaaaaactaatggttaacactaacacatagtaacagcttcttttgcagtatttattctcttgttgataaaaaaaaaaataagcccaacgacccactgctgcagaaagaatttagctacaagtttatcaatttaagcaggccaactgcacaactaaatgcatgtgaaacttaacaaatcccttgggaaagctgactgtaagaattttctagtctgtgttgagttactgaggtgcgacatggtggattggacttaatgcgctaggcaagcacaatcaaatagagacagtttaagatttttttctgtgtccatgaagggatctctggtaggtgtctaaatgaagcattcagaaaggactataacaccatcatgagttatcttccctgaatattttggaaggttattttggtttagaag

SEQ ID NO: 656176 - DNA, 616 bp, Homo sapiens
ttttaatacaaatgatgatttcattcgtaatttttgtttcttttttttttttcgcagaattgaggacaaacatttccttacctttcttgctataattatatttcagtgttagccctttttaatccctttcaccctttaactgcatccaaaaaataaatacttatcagttactgagataatggaatggaagctcaattatgctaaaaactaatggttaacactaacacatagtaacagcttcttttgcagtatttattctcttgttgataaaaaaaaaaataagcccaacgacccactgctgcagaaagaatttagctacaagtttatcaatttaagcaggccaactgcacaactaaatgcaygtgaaacttaacaaatcccttgggaaagctgactgtaagaattttctagtctgtgttgagttactgaggtgcgacatggtggattggacttaatgcgctaggcaagcacaatcaaatagagacagtttaagatttttttctgtgtccatgaagggatctctggtaggtgtctaaatgaagcattcagaaaggactataacaccatcatgagttatcttccctgaatattttggaaggttattttggtttagaag

SEQ ID NO: 656177 - DNA, 570 bp, Homo sapiens
cacctattttccaactttaacgtagatgtcacagtcagtggcaatatttgataatagagcttgtcagtgaatgttataattttaagtgttaatttaaataaatgaggttcctattataagtacccctttctaagtgtggattgtaggagccacagaatgtgaggactgggaggggtcttagtagcgcccggcgcaagcatcctggatgccacaaggtgcagggaagcctagaagcacgagtcacttggcttaactcactcgttgcctaattctgtawttttgttccatatctcaaatattacgaaatactactaggctataggaggtacatcattttctaaaaaattgtatatatatgttttcaaaatggtgacctaaatcagcagtcagactgagggataacttcctattttaaagggaaatctctaatttaattaaattactaaatattttgaaaagttatgaaggatccaaagcagatttggctttatgctgcatagtttcagttgtggaattcaaaagagatattgttttgttctgcagatgtggaatttttgtttggtttttaga

SEQ ID NO: 656178 - DNA, 555 bp, Homo sapiens
taggggttggtaaagtattaatattttggaaaggggacagatagtaaatatttctggctttgagggccatatggtctctgtcacaaccattcagctctgagtagtcaaagacaatatgtaaaagaatgagtgtggctgtgttccaataaaactttatttccaaaaacaggcaatgagtgagattagcctgttggccaaggttgccaactccggttctagtgtgaggatagagctctaaattcaatattaacttagaggaaagccatagtttaaatttattccagttaaagaagaaagaaaaaaatatcctgtatcatattgtttaccaaggaattgtatgtaattaggatgtatacttaattaaaataattcctaataaaatgctaagaatgatagagaaacaccagcagagattattactgcaacattatttataaaagcaagaaagagaaacagcctaaatgttcattgatggagaactggttaaayaaattgtggaaatctgcacggttaaaaaaaatgaactacatgtattattttactgacaaggaaatt

SEQ ID NO: 656179 - DNA, 438 bp, Homo sapiens
attttttgtgtgatataaatattacaaggtcaaattcatttttttctagtgagacaaaatgttaaccttacacttggattcaatgctgacccatgacatcacttttggaatgaatattttttttcattggaaggtgtgacctaatctccatatttcttctatgtatcttatttcctaatttgactttgagtcagaatcaccttttttcatacatgtgttgatgctttctgctgctggaaatagatctgtaggctgttaacaattattgtcattctaatacattctaaaaatgcattataaaggtggattgattctgtagttttataataacctgaatgtagcattggtaaaatagatgggaagagtattcagaatacatccttttcatattagacattaaaatcctttastagttttgaggttttaggaaacatcttt

SEQ ID NO: 656180 - DNA, 646 bp, Homo sapiens
gtgtgacatcaaagatttacccatgaagccacgaccaagaattcttttttgagaggtttatttctgttacttaacttctttcattgagtgatctatagcatcattctggctttgtaaatgatgctcattctgaggttattctgcagtttgtcacttgcatacattttatgcttttacattcatgactgcttttattgcattttaataagtggaggaaaagaacttcctacaacatagttacatttttttaaagatacattcttgctaccaatagaggcctaatttccattatattcactctgctacagaaatacttaatgccaggaaaggagatatttactggaatccacaagtccagaattcatcatgattcagtgtgaaatccactgccctttgctccccacccyctcttggactggaatgaaatgtgccttaaactgaagtgaaatacatcacatgcagcaacagtgggccctcgctttgcctctattcctggtgtgaaatcgatacactatctttcctcctgacctgtttcgtgacctccattgcaactttcatgctgaacagcaattgctttgaacagtctgggtctgccacagctcacaaatgattctcagcttctgtctaaaactggtgctgataacaa

SEQ ID NO: 656181 - DNA, 479 bp, Homo sapiens
tccactgccctttgctccccaccccctcttggactggaatgaaatgtgccttaaactgaagtgaaatacatcacatgcagcaacagtgggccctcgctttgcctctattcctggtgtgaaatcgatacactatctttcctcctgacctgtttcgtgacctccattgcaactttcatgctgaacagcaattgctttgaacagtctgggtctgccacagctcacaaatgattctcagcttctgtctaaaactggtgctgataacaaaggcttgattttaaataatgcagttgtaktcgtcttctaattatgaattacatgaaagtgcaagctcctctattattaaacactttcaatagcaggcatggtacatgtgcagactgcacacaggggcctggggtctgggaatcaggcctttaaattaatctggctaactttagattgatagagaaggggaaagagacacaaggtatatttgtatg

SEQ ID NO: 656182 - DNA, 534 bp, Homo sapiens
aggtcagatagaggtaaagctattacttttttgtcaatgatgttaaaaactgaaaagatgatttattgtggaggaggccaacgttaactataacccattgccatgaatagtcatattaattttcataaccaaaatgatcaacattaaataacaactgttgctgattgggggtaatttattgaatgtcatttttgtcatttcttttcctccactcagttgtagttagttctcagtcttcattactgtgatacatttgaaccacggtttttagatgagggcaaccattgtattttgctcatacttctattagacacaaaggccatgcctcttgaaaaacctgaacatttttttttctaatggttaacattgcatgattagtgtggagtgtgagctgatggatgtgtatagcaacaattcttatttattttcagacaatttaggraagtctgtgtagtttccaacttgatttattcacttaggatttattaagccacaaacttgtgccaggctttgtgcaagacataggatatgatg

SEQ ID NO: 656183 - DNA, 549 bp, Homo sapiens
gggcctactttctgaaaatggcctcctagaggatcagcattgtagggatccacttactacggtgtagcccttaaggacaaagggtgggcattttacactggaaattacttttcctttcctttcagttccctgaagtcaggctgcgccttcagatgtagctttttccccaggcattgttcctgcarttgttggttcagcctcctgagctgctttgactttgggaggactcccaccaatccccatttgcctgctgttctctacacaccctttcaccaccattaacaggacagtgcctcaaaccatgtagaacttgcattttaatgtcttttgtttctttgtgtagttccaggtatggtactggcataatttcatcaaccacttcccagaaccccaaaataatgacaaaatagaggtcacagtggtaaatagcccattttgctgagcacagtcatctcaaaatgagaccaagaacactctggctgagaggtttgacaatatggtgttctaacacttactggatgaaagttccaagtatagtctagtacgctt

SEQ ID NO: 656184 - DNA, 355 bp, Homo sapiens
ttcatatttctttgttgaacaaaatacattttgttagaagagtcatcaagaaccgggagttcaggaactggaaatggatagaagtgatagaaggattggaataggatagtttaccctcagattccattcatttcaggattactcacaaaaaagcaccctctctcacacacacaatggacaaccgctactgtacctgaaatactcagctcattttaatggttagcacatatgctgtttttacaaggtagatactgctggaaggcattcttgcagattagtttggtcacattgccttctttcttatatctgaggtaaagagagttttgcaytgactgttagggtggggaaaatgatt

SEQ ID NO: 656185 - DNA, 630 bp, Homo sapiens
ggggggaggatggtcacctatgctgaagaaaagggaaaggtcacggaggctccagcagcaggagtgaattcttttgctggttgtttaacctgattgactgattgctattatacagtcatcttcccctcacctgcacartagaacaacttatgccagttgtgttaggatcagtaaataacaaaggattgagaaaagagttagaaatataaaatgaccttcataaagagctctaatgctaaacatgttaaacagacattgaactttgtagcaagaactgcttcaagcctttcgatatccaaatgaattctaatttccacatcatgcctttcagacttcagcatggtttctggtggtttctcccagttaattttagcatcacacgaatgcttttgcctataaatgacttgaagtagcatatgttggtaatgtggatggcatgaaagtgtattatttaggggttattctagactagcctagaagtgagtgaatttattcattcatttaacaaatatattttaatcatcacccacgggtcaggtgcttttctacacgaactgttctacactaactgacttattcagaggtgactaagaaaacctctgctctctagaagcctagaagactgagata

SEQ ID NO: 656186 - DNA, 630 bp, Homo sapiens
ggggggaggatggtcacctatgctgaagaaaagggaaaggtcacggaggctccagcagcaggagtgaattcttttgctggttgtttaacctgattgactgattgctattatacagtcatcttcccctcacctgcacaatagaacaacttatgccagttgtgttaggatcagtaaataacaaaggattgagaaaagagttagaaatataaaatgaccttcataaagagctctaatgctaaacatgttaaacagacattgaactttgtagcaagaactgcttcaagcctttcgatatccaaatgaattctaatttccacatcatgcctttcagacttcagcatggtttctggtggtttctcccagttaattttagcatcacacgaatgcttttgcctataaatgacttgaagtagcatatgttggtartgtggatggcatgaaagtgtattatttaggggttattctagactagcctagaagtgagtgaatttattcattcatttaacaaatatattttaatcatcacccacgggtcaggtgcttttctacacgaactgttctacactaactgacttattcagaggtgactaagaaaacctctgctctctagaagcctagaagactgagata

SEQ ID NO: 656187 - DNA, 661 bp, Homo sapiens
cctcagtttttcctattttcttttgttgaatctagccatcactcattaaccataactcctttctgccttataggctctctaataattttatgttttttaaaaatattttgttcattgagagaatgacattgatctttttccttcctcactgttaaatccccaggcctagcacaatttaaataaccaacattcattacatgctaatattttattaacaatgttgtaacttatttctagtaaaaccgcagtgatatattactatcatcgctcttttttctgcatcaaaactgagctttagaaagcttaaatgccttgcttatagttgcatagctagcaagtggcacagtcaagatttggacatggagctcttgacamcagaaaccaaaatctgagccattgcaatataaattaaaaagcatagtgatgttgaacaatatttcttgaataaactgatttcagatttaatttcatttttttattttccccatgttgacaaagtttctaaactctgtgtttttacattgtgagattactttataaattaagttacaatgaaattcttgcaaatattttgcctttatcttgaatgtgagtcaaagctatgttttgttgtcattgttggaataggagtttaaaaatgattactacaccaaaagcataa

SEQ ID NO: 656188 - DNA, 616 bp, Homo sapiens
ggtattggatttttcagacacaaactttaaaataatgatgactaattttaataactgattgatttacctgattggatattctatttggaataacgggggacggatgaatttacatatattaatttgttacaagatgtgaaactcttgatcatttttacttgtgctacaaaattttatctttgcattaatcttctaagagttatcattcatttttcttttattaaaaaatggggagatcaggctcagagaagttatatatgccatataactttaaaaatatacaacatatctaattccacctaccacaaagacaatacttactttaaagagatttttgaaagaagaawttgatagcattcccaaggattctataacatgaaaaagtagatgagtgtcactctgacaaggaaatgaatcagacttagcataatcaatgaaacaaaatctattttttagcatttactaatgggatcataatgggccaacagagattggatagtctaattctacctgtgagagaatgaaagtctgtttaaaggagattctctttcatttctcataatgttcatctcttccttctacactgcaatcaggctaaagaaaatgaggtattacc

SEQ ID NO: 656189 - DNA, 616 bp, Homo sapiens
ggtattggatttttcagacacaaactttaaaataatgatgactaattttaataactgattgatttacctgattggatattctatttggaataacgggggacggatgaatttacatatattaatttgttacaagatgtgaaactcttgatcatttttacttgtgctacaaaattttatctttgcattaatcttctaagagttatcattcatttttcttttattaaaaaatggggagatcaggctcagagaagttatatatgccatataactttaaaaatatacaacatatctaattccacctaccacaaagacaatacttactttaaagagatttttgaaagaagaaattgatagcattcccaaggattctataacatgaaaaagtagatgagtgtcactctgacaaggaaatgaatcagacttagcataatcaatgaaacaaaatctattttttagcatttacwaatgggatcataatgggccaacagagattggatagtctaattctacctgtgagagaatgaaagtctgtttaaaggagattctctttcatttctcataatgttcatctcttccttctacactgcaatcaggctaaagaaaatgaggtattacc

SEQ ID NO: 656190 - DNA, 438 bp, Homo sapiens
gtcagcgggactggcagtcagaaaaaaaaaacaacaaaactgtatgcaaattgagggagaattaggacaaatgaaacaaaatggacgaactggaacttaggaaaacaaatagaaacctatacctgtctcttaggcgtgacacagatgamatgcaggagaatgtggaatcttttgctatgatgatgcacacactcttggcccagggactcaacaagctgaaggagaaaatctggtgggatcagcgggcagatcagcagcaaagtgtgagccctcattgtgctgtgggcccttgcccttcctccagataatcctttatctgccttgtcacttatgccttccagttttgctgcaatctctctgtggtcaaacctaatttggaatcgtgcaaagaaagaaattccggaacaggtagttccagctaggtggagtgagcatggt

SEQ ID NO: 656191 - DNA, 554 bp, Homo sapiens
atagatctattaagtgaagcctgtgagactaatgcttctcattaccttatttttaggtcaaattagtgttagtatcatcaatccagatagctctaccattttatagaattcaactaatatatttactggttgtgattctgaatttggttcttaatttttctatatattaggaccattactaccaaagacatttcaaggatatctgattggaacctgtcaactacraagctacaatggtctctttggtcacacattataatatgcacatttctgcttaagggtatgatgaatgaatgtaatcactgtgcttagaacaatgtctaacaaatcagaatttcgaactatattggctattatgattgacgtattagtctgttctcacactgctaataaagacatacctgagactaggtaacttacaaaggaaagaggtttaattttctcacagttccacgtggctggggaggcctcaagaaaacttagaatcatggcggaagtctccttttcacagggcggcaggagagggaatgagtgccagcaggggaaatgccaga

SEQ ID NO: 656192 - DNA, 672 bp, Homo sapiens
tcttccctttaacaggtctgagaagcagtgatacttcaacagcaatgatgatacctagctccacattttagctttaaggtaccaatctccactaaaaggttccaggattttttggagaaattgcctattccaggaatgcaaagggaaaatgcaaaagctcaggactttttggstcagaaagcaaggaagtgtttaagaaataagggaagcaaagaaagtgtgacaggctaaaacacttacagattatagcctactttattagttagggttcttcaaagagacagaaccaataagggagagagagagaaagtgggagggagagatgatagatagatagatagatagatagatagatagatagatagatagatgatagatagacagacagacagacagatgagagagtatttatttggagaactggtttatgttatcatggaggctgagaagtccatgatggaccatccacaagctgaagatgctgagatgctggtagtgaggctcagtccaagtccaaaagccttggaaccaaggaagccaatggtgtaactctcagtctgagacctaaggcctgagaaccctgggcagtggctggggagcgtataagttctggagtccagaagtcaggagcctagagttgtccaagaacaggagaggaagagcgtatccaag

SEQ ID NO: 656193 - DNA, 672 bp, Homo sapiens
tcttccctttaacaggtctgagaagcagtgatacttcaacagcaatgatgatacctagctccacattttagctttaaggtaccaatctccactaaaaggttccaggattttttggagaaattgcctattccaggaatgcaaagggaaaatgcaaaagctcaggactttttgggtcagaaagcaaggaastgtttaagaaataagggaagcaaagaaagtgtgacaggctaaaacacttacagattatagcctactttattagttagggttcttcaaagagacagaaccaataagggagagagagagaaagtgggagggagagatgatagatagatagatagatagatagatagatagatagatagatagatgatagatagacagacagacagacagatgagagagtatttatttggagaactggtttatgttatcatggaggctgagaagtccatgatggaccatccacaagctgaagatgctgagatgctggtagtgaggctcagtccaagtccaaaagccttggaaccaaggaagccaatggtgtaactctcagtctgagacctaaggcctgagaaccctgggcagtggctggggagcgtataagttctggagtccagaagtcaggagcctagagttgtccaagaacaggagaggaagagcgtatccaag

SEQ ID NO: 656194 - DNA, 672 bp, Homo sapiens
tcttccctttaacaggtctgagaagcagtgatacttcaacagcaatgatgatacctagctccacattttagctttaaggtaccaatctccactaaaaggttccaggattttttggagaaattgcctattccaggaatgcaaagggaaaatgcaaaagctcaggactttttgggtcagaaagcaaggaagtgtttaagaaataagggaagcaaagaaagtgtgacaggctaaaacacttacagattatagcctactttattagttagggttcttcaaagagacagaaccaataagggagagagagagaaagtgggagggagagatgatagatagatagatagatagatagatagatagatagatagatagatgatagatagacagacagacagacagatgagagagtatttatttggagaactggtttatgttatcatggaggctgagaagtccatgatggaccatccacaagctgaagatgctgagatgctgrtagtgaggctcagtccaagtccaaaagccttggaaccaaggaagccaatggtgtaactctcagtctgagacctaaggcctgagaaccctgggcagtggctggggagcgtataagttctggagtccagaagtcaggagcctagagttgtccaagaacaggagaggaagagcgtatccaag

SEQ ID NO: 656195 - DNA, 582 bp, Homo sapiens
gcagtaatatgttcatattcatgtcagaaaggcctttctcctaaaattacggagaatgaactcagtggaagcaagaataaaggtgaaaattagaaaattaggaggttatcgcagcagtacataaaagaaacagtaagggtaaaagtgaaattaatagagtgggaggggggatttgagatataattgcatgccaaaatgacaagacttagttgttcactgaatgtggatgataaaggagaagaaggagataaggattatattcagattttttagtttgataactgaaaggaaggttgtattattgaaaatgcaagcaggttcagtgggactaatgaaaagtaagttcagtactataggtattgaacttgagctattacaagatatccacttgatatgagcaggaaaaarataaataaaataaatattttatttcttttaagaaaaattctgggcaagagagtgattttggagacaacctgtaatttaaactatggaagtgaattaaattgaccagatggagtatacaggcctgaagaatattctgatttaattacaagtaagaaaataatgagataatgtaaa

SEQ ID NO: 656196 - DNA, 506 bp, Homo sapiens
agaattcagcctcacagatggctacctgctttcaggctctcctcccacacctgagagcttttcttctgtcactcagtaaaattcctckctaccttactcaccttccagtgtttatgtaccttatttctcttggtcatgggacaagaacccgggactcgcagacctgcgggtggcgggagtaaaagagctgttaccctccctcctgctcacctaacaaagggagacaggaagccattgagagccaccccctgtcgcttgctgaactgtgagggttaaagagttgagatgttcctggctgactgcggttggcgggagtaaaaagttgtaacactctctcgcgctcattgaacgacgaaagtgaaaaagctgctgaacactactccctcccgcttgctgaattaacgggagcaaaaaagctactgggccccactccctacaactcagaattactgaagcaaacaaagctgcaacaatacaatgttattttttcctataccaacaaagga

SEQ ID NO: 656197 - DNA, 609 bp, Homo sapiens
attatgaagttcattactttcagcctcaatttgacaagtgaaaataatttttgggtcatattgtgaatgtgtgtagggcaaattctaaaaatgtacctatcccagttacctattgctgctgcattacaacttatctaaatttagagccttaagtaacaactatttactacgtgttaattgttctgtgattcagaaattcatcaggactcgaaatctgattcttctactccacatgacattgacagtkgtacttagtggtgtctggcatgtgaatgtgctgaccatgttttaattgagttcttgtattaaaggagatggctggagagtggcattcaccagggcaccagcatggtggcttcaaagtagttgaaaattttgcctggagactcacaatgtaagaagaagagttccagagaaaaaggcaggagttgcatatatacttttggcttggttttgaaagtcacttagcattatttcatgtgtattcttttggttgaagctgttacaagctcctccagacttaaaaggagggaagtagtaccaaataattgatagttagtcatctctttaaagtggcatgatagcctaagaaagaaagatgagaaaaac

SEQ ID NO: 656198 - DNA, 609 bp, Homo sapiens
attatgaagttcattactttcagcctcaatttgacaagtgaaaataatttttgggtcatattgtgaatgtgtgtagggcaaattctaaaaatgtacctatcccagttacctattgctgctgcattacaacttatctaaatttagagccttaagtaacaactatttactacgtgttaattgttctgtgattcagaaattcatcaggactcgaaatctgattcttctactccacatgacattgacagtggtacttagtggtgtctggcatgtgaatgtgctgaccatgttttaattgagttcttgtattaaaggagatggctggagagtggcattcaccagggcaccagcatggtggcttcaaagtagttgaaaattttgcctggagactcacaatgtaagaagaagagttccagagaaaaaggcaggagttgcatatatacttttggcttggttttgaaagtcacttagcattatttcatgtgtrttcttttggttgaagctgttacaagctcctccagacttaaaaggagggaagtagtaccaaataattgatagttagtcatctctttaaagtggcatgatagcctaagaaagaaagatgagaaaaac

SEQ ID NO: 656199 - DNA, 596 bp, Homo sapiens
ttactgttttttccattgagtgtgaagtaagcatttgacttttttttaaatgaacatttgatgtgctatttgaatatgattgcttcagttacgttcaackttctattggtgtgtttgacaagacaaggataattttgacaatttattttacaataagttatgagatggataaattctttcaaatttgattgatctatcaggaaacaaaaggcttatactttttttcatctcagtggtaattactgctaatttgtacttttatattgctaaaaagatcttatatttaattctagataattcaactcaataatacatacatatatgttctatcagtatatagcaagaatatgcaaaattaaaaattagacgatacttttttaattaaattaattataaaataaataattgcattctatcacagaaacaataaatagtcagatattttgagaactgtaaacagagatctaaattttttagtttaactaattgtgagaaatttttcattgctaattatacttaacaactattattaactttaagaataagacaaatctaatgtttattgggtgtctacagtgctccaggtactattaata

SEQ ID NO: 656200 - DNA, 596 bp, Homo sapiens
ttactgttttttccattgagtgtgaagtaagcatttgacttttttttaaatgaacatttgatgtgctatttgaatatgattgcttcagttacgttcaactttctattggtgtgtttgacaagacaaggataattttgacaatttattttacaataagttatgagatggataaattctttcaaatttgattgatctatcaggaaacaaaaggcttatactttttttcatctcagtggtaattactgctaatttgtacttttatattgctaaaaagatcttatatttaattctagataattcaactcaataatacatacatatatgttctatcagtatatagcaagaatatgcaaaattaaaaattagacgatacttttttaattaaattaattataaaataaataattgcattctatcacagaaacaataaatagtcagatattttgagaactgtaaacagakatctaaattttttagtttaactaattgtgagaaatttttcattgctaattatacttaacaactattattaactttaagaataagacaaatctaatgtttattgggtgtctacagtgctccaggtactattaata

SEQ ID NO: 656201 - DNA, 542 bp, Homo sapiens
tacaaatggcaaacaggtttatggaaaatgttcaacatcactaatcataaggaaaatacaaataaacaccacaatgagatatcatttcatccctgtcatctcatctcagttagaatgcctactatcaaaaagacaaaaacatarcaaatgctgatgaggatgcagagaaaggggaatcctcatacactgttggtaggaatataaagtagtacagccattatgaaaaacaatatggagttttctcaaaaactacaaatagaactacactatgatatagcaatcccacatctggctatatattcaagagaaataaaatcaatgtatagaagagatatttgcactcccttgtttactgtagcactatacacaatagccaagatatagaatcaatggatgaatgaataaagaaaatgtagcacatatacacagtggaatactattcagccataaaaaatgaaattttgtcattcacaggaacatggatggaactagcagacaccatgtcaagtgaaataagccaataacaatatgctaaacattgc

SEQ ID NO: 656202 - DNA, 504 bp, Homo sapiens
agaggatgggaaatgtaaggagaagaagaggataaggagagatttgtcataaaatacaaaattacagctaaaaatgaaactggcctaactgtcccacagaactgatgtttactgtattttttctttaggataaatacagaaattgaccctccaggtctcaaagcttgaaacttccttttgtcttatctgagttccttcctcaggaaaacacccrcaggcctcccagatagtatcaagaaactgaaactcaccagatcactgcatccagtgagatgccagacaccttatccatcatgattcctgtttaccaactcctctttatccttctttaattcctgttttccaacacatggttacatttcttccctaccatataaacccctaatttagccagtggaggagacagatttgagactgatcttctgttcttctcagcttctgcatccaaataaagccctttccctgccaatatttgtttcagtgattggctttctgtgcagtgag

SEQ ID NO: 656203 - DNA, 560 bp, Homo sapiens
aatcttccttcttacagctggctcactattaacttttccatgtccaaaggtcttcatgagcaatattctcaccatttttattttkcacaaaatgaggtaaaaacaaaaaaaaatgattttgacatatattacattttcaaacttgtgtttttctgtattttgatactatgttcatccatattttcatacagcaacatattatctgcattattaaaattttctttgttatgtttatgcaaaaagtgttggcttcctgagtgaagtttgaaatttaaaaaaattaagaatattaaaaatattaattattaatactttgttttccctagactgtttcttaaaaagttatatatatatacatatatatatatatatttaagaggtaatagaattttcttcttcatcatttttaataccagttctcactctgtcatttgtcctaaaaaaaaatctttgattagattaaatatagctttagtttagtgaaatcaggttaactcaaaggctaaaggttggcctgcccatattttaatcaaaaggcaagctaaactcatttagaattc

SEQ ID NO: 656204 - DNA, 610 bp, Homo sapiens
gatcctcccacctcaagtgtgtgctatcatgcccggttaatttttgtatttttttgtagagattgggttttgccatgttgccaaggctggcctcaaactcctgggctcaagccatccacctgcctctgcctcccaaaatattgagactacaggctggagccactgcatctgaccaacaacaattctaaataatgacaatayacaatacgtagtcttagggttgtgtagttgaaatatcatgaaggtgaaggttagtggaattgaggaggacaagaaacttaaggcaaagtattcataaacatccatatactgatgttgaccttactcaggaatatatcagaaatagctagctatatttatctcatcatataaaaacacacttaaactctattccatgccaattttccaagtaataaatatgataaaagatacacattttcaaaaatcaatgtgtatccatgccacttttctaattaataaacatgataaaagagatacattttcaataatcaatatgtttattaaaacccactaacgtcttcaaagttatttcagatataaagatggaaggatggatactaagatgagaggatggatactaaccaaaaaa

SEQ ID NO: 656205 - DNA, 590 bp, Homo sapiens
ataaacatgtagaaacaattgtagattaaagttaaaaataaaaaagataattttcttttctactatttttgcttgatattaacttactctagataaatatgttggtagacaagctgagaatatagatgaaatcatggtttacattcctatttttatacatcccttattcatgatctgtattttaaatttcagacaaaatctagtagtactttgcattttcctaagtctgcataaggaaacacactccaccctaattttctcaactgcatgccccccaaaactaactggaggaaaaattttgtcagcccccttaagggtgtaagaacttttcttctgatggcatgactagtaactctctaattgtcatgttcaagaacaattatttaacttargcaaagttggtgtttattttatggaatgagtagtctcatgtcatcttacaaatttggaaattctctttgagaccactgactaaattacaggtaataactgtaccataatcattcaaaatctctttcttttgattcctaactacacgtggaaaaaataaataaatcaaaactcatataaattttgatatttaggagaag

SEQ ID NO: 656206 - DNA, 538 bp, Homo sapiens
aatcactaccctgttgcttgcctcctggggaagactactctgttatattttaataaaatgggttgttgttatattttaacaaaatgcatatcaaattctgaagttacatttatcaaagaattaagataataaataaggttaatgacatcacattttaagtatacatttgtgaaaatttactatgttttatattgttaatttactttacttaatattgagttgacttaggccagaaaaaaatgtgctacattacagtggaattgagagtgctgatatcctgcagtagagttatgcgctaatttcttgaagacccagttaactcatcaatatggatcagcttcaatgctacctgttagcarttaaaatcccctcacattttacaaaagttccataaaatttctggacacttcttttttctccatatatatttcacatctaggcatttcctgagttctaggacacatagatatccaaagcaaacagtaaacccaggcacaagcttctcatttctactctttttgcccagcaaaggaagaca

SEQ ID NO: 656207 - DNA, 538 bp, Homo sapiens
aatcactaccctgttgcttgcctcctggggaagactactctgttatattttaataaaatgggttgttgttatattttaacaaaatgcatatcaaattctgaagttacatttatcaaagaattaagataataaataaggttaatgacatcacattttaagtatacatttgtgaaaatttactatgttttatattgttaatttactttacttaatattgagttgacttaggccagaaaaaaatgtgctacattacagtggaattgagagtgctgatatcctgcagtagagttatgcgctaatttcttgaagacccagttaactcatcaatatggatcagcttcaatgctacctgttagcaattaaaatcccctcacattttacaaaagttccataaaatttctggacacttcttttttctccatatrtatttcacatctaggcatttcctgagttctaggacacatagatatccaaagcaaacagtaaacccaggcacaagcttctcatttctactctttttgcccagcaaaggaagaca

SEQ ID NO: 656208 - DNA, 348 bp, Homo sapiens
aatatcacatgttctcattcacatgtgggagctaaaaaagtggatctcatgaagatagagagtacattggtggttaccagaggctagaaaaggtgggatgaagggagayaaagagaggttgattaatgggtacaaatatacatttagataaaagaaataagacctagtgtttaatagatcagtgaagtgactataattaattttaattaattgtgcatttcaatataggtagaagagaataattcaaatgttcctaaagataaatatttaaggtgatggatatcccaagtaccctgatttagttatgtgaatgtatcaaattatcacatgtaccctgaaaatatgtac

SEQ ID NO: 656209 - DNA, 536 bp, Homo sapiens
aatcctatcactatactgaatagtacgtagattttaaaaacagccctgctgacacaggttctgccactgcatgacaattttccttcagttattttattctgtgaagtacttttagtacagcatagctcccatattagagttattattcttcaaataaaaatttaaaatgttaaagatattagcattattaaaaatcattttactcattcattccttcagtaaatatttgttgagaatttaacatacgtcaatgttcttgatgttaaagcagtggaaaaaaaaaaagtccctactctcctgggactyacatgagggaggagatggacaataaacaaatcaacatgtaacatgtcaggtggtgatgagtaatatgaacaaggtctaggtaagtgagaaaagagtattgtgacagatttggaagggatgaaaacatctaggcttttattttagacaaggtattgtcttagtcactttgtactgctataacaaagtagtatagacagggtggccagcacacaaaagaaattcctcacagt

SEQ ID NO: 656210 - DNA, 633 bp, Homo sapiens
tctgtgtgaactaaacaattatgagagagagaaaaattccagagaaaataaattcaaagtcatgaggggagaatgtgtactgctttcacaccatcataaagttgcaaaaattgtgagttgaacaatcctaagtcagggycaatctgtacttcatacaatatgtactatatgtatactttactttcttagctatgcatatgatatgtaaaacgcacacacagggacgcacatataacagtatacttaaataggaacttattcaaaatgcaacaaaaataacactctgaggacttttatatagaactaatgatttgcttgcattgaggtgccctctagggaactgcaggctgcagattcacaaaacaaccaaattctgagaccacagtcagaaagaacaccttattgacttgagataaggcatcaatatataatggattgaactagccatgagaaagagtgatacacccgtctagccaatacataaaaggaaactcttctagaaatgaatgctaaggaaaaaatcaaagatgcaaataatagatattttaaaagagacactcatagcattatctataatattaaaaatttgggaagaatctaaatgtccattaataggatatggtgaattatgat

SEQ ID NO: 656211 - DNA, 633 bp, Homo sapiens
tctgtgtgaactaaacaattatgagagagagaaaaattccagagaaaataaattcaaagtcatgaggggagaatgtgtactgctttcacaccatcataaagttgcaaaaattgtgagttgaacaatcctaagtcagggccaatctgtacttcrtacaatatgtactatatgtatactttactttcttagctatgcatatgatatgtaaaacgcacacacagggacgcacatataacagtatacttaaataggaacttattcaaaatgcaacaaaaataacactctgaggacttttatatagaactaatgatttgcttgcattgaggtgccctctagggaactgcaggctgcagattcacaaaacaaccaaattctgagaccacagtcagaaagaacaccttattgacttgagataaggcatcaatatataatggattgaactagccatgagaaagagtgatacacccgtctagccaatacataaaaggaaactcttctagaaatgaatgctaaggaaaaaatcaaagatgcaaataatagatattttaaaagagacactcatagcattatctataatattaaaaatttgggaagaatctaaatgtccattaataggatatggtgaattatgat

SEQ ID NO: 656212 - DNA, 633 bp, Homo sapiens
tctgtgtgaactaaacaattatgagagagagaaaaattccagagaaaataaattcaaagtcatgaggggagaatgtgtactgctttcacaccatcataaagttgcaaaaattgtgagttgaacaatcctaagtcagggccaatctgtacttcatacaatatgtactatatgtatactttactttcttagctatgcatatgatatgtaaaacgcacacacagggaygcacatataacagtatacttaaataggaacttattcaaaatgcaacaaaaataacactctgaggacttttatatagaactaatgatttgcttgcattgaggtgccctctagggaactgcaggctgcagattcacaaaacaaccaaattctgagaccacagtcagaaagaacaccttattgacttgagataaggcatcaatatataatggattgaactagccatgagaaagagtgatacacccgtctagccaatacataaaaggaaactcttctagaaatgaatgctaaggaaaaaatcaaagatgcaaataatagatattttaaaagagacactcatagcattatctataatattaaaaatttgggaagaatctaaatgtccattaataggatatggtgaattatgat

SEQ ID NO: 656213 - DNA, 595 bp, Homo sapiens
aaggctatattaatgcttgagataatgtctttgttcatattgtgctactataacagaataccacaggactgggtgatttgtattgaacagaatcttattggcttatggttctgggggctggttagtccaaaatcacgtgaccagcatctgggtagggcctttttgctgtgttatcccatggaggaaaggcaaagaaagggtaagagagaacaagagattgaacttgcagtctcatacccttttataatcagcattaatccattagagagggtgagccctcatggtcctaaacaccttccatgaggccccactttccaatactgttgcattgagaattacattttcaatgcatgctttacggsggacatgtttaaaccataggatttagtatgtatgtttgggactaaatgtataccaaattaaagaggtctcagatgttttgatttctaggattgccatatcttctcttaataactaaacacattaatcccacacctccacttccaatgttggagaaaggagaccattaagaagctaggtttgtcttgatggacaccagctaagagagaataaagtggtaccttactaagggatg

SEQ ID NO: 656214 - DNA, 595 bp, Homo sapiens
aaggctatattaatgcttgagataatgtctttgttcatattgtgctactataacagaataccacaggactgggtgatttgtattgaacagaatcttattggcttatggttctgggggctggttagtccaaaatcacgtgaccagcatctgggtagggcctttttgctgtgttatcccatggaggaaaggcaaagaaagggtaagagagaacaagagattgaacttgcagtctcatacccttttataatcagcattaatccattagagagggtgagccctcatggtcctaaacaccttccatgaggccccactttccaatactgttgcattgagaattacattttcaatgcatgctttacgggggacatrtttaaaccataggatttagtatgtatgtttgggactaaatgtataccaaattaaagaggtctcagatgttttgatttctaggattgccatatcttctcttaataactaaacacattaatcccacacctccacttccaatgttggagaaaggagaccattaagaagctaggtttgtcttgatggacaccagctaagagagaataaagtggtaccttactaagggatg

SEQ ID NO: 656215 - DNA, 632 bp, Homo sapiens
aagttctttacaaatcccatctttacttgatcagatgatactcttactcagcattcatatcttcccattaaaaccatgaaactgaaaatcaacagtttctcccattctgtatcactgctattattacatcttttagtattaatattcatattaactctttcaattattaaatatttgctatgcagaagctttttagctttatgtagtcctacttgtttatatttgtgcttttggtgtcatatcaaaaaaaaccattccctggatcaatgtcaagaagcttttctcatgttttctctagtaatgttatagtttaaggtcttatatttaagtctttaatctacttacagttgattttttccatatagtatgtatgaattaagtatctaatttgattcttctgtakgtggatatacagttttccaggactgtgtttttttaaagactgtcctttccaccattatgtgtttttggcatgtttgtcaaaaatcaattgtctataaatgtgtttctgggctttctatcctgctcattggttgacatgtctgttcttatgctagtaccatgctgctttgattacagagctttataatatatttttaaatcaggtaccatgatggttctggctttgttct

SEQ ID NO: 656216 - DNA, 565 bp, Homo sapiens
tgtaacagcacaaaaaagtcattaaggccctaagtcctacgtagcttcctgatccacaaytcttattgtgtagtgttcacctttatgctaacataatgactgcatgccagttgagtctttttcttttatcagtgaaactataacttttcccaggaacccactcattagactatatttacatcacagaactatgtttcatatctataattagctgcaaagactctcgagaaatcacatcttctagctggttattttgttgacttttgcaaagactgggttctggtagtgagaaagtttgagtaggcaactagcatattttctttaacctggaataatttctttctcttgtatggcaataagaaaacaaagttgcacattgatatggtttggctctgtgtccccatgttcccacccaaatctcatcttgtagctcccaaaattcccatgtgttacgggagggactggtgggaaatgactgaatcatggcagtgggtctttcccttgctattcttgtgatagtgaatgggcctcatgagatctgatggttttaaaaatggaagtttct

SEQ ID NO: 656217 - DNA, 565 bp, Homo sapiens
tgtaacagcacaaaaaagtcattaaggccctaagtcctacgtagcttcctgatccacaattcttattgtgtagtgttcacctttatgctaacataatgactgcatgccagttgagtctttttcttttatcagtgaaactataacttttcccaggaacccactcattagactatatttacatcacagaactatgtttcatatctataattagctgcaaagactctcgagaaatcacatcttctagctggttattttgttgacttttgcaaagactgggttctggtagtgagaaagtttgagtaggcaactagcatattttctttaasctggaataatttctttctcttgtatggcaataagaaaacaaagttgcacattgatatggtttggctctgtgtccccatgttcccacccaaatctcatcttgtagctcccaaaattcccatgtgttacgggagggactggtgggaaatgactgaatcatggcagtgggtctttcccttgctattcttgtgatagtgaatgggcctcatgagatctgatggttttaaaaatggaagtttct

SEQ ID NO: 656218 - DNA, 565 bp, Homo sapiens
tgtaacagcacaaaaaagtcattaaggccctaagtcctacgtagcttcctgatccacaattcttattgtgtagtgttcacctttatgctaacataatgactgcatgccagttgagtctttttcttttatcagtgaaactataacttttcccaggaacccactcattagactatatttacatcacagaactatgtttcatatctataattagctgcaaagactctcgagaaatcacatcttctagctggttattttgttgacttttgcaaagactgggttctggtagtgagaaagtttgagtaggcaactagcatattttctttaacctggaataatttctttctcttgtatggcaataagaaaacaaagttgcacattgatatggtttggctctgtgtccccatgttcccacccaaatctcatcttgtagctcccaaaattcccatgtgttaygggagggactggtgggaaatgactgaatcatggcagtgggtctttcccttgctattcttgtgatagtgaatgggcctcatgagatctgatggttttaaaaatggaagtttct

SEQ ID NO: 656219 - DNA, 415 bp, Homo sapiens
caagagaacagcatgggaaagacctgcccctatgattcaattacctcttactgagtccctcccatkacatgtgggaattacgggagctacaattcaagatgagatttaggtagggacacagccaaactatatcacctataaatagttttcctttgtgattcaatctttaaaaatatttcatccacatccgtggtttgtcttttaactttgtttttgggatctttggttatatagggaattttaatattaatgaacttaatgaaatattttctattatattttgtgcttttttgtcttaaatacttccttatcttgataaaaacagatatattaaaattattctctgataattttcactaaaaattttaatattcagcttttcaaatttatgactttaagtatttagtataatata

SEQ ID NO: 656220 - DNA, 571 bp, Homo sapiens
taaattgaaaaactcatttaacccctctggcttcaattttctctcatataaaatgaagaccagagtatttctgaaatcatttgcaatgcttaaagagctcatacatttttacatcttcatcttttgattaacatgattatataaaatcactttcatctacgacttaatgaaaatcgccagcatgatatgggatctacaatgttcctggggcctagtagcttaaagaatattatttttctattcaactttccaggaacaggtcacatttgaatacaaagctattatgtataattgaaagttatttctttagcttaggttttcaaagaataatctttggaaaattgcatttggcaagagtgacatctacttttatccwttatactttattttatgaggaactttctcaggcaagcataggcacacactgtcacggtgattatttacaagcatcataaaattgctgagtgcctagaatgtataaacccctaatgctaagtcttacagggaaccaaaggagtacagctctttctgctctcatgaaacaagtaatctctttcactgagtgttttta

SEQ ID NO: 656221 - DNA, 585 bp, Homo sapiens
ctttttggtgcgcgctctctctctctctcagagaggcttacctactgcagtgtgtgctctcctcatyggtccctctttcatgtgttaagaagtttcaggcagagattccccattctatggagaaggcctgtaatttctcagttcctcagactataactgagtgggtagatgaggtagattgtattactttttcattcactaccccttcattgcaaaagcaagtatctatgatcaaagatgctgtagtagactatatcattttgaaactcgttactgctcccatcaaccagatgtattatacattcctacatatttgtgtcagtctcggccatgtgacttgctatgtccaaaaaatatgaatgataatgataatgccacttctaatacttctaaacagaagcttcaagagctatcacatgatgattatatctttttttctctctcactaaaatgagtctgataatgattcctactcctcatcctagatgctggaataaagaagacagggaccagagccacaggctacccacagccaagccatagttgtcatgtaatatcagcaatcttttattttactaaaacatt

SEQ ID NO: 656222 - DNA, 547 bp, Homo sapiens
atcctggaataaagacatagtgcagagcctaatatgacctacagccaatgtacaatgtaaacaagaactaaacctttgtttttgtaagcctacagatatttgagatagcttgttaccacaatatcacctaaaaaagctaatacaatgacttggttcagttaaacatatcagtaccaatggtggcctcttgtctaagttgaattctgcaattcacataccagtattctaattaacgtagaagtctggtatctcaactgattgaaaacttggaaaaccttcaaatcctaacattatttgattgctttctatgtcccagacactcagataagtgctttatatatacggcctcattaaaactcaccaaactgtattattctctcttttaaaggataaagcatctgaattaaagagattatgtaaccattccaaagtcacccagatcgtaagtgttctgatttcagatcctacayaggtaacgattgttctcaagtactcaggataatctttctcctctaatactttctctttcttattctccccaatacac

SEQ ID NO: 656223 - DNA, 476 bp, Homo sapiens
caaccctaagcactcattccataaaatgtgcactggcctccgttgaagcatttgaagcagaaaaaaataacagaaaaccaaaatcagttcttcaaaatcaaaagcagttcttttaaaagactgctctaagactcaaactccaagctaattatcaacaactatctaaagcataaagggactttgggataattttcggtgccagtaatcacaaatgactaagaataacttattcagttagatycttgtgacagcacatatgcttgtacatatgcactggaaacagtgtttttttactctcaggttaaaatcttgaaaacagttatctaataagaatcttcacgtatctgttaaaaaagaattcagatttccaagccccttccctgaagtttcttccctgtaatttgtatgctaattattgcttctagttattattagtgtccgacagttgagagatatttttctgaaacaaatggaaa

SEQ ID NO: 656224 - DNA, 641 bp, Homo sapiens
agcaagaaatagtaacataaacaaattatttataaatatggatgtaaatgccagaataaatgtacaaataaatgaaagcacttgaatctaaaatgtaggaattgggaaatggaaaagtaaagcatggtaatcttgtttatggaacatgactcgttgaggttttgacttcttaaactatgtatatatatctttttaagtaaaatttatcttttacataaaatttaaaataaaattttaaaattcaaagataagcttaaaaaaggaaattaatcactttgcaaactcaaagacagcacacacaaaaaaaggagaagggagaaaagaaagaaaaaagggaagaagggagggaaggagggaagagggaagaaagggaagacagaaggaagtaaagaaaggccagctaaataaatgtttattaaaatattatatgttatatctaatatcagacatagggcaaatttgaggcaaagaacaaataatgcaaaagtcaatgggaaataatccttctaaaaatttatgaagatagttattttgcatttgaatytagtatgcctattaatgcaaagatattcaataagacattacagaattatatattatatacataacagaattatattatgttataacagaattataca

SEQ ID NO: 656225 - DNA, 597 bp, Homo sapiens
cttttaagtctggaacaagacaagaaagtcaaaagcagtaaaaaggctttggataggaagcaaaacattgccattagatattagataatatgagtatatatgtagaaatcccaggtttaatgttacaaataaacataaaatctagtattttcatttgataaaattgatgtgtaagaatgaacagtttctagtgcacaaacaacaatcagttattattggaatttagttccatatttayggaaaaacaaaaatattgcatacatggtaataagcagtaagtcgaaagtatggaaagagtataataaaacactaatgagtgacaaaataaaatatgttaataaatggaaacatgcatcatgatcctggatacaaaagttcataaagttttcaatatttcctaaactgactcctcaatttgttgggataccaaataaaataaaagattagtaaatgacaaactgacaataaattcaattgggaaaaaattcaagaatagtaaagaaaccctttttttgttaaaacttgatagttggtaccactttaagacatttgaaaatgtattataaagcttgaataatgaaacaggaattgaaaata

SEQ ID NO: 656226 - DNA, 609 bp, Homo sapiens
atgcttgactttgagtaccataaaagttaccacccaccatgtcctaccagcctaacattacctctctcggtagccttttatattatcctcttttctccrttcccatgtttctcatcatcaccatctctcaaggaagaaatgcaaattattcttgcttgactatgcaaaacaactgcaatacacatacgacttgccctctcttacccaggctaggagctgcagttgaggtagagaagaatcctttaaattgagaagcccatcaatgtgttttcttaaacaaaagagccatctaactccagtgattattttaacagttatttaggtgtttatggtttattttcagtggtcatttgtttgtactcttacctaagctttgaaagttggcagtttggtagggaagactaactgtgtataaatatttggcagagaaagtaaatgactgctggtacattgtgacaaaactgcctagagctaatttaaaatactaaatgcatataatgatttgggataagaggtctactatcttaaaagcagaatgtttaaaaacacattctaggtcaacaagtgtctaaaatatctggatcaaaagcaacaaagaatgcatcatat

SEQ ID NO: 656227 - DNA, 650 bp, Homo sapiens
ttacatgtatttttcaagaatatacacatataataaaaggatccaaaatagctacataagaatgataaccttctcaaaatggtggtggggtagataatataataagaaataaaggtaaaaacaatttataaataggtatttttaaaggctgtattagatttattagatttcaattgctgcataactaatcatcacaacttagcaacttaaaatcatgcaaattcatgatctcttagttcatgactgccagaagtccaaactccaatcagggctcagggttttctgctgaagatttcacaagacgaamatctaggtgacatctgaggccaggagttcatctgagacttggtgtcttcttccaagctaatgtggttattggattaatttattttcttgtagctatagaattcaaaaagactaaccatcaaggccatcagcaaagcatctctttgaggtttcatttttccataaagggctagactaggcccaaacaggacaatctctcttttgattaactgaaaatcaactgattagtaatctaattacagaagggatagcctatcgtattcactggttatgtccacattcaagaaaagggaattaaaccgggtgatatggtttggcagtgtccccatccaaatctcatcttg

SEQ ID NO: 656228 - DNA, 619 bp, Homo sapiens
agatgatgaaattattagaccagaaatttaaatcaatgattgatatgctaagtgctctaatggataaaagagggagcatgtaagaaaagataggcaatgtaaggagaaaaacagtaatcctaagaaagaacagaattccaaaaaaaaaaaaaatgctgaagatcagaaacattgtaagataaatgaagaatgtctttgataggytaattagtagatggaacatatatgaggaaagaatctttgggttacaaacatccaaactgaaaagcaaaaagaacagtgattaaaaaaccaaaacagaacatctaaggactgtggaacaattttaaaagatgatatttgagcaaaagggaaattagagaaggagaagagagagaagatggagcaaaagaaatatttgaaacatttattgagattttcccccaaattaatatcagacagattcaggaaaattcagaggataccaagccatatgaatgccaaacaacacacacgcgcgcgcacacacacacacacacacacacacaaactacatgtaggtatattattatcaaccttttgaaaatcaaagatacagaaaaaattctgaaagaagatagaggaagaaaaccactgtact

SEQ ID NO: 656229 - DNA, 545 bp, Homo sapiens
atacgcatcctaatttggctagataaataagaaagtaatgaaagagtgctgtaaaaggaatttctaatatgacaaacctgaaagcttagaaaaagcagatctcttttacacctttaaactataaacataaaaagcatctggaaattgaattttcacagtaggggctggaaaggaaaagtaaaaacataacaatatagtacttaattatcataattcaccccaggtgttgaaatgctgagaaaagatatatttatgatgagtatcaaaacttgtattcacaagttggtaaagagtcttgattaaacatcatatgtattatacaagaaagataaaataaagcaaagttaatgttttccaagtactcatttcttttctgatattcacctaaaaataaactcttatatagttgcatggttatagtctgtttacaaattaggtaatacatttttcttaaaatcacacacacaggattgtttgttttyttcttactgatttgtttgagttcattgtagattctggatattagtcttttgtcagatgtacag

SEQ ID NO: 656230 - DNA, 555 bp, Homo sapiens
ccaaactccttctagaaggccaggattaccctgataccaaaaccagatgaaggcacatcaaaaaaaataaagctacaagccaataactctgatgaacattaatgcaaatattttcaacaaaatgatatttaatagcaaaccaaattcaacaataccttatacaatcattcatcattaccaagtctgatttatcccaggatgcaagcataattcaacatatgcaaatcaattaacgtgatacattatattaacaaattaataaaggacacaaactatatgatcatttcaattgatgccgagaatgcacttgaaaaagttcaacatcctttcataaagaccctcaaaaaagcagtataaaaggaacttacctcaatataatgaaaatcatatatgacagactcacagctaatattgtactgaatgaggaaaaactgaaagcccttcactgcagwtctggaccatgacaaggatgcccacagtcacgactgttattcaatatagaatagcaatcagataagagaaagatatccagccaaactaagtttcataagtgaa

SEQ ID NO: 656231 - DNA, 553 bp, Homo sapiens
taattattaacagcaataatgtaatcaaatttataatcataattagtatttaatgtatgaataattttggaattctattggaatcagatttttgttcatagcaaatacaataagtttttactgtacacctctgtttaatataaaatatttaattctattyctcattatagaatgtttttatgaaaactgagaagaaaatacttagtctttgctaatgacaaaaaccctagttgaagtactgttgtgagcattttgcatttaaaagtaataaagaaaacaaaggtttggaactcatttttacagaagacataaaaaggaaatgaggaaaactatgacatatcagtgccaacaattggcataaagaagaactagataaatgaatgagctctctgaggaaattaaaagaggtaggcttaacctgtcatttcctggttcattggtgctattagatgtaatactactttatggatagaataccacttatatagctgaaaaacactaatttcagcatcaacctgactttaaagatagcaattattaaaatttatttaca

SEQ ID NO: 656232 - DNA, 587 bp, Homo sapiens
aatgatttttatttgttgattctgttaccttgttgaactcttgtagaaattytgtttttattttgtaaattatttataattttctatgtcaacatcatgtcatctccatttaaagacagcttgatttcttcctttctcatctgtttgtcttttatatctttgactttactcattatagtaactagaactcccaatactatgttgaataagagtggcaagagtggatgtctttacctttttcctggtcttagaagaaaaacattttctttcactattatgtataacattagcaggaagttttttatagatacccattatctgtcttagataacttttcataatttgctaacagcttttgttttatgtaaggttgaattttgtcaaatgctgtctctgtatctatgctatggaaagttatatgttacatgatttttctttgttaccttgttgataatgatggatcacattgatgaattttcaaatgttgaacaagtcttgcatacctgaaataaattccatttagatatagtgtgtaattcttttgatacactgataagaaatataattttttagaaattgctgtttta

SEQ ID NO: 656233 - DNA, 587 bp, Homo sapiens
aatgatttttatttgttgattctgttaccttgttgaactcttgtagaaattctgtttttattttgtaaattatttataattttctatgtcaacatcatgtcatctccatttaaagacagcttgatttcttcctttctcatctgtttgtcttttatatctttgactttactcattatagtaactagaactcccaatactatgttgaataagagtggcaagagtggatgtctttacctttttcctggtcttasaagaaaaacattttctttcactattatgtataacattagcaggaagttttttatagatacccattatctgtcttagataacttttcataatttgctaacagcttttgttttatgtaaggttgaattttgtcaaatgctgtctctgtatctatgctatggaaagttatatgttacatgatttttctttgttaccttgttgataatgatggatcacattgatgaattttcaaatgttgaacaagtcttgcatacctgaaataaattccatttagatatagtgtgtaattcttttgatacactgataagaaatataattttttagaaattgctgtttta

SEQ ID NO: 656234 - DNA, 587 bp, Homo sapiens
aatgatttttatttgttgattctgttaccttgttgaactcttgtagaaattctgtttttattttgtaaattatttataattttctatgtcaacatcatgtcatctccatttaaagacagcttgatttcttcctttctcatctgtttgtcttttatatctttgactttactcattatagtaactagaactcccaatactatgttgaataagagtggcaagagtggatgtctttacctttttcctggtcttagaagaaaaacattttctttcactattatgtataacattagcaggaagttttttatagatacccattatctgtcttagrtaacttttcataatttgctaacagcttttgttttatgtaaggttgaattttgtcaaatgctgtctctgtatctatgctatggaaagttatatgttacatgatttttctttgttaccttgttgataatgatggatcacattgatgaattttcaaatgttgaacaagtcttgcatacctgaaataaattccatttagatatagtgtgtaattcttttgatacactgataagaaatataattttttagaaattgctgtttta

SEQ ID NO: 656235 - DNA, 587 bp, Homo sapiens
aatgatttttatttgttgattctgttaccttgttgaactcttgtagaaattctgtttttattttgtaaattatttataattttctatgtcaacatcatgtcatctccatttaaagacagcttgatttcttcctttctcatctgtttgtcttttatatctttgactttactcattatagtaactagaactcccaatactatgttgaataagagtggcaagagtggatgtctttacctttttcctggtcttagaagaaaaacattttctttcactattatgtataacattagcaggaagttttttatagatacccattatctgtcttagataacttttcataatttgctaacagcttttgttttatgtaaggttgaattttgtcaaatgctgtctctgtatctatgctatrgaaagttatatgttacatgatttttctttgttaccttgttgataatgatggatcacattgatgaattttcaaatgttgaacaagtcttgcatacctgaaataaattccatttagatatagtgtgtaattcttttgatacactgataagaaatataattttttagaaattgctgtttta

SEQ ID NO: 656236 - DNA, 537 bp, Homo sapiens
catagaagcttttaagtttaattamataccgtttgtctagttttggtttcattgcatttgcttttgggtttttcattatacattgtttgcctaagccaatgtccaaataatttttcttaggttttcttccaggagttttatagtttcaggcctcatgtttaggtgtttaacccatcttcagttaatttttactgtggtaagagatagcagacaaacttcattcttcttcatatagctagccaattttcccaaaatcatttattaaatatggtattcttttccattatttttgtcaactttgtcaaatgtcagttggttataggtatatggctttatttctgggttctctgttctgttccattgttctatctgtctatttttgtaccaatatcatgctgtattagttactatcgctttttattataatctgaagtcagacaatgtgatgcctctggctctgttcttttttcttagaattactttggctattcaggctctttttggttccatatgaatgttagcatttttttttttctg

SEQ ID NO: 656237 - DNA, 537 bp, Homo sapiens
catagaagcttttaagtttaattacataccgtttgtctagttttggtttcattgcatttgcttttgggtttttcattatacattgtttgcctaagccaatgtccaaataatttttcttaggttttcttccaggagttttatagtttcaggcctcatgtttaggtgtttaacccatcttcagttaatttttactgtggtaagagatagcagacaaacttcattcttcttcatatagctagccaattttcccaaaatcatttattaaatatggtattcttttccattatttttgtcaactttgtcaaatgtcagttggttataggtatatggctttatttctgggttctctgttctgttccwttgttctatctgtctatttttgtaccaatatcatgctgtattagttactatcgctttttattataatctgaagtcagacaatgtgatgcctctggctctgttcttttttcttagaattactttggctattcaggctctttttggttccatatgaatgttagcatttttttttttctg

SEQ ID NO: 656238 - DNA, 562 bp, Homo sapiens
tgttattggtgtatagaaatgctaactatttttgtacattaatttttgtatcctgagactttactaaagtcatgtawcaagtctagaagcctttgcgggagttcttaaggttttctggatacacagtcatctaatcagtgagcagagatcatttgacttcttttacaatttgggtgtcttttatttctctctcttgcctggtcgctgtggctatggcttgtagtactatgttgtgtaggcatggtgagagtgagcatctttatcttattccagttcttaagggaaatgtttttaactttttaccattcagtatgatgttgcctatggggttgttacatatggctcttattattttgtaatatgttcctttaatgactagtttgttgagagtttttaccgtaaatggatattggagtttattaaaaaaaaaaacaacctttttgcatctattgtgattatcttttggttttgcacttagttctgtttatagaataaatcatatttattgatttacatatgttagaacaaccttgcatccctgaaataaagcccactttatcat

SEQ ID NO: 656239 - DNA, 530 bp, Homo sapiens
atagcatataatcttgatatggtataattaaaatgacacctaacccctgtggttttcttctcccaaatgcataaccccagagtaatcctggggaaaacaccagaccagtcccaattgagggacattctacaaaatacctgaccagtatacttcgaaactgtcaaatcataaaaaaaaaaaagacaactcttagaaactgccacagccaagagaagtgtaaggagatgtgtcatctaaattgtagtatattctgagtggtattctggatcagaaaaaagtattatgtcaaaattagataaaataacttcagttaatattaataatgtatgaatactgactcattagttgtaacaaattaccacactaacataagatattaacaataggggaaaatgaatgaggaaactctgtgtattaccttaagagtccttgtgtaaatctgaaactcttctaaatagtaaagtttatcaaaacataaaataatratatcactgttcttaaaattcttgtgctgtatgccacttaaaaaa

SEQ ID NO: 656240 - DNA, 530 bp, Homo sapiens
atagcatataatcttgatatggtataattaaaatgacacctaacccctgtggttttcttctcccaaatgcataaccccagagtaatcctggggaaaacaccagaccagtcccaattgagggacattctacaaaatacctgaccagtatacttcgaaactgtcaaatcataaaaaaaaaaaagacaactcttagaaactgccacagccaagagaagtgtaaggagatgtgtcatctaaattgtagtatattctgagtggtattctggatcagaaaaaagtattatgtcaaaattagataaaataacttcagttaatattaataatgtatgaatactgactcattagttgtaacaaattaccacactaacataagatattaacaataggggaaaatgaatgaggaaactctgtgtattaccttaagagtccttgtgtaaatctgaaactcttctaaatagtaaagtttatcaaaacataaaataataatatcactgttcttaaaattcttgtgctrtatgccacttaaaaaa

SEQ ID NO: 656241 - DNA, 553 bp, Homo sapiens
gttggaccataataactttcatatttaggtgtaaaaatccttagagtaaaatttattatgatgctcatcaatacagttaatttgtgttcttataacattattggtaaatgctgatacctaatttgctttatctatgctagtggttgaggttggaaaattaagacacacaatgaatttatcatagcaacatagtcatcaggagatgaatatctgttacttatgtatttgaaaacagtgttctataaaaaaaaaaattggtgtcagctgagttactatgaataagagccttttgtcaaaagcatttctgcctagactgtcagaagaaagattgaagagaaaacttggagacaaaataaaaagaatgtgatttgtgatttcatgttacaatgatcatccttttttttttttttttggtaattktttcttgccaaaactttggtttgtcatactgtagatgcacgaatacaactaaatagaagatgtttttatataaaatgacactgagatttgtcacaatataaaggatgctctgtgttttgtgcagtattgcaca

SEQ ID NO: 656242 - DNA, 595 bp, Homo sapiens
tctctgttcaagtgtctctcttgacaaagagaaccatagaaagaaacatgttgtaacacaaggagctgttgatgcaggatctgttcatgcaggatctgttcatgcttctgaaccagtaaggctgagtaaggtaaatatcaatyctccttttagagttaaacgtttactatgagtgataataaattgtattctattatcagtgtagctagtcatcttttaaaagttgtaagaacacatgctagaatgatagatgaagattggctctgagaagcagaggataattactacccattaccacagtgagagaggggttattggcaggaagaaggtggattggtggagaatgcatgtctttataccaaaaacaagtattaagaatagcaaattaaataggaatccttctgaaaagtatgcgttcagaagtttttaaaggccataaccacaagcattgagttgcacaatatctccaaggattttatgactttagaaaaagttgctattcgatctatctgttgcagctatcacagagtactcattttcagtcgattggaacttctacagtactgttgacacctaaggatttcttccttgattt

SEQ ID NO: 656243 - DNA, 498 bp, Homo sapiens
tgtggcatcagctttggaaccagctttcaggtatgagctggaagggtcttgaggaggatattaataaaggatraaagggaaaagaagaaattgttattagaggctagagaaaaaagcagattgtgttatgaatttttgacagcagtagtccctgcaaaatgcaaaaaataaaagaaaaatgtatcattgaatttgtaggtctgaccaataatatttcctacctttaagagagaaataactcctagagagcctctttgaaatttggaaataatatatacagttgacccttgaacaacacatgtttaaactgcatttatatagtgattttttttctgcctctgctattcctgagacagtaaaaccaacctctccttcccttcttctcctcaggctattcaaagtgaagagaataaagttgaaacctttatgatattccactttcaattaatcaatagtaaatatattttctcttatgattttcttaataacattttattt

SEQ ID NO: 656244 - DNA, 480 bp, Homo sapiens
cctgtgccagtaattccaacatatatggcataactgcattttgcattctgttctgtctgttttccttstctcttcagttttttgtttttgttttttggggttttttttgcttgtggtatgaggtaattttgtttgttgttgttgctgttgttgaaagcaggtcatgttatgttgcatgagctaatagatattaaagtaactggcttttagtatgaggatttatgataatctgagtttgcgctatgttaaacttttgtcgtacctgcagataccagaggcttcaaatttgtctacagttcctgtttttgcctcacttctcggcacttagaattccctttttattgccactcaagagagtctgtgtattgcagttctttcaatgtaatctcttgttgttatactggacacttacggagtagggatagaatatgtgggaggggagcagtctataatctttggatcatgcctaagtctttaaca

SEQ ID NO: 656245 - DNA, 569 bp, Homo sapiens
gatatatactaaaaatggttgaaagtatatgaagcattataacctttccaaacaattaacacttccaytgataatttttctatgaagaattaataagaaaattctggatttttgtcatataaaatagttattagtttcactagtactattataatctatgaagtagagggccgggcatactggctcacacctgtaatcacagcactttggaaagctgaggtggaaggattgcttgaggccaggagttcgagactagcctgggtaacacagtgataccctgtctctacaaaaagattgttttttaaaattcagccaggcatgatggcactcacctgtagtagccacttgggaggctaaggtatggagatggcttgagctcaggatttcaagggtacagggaattatgactgtgccactccactccggcctgggcaacagagcaagactgtctctattaaaaaaaaaaaaaaaaggaaagatttggacaaaatgtaaaatgaaaaggcatgatgagcacccttaacagactttcattgttgtatatacttaattgaaaatattaccctaga

SEQ ID NO: 656246 - DNA, 605 bp, Homo sapiens
aaagactttagggatcactaagaaaaaagtatcaagggatctagcctgttagacttagttcctgaacctgacatcacagaactcattagattcattctgaaaaatgtcatagtgttcagaattacctaatgaatgccaaacttctcacttatagtggttccttttttgttatatcacagttcattcattcattcattcatttattcaataagaatgtatcgaatgcctgttatttggtttggaaagatgcgtagaatagggaagggagwgttgagacaataaaataaatgaaaatggtttaagaaatcctagtaatatgaagtcaaattttctcccacttttgaaaaacacaaaaaaagcactgacgaagaactgagatctaggataacaaattttccctacctgtcatattctactaactatagtcatactatattgatgttctttaattatttcatatatttaagttctttttcttatccagatttcttaacttttactcttcaaagtcaaggcctctaatctcttttgttcacttatgaaaagaagaaccagctaaaaaccaatactttcttaaagtaggtatttttcctttctaattacag

SEQ ID NO: 656247 - DNA, 605 bp, Homo sapiens
aaagactttagggatcactaagaaaaaagtatcaagggatctagcctgttagacttagttcctgaacctgacatcacagaactcattagattcattctgaaaaatgtcatagtgttcagaattacctaatgaatgccaaacttctcacttatagtggttccttttttgttatatcacagttcattcattcattcattcatttattcaataagaatgtatcgaatgcctgttatttggtttggaaagatgcgtagaatagggaagggagtgttgagacaataaaataaatgaaaatggwttaagaaatcctagtaatatgaagtcaaattttctcccacttttgaaaaacacaaaaaaagcactgacgaagaactgagatctaggataacaaattttccctacctgtcatattctactaactatagtcatactatattgatgttctttaattatttcatatatttaagttctttttcttatccagatttcttaacttttactcttcaaagtcaaggcctctaatctcttttgttcacttatgaaaagaagaaccagctaaaaaccaatactttcttaaagtaggtatttttcctttctaattacag

SEQ ID NO: 656248 - DNA, 584 bp, Homo sapiens
gcagttaccatgtaaaaagttaattttactttgtgagttgaaagagtamaaacactaagtcagaaaactgctttagtcaaaagcagcctgaaataagaaagccatcaatagaaacaaaacaagggattcacatgcctgattcctaatttgtcttattttctctttcacttttgccatccttcaaatcacagatacaacacacatacaaagaatagttacataatgcatatattaatgactatactaataaataaatgagctaaactttataatcattggggaaaaaacaatctactatatttagccacttaagaattgtgttgccactgagtttctatttcaaaatataaagtaatacaattagcctaacacctaaaactgcaggcatattttgagtgtttgttctttagattcccttttaagatgttaaaaaggaactgtgcaacaaaatattatctgaatatatattatcagcactaaatatgatacagttgtcattcaatccccagtttgcatatgcatagtagaaatgttgtgaaagctagctaaaggaatggaaatagactggtcataattcttaattt

SEQ ID NO: 656249 - DNA, 582 bp, Homo sapiens
ccatgtaaaaagttaattttactttgtgagttgaaagagtacaaacactaagtcagaaaactgctttagtcaaaagcagcctgaaataagaaagccatcaatagaaacaaaacaagggattcacatgcctgattcctaatttgtcttattttctctttcacttttgccatccttcaaatcacagatacaacacacatacaaagaatagttacataatgcatatattaatgactatactaataaataaatgagctaaactttataatcattggggaaaaaacaatctactatatttagccacttaagaattgtgttgccaytgagtttctatttcaaaatataaagtaatacaattagcctaacacctaaaactgcaggcatattttgagtgtttgttctttagattcccttttaagatgttaaaaaggaactgtgcaacaaaatattatctgaatatatattatcagcactaaatatgatacagttgtcattcaatccccagtttgcatatgcatagtagaaatgttgtgaaagctagctaaaggaatggaaatagactggtcataattcttaatttaagac

SEQ ID NO: 656250 - DNA, 473 bp, Homo sapiens
aaatcctgggctaaaaactaagtgtgctcaarctacccccgcacccactgattctgcactccatgggaaaagttctcacaagcaagtcctttgtccactacccacgtctataggaaatgtttgaacagctatacacaaagaactcacaagtccacaacctcgggggtgttgcgggtggagagggcagtggtaaaggtgatgacagggagggcctgtggggacagtaatattagattagtggtcagaagatgctggagcctgccttgccagtcacacacttttagaggaatgctggacagtacacaccctccccaaccctgaatgtaggccctcgctgacatcacgccagatgaagccctgaggtctttaacatctgtaactctatggcatgtaacataaacaggtgtctgaccagtttccccagatatagaataataataatacctttcatttaaaaaggtaagagggaattc

SEQ ID NO: 656251 - DNA, 567 bp, Homo sapiens
cctgtgtttgccatctttgacaaactctcactgtgaccatcttcctccagcatggttttagggctatacacctttgttctagtctcagttttctattaattagttttgggtctagtcttgccttagtctcagctctgctagctatgttaacattgaacaagtcaatttatgcttttggaactcatctgtgaaattaggagattaaaataraaaatgtttaggtctatccacatctgaaactcaaggacatggtgggtggggggtgggggaattccctcctctagcacatctccaaagtaaataaattgacattgctttttctataaaaagtggcagtcattattctaaaagcttgaggaggctttggaatgagaactttcaatccgcatagtcaaaataatacatagttctaaaagactaacatacacggctacaggacttcaggcaagtaaaaagacaagtgacagaagaactcaaggatctgcaaaaatttagagtatggcaaagaaggcacttcaaatcattagaaagactatgtggactattcggtccaaaggttattgggac

SEQ ID NO: 656252 - DNA, 431 bp, Homo sapiens
gaattccctcctctagcacatctccaaagtaaataaattgacattgctttttctataaaaagtggcagtcattattctaaaagcttgaggaggctttggaatgagaactttcaatccgcatagtcaaaataatacatagttctaaaagactaacatacacggctacaggacttcaggcaagtaaaaagacaagtgacagaagaactcaaggatctgcaaaaatttagagtatggcaaagaaggcacttcaaatcattagaaagactatgtggactattcggtccaaaggttattgggacaacttgttgacaagttaagaaaaaatctagattccctacctcactccacacatcaaataaatcccaaatggcttaaaaataaaaatgtagaaaacaaaagataatmaaaaagtataggtaaaaaaattacat

SEQ ID NO: 656253 - DNA, 541 bp, Homo sapiens
cttgtgccctcccactgatatcctttgacctgtaaaacatttctccccacttcccactgccacatccsaaccttcttgtattaatctacaaaatatttcacttcaaaattttcttctgatgggactgaggatacactataccaaaatatggcactatggcatactgaatattttaagctaaaggaatttgataaaacaagagcagcaggaggtcagtctgaccttcctctactcttcttccctaatacaggtcataaaacctagaaaggattttctgaccttttcctgaagcaggtcataagactctcatgtgagaggtgccctccctatacccagaggaaagttatatccttatttctgaagacacagggacacagagaagaatctaaacacacaggtcttgctaaatttcccccagcttattaccactagatcatactttttttgccctattgtgtatcgccacaactgtctactcttcatcaaatgtagcgtaaaagcacacagccttaactgtttcttcaggtctacatttcctcag

SEQ ID NO: 656254 - DNA, 599 bp, Homo sapiens
cttgtaattttttttttaagacaatgtcttggtctgtcatccatgctggagtacagtgatgcaataatagcttactctagcctcaatctctcagctcaagtgatcctcccacctcagcatcctgagtagctggaaccacaggtgcatgccaagacattgggatttttatttttatttttagtagagataaggtctatgttgcccaggctgctcttgaactcttgagctcaagtgatcctcccgctttggcctcccaaagtgctgggattacaggcataagccaccacgcctggcctctccttgtaattttgtggttgttgaagaaactgggtcatatgtcctataaaatttcccagtctggattttggcttctgcattctcatggtgttatttaacatttcctctgtcccctttatttcctgtaaattagtagttagatttagagtcttgatcagattcaggttccatatttttggmaagaaaacttcataggtgatgttgtatactgttgtaatttgttaagtgaggtatttaagttaggttttgtgtggcacagtgaggaacattcagactggaatggtggaaagattaggtttatt

SEQ ID NO: 656255 - DNA, 438 bp, Homo sapiens
gaattcaagaccagcctgggcaacacagcaaaattttgtctctattaaaattaaaamattagccaggcatggtggtgcatgcctatcatcctcgccaatccagaggctgaggcacaaggatggcttgagcccaggagtttgaggttgctgtgaactattattgtgccactgcactccagcctaggcaacagagcaagactctgtctaaaaaaacacaaaacacacacactgtattaggccattttcatactgctataaagaactacccaagactgggtaatttataaaggaaaggtttaattgactcacagttccatatggctggggaggcctcaggaaacttacaattgtgggagaaggcaaaggggaagaaggcaccttcacaaggtggcaggaaggagaagaactgagcaaaggggaagaaccccttataaaact

SEQ ID NO: 656256 - DNA, 292 bp, Homo sapiens
aaggcagggggcaggaatcctctaaaaggtcattcattcacaatcaggtgattggtgctgctgactcggcggggcccagctggagctgtcaactggaacatccacatgaagtctcaccatgtggccygagcttcctcacaacatggttccaagggcagttgtcctgagagagagccaggtggaagccatattgccttttatgacctagccttggaagtcaactggagtcacttctgctacattctccctggctcaatgacagggagcataaaccctagctcttttgaggcat

SEQ ID NO: 656257 - DNA, 397 bp, Homo sapiens
tttatgcaggaagtgctaagaatctcccagaaaatggtgagacagcctggagactggtaatagtaggaaggaggaggtggtcttatgggagcctggggaggcaggggaattgactgacagcagctggagccacagcaggcctcaataggagccgcggaggagctgccagtgtccccaccctggcttcaccctttatcttccttcmaatctcccactgactgaactctgccagaatttcaccaacagggaaatgcaccctccagggatcagctctcctgtgatacagggcagagctgtaaaaggttgagaacgaaatccaaaagcaaaaacacgcaagactggctcacacactaacactacaaaagtggaaattctggccaggagcaatggctcactc

SEQ ID NO: 656258 - DNA, 521 bp, Homo sapiens
ccagccacggagtaaggttttttggtagattgctctggagtcgtccctgagctgacaagagttgtctctagtaaaggagaatttatattttgtctttaggaggaaaagggggagaatagagctcttccatttgctgcagcttgtctttagctcaaaaatataagtgtcaaagagacatattttggggtgtcatattttggtttccttcaacaacctcttaactgttaatattcaccagggtccaaccatagctttctmacactttccctaagaaatatcaattcatatagcttcaactatacctagatggtcaaggcaataaatttagttttctagcccttatttctcccttgtcaatgtccttttgtgttcatatttatatttctaattgcctgctagatacctccttctggacacctgatagacactctaatcacatacaaaatggtatattttcatgtattcaaactcaaaggtccaaaatgtgtatattcttatgtattctttagattaatggcatt

SEQ ID NO: 656259 - DNA, 572 bp, Homo sapiens
cactgctaaactctaagaatggtctcaaaggcctcactaacatgaaaattgttctgaagtgcaaaaatgtagatcaagacactacgtattctaaatacaataagtagataatgttggctttaatagaaattgtgggtgccttctctctatcttctctcctcttcctaagtctcctctaacccagtctgcccctatgatcaatcagaacattccattttattctacaccaagaaggtatgctcccacataatctataagctccaaagagacataagaggctgtatctgattttaacccctagcatagtgtctaggccagagtgagatatcatacattttttgaataaatgaatgaataaaaggctaaagaaagtggttcacagagctgaaagaaaggtcagccctgtcttgtaatcacagctcttaggagtcaagcttcttggatctatatggctagtgacatgagctctgtttctgctgtctgagcctaaaagaatctggctaagtggctataatcagttatgctctrggcaatggggcaaactcattctgggtctccttgtgggctgatct

SEQ ID NO: 656260 - DNA, 183 bp, Homo sapiens
ctttgtcctgtcagaatctctgagcaggatctcccaggttcatccaaactcgtgctttgtccacttttsactaggcccttgggcatcactgggctatcccagctgtccacagggccttcaataatgcacattgcacctggcttatccaagcagtgctcagcagcccacattgaccaagtccct

SEQ ID NO: 656261 - DNA, 568 bp, Homo sapiens
aaatacaccttaaaatgccctttagctcaaggaagaaatcataagaaacaccttaaaatacattgaactgaatacaaataaaaatatactatatcaaaatatgtgggataagttaagcagacccagagtaaattttttgtataaatgcttattctaaaaaacagaagttcaaaacaagtgcactaattttctaccttaaaaagaaaatctaaaacaagagagcaaattaagtccaaaacaagtagaagaaagaaaataaaacagaaattagaaatcaatgagacagaaaacagacacaggagaaaattaacatggccaaaagttagttctgtgagaaagaaagaaaacgcaaattataaatatcagggattaatragattgtacagttgtagacacaagagacattaacaagataatagaatattgtgaaacattttatactaattttcattacttggatgaaagggtgaattccttgaaaagaaacttataaaaaatttcacaagattaaatggaatatatgaagtaattgacatttattaaagtaattaaattgtcaaatacctgc

SEQ ID NO: 656262 - DNA, 568 bp, Homo sapiens
aaatacaccttaaaatgccctttagctcaaggaagaaatcataagaaacaccttaaaatacattgaactgaatacaaataaaaatatactatatcaaaatatgtgggataagttaagcagacccagagtaaattttttgtataaatgcttattctaaaaaacagaagttcaaaacaagtgcactaattttctaccttaaaaagaaaatctaaaacaagagagcaaattaagtccaaaacaagtagaagaaagaaaataaaacagaaattagaaatcaatgagacagaaaacagacacaggagaaaattaacatggccaaaagttagttctgtgagaaagaaagaaaacgcaaattataaatatcagggattaatgagattgtacagttgtagacacaagagacattaacaagataatrgaatattgtgaaacattttatactaattttcattacttggatgaaagggtgaattccttgaaaagaaacttataaaaaatttcacaagattaaatggaatatatgaagtaattgacatttattaaagtaattaaattgtcaaatacctgc

SEQ ID NO: 656263 - DNA, 406 bp, Homo sapiens
ttggttttgtcatcgaaagtaatgagaccatctgacttacaatgtctgtgccrtaaccaactcctaatagcctcctaggacagctttgccctgacatatactgtcctggaaccacgtctgctttgtaactcctgaggtagctgccaccatgaccaatgccttctcatctttactctacatgcaggtaacagttataattatatctctgtgtattcacagaacatctagtacatctgggacttctacaaaatttccctagctgattttggtgttctggggtcctggcagctctagccatgaagggatgatgctttatcagcatttctgtttagtttttttcctttttctcaaaaactgattccacttttcccacatacgtttgacaattcatttgaactcatttatt

SEQ ID NO: 656264 - DNA, 406 bp, Homo sapiens
ttggttttgtcatcgaaagtaatgagaccatctgacttacaatgtctgtgccgtaaccarctcctaatagcctcctaggacagctttgccctgacatatactgtcctggaaccacgtctgctttgtaactcctgaggtagctgccaccatgaccaatgccttctcatctttactctacatgcaggtaacagttataattatatctctgtgtattcacagaacatctagtacatctgggacttctacaaaatttccctagctgattttggtgttctggggtcctggcagctctagccatgaagggatgatgctttatcagcatttctgtttagtttttttcctttttctcaaaaactgattccacttttcccacatacgtttgacaattcatttgaactcatttatt

SEQ ID NO: 656265 - DNA, 406 bp, Homo sapiens
ttggttttgtcatcgaaagtaatgagaccatctgacttacaatgtctgtgccgtaaccaactcctaatagcctcctaggacagctttgccctgacatatactgtcctggaaccacgtctgctttgtaactcctgaggtagctgccaccatgaccaatgccttctcatctttactctacatgcaggtaacagttataattatrtctctgtgtattcacagaacatctagtacatctgggacttctacaaaatttccctagctgattttggtgttctggggtcctggcagctctagccatgaagggatgatgctttatcagcatttctgtttagtttttttcctttttctcaaaaactgattccacttttcccacatacgtttgacaattcatttgaactcatttatt

SEQ ID NO: 656266 - DNA, 584 bp, Homo sapiens
ttagttaacactatgggaacttcatgggaaatggacactctagctccaccataaatagaaactgtttatgtcaaaaaacacataaaagcatagttgcaagattacatttccttccagatatttcatttagtatctccacagatcactaacttcctgaatagcattcttgtgtctccactgcctcacatttgatttcaggtcattccatcaattgtcaaagacgcatccaacattaacttcccaactactggtttggattgtgtcaacattgtcattctgggccacaacaacacaaaaggctaactcagtgaggtaacatagacactgatcagtgagattttgctgacgggtggtaccattttttaccaagatcaagggtattcataccttcaggcatctagataacattgaaaagggcaggtycatagataaaaagggaaagaggacgggtttttgcactatacatgagctaccgtgtctcctgtttaacctgagtctgaagagattcaaagtgcaggtgccatgaatgcctctttaatagctccatgtcgattgattttctgggctacacttcccagcattca

SEQ ID NO: 656267 - DNA, 607 bp, Homo sapiens
gggtaaaactcctgtggcataactgtgtcttcttacgggaagctaatttaaatcacttggaagtcaattccgatgacaaggagacttgaatttaattagacatagaaagagtgtgtccagggtcatgagtgagcataatattacaaagaatgtcaacaggaaaaccagagcatagagcaatggggatccatagctcacaatgatagcaagaaaatttcctggttacatgaagtaattaagacacatttaaatccaagagtataaaattagacctgatgaaaaagctgaaggagttatcatcccagccaagcaggaaacccaagccttttattccttctcaagaaggaacaggagmcagtgatgtgatctgtgagtcatgtgtaacatgaaagtacaggaaaagttgaacttctgatatacaaatctgaaaagtttttatagtaatagatttcaggattaaaagtcaatatttattacctcttattatgagcaaataaatacattaagaaaactttgttgttttaaccaaaatttttagttttttatcactatgtttttaatattatagctaatttaaataaactttataaacaatctatctgatctc

SEQ ID NO: 656268 - DNA, 450 bp, Homo sapiens
agtgtgtccagggtcatgagtgagcataatattacaaagaatgtcaacaggaaaaccagagcatagagcaatggggatccatagctcacaatgatagcaagaaaatttcctggttacatgaagtaattaagacacatttaaatccaagagtataaaattagacctgatgaaaaagctgaaggagttatcatcccagccaagcaggaaacccaagccttttattccttctcaagaaggaacaggagacagtgatgtgatctgtgagtcatgtgtaacatgaaagtacaggaaaagttgaacttctgatatacaaatctgaaaagtttttatagtaayagatttcaggattaaaagtcaatatttattacctcttattatgagcaaataaatacattaagaaaactttgttgttttaaccaaaatttttagttttttatcactatgttttta

SEQ ID NO: 656269 - DNA, 551 bp, Homo sapiens
gtaagactgctgtgtaagtgttgtaacttattacagagtacatttttttgtcagttggctgagaaagcaggagttactgacacatattgctggaataattcttatccttttaactatgaaaaaaaaagaaccgttataattctcagctgaaaatatgtgagaaaatctggggagtccaagcatctctgtcctggatcaattaygagcatttatgcctgtccttttcttcaccttcctttggtctttaacatacagtcacagaattagggtcaccccaagtagtaggaaaatatgaaaagggcaagcaatccttgccctggaagcatcatctttttgaggccccagttacctggaagtatgaggctgggcttcccaataagcagatcagcatgcaggaaatttattatgaggtctcttaaaatcaatttcagatgaaggaaagagaggagaatgaaggggaggggaagaggtgggtgaataaataggatgagaaggagactagaccaggcagtgggttgagcagcaacttctttcatgggaagcatcagttg

SEQ ID NO: 656270 - DNA, 542 bp, Homo sapiens
cctcctcctcagctggtttagcttctgggtatgctcctaacaatgtaaatgctagcctagaggaaatacattcacccctttattaattccagtgtccacagatttatttggaatctctttgcagggcttacagaatatgtgtctgttaaaattccagaaggaatgcagactcaaactgggtgattaaagaaaaattgaaggattcattataaaggtatagggatgttgtatggaaacctcaaggatagtgcaatgcccttgggccaacaacagctccctatttttaaccttgtgtgtgagacacaatgggagggaacagttaacagaatctagagacagaacatgttatggagaagaccatctggcaggagatgcgcccttatgccaaggatgcagcagcytgagatgaatgcaaaggagcaagattgacctcactttccttctctctggtctcctgcagtgccctccattgcttgactcaactggaaatcagagagggagccctttggtaaagtccaaacaggtcaggctccaagggcaca

SEQ ID NO: 656271 - DNA, 568 bp, Homo sapiens
gatgagagaggacagaaaaatatttaatggccctaaattttccacatatgacaaaagttgtaaacccgcagatccaccaagctaagtgaaccctcaaacacaaaacacaagtctgtgcaccaaattacagatcttttaattacatgaggcaaaaaactaatagatttgcaaggaggaataaagaaatgagaaaatatagtcagaaaacattagagagaagtattccccatgaacataaattctaaacaaaattttatcaaaattaaatccaacagcatattaagagcatcatggccaagtgaggtttattctagaaatgcaaggttggtttatcattcaaaaatcaataaatgtaattcaccatattaataaaccaaaaaaagaaaaattatgtaatcmtctcaatggacacagcagatgcatttgacaaaacacaacatccattcctgatgaaaattctcaacaaaaattctacagataacatcatacttaatgttgaaacacagaataatttccctctaaattggcctggccaacatggtgaaaccccatgatatggtttggcttt

SEQ ID NO: 656272 - DNA, 450 bp, Homo sapiens
aatgggacaaaatagctttttttttttttttttttttttttgacagagtttcactcttgttgcccaggctggagtgctggagtgcaatggcacaatcttggctcagtgcaacctccgcctcccggatttaagcaattctcctgcctcagcctcccgagtagctgggattacaggcccctgccaccatgcccagctaattttgtatttttagtggagactgggttttaccatgttggtcaggctggtctcaaactcttgaccttagttgatccatccacctcsgtctcccaaagtgctgtcacgacgcccgaccgacaaaatagctttgttagctctgcttcattcaatcaacatttagcaaatgcctattgtgtcctacccttgtgcagacactggggacaaagaggaaacaagacagttcccactctttctatcatttttgcagttgtc

SEQ ID NO: 656273 - DNA, 575 bp, Homo sapiens
ttataaatagaaaattaccactttgtctaactgttcctcacctctggtgagaggtgaaaggcagtagctcaagtcatcttgtttctcaccctgccttcctgtgcaactgccagtcccctacgtcataccctgtccttctaagctggtgcctgcacagtcttcccaatgaatgacccctccttccacccagctgtaaatctgagctccatccttgacacctccttttcactcatccccttcactgtgataattttcctggtgtattcaatcattcccatctcctattttctctagtctgtctgtttctgttcctctccactgcgatcatcgtagttcacaccaccatttggtctattccagactactacaactgcctcctaactatcactcggcttccccttttgctccaattccccaatccactttccaacttccatccagagtgatctgcctagaaaatgaattggaacactcactcccctctatgaagacttcaatgttttattgaggttagaataaaagctatagctaggtctacctgaytgtcatctggacttatctcaatctcactccta

SEQ ID NO: 656274 - DNA, 521 bp, Homo sapiens
atccaattctgcatcccttaacctgctttacttttctgcagggcccttctcaccactggctatagcatatgttttatttaactttcacagcaacyatacaaagtaggtactattattgttctttgcctttacaactctttttgcctgaaaggctctcctccccaggtatgtgatataattccctatggtctttctggactccactgaaataccattgataatagcagcaacgttaatttcttccttgactaggctgcaaacttcatgggaggagactttgtttcgttcacttctaattcctcagtggcttcaacagtacctggcacaaagtaggcactcaataaatatgtgttgaatgaaatatctagatgttagagaagggtaagcttaagaagaacagcaggtggtagaatcagactttgcatacaagaagaatgattctagaactactaactactgtgctcttctcgggctgcttttccaggcaacccccaggttttccccatttcaagacaagacca

SEQ ID NO: 656275 - DNA, 521 bp, Homo sapiens
atccaattctgcatcccttaacctgctttacttttctgcagggcccttctcaccactggctatagcatatgttttatttaactttcacagcaaccatacaaagtaggtactattattgttctttgcctttacaactctttttgcctgaaaggctctcctccccaggtatgtgatataattccctatggtctttctggactccactgaaataccattgataatagcagcaacgttaatttcttccttgactaggctgcaaacttcatgggagsagactttgtttcgttcacttctaattcctcagtggcttcaacagtacctggcacaaagtaggcactcaataaatatgtgttgaatgaaatatctagatgttagagaagggtaagcttaagaagaacagcaggtggtagaatcagactttgcatacaagaagaatgattctagaactactaactactgtgctcttctcgggctgcttttccaggcaacccccaggttttccccatttcaagacaagacca

SEQ ID NO: 656276 - DNA, 606 bp, Homo sapiens
atcagactatgcacctgtcaagactgggatggttttcaccaggcagttttgcaatgttttttgaaagtgcaaatgtcacaatcaagtataatctgaagttcttgcccatgtaaatatctctgagaagaagaagaacacaataacaccatggctggctgcccactccaggcatttacatgagctattccctagtccaaagcccctagcctgccccaacagctccaccaggttaacactcactctccttcaggacctggcttaaaccctacttcattcaggaggaagtcattgcgtcctccaccaagtcagcattagatcatcctgccatgtgccctcaaaacactgtcctctaaattataatggcctgattatttgtttgtattggttgatagattacaagatctgtgaaggcctgagtagccccatttcctggcatatagtatgccctcaaatattagttaaatggaatgwttgtctcaattaatcatgcatgcaggcatgaaatattttaaaaatgaaccaaactgctaaagttattttactttgtataaaatgcttgttttaaaaaagaactgtaagcaaagaggatttacttatataatacac

SEQ ID NO: 656277 - DNA, 455 bp, Homo sapiens
aaaccaatcttcataattcccagttggtttggctgaggcatggccatgaggccggtggcttcatatmaacaagtgaggcactttgtgaataaaagcaacaagtcatggcacctcattccacccacaaaggggaagaaggttgcccaaggtcaagggcaggggttggcatcaaacctccctcttgagactctcatatatccaggaacatggaaaaataaaggccaggaggaggcctactctctagcatttataggagactggcgtccgatgtagtttgctgtttagaatgtgtctgtgttaaaacatctctgtggaggtagtgggggagcgactggtttgttcactctgcagaaaaaattggaccactggccttacaaacacatcattactgggtataaggttagagaagatacaataatcatttcagctccaagcttccactgtgattttacact

SEQ ID NO: 656278 - DNA, 557 bp, Homo sapiens
cttggactccactctctgatgctgtggcagaaaagtccctccacatagaaagccaaggctctgagggccgcctcgcatgtccctgtttctcaaggtcacagttctgcggtttctcctgttttataattgcctttggcaggacggctggtcctccaccagtgatcccgccatggccagaaatgaaagcataatttcccatctttaaaatgttgtacttggaagaaaatgcttctgggagctgggaaaattttttaccaaccaatgcaaagctttgtagtgcaagaggtagttagctgtttggaaatggaaacctcaaatgtctctggtttcttacctctattgatcatgatgattgtcacaaacataatttatactgagacattatattctttgcagtacattcttgaaattgcacaaacgaacttttcaatgtggaaaaattcaaatacatatatacagacgtggagaataatgacctcccatgtttccatcaatttgytttaacaactatcaacttatgaacaatctcatatgcttggtgcccccagcgcctctcc

SEQ ID NO: 656279 - DNA, 614 bp, Homo sapiens
gagtggtcttctagattctgctcatgaaggggtatgcctggcacttgtcaaaaattactatttaagttcagaattaatatcagagagagactcttggctgaaagtgtgacacaggctctaacctccttaaaagaggtgtgggatttgaaatttaacactgtgtgtttcctccccatacaccacatttctacgtgctgaagacagacacccttcagttggagctaatgtcaatgggctcaagatcttaagtttccccagaagtatgttcgtcaaaatagggctgtcctaatcagttcaggccgctataagagaataccatagactgggtggcttataaaccacagaaatttatttttcaccattctggaggctgaaagtccaaaatcagacatcaccagatttgatgtctggtgaggactgcctcctagttcwcagacacggccttctcaccgtgccctcctgtggctgaaggggcaagggggctctctgggatctctttcataagggcactaattctattccccttcacctccgcaagaccccacctcctaattgggggttaggatttcaacacaggaatttcagggaggatacaaacattcaatccataacaa

SEQ ID NO: 656280 - DNA, 521 bp, Homo sapiens
gacccttcaaaaaatcaatgaaaccaggagctggttttgagaaaagatcaacaaaattgatagactgctagcaagaagaagaaaagagagaggaatcaaatagatgcaataaaaaatgataaatgggatatcaccaccgatcccacagaaatacaaactaccatcagagaatactataaacacctctaagcaaataaactagaaaatctagaagaaattgataaattcctccaaacatacaccctccccagactaaaccaggaagaagttgaatctctgaataggccaaaaacaggctctgaaattaagacaataattgatagcttaccaaccaamaaaagtccaggaccagatggattcacagccgaattctaccagaggtacaaggaggagctggtaccattccttctgaaactattccaaacacagaaacagagggaatcctccctaactcattttatgaggccagcatcatcctgataccaaagcctggcagagagacaacaaaaaaagataatttt

SEQ ID NO: 656281 - DNA, 570 bp, Homo sapiens
tttttttttttttgagacggcgtctcgctctgtcgcccargctggagtgcaatggtacttctcagctcactgcaacctctgcctcctgtgttcaagtgattctcctgcctcagcctcctgagtagctgggaatacaggtgtgcacctccatgcctggctaatttctttttatatttttagtagagatgggttttcaccatgttggccaggctggtcttggattgatttcaggtgattcacccacctcggcctcccacagtgctgggattacaggcatgagccaccatgcccatccccaacatttaaaaaattgagtcattttcattaatttcacatagcaagagtgagttaaaggttcatattaggtaaaataatatgctataaagtaagcatttaattttaccgggagttttcaaagaaatattaagtttgatagctcagatttgtttgagaactgttgacatgcatactgtgttatcctgatttcttctctctggccccagttcaccaccaccaccaccaccacttgtgcctcctcatttaggaaaattttctcttcaatcacccact

SEQ ID NO: 656282 - DNA, 573 bp, Homo sapiens
gcctgtcctcttaaccccttcattacactgccttgtatattttaaaagcttttaaaagattgaatgattttagattgtatttttcttgagagaattttaatccatgggcaaaatcrtttaagttattaaaataaaaatgaggaattaagaatatgccaaatgttatgattagataatattcaaggtttttagaaaggagacagtaagaactaagtcttaaaaatacctaaacgctttgcaattcatttttagaaatcccttaaatgtgaagcttgagagcgcaactcttcagtgccaccaccatttccatttcctgtgtcagttctctggatttttatcatctgacattcctttctccacccaatttttgtttgttagtcttaaactgatcctaaaaatctgtcgccactgatgacacttctgtattatttaattatttattttaggaagaaagaggcttatttctctcctgttttgatgtgagaataattgtccatttgcataaactttgtgaccactccagaaggcagctcagaatcagtccctttttgttgttgttgttgttgttgctct

SEQ ID NO: 656283 - DNA, 573 bp, Homo sapiens
gcctgtcctcttaaccccttcattacactgccttgtatattttaaaagcttttaaaagattgaatgattttagattgtatttttcttgagagaattttaatccatgggcaaaatcatttaagttattaaaataaaaatgaggaattaagaatatgccaaatgttatgattagataatattcaaggtttttagaaaggagacagtaagaactaagtcttaaaaatacctaaacgcyttgcaattcatttttagaaatcccttaaatgtgaagcttgagagcgcaactcttcagtgccaccaccatttccatttcctgtgtcagttctctggatttttatcatctgacattcctttctccacccaatttttgtttgttagtcttaaactgatcctaaaaatctgtcgccactgatgacacttctgtattatttaattatttattttaggaagaaagaggcttatttctctcctgttttgatgtgagaataattgtccatttgcataaactttgtgaccactccagaaggcagctcagaatcagtccctttttgttgttgttgttgttgttgctct

SEQ ID NO: 656284 - DNA, 573 bp, Homo sapiens
gcctgtcctcttaaccccttcattacactgccttgtatattttaaaagcttttaaaagattgaatgattttagattgtatttttcttgagagaattttaatccatgggcaaaatcatttaagttattaaaataaaaatgaggaattaagaatatgccaaatgttatgattagataatattcaaggtttttagaaaggagacagtaagaactaagtcttaaaaatacctaaacgctttgcaattcatttttagaaatcccttaaatgtgaagcttgagagcgcaactcttcagtgccaccaccatttccatttcctgtgtcagttctctggatttktatcatctgacattcctttctccacccaatttttgtttgttagtcttaaactgatcctaaaaatctgtcgccactgatgacacttctgtattatttaattatttattttaggaagaaagaggcttatttctctcctgttttgatgtgagaataattgtccatttgcataaactttgtgaccactccagaaggcagctcagaatcagtccctttttgttgttgttgttgttgttgctct

SEQ ID NO: 656285 - DNA, 573 bp, Homo sapiens
gcctgtcctcttaaccccttcattacactgccttgtatattttaaaagcttttaaaagattgaatgattttagattgtatttttcttgagagaattttaatccatgggcaaaatcatttaagttattaaaataaaaatgaggaattaagaatatgccaaatgttatgattagataatattcaaggtttttagaaaggagacagtaagaactaagtcttaaaaatacctaaacgctttgcaattcatttttagaaatcccttaaatgtgaagcttgagagcgcaactcttcagtgccaccaccatttccatttcctgtgtcagttctctggatttttatsatctgacattcctttctccacccaatttttgtttgttagtcttaaactgatcctaaaaatctgtcgccactgatgacacttctgtattatttaattatttattttaggaagaaagaggcttatttctctcctgttttgatgtgagaataattgtccatttgcataaactttgtgaccactccagaaggcagctcagaatcagtccctttttgttgttgttgttgttgttgctct

SEQ ID NO: 656286 - DNA, 609 bp, Homo sapiens
agcgtgtgaaaaaaaatcctattgcattcatatcttcatttttcccttggtgatttttatgttagaatgactgctgtgattttaatactgacacattcagttcatccaaacctaggagagacagtgattagagttttaaaataatataaaagatattttattagaaagatttaagattgtcaggaaatctttaagttgcagccattttactctccaaagctttatattcaatgcatctttttatgcaaatgcaatttattgatagatttgtaaagaaacacataatttattatttttcattatgtttttcctgagtttggccagtaactatatacaaatgctaattttttcaacctcataaatagtccctcacaaaattccagtagagtaggtgggwgaggaggaaagagaacacacaggttttattttttgtttgtttttaatcatatgcaaaatatttcagagtgaaaacatcctaaataaaggatgctactggagaaatgtagatgcacacatacccaaagtacatttttgagaacttgttgtcctagtcctttcagcctcctataacaacattccataaattttgtggattataagcaagagaaa

SEQ ID NO: 656287 - DNA, 601 bp, Homo sapiens
aacttttagttttagtttcacatggcatttaggacaaagtccaaaggctttaagatggcaataaatctccacattacctggtcccagtgtcacctcccaccactctgaaatgtgcatgctaggtacctgcaatattaaaatgcctgaagttctcacacacacctggttctttcttactccgtttccagatttctcatggtgttccttcactragactctctttggcttggttaaattcatgttattaatttgtggtcatgcactaagactgagctaaaaatcacctgggataagccatctctaatactctaaactggattaatctaactggtctcatcttcttgccagccccagaacctaggcatacttgtagtatggcattataatttatttttctatttacagcacaccaagaatagagtaataaagtaaaggctgattaaattaaatatctaacgcttttaaaacattaatttgtattatctattataggatgtttccaatagatcaatattctcaccagactacagattactttatatgtgtatataacttattgatataatttacaatcaaatatataaatactattaaaatgatt

SEQ ID NO: 656288 - DNA, 603 bp, Homo sapiens
taatagattggatcaaatttaatttatactaattaatcttagtactctaagatgaaataaaacctcaagatgtacagaaattactccgaacagttaaactttggtaatggttaatattctaaaatatcctctcactctttttattagaggaaagtgaaaacaaatgcctttctcatttgtcttattcctttgtaagtattctctggaagtaaagtgtctattggcaaaaagmtcagtggcaaataatttttaaaattaaatactttattaattattacagcagaattagaaaatttgttatatacaactttcaatatatattatgcccatatgatatctaacataatattaaatatttgatttgaacaattaagtcaagtgtatcatagtgcaaacagcaccaacatttttaaaagtaaatattaagccaatcaaaatatttgttattcattatagccacagttattaaattgaaccaaattgggttaattattaacacacaccttggtgaaatctagtgtagcaatattaatttaccttctttaactagatagggaaaaagccacgcaggcccagatctctggttgttttcatgtttgttac

SEQ ID NO: 656289 - DNA, 556 bp, Homo sapiens
cagcctgggtgacagagcaagactccatctctacaaaaaataaaaataaaaaggcctgcttataatgactaacatattgaaagagtatgattattttacaataggtagattatattacctatatgtaatacagccttccaaggtcaactcctcccccaactctatgaaaaccaggtaaccattgagcaatttgtcactagtaaatgcctaactacatatcatataattatctcctgaaatcagttktcttacaactttaaatataaaggaacactgtctatggattctgtattaaagtcactcactaggatgctaatggcttcattggttcatttttgttattcaattatttatttaatccctaccatgtcccggtcaagataagagatgcagtgaatatgaaagacacagagtcattcctcatagatcccattgacagagaagggagaccatcttcaaagctatattctttctgatgatttagcttccaatgtcctaaaaattgattattccaaagctagtgtatttctgtttgaaataatgtatcttgtgaatg

SEQ ID NO: 656290 - DNA, 532 bp, Homo sapiens
agaaatttgtgaattccatatatggcagaaggacagaaagcaattctattaaatatgaaaatgccagtagcaaaacttatagaattcactctgctgttcagcacagatagaagttgggtcaaatataaattacatggtttgaatatatgtctcccmcaaatctcatgttaaaatgtaatccccggtgttgaaagtggggcctggtgaaaggtgttttgctcatgggattgatctgtcatgtcttggtgctgtccttgcaatagtgagtgagttatctcacaagatctggttgttgtaaagtgtagtgcctccctccctactctgtctcatgctcctactcttaccatataatgtgcctgatctctctttgccttctgccatgattggaagcttcctgaggcctccctataatcagatgccactatgctttctgtacagcctgcagaaccatgagccaaatgaatctctcttcttataaatgactcagtctcaggtatttatatagccatgcaagaatggcctaatacagaaa

SEQ ID NO: 656291 - DNA, 532 bp, Homo sapiens
agaaatttgtgaattccatatatggcagaaggacagaaagcaattctattaaatatgaaaatgccagtagcaaaacttatagaattcactctgctgttcagcacagatagaagttgggtcaaatataaattacatggtttgaatatatgtctcccccaaatctcatgttaaaatgtaatccccggtgttgaaagtggggcctggtgaaaggtgttttgctcatgggattgatctgtcatgtcttggtgctgtcctygcaatagtgagtgagttatctcacaagatctggttgttgtaaagtgtagtgcctccctccctactctgtctcatgctcctactcttaccatataatgtgcctgatctctctttgccttctgccatgattggaagcttcctgaggcctccctataatcagatgccactatgctttctgtacagcctgcagaaccatgagccaaatgaatctctcttcttataaatgactcagtctcaggtatttatatagccatgcaagaatggcctaatacagaaa

SEQ ID NO: 656292 - DNA, 562 bp, Homo sapiens
gctccagccatggctaaaagggaccaaggtacagctcagaccacggatttagagggtgcaagccccaagcctgggcagcttccacatggttttgagcctgtgggggcacagaaatcaagaatttagagttgggaacctccccctagatttcagaggatgtatggaaatgcctggatgtccaggcggaagtttgctgcaggggcgaggtcctcatagagaacctctgctagcacagtgtggaaggggaatgtggagtaagagcccccacacagaggccccactgggtcactgcctagtggagctgtgagaagagggccactgtcctccagtcctcctcaaccccagaatggtcaatccaccgatagcttgcaygctgtgcctggaaaagccgcatatgctcaatgccagcctgtaaaagcagccaggagggggggctgtaccctgcaaagccacaggggcagagctgcctatgacgatgggaacccatctcttgcatcagcattacctggatgtgggagatggagtgaaaggagttcattttggagctttaaaattttattgc

SEQ ID NO: 656293 - DNA, 581 bp, Homo sapiens
tctctctgtaacttcatgagttgtctatcactaattgctagaaagaattcaccaatgtaatttygaactgctagtgaatttgccattatcaaaacttgattttgattatctgccattttttgaacttaagcaatttaagcggcctaagtgtcttattttgaaaaacaatttaacagtaataaaagtatgagattgctaagggctcttccattcagaaggctaaataattctcacagagatatgtattggcatagttttatgatgtaatttaaatcaaaggtgactgcataaatggagcataggtttttacatacacagacgagtttgatattgcatccacagttgtaagtacattgtaaggcttattatgagtgtcccctatgctctgtcttgtacttgcaatcttagaattgtctacaggactgattaaattcaatatggattaaaaaccacacggtggattggacttctgagaaattcacagttcagactggcaaatttgcaacatgaaatgcaacatgatatgttgcataaatatacacttgagtgggtagaagaggaaagacgagataaaatgcatg

SEQ ID NO: 656294 - DNA, 468 bp, Homo sapiens
tcccacaacagtgtgagatttacctctaggagttcaaccaggtttccagagtaaatattggagaaaaatctcctggtgctaccggcagggggagggataaatgagcgatactgaagtacaccaaaacacwctgttattaggcctgccctcaggagaaactagtctacctcatcctaacctgttggggtattatcagagtctaattgatttggaggaagggaaagacccaactccagcccactctagctatcttgcccttgctgagaaagatgaaaaaaacaaaacaaaatggggaaacacgtgtgaagttcatagttctgaggctcaggctcactacaagactgagactataggattatgaaatgcttccactcccccgacaccttactgtcacagtactaagagcctacttatagcatttccttttacccagtacatcatgtctcacaatcaagaaaaattacgagg

SEQ ID NO: 656295 - DNA, 549 bp, Homo sapiens
tactgtgggaaagagaaaacagccaaaatgttcatgtggctcttaaatattaattakaattttgatattactgagacatggtaatgttttgcaaatgaaaggggtagacacaagaaatattaagtaatttgcttcaagtctcaatactattttatcaccagaactagaagtacaatcttttcactcattaacttaaaaattatcttttgtgaaatttgcattttattattttcagaatcattgtgagttcctttatcctttgaatttttcattcttgatttttaaatgcatacttcattgagcagaatagtttctaatactagtcttgagaatcatatttagggggtatattttctgaacatttacataattttcttgtaccttttacttgaatagctctgtacatatttctttcagcttctgtctttcaaaattctgtagataccacttcataaatttatgacttttaatcattctgaatgtgattcctctgtaggcattttgtatttactaactgaatgcttgaaagattaatttttttctttttcc

SEQ ID NO: 656296 - DNA, 674 bp, Homo sapiens
ataatataatacataatatataattttatataacaatgtatacattttaataatttctatctaataatatacatatatagtgcctatgagaaaattcaccaaggtagctgtattagtctgttctcacgctgctaatgaagacatacctaagactgggtaatttataaaggaaaaacgtttaattcactcacaattcagcatggctggggaggcctcaggaaacaacartcatggcggaagaaggacaaacacatccttcttcacataatggctgcaagaagaagtgccaaacgaagggaggaaaagccacttataaaaccaacggatctcgtgagaactcactcactatcaggagaacagcatgagcatgagagtaaccacgcccatgatttaattacctcccacctggtcctctcacaacacgtggtgattatgggaactacaatacaagataaaattcgggtggggacacagcaaaaccatatcagtagctcatataatgggccataaaagaaacctcaatcaattttgtaaaattgaaatcatagatagtattttgtctgactctaatacaatagaactagagaccaatattagaaagacaacagaactatctctggaaatttgaaaattacacagtatacttctaaattatttataagtcaatagtaaat

SEQ ID NO: 656297 - DNA, 566 bp, Homo sapiens
actttctcaactatataaacagcatctacaaaagaaaacctatagattatgttatacttaacagtgaataactgaatgtttatgatataacattggaaataagggaagggtattagttttctaccactgctaaagtgaagtgccacagattttgtggcttagaacaatttatatttattatcttactgttttggtgttccaaagtatgacatcagtttcgctgggctaaaatcaaggggttagcagcagtaactcattctgcaaactccagaaaacaatctgttccatgcttcttccaacttctagaggtcacagkaatctcttttcctacatcttcatagccagcaatgcttagctgagtctttctcacactggatcaccctgacattccttttctatagtaaaatctctttctgtctctctgttataaagacatttatgattaccttaggcatgcagaataatctagaataatctccccatctcaacatcctcaaattaatcacatgtgaaaacatctttgtaccatgtaaggtgacatattcacaggttccaggggttagata

SEQ ID NO: 656298 - DNA, 637 bp, Homo sapiens
acctgttgctaaaagggattcwgtttaaatactaatgcctggaattttattcagaatcatgtgggaagtgaaaaaaacgactaggtgtgtaaatagtatgagactggctgtggcttaaatgctgttgcaacttagtggtaggttcataggtgcttattattttattttaaatgtgaatttatactagcttatcatacagtaaaaaaaataacaaaatatataacaaaagaagaagccatgaaagacaggttgaatagaagtcacatattagaagaagaggttgttggcataaataaagctagaatttaaaagagaaaatgagaaatttacatttaaaaggcaagaagatacgtaatcaaatatcaattggtaaatgtcttatgtaaaatatacgatggtataaaattcatgttttgtttcagtcatgggataactcacagtctatagagtctatagtttctcatagacgagaaattaatctagttacagagcaagaaaaatacatagatagacagataataagattacaatttcttctctacataatgtcattttatttgtttccttacacaatctttttgtttttttcagttacttttctcaggttaaatacatacctcttttttttccgtctata

SEQ ID NO: 656299 - DNA, 438 bp, Homo sapiens
tatgtaccaaaaaaaaaaaaaaagactatttgcaactcaataactgacaacaaagaaagaaaatrtagacacaaaacaaaacaaaacaaaaaggcaagaagacactattcaatttattgcaagttaagatatatctatagaattaaatgattttaaataagctaatatattcttaggctatactatgagggtaatggagaaaatgaaaatgatagcaagtttatgaccactcttacttatgttacaaaagctaagtctgaaatattactcttaattctcagctccacttaaagattagaaaagtgttacatcatctaacgaaaagacacaatggtaaattgctaaccataacaatattaaaatttataatgaaaaaactattaacctcagttaaacagttttcattttacatatttcctgtgtatagttaatattttt

SEQ ID NO: 656300 - DNA, 618 bp, Homo sapiens
attttgccatataacctggcatggttgtaggagtgatattctatcatattcacatgcacacacacacacaccccatataaaatatatatatatatatataaaacaataggtaaaaaattataatctcaatgttaaataagtacttccaactggtttggaaacacttattttaactaatattaaataatataatacatgtgaaaagggttctatatgcactgctagaattgatttcttatttttttacccatgtctaagatttaggtaagcatgagaatgccagctaattcattattccacaggtatataaacatgctgaaaatccctttcgtatttttcttccaactggatgtgtggagattttggttgaaactattcaagcatacctacggttcacgattgtattttaactctatatatatatakagagagagttatatatatatatatagttatataggcatattttgattgagaaaagaaaagccaagacctagaaaaaactcttgttgttcagtgttatctaaaaataatggtggataagatgccagagtgaaataaaaatttggagtcagaggaagaaaagaaaagaagaaaaacactgaatatggaagatga

SEQ ID NO: 656301 - DNA, 438 bp, Homo sapiens
tatgtaccaaaaaaaaaaaaaaagactatttgcaactcaataactgacaacaaagaaagaaaatatagacacaaaacaaaacaaaacaaaaaggcaagaagacactattcaatttattgcaagytaagatatatctatagaattaaatgattttaaataagctaatatattcttaggctatactatgagggtaatggagaaaatgaaaatgatagcaagtttatgaccactcttacttatgttacaaaagctaagtctgaaatattactcttaattctcagctccacttaaagattagaaaagtgttacatcatctaacgaaaagacacaatggtaaattgctaaccataacaatattaaaatttataatgaaaaaactattaacctcagttaaacagttttcattttacatatttcctgtgtatagttaatattttt

SEQ ID NO: 656302 - DNA, 659 bp, Homo sapiens
tgcaatactataataattccaaattatttttagttaaaattgtttacaattatcatgaaaataaatgcttttataaatcaggttttttatattttaaatcatgttatttgattagattcatagcagtagaatgtctacataaatgagatgaacaacttgcggtgcatatagatagggtcttacacttatttaatcacccatattaatatatcatgaactttcttcgagtattattatttctgagcatttataatttaagagactcaaaataaacatttgtatttttaaaatttaccagtgagttttaatgtgctccccaacatgtactgwaacttttcattagctaataaccctatagtcatatataatcataattattaacattagctatttatattacctttatccaaacttgttttttagttgtttgttcaaactttacccatctattattgagattataatgcttcaaatcggtttataagaatgctttgtttagaatactttatatatatttcaatttattattgtcttcttagtattttcattttaagtttgatattgttataagggcacagtttggaaaactttctgttcgttaaaatctttataagtatcatttgatgcatctggcagtaagtacaatattagaaaatctc

SEQ ID NO: 656303 - DNA, 588 bp, Homo sapiens
tgtggctcaatttcctacatgagttaattacccacattttgatttttctcttatacgacttaataccgttcgaatttcttagcatagggtcttgcatatgataaactcttagatattcttaacaattaaataataactccgtggtcttaaaactaactttggtcaggtttaaatctaaacagaactcaatttgagatgctgcttattccataagaacacaagccgcctggccaacatggtgaaaccccgttcctactaaaaatacaaaaattagccaggcatggtggtgggtgcctgtagttccagctacttgggaggctgaggcgggagaatcacttgaacctgggaggcggaggttgcagtgagccaagatcgcrccattgcaccctagcctgggcaacagagcgagactctgtctcaaaaaaaaaaaaaaatgcaagccaatgctattaatgcactttgttatcctggaatttggactaaaaactaggcaattttaatttagggagtccaattttaaactcataacttactgtaaaattcagttcttgaggttccttgatgacacatctggaaaaaatggaattc

SEQ ID NO: 656304 - DNA, 609 bp, Homo sapiens
aatcttctttgactttattccctgccttctagacatactaagacaatgttgggccccaaaggccccaagaagctctgtcccatgacgatgctgggtgcagccttcatgcattggagttaggtacctgcatctctctctggctgctgttgcactctaatggctgccccagtctggggtctctggggtggccctgcctccatggctccactcagcattgccctaatggggactctgtgcagcaatcctgcctttgtggtacttctctctctggggcccaaggctctctgaggcatccttcgaaatccagatggagtcagctgtacttctacagctcaggcattctatgtgcctgcacagttaacaccatgtggccactgccaaagtttaccccagtaccctttggcacagtggcctgagccacacttgggcctggtcaaaacacagctagaaaggacaaagagcactgtaccagaattcaggaagcagagatgtgtggcagcactgggcagtgaaccagtgaaccccaaggtcccaggggtgccctgggtccctccttgaaactgttttgtcctcargctcctgacactctggtcccgtgatgaaagtggc

SEQ ID NO: 656305 - DNA, 590 bp, Homo sapiens
atctaatagtaataaaacataatttctcaaaatatagcattggtataagacattggataaagtctgtcatgttctgaatagaaataaataggctttttaccctagttttctaaaccttaaagagatgtctgtatgcagtagaaatactaccaaatacacaaatactttctgatattaattccattttagagaaatgaaccattcttaaaatttcatgatggggacttttgaaagaagcatggaagagtgacagaatgccttacttatgaacgtaaatctaacagttcattagcaaaatagaataaatacctgcgttcttagattcacttagtgtgaagctactcagagaacagataaaaccaaagacatatttgatggtgcaaacatcccaattgatgcttgccttgtgctgtccacgtttaaaaaatttattaaagtgaaatataattcacataccacaaaattcttccatttttgcggtttctagtrtattcatgaaattgtgcaatcatcaccacagtctaattttagaatgttttcattgcctccaaaaacacactgtaccctctcgggaggtggccagtcattcc

SEQ ID NO: 656306 - DNA, 367 bp, Homo sapiens
tagagctctcagtaaaaactttcagacatagtcaattaagccctgcacaataaggaaacattmaatctgctcaatagaccagactcccccaaaataaaacaatgatcaccacccactacaatatggtctgaacaatctcctgtctccaagtttagttaagtctgtcctgaggatgtacagtagggaacgaccatttttccgtgttcacaatttgtctttggcggatagtatcagcaccactgtgagtgacataggcagcatcttatggtgcaatttcaagggcagagggcaggtgtcccctgcaccacattccctccccacagctaccgcccctaccccagggacattctacacaaacacaccagca

SEQ ID NO: 656307 - DNA, 547 bp, Homo sapiens
atgtatatcctaaatagacaaaaataatccttgtactacaaaataacatttcattttcctcaatagttttcttagagctctcagtaaaaactttcagacatagtcaattaagccctgcacaataaggaaacattcaatctgctcaatagaccagactcccccaaaataaaacaatgatcaccacccactacaatatggtctgaacaatctcctgtctccaagtttagttaagtctgtcctgaggatgtacagtagggaacgaccatttttccgtgttcacaatttgtctttggcggatagtatcagcaccactgtgagtgacataggcagcatcttatggtgcaatttcaagggcagagggcaggtgtcccctgcaccacattccctccccacagctaccgcccctaccccagggacattctacacaaacacaccagcatttggcttaagggatccttgttggaatgcaaacggctccgattytgagtagaatttcagaagcctttttgagtcgttactcggggaaggggaaaagatgagggatggg

SEQ ID NO: 656308 - DNA, 461 bp, Homo sapiens
ttctgacagggaaatgaacttgagcacaatttaaaatgtcatcttctgatgggttgatgggtgcrgcaaaccaccatggcacgtgtatacctatgtaacaaacctgcacattctgcacatgtgccccagaacttaaagtataacaataaaaaataaaataaaaataaaatgtcatcttcttattccaatcacagatccagttctccctctatcaaatctgcatttccagttagaggctgaagttgcaaagaacagaacaataaggtctcgcctgttattcttcttcctcaggcatctttagtgcaagctctttaatcacctctaaggaacactgagtgatttcaggaaagtaactctaccaagttccagttttggtcaggagtattccccggttcttgtgacactttagaacaaagttattttttgaagtaaatatttaactcttccagacccaagaggat

SEQ ID NO: 656309 - DNA, 387 bp, Homo sapiens
agtttattatagatttaaatgaacattaatttaatattcattcattcatacactrcagccaaactcccaatattgataactaatattattgcttttgaaatctaaaaacaaaaatctgcatttactcaatagtttaccaagaattactaagacttaggtctaaaacttaccttcataatttctcgataggggtggtctaggattgcaagatgacactcatcaaacaccaaaaggttaatgtctgacagtgataagtaaccatttttcaaaacattcaaggcgacatagcaagtcataatgagaacctaaaataaaatcaacatcagtaaacaaacatagcattcactgcctggatatacttacataaaatcagatcatagagccatt

SEQ ID NO: 656310 - DNA, 618 bp, Homo sapiens
atcatgtgggggacagctagagacaaggtgatagagtgcaatgttaaatccatgatagttatggggggctaccttatattaatacgggatgtcctctgagcagtagttgaatgggaccctgaatgataggagccaaccatgccaacacatttccattaaagatgcgtgttttctggatgccagctctgcaccaaacaccttccctgtatcctttcacttaatcctcatgaccaccctctggattccagttattactatcatcacttgtagagtgcacagaaacaaagcattttgtccaaggtcacacagtcaagtgacagagaaggcttcacacacacgaagtccgaccccagagcctcccctgaactctgtactaggatgagcttagtgctcagtgaaaccagcaagaycctcgtgactaaagcacactgagacgactcagccgtggaggggccggatcacacaggctttgtaggccatgggaggagtttagttctattttgatttctattttaactattctggctacaatgtggaaaacagatcagagaggggaaaagggtggaagcaggaagacccgttaggaggctgtgacacagtccaggtaaaagcaatggt

SEQ ID NO: 656311 - DNA, 607 bp, Homo sapiens
tgagcatatcttcctatctcccaatatgtcagtgcttatgttttcatttttcttttygttttttattttttttttctattttgtagagctggggccaccccatgtttcccaggctggtctcgaactcctgggctcaagtgatcctcccaccgtggcctcccaaagtgctgtagtcccaaaagattacccaaataccactgcattacaactgcctacagtactcagtacagtaacatgctgtattgaatactgcagattacaggtgtgagccactgcaaccagccaaatttgtgttttctaaggctacctcagacttcatttaatttttaatttcattctataccgccacctagtaggatgcaaagaccacgcacaccaacatgtcctgctgtgtcaccctctagagatgatttccaattcagactcacctcattcctagaaatgccataatcaaattactaagttgataatcctttaaaattcaatgtcacccaactattacaaaattattgctaagttatccacattatttccattgataattccatacatacattagaaaggtaatatgtcaagtataatagcaacttattttatactggtaatt

SEQ ID NO: 656312 - DNA, 556 bp, Homo sapiens
actgttccacctcagatcatcaagtattagagtctcataaggggcgtgcaacccagatccctcgcatgcgcagttcacaatagggttcacgctcctatgagaatctaatgcccctgctgatctgacaggaggtggagctcaggtagtgtgatggttaatgctgaatgtcaacttgattgtgtcgaaggatgcaaagtattgatcctgggtgtgtctgtgagggtgttgccaaatgagattaacatttgagtcagtgggcygggaaaggcagacccacccttaatctgggtaggcaccatctattcagctgccagcatggccagaatataaaagcaggcagaaaaacatgaaaaggctagactggcttagcctcccagcttatatctttctcccatgatggatgcttcctgcccccaaacatcggactccaagttcttgagctttgggactcagactggcttccttgcttctcagcttgcagacagcctattgtgggaccttgtgatcgtgtgttaatacttcttaaactcatatatatatatatatatgtatatcc

SEQ ID NO: 656313 - DNA, 556 bp, Homo sapiens
actgttccacctcagatcatcaagtattagagtctcataaggggcgtgcaacccagatccctcgcatgcgcagttcacaatagggttcacgctcctatgagaatctaatgcccctgctgatctgacaggaggtggagctcaggtagtgtgatggttaatgctgaatgtcaacttgattgtgtcgaaggatgcaaagtattgatcctgggtgtgtctgtgagggtgttgccaaatgagattaacatttgagtcagtgggccgggaaaggcagacccacccttaatctgggtaggcaccatctattcagctgccagcatggccagaatataaaagcaggcagaaaaacatgaaaaggctagactggcttagcctcccagcttatatctttctcscatgatggatgcttcctgcccccaaacatcggactccaagttcttgagctttgggactcagactggcttccttgcttctcagcttgcagacagcctattgtgggaccttgtgatcgtgtgttaatacttcttaaactcatatatatatatatatatgtatatcc

SEQ ID NO: 656314 - DNA, 547 bp, Homo sapiens
tgtactgctttgatttttactttgtcctaattatttggtcagactattctcttaatctttttaccattttataatagctcttaagaatgttgaatccacttaagagaaaaagaacatgaagataaaggttggrtacaatacgggaagaaaataatgaaggaatatatatttaattccatcaaagagacatatatcaatttccaggtttagggaagagaagtgaaaatagactaataaaaactaaatttgattaacagggtttcactgttgtgcacagagctcttgcttaccaatgggtgttgttccacgcattgctttgtaagctatttggaacttgaaagacactttcctataaaagttggggctaaaatccagagcacaaaagcccatttaatctgaatttcatgtatatctgaatttcaaggtgaagagtcctataaagactaatgaaatatataattgattcattcaacagatccgtattaagcacccattgtgctggttatggtgatagatgcttttccatgttagatgctcttagaattcc

SEQ ID NO: 656315 - DNA, 439 bp, Homo sapiens
ggctttgccttcccttccagactccactgaaatgaaaggcttcctgggccttaggggagactgtgacatttgcccctttcccgtgcagaaggaccacttatttggaagcaagagttacaatctaagggaaagtttggacgggcatgttacaatggggaggggtagtgctccttttgttatgttagcttgggatctatagacaaacacatgcctatcagtgttgaaggtgaggttctctggctcagtagggttaattgcacaaacgccagcctctttccctgtgccagtggcctgccttgggtcagccgctgccaggactttaccagtcactagctatcccttagtgatgcctcgttaaatgcttcatcatccaaggactccaaggrctcagattcacagctctaccattcaggcttcagctcatatataaaccagtaat

SEQ ID NO: 656316 - DNA, 556 bp, Homo sapiens
agtagcaaagtcatggaatcaacctaaatgcccatcaatggtagacttgataaagaaaatgtggtacatatatgctgtggaatactacatagccatagaaaagaatgagattatgtcctttgcagcaacatggatggagctggaggccattatcctaagtaaactaacacagggacagaaaatcaaataacgcctgttcttacttataagtgagagctaaacattgagagcacagggacacaaagaagggaacaacagacaccagggcctacttgaggatggagaatgggaggagggtaagatytgaaaaaccacctattggatactatgcctattacctgggtgatgaagtaatctatacaccaacccctgtgacatgccaatttagctatataaaaaacctgcacatatatccctgaacttaaaagttaaaaaaaaaagttttgccaggtaaatatttttgttttgtagtttttctcccagtacttatatcatcccattgtcttctgtcctgcaaggtttctgctgggaaattatctgatagtctgtttgggcg

SEQ ID NO: 656317 - DNA, 556 bp, Homo sapiens
agtagcaaagtcatggaatcaacctaaatgcccatcaatggtagacttgataaagaaaatgtggtacatatatgctgtggaatactacatagccatagaaaagaatgagattatgtcctttgcagcaacatggatggagctggaggccattatcctaagtaaactaacacagggacagaaaatcaaataacgcctgttcttacttataagtgagagctaaacattgagagcacagggacacaaagaagggaacaacagacaccagggcctacttgaggatggagaatgggaggagggtaagatttgaaaaaccacctattggatactatgcctattacctgggtgatgaagtaatctatacaccaacccctgtgacatgccaatttagctatataaaaaacytgcacatatatccctgaacttaaaagttaaaaaaaaaagttttgccaggtaaatatttttgttttgtagtttttctcccagtacttatatcatcccattgtcttctgtcctgcaaggtttctgctgggaaattatctgatagtctgtttgggcg

SEQ ID NO: 656318 - DNA, 515 bp, Homo sapiens
ctgagaccatcttgctcattgctgggcagaaaaactgaaaattctgtaatggctatagggagctctattagggagagtttttccagagaaacagtaccaacattgtgtgtgtgtgtgtgtttgtgtgtgtgtgtgtggttgtgtgtagagagagtttaaggaattagcttacatgatcatggaagctggcaagtgttaaatctgcaagttgagctgatagactggagatccagggaacagccaattttgcgcttgcagtctgaagactgtctgctgcacaattccttcttgtttgtgggaggtcagtttttgtaccattaaggccttcagtgaaytggatgaggcccacctacattatggagggcaatctgctttgcatagagtacactgatttaattattaatctcatctacaataatattctcacagaaacatccagactaacatttgaccaaatatctgggcaccatggcttagccacactgatgcataaaattaatcatcatagaatctta

SEQ ID NO: 656319 - DNA, 499 bp, Homo sapiens
ggaggccagtctcaattgagttcaaatttatttgatataaatatttcttgagtgacttctatgtgctagatatggctgctagatgctacaatttgtgatatgtctatatcatagttatgtttgaaacaaaatgaattatatgtgtattggctaccaacagtagtaacaagtccaatggaggtggctaaggggagctccccaagatcctgctttagaatgttatcttcagagaacactgacaacttaccaagtgtaattctatcatttgcaggtgaaaaaatggaagtccaggatattaaacatattttttgagttcataaatagtacagcggtggaackggctcatggtgcctgatacctattttagtgtcattccactgtctctcctaatctcttaatgaaaaaaaaataaaagtaattataaggtaaacagacccctgattattattgttatttattaagttgtttaaccagctaaacaactttttttaatatagaa

SEQ ID NO: 656320 - DNA, 619 bp, Homo sapiens
tgatggcctattctatggtagtcagttactctgcttggtgctgacaacatggcaaagacaacaattaacctactctgtgatctcatagaaagtcttgtttagtgagacagatgggtattaaaagaaataatgttataggtcatcaataagctacaattatagtaagtgttaataagaaataaggggtgttatgggagaatatttcagcgacatcatttagtgtggattatggcggggggaaaacattctgaaaagtgaagtgtaacctgggacctgaaaggagatggatgggcactgtcagggtcagggagcctgaagggagaagagctttcttagcctgtgagaggagcctgagcaactaaaaggaggaggtgagatgccccagcctggagagcaaatagcacttaaagacaagatggaaccaaccagggatggccttctgagtcytgtgaattttgaactttgccataagtgcaatgggaagccattttaaacactgaatgacgtgatcaaatatgcaccttagaaagatcatgaagttcattttgtggaaatgaggtaggagtgaatgcagtggggtcatttaagagactgttgaagtggttcagttaggaaataa

SEQ ID NO: 656321 - DNA, 553 bp, Homo sapiens
ataatttctgcttccctgaaatttgaccaatagtgtagtgaaagtattgtcaaagcatttgtatagattataaaatagtctatgttaagtgcacaaaacttagattctgcaggtaaactgccactttctggaaattataggtaactgatgaagcagacatctatgtcttacccatatgtgatattcaccagccaaacaaataaatataacatgtcaggtgatgaaaagtgccatgtagaaaaataaagcaggataaggggatacaaattaattagatgaatgctaccttaatagggtggtcctatattttataggatgwtctctctgagaaggcagcatgtaaacagagacctgaatgaagtgaagatgagagctgtgcaaatatttgagggaagaacattctgggtatagggaaaaataactggtcatgccctggggtggggtgaggagtgttttggtattcgattgattcactttgcccgtgcttattagcatctggtcatcggtaataccatccagtggttactctggaatttctgctatcctagaaatt

SEQ ID NO: 656322 - DNA, 553 bp, Homo sapiens
ataatttctgcttccctgaaatttgaccaatagtgtagtgaaagtattgtcaaagcatttgtatagattataaaatagtctatgttaagtgcacaaaacttagattctgcaggtaaactgccactttctggaaattataggtaactgatgaagcagacatctatgtcttacccatatgtgatattcaccagccaaacaaataaatataacatgtcaggtgatgaaaagtgccatgtagaaaaataaagcaggataaggggatacaaattaattagatgaatgctaccttaatagggtggtcctatattttataggatgatctctctgagaaggcagcatgtaaacagagacctgaatgaagtgaagatgagagctgtgcaaatatttgagggaagaacattctgggtatagggaaaaataactggwcatgccctggggtggggtgaggagtgttttggtattcgattgattcactttgcccgtgcttattagcatctggtcatcggtaataccatccagtggttactctggaatttctgctatcctagaaatt

SEQ ID NO: 656323 - DNA, 567 bp, Homo sapiens
gtcacttgcaaattgttaaaaaaaaaacaataaaatatttctctaattacatttttctattggatcaaatgatacatattaattgctaatattaaactattcttgaattcttgaggtaaaccttatttggttatgtgtggtgattctccaagtttgctacactttgctgtcttcattaaaaaattaggtagcttttcttttatatgccttatagtaaattattacatgtaatgtagtatctgagccctcaaagtttggagtagctctttgtccctgtctttttgtttgcttagcaacctgcccttttccttaagtatagcatggatcacaatgagtggggggaatgtctcccatgatccatacaattgtcatatcaaagtatatttcaaactgttgcaattacccattttcttaatctgtttatgttkctataactaaatacttgagactgagtaatttataaagaaaagacatttatttctcacagttctggaggttgggatatccaagatcaaggcactggtatctggtgtctggtgtctggtgaaggccttcttgctgcatcct

SEQ ID NO: 656324 - DNA, 539 bp, Homo sapiens
aacttgatgaatgcacagctattgctaaaatagcaattatttttgtatatatgcaacctgctttattttattttttaattttattttaggttcaggggtacatgtacrggtttgttatataggtaacttgcatgtcacgggagtttggtgtacatactgtaatatacaaacggcaaataaacacatgaaaagatgctcaacatcatgtcattaaagcaataaattaaaactacaatgaattgccactacacacccattaaaatggctaaaatccaaaagactgacaataataaatgctggcaaggatgcagaatagcaaactctcaatcattgttggtgggaatgcaaaatgatacagccactctggaagacagtgtggcagtttcttataaaactaagtataaaacttaaccatatagccagcaatcatatttctaagtatttacccaggtgattttaaaacatgtccacacaaaaatctatatacaaacgtctataccagttttattcatagtcactaaaaactgaaagcaactaaa

SEQ ID NO: 656325 - DNA, 600 bp, Homo sapiens
atatcccactcatgatttaaaatatagatatatgtgtatatatttgtgaaaagaaaagacttcaggtatatacaccaaactgttaacagtaacagttaaaaggcagtaatacctgagtgataatatttcactgcatttttttatttttctgcttaccagtttacctttttagtaaaaaaatacatatatatatataaataaaacatatacacacaaatatatatacacatagcctacacacatacttacatataattatttctawatcttttataaaaagataagcttggttctacttttagagcctacgagttgtaagagaatcctagccattgctcacctttcctttgtgctgaattcggtgaagccgcaggttgggctcaggaatggctacagagtctccaatgagcactccccagctctgcactatattgtacaccatcactgcatagcaaggtccatctgaatctaccaggccaaatgtactaccaagtaaagacagattaggagagaggaaaacaaaaaggtatgtgggtaggaaagaagagcagaaacagtggtttaaaaatactagcaaaatactggacttaaagtcagtga

SEQ ID NO: 656326 - DNA, 532 bp, Homo sapiens
aaaataaaatactaacaaaataaacaaatgctttttctcagttactcagaaaacctatgagaggtaccatcttccactttatatatctgagtcttcatttttctgaaactcatcagtcactttgctaagaacttaggacaaagcacactgaagccattcaacaaatattaatgatgaactagaccaacatgttacagttgtaacattattcctggtctatcaatttaactatcatactcttaaccaaagcctctaaccatcactgtctgtgtagtttaactccacaaactttcactgaatattacatatgtgccaagcattgtgtttagcaataagataccaatccagctatgaatgacctatagtctagcaggagtcagacaatgaagtcatcacttacagcacagtgtgatgggtgctagaatarcttttcccttgtgctgaattcaatgaagccacagattgggctgtgggagcccagaggacaaatatctaaatcaaaattggaaagcagggaagatttcctggaaga

SEQ ID NO: 656327 - DNA, 435 bp, Homo sapiens
cactgacaatctcctcaactgccagggaaagaacaggaagtgagagcaattagttcaaaagggtaaaaygggggaaatccaagagaaactcacaaggggactttctcctctgtggtgaggctaaataccacctttcccaggatgacggcaccgctgttcaccccaggctgaagcgtactcagtggcttgagctccagggtcactttctgcccagaggctgactgatagtgcccatcactgcaagggcctagatgggctgggcgcaagcttcccagcatgctctgcagctttttggtcttcacctttccctgcaaagaaggggaaataggtaagaagctggaaactagtcgccttccttgagattctaatccttccctcccacccacttctatagggtctctacctcgtaaacctatttattcttattttattgac

SEQ ID NO: 656328 - DNA, 558 bp, Homo sapiens
attttcctgtgctgcaacaaacagcctgaagagctggtaacaccttacatccttcttcctagccaagatgatcacaaccccaaagatggaatcatttcaaagaagctaatttccaaactctaaaatagttaagttgtatatattggctcacttgacctttatatttacttaacatttcagaagtcttctaaaagatccccccattctctacctattcttccacctccacagccccttctcctttccctccagtgactacaccagatactgaagccaaaccgagctagctatttatagaaatagcatggctttcctctcgcagtctgtacccaatcttgtccctatgcaaactcagttatcctcacaagctaagacataggtgtcttatttatttgaccctcagatgactacaccccaaaggtcttaccgtcgccctgttcagatgaaggtcaggattgctagamgcttttctgtcaactttctcctataatgggatgaaaagattatcagtggatcctgtctcaatgttaaggactgacatgcccaacatgtcctacg

SEQ ID NO: 656329 - DNA, 569 bp, Homo sapiens
aaattttaaaacataataatatgttagagctgaatcatagggggttttatttgccaattttagatctaatgctgtcaacagagaaaaaaaatcaaagctgctgaaaggaggaagtaaaattaactaagtctttgagataaaacttcttccatakttggagatagaaggacagcaaatgagttgtgctgaaagacctgcacctgcatcagggatgagaaaggcttagagcccaacttcagatgcaactgctggggaagagctagtgccctgctctggcctctcctgggcctggcaagtgtgccctgagaagcaactgcttgggagtcacagacctcaaccccaagcaagaaaggaaaaggtctataagaaaatcatggtggtcctgagaggagatggattcctgctgtcattacactgccctctatgcctgagatctcatcacaaatccagccatctcttttttctcaaaaaaatcagaggtaactctgtccccaaaacccataactgacaccactcactagaggcccagtgaacagctttctgcatcacagccataacaccctgtgtta

SEQ ID NO: 656330 - DNA, 561 bp, Homo sapiens
tggtaaattgatcctcactgagcacaggaccagagctcactccctgagggctctgttcataatgcctccatcctccagcaaacaccaagagacttttctccctatttctgctccttcattctttgatggctaacatagaaaagrctacctctcctctccaggacaatcagacagtctcagagaaacttcaggtttgtgatccccttttgtccatgaaaggagatgatgcaatggacaaagtttccaggattggtaaagcctaggttgtaattcaagtcctaggctccttactcaaatccactgtttttctactatgcctgagttgcctaccccttctcataaagggaaaagctgttcttattttcaaggactttgcagaaagtaaataggtgtaatgatatgtagtcaaaatcaagtgaagcagatggatgtgtgctgctgagatcagaacaataatgcttccgatccacactgcctttttgagctagccttggggaaaaagtaaaacatcagagaaatgcttttgtctcatattatgtattatagcacaggagctggcta

SEQ ID NO: 656331 - DNA, 523 bp, Homo sapiens
ttcatttcctcaaatttcatctctccttcattttgaagttcaatgaagtaattggtaaatatctatcgatgtattgtctatctatatcctctataacagtgtagacaatcattttttaacaaatatttgagaaatacctattatcttcctcagactatgtggggcactggcgataaagagtgaacttgaagtacaagagcaaaaatcctgagtcctgaaagtacccggctgtttgtaaaaactgaaagaaggccagtgttatattgctgaagttttgaggaggaagggtgtacatgttatgtgtgtgcatgcatgtgtrtagagaggagacagtcagagaggcaaattccaatggctttggaaacataatttagctgaaagttggcccagaggtctgagttagttcagcagaacagactgattccagctttcacctctagaagtcccctctgtttgttttttgttttgttttgtttgttgttttggtttttgttttgggggttgtattgaggcagagtctcac

SEQ ID NO: 656332 - DNA, 630 bp, Homo sapiens
aagaaaaaggactttgcatttctagggtgggaaactgtgggaaaataaatattatggacaaactaatggaagatacagactaaagttggtaaaaattgttatatagattcctctggtrccatctccaggcggaaagggtttacagttgtctctggtaattttacctcgtcctccctggtagagaggagaggaaggctacccttgcaaagttatcctgtttctatgcaaataatagggggaagacagagagcttttcttgtatctgctttttctcaattgccttcagctggaaataatcttatgccaaagtggcatgtttaggggcagcagattctgctaccttaaaacttcctgggtccctgtgccaacttcaaaaagcaaaatgtggatctaaacatagaaggagggacacaaactttctttagtttgctcacttatgcgcttatttagaaagggctctaactaattccaaggcttgattacatgattgtttcacaaagatattctaattcatttaaaacaaatgaaaggcatcatgcagatattcagccttcaaaagccactctgccttgagatgttcctaagtggttactgggagatggaccacagctttagtctaatatcgcctac

SEQ ID NO: 656333 - DNA, 563 bp, Homo sapiens
acataatttcactcagatagtttcgtactttagaaaaaacctgagatacakcttcctcatcttagggcttgtgtaaatatactgttataaaactttaacgagttttatcacagttatatttagacatcatctcccttatttttcaattactgatttttattgcccttgttcggcacctgcaatgtaccaaacattgagccaggaaataaatttgagacaaaggtatataagacacattttcttccctcataggattcacagtcttgtgatcgagaaaattggaaggttttctttttgttaagtagcaaaagttcagtgagaggggaaggcctaattacagtggaagctcacgagaagctgcatgtatgtaagtatggaacttgtgtgaaagaggttgtaagcacagcacaggcattgtctttttgcaagtgcacctcaggttacagaatagaagtgcttctagaaattattttacaccatcgtataatcaaccactgctagtggttactactaaggtcccagagacaaagcaagtatgaccataaaatataatataggctggg

SEQ ID NO: 656334 - DNA, 628 bp, Homo sapiens
tcatatatatatgtatttcaattacatatatatgtaattatatatataattgaagtccaagtggataggcaaacaagagaatgagaaaggtgaaatatttgaggaaagaattaccaataacttttaaaacctgataaaagacaataagccacaggaaaaaaatacacggtgaaccacaagcagaataaacaacaatgaaaaagacctaaacacatcaacrtgtgacaataaaaattaaaaacagagaatcttagcagctgggatgagaggctgtcctttagtttaaagggaactgataaatttcttcataaaagaaacacagaagccagagaaaaatggaaaaacatctttaaattgatgaaagaagataatatcaacctaaatgtctatgtgagataaagtaaatcatttaagtaaagatgagataaagcatcttatgacaaaaatgagagaatctgttgcctaagaacttctaataaataaatattaatagcagttcttcaaataaaagaatcctggagaaaaacactaaattaaaggaaaaaataaagaagtagactggcaaataagttggcatatgtaaataagtatacactgaatattgactatacaagcaatagtatgatgt

SEQ ID NO: 656335 - DNA, 609 bp, Homo sapiens
ctctctgttttcctctctctgtccctttcattactcactttgcaccttcaggagaagtgacatttaaaaaaaaagaaaagataaaaataaaatcaatgtttttgtggactaagaactcacatagatttagtggtgaatatattaggaactgtttcttacaaatatgttggaaattatctgtgaaatttatttaccatgctttccctgtggctaattgtttttctgcaaggtttttgtttgtttgttgtttttaatgtcaatgaaagtagtctaagctcaaagaagcagctcggtcttgtgcattttgattttgggtcaaagtcygtgaatctgagttcaaaaacattgttgctccttctctgttccaagcataagtggctgctccctgcatcactgctttctcatcttgttgaggagagaggtttcttgctcggaaaggagaatgtatagaggacccatagtggggagccattcttttatgatatcttacaaaaatgaccatcgatgcaggtttagtttagttcttcataatcatcctagtttaaaaaattaaaaatcactgatccccatcttgcagtttctttctctttttggcttcttgtccaccaa

SEQ ID NO: 656336 - DNA, 609 bp, Homo sapiens
ctctctgttttcctctctctgtccctttcattactcactttgcaccttcaggagaagtgacatttaaaaaaaaagaaaagataaaaataaaatcaatgtttttgtggactaagaactcacatagatttagtggtgaatatattaggaactgtttcttacaaatatgttggaaattatctgtgaaatttatttaccatgctttccctgtggctaattgtttttctgcaaggtttttgtttgtttgttgtttttaatgtcaatgaaagtagtctaagctcaaagaagcagctcggtcttgtgcattttgattttgggtcaaagtctgtgaatctgagttcaaaawcattgttgctccttctctgttccaagcataagtggctgctccctgcatcactgctttctcatcttgttgaggagagaggtttcttgctcggaaaggagaatgtatagaggacccatagtggggagccattcttttatgatatcttacaaaaatgaccatcgatgcaggtttagtttagttcttcataatcatcctagtttaaaaaattaaaaatcactgatccccatcttgcagtttctttctctttttggcttcttgtccaccaa

SEQ ID NO: 656337 - DNA, 625 bp, Homo sapiens
cattctgtgagctctcttttcatcaacctcaccatggtgtacatccttgggtcctataccttggtgctcagaactgtgcttyaggttccttcttcagctggatggcaaaaggccatctctacctgtgggtcacacttggttgttgtgtctctgttctatggagccataatgctgatgtatgtgagtcccacacctggcaactcagttgctatgcataagctcatcacactgatatattctgtggtaacacctgtcttaaaccccctcatctacagcctacgcaacaaggacatgaaatatgccctccatcatgtcttctgtggaatgagaattatccagagatcatgaatagggttttttataacccaatgactcttaatgcgattggaagaataatcctcttcttttaacactaactgacttgattttattcatggtcatcgccatccttttgtacaagcaaaactcttcatgtatctgatcatattttgacgagcttctagtttcagaaatgtgctccatgggagcaggttggccccaatatatggtaaaaataacacataaaaatcttaatatcttcatccatgtccctacaaaggacatgaagccatcatttttatggctg

SEQ ID NO: 656338 - DNA, 625 bp, Homo sapiens
cattctgtgagctctcttttcatcaacctcaccatggtgtacatccttgggtcctataccttggtgctcagaactgtgctttaggttccttcttcagctggatggcaaaaggccatctctacctgtgggtcacacttggtkgttgtgtctctgttctatggagccataatgctgatgtatgtgagtcccacacctggcaactcagttgctatgcataagctcatcacactgatatattctgtggtaacacctgtcttaaaccccctcatctacagcctacgcaacaaggacatgaaatatgccctccatcatgtcttctgtggaatgagaattatccagagatcatgaatagggttttttataacccaatgactcttaatgcgattggaagaataatcctcttcttttaacactaactgacttgattttattcatggtcatcgccatccttttgtacaagcaaaactcttcatgtatctgatcatattttgacgagcttctagtttcagaaatgtgctccatgggagcaggttggccccaatatatggtaaaaataacacataaaaatcttaatatcttcatccatgtccctacaaaggacatgaagccatcatttttatggctg

SEQ ID NO: 656339 - DNA, 625 bp, Homo sapiens
cattctgtgagctctcttttcatcaacctcaccatggtgtacatccttgggtcctataccttggtgctcagaactgtgctttaggttccttcttcagctggatggcaaaaggccatctctacctgtgggtcacacttggttgttgtgtctctgttctatggagccataatgctgatgtatgtgagtcccacacctggcaactcagttgctatgcataagctcatcacactgatatattctgtggtaacacctgtcttaaaccccctcatctacagcctacgcaacaaggacatgaaatatgccctccatcatgtcttctgtggaatgagaattatccagagatcatraatagggttttttataacccaatgactcttaatgcgattggaagaataatcctcttcttttaacactaactgacttgattttattcatggtcatcgccatccttttgtacaagcaaaactcttcatgtatctgatcatattttgacgagcttctagtttcagaaatgtgctccatgggagcaggttggccccaatatatggtaaaaataacacataaaaatcttaatatcttcatccatgtccctacaaaggacatgaagccatcatttttatggctg

SEQ ID NO: 656340 - DNA, 563 bp, Homo sapiens
tagaacaaaaaggcaaaatggcaaatctcatttaaaatttactttgaagctcagtgtttttgctttcttagttgtctaccacctccctcccttctccctcccttctctgttcaaatggagaagatataaggagagtacagatgcgacaggtcttaaacgaaagcattcccaaggtacagtaattgtagttttatttctccatgtagttatattcctggcttatagtattcagttgcatttaaagcatagaaattattagttttttttaaatgtgtccattgtattagtttgtttactgctactttattatgtgtataaatattggtaaacagtgtgtatagtccagtaacaggatattcagatgttccccaacattaaaatggtttargatgatatatggatgatttaaagaggaaaataatttttctggcttaacactcatctctaaatatcttgatctcatagtttaacgttttaagcatctgttgctcacaactattttaacaaaaatgtggtttagaaacatataagagcttgaagtagtggcatggatcagatatgta

SEQ ID NO: 656341 - DNA, 568 bp, Homo sapiens
aaggctgggaaagttgtcttctattattccctcaaatatgttttccaaacttttagatttctcttcttccttgggaataccaactattcttaggtttacttgtttaacataatcctaaacttcctggagsctttgttcatttttttttattattctttattatttgtctttgtaggattggcttaattcaaaacccttgtcttcaagctttgaggttctttcttctacttgttcaattctattgctgagactttccaatggattttgcaattctctaagtgtgtccttcttttccagaagttgtgattgttttttatttaggctatcaatttcactggagatgtttccatttatattacttttttcatttccttaagatggacttcacccttctgtggtatctccttcactggcttaatagtcaaccttttgaattctgtttctagcaatttagagattttgtcttggtttggatccattcctgttgagctactgtgatcttttgggggtgttaaagaactctgttttgtcatattaccagaattgtttttctggtttcttctcattg

SEQ ID NO: 656342 - DNA, 595 bp, Homo sapiens
cctcctatctgccattttcccaaaattttaaaattctctaattttgccctagcccaggccagggcmaaggctgcctcagggagcagtggtgtgcctgtggactgtggctgtggggtgggtctggcaccttttaaagtttgataagaaacatttaccaactattctctctgaagcctgctacatggagacttcatctgcgtaataagaaccttagtctccacaaccccttatcttaacccagacattcctttctattgatttcaggtctttaaataacaacttaactctttcaatcagttgccaatcagaaaatctttgagtccacctacggtttgatttgattaatgtttgcttgtaacttctgtccccctaaaatgtacaaaatcaagctataacccaaccatcttgggtaaatgttctcaggacctcctgagattgtgtcacagacatgtccttaacgttggcaaaattaacttctaaattgattgagacttgtctcaaatactttttagtttacagtacattaatatggtaatactctaaccctctacaagccctttatttgggctttactgaactgcctactgtatagccc

SEQ ID NO: 656343 - DNA, 595 bp, Homo sapiens
cctcctatctgccattttcccaaaattttaaaattctctaattttgccctagcccaggccagggccaaggctgcctcagggagcagtggtgtgcctgtggactgtggctgtggggtgggtctggcaccttttaaagtttgataagaaacatttaccaactattctctctgaagcctgctacatggagacttcatctgcgtaataagaaccttagtctccacaaccccttatcttaacccagacattcctttctattgatttcaggtctttaaataacaacttaactctttcaatcagttgccaatcagaaaatctttgagtccacctacggtttgatttgattaatgtttgcttgtaacttctgtccccctaaaatgtacaaaatcaagctataacccaaccatcttgggtaaatgttctcaggacctcctgagattgtgtcacagacatgtccttaacgttggcaaaattaacttctaaattgattgagacttgtctcaaatactttttaktttacagtacattaatatggtaatactctaaccctctacaagccctttatttgggctttactgaactgcctactgtatagccc

SEQ ID NO: 656344 - DNA, 567 bp, Homo sapiens
gctgggcatgctggctcatgcctgtagtcccagctacttaggaggctgaggcagaaggattgcttgaacccaggagtttgagaccagcttgggcaacataacataatgagaccttgtctctaaaaaaaagaagaaagagaagaagactattgagcgtttcagtgggcatttctatactcaacatataaaactcatgactgaccagccacagttgctcawgcctgtaatcccagcactttgggagtctgaagcaggtggatcacttgcgggcaggagttcaagaccagcctggccaacatggcaagaccacatctctactaaaaatgcaaaatttagctgggtgtggtggtgcatgtctgtaatcccagctacttgggaggctgaggcatgagaatcacttgaacccaggaggcagaggttgcagtgagccgagattgcatgactgcattccagcctgggcaatagagcaagactctgtctcataaataaataaatacatacatgtatacaaactcatgactgactgtggctttttttttactcccatgtattctgtgagacagaaaa

SEQ ID NO: 656345 - DNA, 465 bp, Homo sapiens
gatcccgctgtaatcaattgcttaagctggctcaggtaggtttctatttcttgcaaccaaaataattataactaatactgtaaccacccaatgggttcaccttgcccactgcctagacagagctgatttatcaagacaggggaattgcaataaagagtaattaacgcagagccagctgtgcaggagaccggagtttgattattactcmaatcagtctccccgagcattcgggagcagagtttttaaggacaacttggtgggttgggggaaaccagtgagccaggagtgctgacggtcagggatgaaatcatagggagtcgaagctgccttgtgctgagtcagttcctgagtggggaccacaaaatcagatgaggctaaagtaagtcctacaaagtcaatctattccccgggcaggaaggaggtctgctttgggaaaaggctgttatcatctttgttttaaactac

SEQ ID NO: 656346 - DNA, 576 bp, Homo sapiens
tgatgcgggagaatcgttcaagaccagtcctgaggacttagcaagattcagtccccrttaaaaattatatatatatatataattttctatataaatatatataacatattatacacagacacacacacatacaccccaagtgaatgatttttcagtttccttttaattctagatccttgaagaccattaaactcctatcttttattagatgattgtttgaggcatatataatcataccttttaactgctgctggtgatcaggtatactagtccattcagagctaagttctcctcttatacaacacctgagaagaaatacgtttgaattatttacagagcaaaggctgtgccagtggaactgaggcaatagcaatgtaagcagaaatatagaaatctatgtggtataatagaaagcataatattaagttctgtcactaactagctgtgagactttgaatagctcacttcagatctctgggtcttagtttcttcatctataaaacagagtaattggacttgataagtggttctgaactagaataggcatcagaaccattaggagagcttcttaaaagc

SEQ ID NO: 656347 - DNA, 439 bp, Homo sapiens
aatattctaaaaaataagtatcagaaaattctttgtctttggggaaaagccaaacttaaggaagtctcatttcattagactacctttgcaataaagcaggacygttaaaaaaggatggcatagccattttaagggggctgataaaattgttcctctcagcaccataaggcagggtgagaaaaaaaattgttcctcatgtttcatggaccaaaaaaaaagcatcttttgaaaatagaagtgctctaattcttgatgctggtgcctgctaatatttgtgaaagaaatttctttaaaaggacacctctatttaatttgaaaatgagttattggatgttgttgtgttatatcattttatagaaagtcttgtggtataatggcatcccttatcaggaagcaaggtctggtgagagacagtatagtgaatggaagaagttagcat

SEQ ID NO: 656348 - DNA, 439 bp, Homo sapiens
aatattctaaaaaataagtatcagaaaattctttgtctttggggaaaagccaaacttaaggaagtctcatttcattagactacctttgcaataaagcaggaccgttaaaaawggatggcatagccattttaagggggctgataaaattgttcctctcagcaccataaggcagggtgagaaaaaaaattgttcctcatgtttcatggaccaaaaaaaaagcatcttttgaaaatagaagtgctctaattcttgatgctggtgcctgctaatatttgtgaaagaaatttctttaaaaggacacctctatttaatttgaaaatgagttattggatgttgttgtgttatatcattttatagaaagtcttgtggtataatggcatcccttatcaggaagcaaggtctggtgagagacagtatagtgaatggaagaagttagcat

SEQ ID NO: 656349 - DNA, 585 bp, Homo sapiens
tcagtgagaccaagaacccaccaattttggacacagtatgatttagtgaatctcatggtacacttaagatcaccactgcaccccagcctgggcgacagagtgagaccctgaatcttaaaaaaaaaaaaaaaaaaaaaawgtactgatacatacaacctatgtatctcaaaaacattacgctgagtaaaagaagtcttacatgaaagagaatatactgtacagttcaatttatataaagttctataacaggcaaaactagttggaagaaaattggaatagtcactgcctctagaagagaagacttcctggaaaggggcttgagtacagttttcagggtcagggtcatattctatatcttgataggtgtgtaggttactcacatgtatgatttagtgaatctcatggtacacttaagatttgtgcatttcacatttcattgtacataaatttaacatgaaattttaaaataagaattacaaacaaatatagaactctatatgttatgtaggaactctgagtgatatgtattctgagttatttggaaaaaagtatatcgatatctgcaacttactttgaaaagcattt

SEQ ID NO: 656350 - DNA, 585 bp, Homo sapiens
tcagtgagaccaagaacccaccaattttggacacagtatgatttagtgaatctcatggtacacttaagatcaccactgcaccccagcctgggcgacagagtgagaccctgaatcttaaaaaaaaaaaaaaaaaaaaaatgtactgatacatacaacctatgtatctcaaaaacattacgctgagtaaaagaagtcttacatgaaagagaatatactgtacagttcaatttatataaagttctataacaggcaaaactagttggaagaaaattggaatagtcactgcctctagaagagaagacttcctggaaaggggcttgagtacagttttcagggtcagggtcatattctatatcttgataggtgtgtaggttactcacatgtatgatttagtgaatctcatggtacacttaagatttgtgcatttcacatttcattgtacataaatttaacatgaaattttaaaataagaattacaaacaaatatagaactctatatgttatgtaggaactctgagtgatatgtattctgagttatttggaaaaaagtatatygatatctgcaacttactttgaaaagcattt

SEQ ID NO: 656351 - DNA, 491 bp, Homo sapiens
aaggcttgagtcgtcaactgtgaaattactccctaaacaccttcaatgcctagtcatatgcactgtttaatttacttttaatattacagattttttaaagtgccacaaagctacagctcagctaaagatgagtttatgtcaacgcttgtttagagtggatttttgcaaaattaccttgaatgtctgagcwgtttctctctagacagctgcaggctctcttgtttgatgctgagcgcagtttgctgtaaattaatgcaacattttactctgcttttaggtaattctctagttatttgatatttgtattcacttgtggattttaagatccttacaaggaaggagaggagatctcagtttatatgaacacctatgatactggtgctatgcaaggccatttacatatcatgattcatgattctaatcactacccagagaagaattttattgtccaaattttgcagataagtaactgaggctcaaaaaggttaagc

SEQ ID NO: 656352 - DNA, 465 bp, Homo sapiens
gattacaggcatccaccaccatgccccgctaatttttgtagttttagccatattggccaagatagttttgaactcctgacctcaaataatccgcccgcctcrgcatcccaaagtgctgggattacaggcatgagccactgtgcccagcctgttccttatctcttaatgagaaagatcttcagaggcctggaaagggagatctgggagtctcactgacctggctttctcagtttcagtcagtttggctgtgattgaacccacgacacagaaaagccaaagaatttggatcacaaaatacagaaaccagtcagcatggcagatgcctgacctgaataggctgggctgtgtacaggcagagaatgaggcataagaagctgtcaggcaggggcctgtggcctttcaggaacaagagggcaggctccatcctgactccttactccctcttacagtgtctgttctcacaca

SEQ ID NO: 656353 - DNA, 581 bp, Homo sapiens
ggcacctggctcgagcacagccaatccatgaacctgttcagactgaggcctggcagggaaagtgaccagagcctatcagattccctctcctgttaccttcacctagaggatgtcagagctggggctattggcaggtagagctgaggtcatgaggttggaaaaggcaaagaagggtcaaggcagggcagagtggggaagagtagaaaccatgcacagagcatacaaggaggyagctggggcatggagcaggagaggacaaagcacagggatgcttagaggcgagagctgaggccagcagctactccctgttctcacctccctgctcagcactcatagaaacacactgtgatggttaatactgagtgttaacttgattggattgaaggatacaaagtattgatcctgggtgtgtctgtgagggtgttgccaaaggagattaacatttgactcagtggactgggaaaggcagacccacccttaatctgggtgggcaccatctaatcagctgccagcatggctagaatataaacaggcagaaaaatgtgaaaagagagactggcctggcattccaggctacatct

SEQ ID NO: 656354 - DNA, 603 bp, Homo sapiens
atggtatcaggaagtgggatctgggggagaaacttaggtcatgaggtggagccctcatgaatgggataaatgtccctataaatgttactccaaagaactctctcaccctctttccaccatgtgaggatataatgagcagtcagcagtctgtaacatggaaaagacccctcaccagattcccaccattctggcaccctggtcttagactttccagccttcagaactaagagaaataaaattgctggtgtttataagccacccagtctatgatactgtgttacagcagtctgaactgactaagataaacacatttcctggtcctcttaaacaaatgctcctacacccagtgtaactttttttagagactcrgggtcacaattatgaccatcaacttgggctttgttgtaacagttaatactcctatagactacttgtaggtatagggctacacgcctcttctttaagtggctcccaggccactctacttttggagagcaagaggacaattcatagtttttcctgtctcttcccaaaatgacaggctctcagccgttctatcttgatgatgagagcaagtcttcctttagcccttgttattcagta

SEQ ID NO: 656355 - DNA, 601 bp, Homo sapiens
catttgcctgttcttcagtttgcttttgggtgggggctgatggaaaaaagggacagaaatgggagtgaggtatggcatgtttgtccaccaaaaatggaatgcttctcaactctggaactccagagctattttcttatgtgtaaaagtcaacttgtaayatccccaaacatcaactcctcttcctgtatttcagattttgattcatggcacagagatctacacaagtgcccaaggtttcctttcttctctctccctcactactcacacatccggttggacaacaaatcatgttgacactagctcctcagctgaacctcaagaatcatttccctccagttcagactccctgaccctgtcttaattttgaagaggtaatttctcctgacaacttctagtatatctatattattatatatgctagtatatgtttagtatattagttccttgccttaaaacttctcttgcttccaagccatattgtcacacttatctttccaaaacacatatattcattgtcactcctttgcttacaaacttttgccacatccccattctctgcaagataaagtcctaatcccttaatatggtgcatgctgctttc

SEQ ID NO: 656356 - DNA, 510 bp, Homo sapiens
atagttggtaataaaagatgacccaaaagggtgctctagataggacacccactaatcaattttgcctatttccaaagtctttcacaatttttgctgacaaggtggttaggtatgaggggtgtctctaagagaggactctgtgtcctgccctattcccagctaagccaagggtatggctatatagacacccaaggatttggcgacggggctgggggaggaggagcaggtagacagctcaagtgccaggcttcccttcagtttccatggaaggggaaaatcctcacatatattttccaatagaccatagcaggacagatgtcagaatgctgtagagatggcttcaggggatctttttacatgtagaataaaataccagccccttactatagcatgcaagacccttcctgatctggctgtgcccacctctgtggttttctytcttcactctccctttctttctctccactccagctatgcaatcatctttcagtccatgaaagaggccgaatt

SEQ ID NO: 656357 - DNA, 605 bp, Homo sapiens
ttcaccacctctggtccccttcacaatactccttgtctcctcttttcattgattcattttcgtgtctatgacctggctctcttctctagaacataatattctgatggcagacttgtgcattgccgtctgcagcgcccaggaatcagtggtgctcggtattttcagatcacctggttgctgaggcagctaagccaaggcagcctgcttgtctctcttaaggctaagagtagcacaggtgtgatagttggatctggyctcctaactggggtaagaagcttaatggatctcgtatgaattgtaattgctgaggaccaaaaaggaatgtgaacatgtttaggaaatgacagcttggcaggcatctctgtagccagggtcctgatgccacaacaccatgctagtcccctgggcatagagcctacaccaaggaaagtgggggaaggaaataagcctgaaatgactgagtttgccctcaattggtgagattgtgttttctgcaaccatgtgaaatgactcaaagaaaaaatttaaacttctgtgtttgaacacctaagttttgtggcctgcaattattttgcctgctacataaacaattctgtagactaacc

SEQ ID NO: 656358 - DNA, 605 bp, Homo sapiens
ttcaccacctctggtccccttcacaatactccttgtctcctcttttcattgattcattttcgtgtctatgacctggctctcttctctagaacataatattctgatggcagacttgtgcattgccgtctgcagcgcccaggaatcagtggtgctcggtattttcagatcacctggttgctgaggcagctaagccaaggcagcctgcttgtctctcttaaggctaagagtagcacaggtgtgatagttggatctggtctcctaactggggtaagaagcttaatggatctmgtatgaattgtaattgctgaggaccaaaaaggaatgtgaacatgtttaggaaatgacagcttggcaggcatctctgtagccagggtcctgatgccacaacaccatgctagtcccctgggcatagagcctacaccaaggaaagtgggggaaggaaataagcctgaaatgactgagtttgccctcaattggtgagattgtgttttctgcaaccatgtgaaatgactcaaagaaaaaatttaaacttctgtgtttgaacacctaagttttgtggcctgcaattattttgcctgctacataaacaattctgtagactaacc

SEQ ID NO: 656359 - DNA, 664 bp, Homo sapiens
tattttttaaaactgagatctgcaaaggcttaaggaagctgaggcaacaatataaaagatctgaaataaacatgtatttgaatactgtaccaataactgatttttttcttcttaaattactttttctgataacagtcaataagtttcagtaggaaaatgcagaaaacacagaaaaatatacagaataaaaatcacctgtaattcctacaggtgattttgagaattaattttagaattaattccaaaaatattaaagttctaaaaacttcaaattcttccaaaaatttttaaatctagggtgaagaaatctttccaggcctttttttattgttcctttttttcttccraattttattttaacttcaggagtacacgggcaggatgtgcagtttggtacttaggttaatgtgtaccatggtggtttgctgcacagatcatcccgtcacctaggtactaaacccagcatccattagctctttttcctgatgctctctctccttccagccctgaccctccaacaggcaaaatatggaaataaataaagacccttttttgaaaatttagattatatgctaaatactattttgtactctttgaggttttttttttgtaattcatgtcagacaggtaatgtgcagacatggtaacagagtttgaaggaggc

SEQ ID NO: 656360 - DNA, 466 bp, Homo sapiens
ttggtccttcgaaaagataaacaaaattgatagaccattagcaagattaaccaagaaaagaagagagaagatccaaataagctcaattagaaatggaacaggatatattacaactgatactgcagaaatataaaagatcattcaaggctactatgaacacctttacgtacacaaactagaaaatatagaggagatagataaattcctggaaatactcaaccttcctagattaaatcaggaagaaatagaaactctgaacagaccaataacaagcagcaagattaaaatggtaatttaaaaaattgctaacaaaaaacgtccaaggccagatggattcacggctgaattacattagrcattcaaagaattggtatcaatcttactgaaactattccaaaagataaagaaagagggaatccttcctaaatcattctatgaagccaatatcaccccaatatcaaaacca

SEQ ID NO: 656361 - DNA, 390 bp, Homo sapiens
ccttccttgctttgtttgtgtgttttgtccaattctttgtttaagatgccaagaacctggacacccttcactggagacaatatgatgtgcagagtttgaaagtcagcatattagcttttattgaagcatgggatcgcctagagaaagctttaaggagagatcaaaatgatcaccttatgttgggttccctagaaacagtgtccgagatgtaaatttttgttcaagttatttattgaaggagtgctgtcaggagatggggagtgaggaaaagtaatgcaggaaaaaaagctatgcaagtatgyggtcttagacaaagcctagctccatgaggatctctgaatctgcaagatattacagagtcggccccaccttaagcaaggaggccaacct

SEQ ID NO: 656362 - DNA, 408 bp, Homo sapiens
ggtatagcacatataccagtaacttattaatagtattttatggtcattatcaagtattatgtcctataygataattgtatatgctatactcttgtatgcctggcagcacagtaggtttgtttacaccagcatcaccacaaacatgtgagtaatgtcttgcactatgatgtcactacagctactgtgtcactaggcaataggaatttttcagttccattataattttataggactaccatcatatacacagtccatcattgactgaaatattgttatacagtgcctggttatagctaattttatttgaacaaactttagatattcttacttctaaataatattctttgtattctaccaatattatagcttaagtgaaactaattttttctcttgtttactgaaatgtaa

SEQ ID NO: 656363 - DNA, 572 bp, Homo sapiens
ctgaccaagggatgctccttctgccccgtcagatggcactagtaggaaacagtaggagtctcaggtaaattaagcagaccaaaataacaccacaaaggctctgataattaaattttcattggaaccactgtccacaaaagatggccaagacctgtctgctaaaactaagcatgtctgctaaaatcaaaaatttaaataggacccagtgtgtcctaacatactaatagcaaaatgtccaggatacaaatgactaaaagacaatgaacaaagaagaggcctgggagtatgaaaaccattgtcaagtacagcaagaatagaaaaaggatatcacaagaaagaaagtatccaggtaataataatgagagstaaagccacatttgttgctgatagtgtactagacactgttctaggaacttaaaatgaatgaactcttctgttaaaaccattctattgattaggtattctcttattatttctgtttttgcatggataaactgaggcatagggaggttaattaacttgaactagccaaacagctcataagtgatggaatcaggatttacaaactttca

SEQ ID NO: 656364 - DNA, 615 bp, Homo sapiens
ttttcttacttatacctgtctcttagaagcatcaaatcaatgtttcttgccctaaattttcacagctactcctgtcagaacttatatttgccgcactttttaacttgatctccagaatcttacgaatatatttgtttactatttatacagtgtactatatatatattcagataaatgtaagctccacctcagctccagaaacatccaacttttaagtgttgaaagctttctcatgttgccaattgatagatcccatctttattaaacatattctcattctagtataattctgtactctcatgtggcttctgaatttaaaaagaaaacaagccacaacagaaaatccaaaatagaaacaaaaagacctaatttagaaaaccaagtttaactggatttaagtatctcagaaaacataaaatggaggacttgtacattgcaaaaaaacagccctcattctacatagtctagaataacattttcaacctcaagtttggcacatacaagaragaatgttcttgcaataatttttattaaattctcaaaaacttacttaaaatatcatatactcttgattactgaggtaatgaagaatgtgacaaaaatccaacaatgata

SEQ ID NO: 656365 - DNA, 615 bp, Homo sapiens
ttttcttacttatacctgtctcttagaagcatcaaatcaatgtttcttgccctaaattttcacagctactcctgtcagaacttatatttgccgcactttttaacttgatctccagaatcttacgaatatatttgtttactatttatacagtgtactatatatatattcagataaatgtaagctccacctcagctccagaaacatccaacttttaagtgttgaaagctttctcatgttgccaattgatagatcccatctttattaaacatattctcattctagtataattctgtactctcatgtggcttctgaatttaaaaagaaaacaagccacaacagaaaatccaaaatagaaacaaaaagacctaatttagaaaaccaagtttaactggatttaagtatctcagaaaacataaaatggaggacttgtacattgcaaaaaaacagccctcattctacatagtctagaataacattttcaacctcaagtttggcacatacaagagagaatgttcttgcaataatttttatwaaattctcaaaaacttacttaaaatatcatatactcttgattactgaggtaatgaagaatgtgacaaaaatccaacaatgata

SEQ ID NO: 656366 - DNA, 574 bp, Homo sapiens
cacggattcctttggctaggaaagggaaatcccccaaccccatscgcttcccgggtgaggcaatgccccgccctgcttcagctgaccctccatggactgcacccactgtccaaccagtcccagtgagatgaatcaggtacttcagttggaaatgcagaaatcacccatcttctgtgttgatcacactgggagctgcagactggagctgttcttattctgccattttgaaactcctagcaattttatcattttttatggctgaaaagcattctaacatgtatatacactacattggctttatccagtcatccaatgacggacacttaagctgattccttatctttgctactgtgaatattgttgcggtaaacatactagtataggtatctttttggaacaatgattgcccgttctttaatttgataatttgggtttgtttttttttctagtgagttgtttgagctccttgtatattctggttatcaatctcttgtcacatgattagtttgcaaatgatttctccaatgctatggttgtcttttcactttgctggctgtttcctttgctgtgcaga

SEQ ID NO: 656367 - DNA, 574 bp, Homo sapiens
cacggattcctttggctaggaaagggaaatcccccaaccccatccgcttccygggtgaggcaatgccccgccctgcttcagctgaccctccatggactgcacccactgtccaaccagtcccagtgagatgaatcaggtacttcagttggaaatgcagaaatcacccatcttctgtgttgatcacactgggagctgcagactggagctgttcttattctgccattttgaaactcctagcaattttatcattttttatggctgaaaagcattctaacatgtatatacactacattggctttatccagtcatccaatgacggacacttaagctgattccttatctttgctactgtgaatattgttgcggtaaacatactagtataggtatctttttggaacaatgattgcccgttctttaatttgataatttgggtttgtttttttttctagtgagttgtttgagctccttgtatattctggttatcaatctcttgtcacatgattagtttgcaaatgatttctccaatgctatggttgtcttttcactttgctggctgtttcctttgctgtgcaga

SEQ ID NO: 656368 - DNA, 574 bp, Homo sapiens
cacggattcctttggctaggaaagggaaatcccccaaccccatccgcttcccgggtgaggcaatgccccgccctgcttcagctgaccctccatggactgcacccactgtccaaccagtcccagtgagatgaatcaggtacttcagttggaaatgcagaaatcacccatcttctgtgttgatcacactgggagctgcagactggagctgttcttattctgccattttgaaactcctagcaattttatcattttttatggctgaaaagcattctaacatgtatatacactacattggctttatccagtcatccaatgacggacacttaagctgattccttatctttgctactgtgaatattgttgcggtaaacatactagtataggtatctttttggaacaatgattgcccgttctttaatttgataatttgggtttgtttttttttctagtgagttgtttgagytccttgtatattctggttatcaatctcttgtcacatgattagtttgcaaatgatttctccaatgctatggttgtcttttcactttgctggctgtttcctttgctgtgcaga

SEQ ID NO: 656369 - DNA, 635 bp, Homo sapiens
atatactttacctaggttaataggagctgaaggggtttgtaagagagagcttctattagagaaagcaaaaaagagtcacattaggaggcaaatgccatgttctagaaactgtaagaaaactgctgtggctggagggaaggccaagtaaggaaagcatgcatgagatatgcttgaacaagtagacaggagcctgatgatgcagcgacttacagattctaccaagaattgttattttgttttaaatgccacataaaaacattgaagagttttaagtttcctctgtcctctgtgtttataatgattgtaggaacaaggaggaagtgtattaatgcctatgctgcaaaacaaatgaccacaaatagcccatcttaaaacaatccaattttattctgtttctgtgggtcaaggatcatggtactggtgaaatgagtcctytgatctggatctcgccaggctggaatcaatgtcagctgcaccttcagttaaagcagagatggatgtagcaggccatcagtatattgacaatgtctgaaatcttttgtgagggttagggaaatgcccaaagtaaaaggattgaattggatgggatcaatgaaagattagaaaaggaatcaaatgagtatgagagttgacca

SEQ ID NO: 656370 - DNA, 422 bp, Homo sapiens
gctactttagaaccagaacatagttttgagggttctgtctctctctctttttttttttgagacggagtttcgctcttgctgcccaggctggaatacaatggcacgatcttggctcactgcaacctccscttcccaggttcaagcaattctccgcctcagcctcccgagcagttgggattacaggcacccgccaccacacccggctaatttttgtatttttaatggagatggggttttgccatgttggctaggctgctattgaactcctgacctcaggtggtccgcccaccttggcctcccaaagtgctgggattacaggcgtgaaccaccgtgcccaaccctctgtctcttttttagtccttctgcatcttcatgtctcactcataaccagattctctctctctctgctcagctttcttatc

SEQ ID NO: 656371 - DNA, 581 bp, Homo sapiens
agagatgcagtctaacatgcaaatatccttcagagaagaaaaacatttgtaataagcttataaatgacatttctgtggattttccttttttcagagcagactttgatagtgaaaagaaggaagaaaacatgtaggccctaaagatccttaaaagagggaaagaggtgacacaaggtaaaarggggtagaagatcctacaaataaacatagcctcatagcttactgcacaattttttcaaggttttattataccatagaaaattgccccaaaacatactgacatactgagacctctaatattttatatatgtatatatattttttaaaatattaaaccaacatacgagtttccagtatgtaacaataagaaacatagataataaggaaaacataattttgccagaccaacttaagtgtttttttagagagcaatttctcagtttaagcacatcagatatctgcaagaacattaagaggcaggattagcaataacaaataaatgcttaacatttatattcaaccagacaaatatcaaatgatgtatacgtcatttgatgtatacaaatatcaaaatgatgtat

SEQ ID NO: 656372 - DNA, 551 bp, Homo sapiens
ttggaactgtcagagaacacagctgtgctgttttaagccatgaaatttgtagtagtttggtaaagcagcaataggaaaccactacattgactgttccattatttcatttaatccttatgaaattctataaatgtattattattgctattttacrgataaagaaactgagtccgagagtttagttaacttgcccaaatttacccagctagtgggtacctaaaccaggtttcaaaactattctaattccaaggtctatccatttaattattataattcttctctcatgggttgatattaccatacactcaacattacaactccccaccacgtatttattccaagaaaagatttcatcactggggccttactctgtacctgcacatgaagcagctggtgcagactgtggctctttcaactcagaatgaatgagaatgtggtataaaacagtaaaacagtgacttattggaggagcaaaactaggagttttacacatatagatgtgagcaatgaagcagggaggcattctgacagctgctgatgacaagcagatt

SEQ ID NO: 656373 - DNA, 551 bp, Homo sapiens
ttggaactgtcagagaacacagctgtgctgttttaagccatgaaatttgtagtagtttggtaaagcagcaataggaaaccactacattgactgttccattatttcatttaatccttatgaaattctataaatgtattattattgctattttacggataaagaaactgagtccgagagtttagttaacttgcccaaatttacccagctagtgggtacctaaaccaggtttcaaaactattctaattccaaggtctatccatttaattattataattcttctctcatgggttgatattaccatacactcaacattacaactccccaccacgtatttattccaagaaaagatttcatcactggggccttactctgtacctgcacatgaagcagctggtgcagactgtggctcttycaactcagaatgaatgagaatgtggtataaaacagtaaaacagtgacttattggaggagcaaaactaggagttttacacatatagatgtgagcaatgaagcagggaggcattctgacagctgctgatgacaagcagatt

SEQ ID NO: 656374 - DNA, 517 bp, Homo sapiens
ggttgattttcaacatgccaattatcttactccaagtgtttattccaatgctttaaaaagaaggaattacatctaaatgccttgtgtctgtatattgacctagcttgatgaactggtgatgctgcttccttcagcctcatattgtaaagtgttcttcctacatccttcacagttacaatgtaatcagattttctaaatatctaattgttaatactcatcttattccataatgatgctactgatagagactatgtgcagactaataagatcaaagtcaaaatgactgatcttgccaaaagatcttttttattttctattatgtattaagaaacactataggaggygctggaaatgtaagaatgagtaagatgccctgctgtccaggatatcacaagctagccagaaaaagaaacaaaaaaaaatggctatcaaaatattgtggttgcataagaattcagtaattcaaaggaaaaattcaaattaaaacaagttttcaacatttgttataatgtctact

SEQ ID NO: 656375 - DNA, 618 bp, Homo sapiens
ggaagcaagcaaataaatgtttttgtattcgtccattttcatgctgctgataaggacatacccaagactgggcaatttacaaaagaaagaggtttaatggactcacagttccacgtagctcacgaggctttacaatcatggtggaaggtgaaagacatgtctcaaatggtggcagacaagagagcttgtgcagggaaactccccttcataaaaccatcagatctcctgagacttattcactatcatgagaacagcatgggaaagacgtgccccgatgattcaattacctaccaccaggtttctcccacaamgggaattgtgggagctacaattcaagatgagatttgggtggggacagggccatatcatatcagctatcatgttacataaatggtataaataaatactaccatgtcaccaataaatagatgctaccatgttaactgagttggaaaaacaagatatgcctgaaactaaacatgtcaatggcagtgggggaaacaggtcagatttaagaaataattataattaaggccaggcgtggtggctcacgcctgtgatcccagcacttagggagtccaaggcaggcaaatcacctgaggtcaggagtttaaaacc

SEQ ID NO: 656376 - DNA, 618 bp, Homo sapiens
ggaagcaagcaaataaatgtttttgtattcgtccattttcatgctgctgataaggacatacccaagactgggcaatttacaaaagaaagaggtttaatggactcacagttccacgtagctcacgaggctttacaatcatggtggaaggtgaaagacatgtctcaaatggtggcagacaagagagcttgtgcagggaaactccccttcataaaaccatcagatctcctgagacttattcactatcatgagaacagcatgggaaagacgtgccccgatgattcaattacctaccaccaggtttctcccacaaagggaattgtgggagctacaattcaagatgagatttgggtggggacagggccatatcatatcagctatcatgttacataaatggtataaataaatactaccatgtcaccaataaatagatgctaccatgttaactgagwtggaaaaacaagatatgcctgaaactaaacatgtcaatggcagtgggggaaacaggtcagatttaagaaataattataattaaggccaggcgtggtggctcacgcctgtgatcccagcacttagggagtccaaggcaggcaaatcacctgaggtcaggagtttaaaacc

SEQ ID NO: 656377 - DNA, 428 bp, Homo sapiens
ttcttatttactcagagctgatctacatgtcaatgtaaagagactgtgattttacaaggggcttaaaacatctctcagtattttgcgtgctccttccaacttcctgaccaacagtcctgtctgtacccttacccagccctggcctttccacctggaatagctttcctcttgtgcttattggaatgatactaacctttgaaagtccagcttaaaagtcacctccattaaatagccttcactctctcaatcagaagtatttttaatctatttttgttattctagcacctacttttatagtccatgtacttcagactcctctctaagactaygaccaaagtgagtcataatatttatcatatttagtaatatttatttatcactaaatattagtaccaaatagaggaagtttaacatgaaatttactaaac

SEQ ID NO: 656378 - DNA, 595 bp, Homo sapiens
ttttgttctgttgtcctggctggagtgcagtggtgagatcagagctcactgcagcctcaacctcccaggcactagcaatcctcccacctcagcctcccragtagctggtaccacaggagcacaccaccacacctggctaatttttgtatttttttgtagagataggtttttgccatgttgtccagactgatcttcaactccagggctcaagcaatccacctacctcagcctcccaaagtgctaggattacaggcatgaacatgctacgctatttttaaatttaaaacaactattaagtaatgttgttaatataaatgaaaaaatgctagtgaaactagtgaatgcatcaggcaagtatattgatatgtttactcatagtatatttactaatattaatgatgtttgaaaaacagcgtaattccaattgtgcctgtgaaattctgacatcagccttgctctccatgagtcttttcctgcgcatcatgtgtgaatcaccaaattgaaatataagattgtttaacattcactacatcaaaacaacttcctttcagattctgttgtaacatttcactattcccttcctctatgaaaaaat

SEQ ID NO: 656379 - DNA, 595 bp, Homo sapiens
ttttgttctgttgtcctggctggagtgcagtggtgagatcagagctcactgcagcctcaacctcccaggcactagcaatcctcccacctcagcctcccaagtagctggtaccacaggagcacaccaccacacctggctaatttttgtatttttttgtagagataggtttttgccatgttgtccagactgatcttcaactccagggctcaagcaatccacctacctcagcctcccaaagtgctaggattacaggcatgaacatgctacgctattttwaaatttaaaacaactattaagtaatgttgttaatataaatgaaaaaatgctagtgaaactagtgaatgcatcaggcaagtatattgatatgtttactcatagtatatttactaatattaatgatgtttgaaaaacagcgtaattccaattgtgcctgtgaaattctgacatcagccttgctctccatgagtcttttcctgcgcatcatgtgtgaatcaccaaattgaaatataagattgtttaacattcactacatcaaaacaacttcctttcagattctgttgtaacatttcactattcccttcctctatgaaaaaat

SEQ ID NO: 656380 - DNA, 480 bp, Homo sapiens
tttttaaaaatcacaaaacctatttttacgaactgcaatatgtacctggtgtgtcaaataagcacataacaaaaagatatgccccaccctgtgaagccatggaaaacacacccacagaagcatgctgaaatatccctgatttgacagggtggactaggggattggtgtgtgggggggcatgctggcaaggcaggcaggtgaactagaatgtgcagagcccttgaggtagccacagaaagacacatttgaaaaactgcctgtccttgtggatatcacaaaggaatgggtgacgggtaacaaggccaaggtaggccagcaaagactgactaagggaaggacttgccacaggctatcctaaggattttcgccttcatgctaagaaaaatgyggcagtttaggtggatcatgctggaggaaagagtttgattttgaaattgttgcatttcaaatgcctttgagataccaaactgtaaatatgga

SEQ ID NO: 656381 - DNA, 650 bp, Homo sapiens
ataagaaaaattaaatcctccaaccttttggcttagttactatccaactttgaaggcacaaaggaatctcttctagatagatagagtgtttattaaagacaggccctcaggtaaagtagacttgcttctttttcagatctatctgtcctgattccaggcagagagaatgctttatttgccctgttccttaatgggcttcatcccaaacatagtgattttagctagaaaccatarttaaattgaaaggttcacctatggaactaaaatacagctttctggtatttaactagctatcttgaaattcttttgtaaaagaaattacatcttggtatggtttggctgtgtccccatccaaatttcatcttgaactgtagtgcccatgatccccatgtgttgtgggagtaacccagtaggaggtaatagaatcatgggagcagttacttccatgctgttctcatgagtgagttctcatgagatctgatggttttataagggtcttttccctgctttgttctgcacttctccttcctgccaccatgtgaagaaggatgtgtttgtttcctcttctgcaatgattgaaagtttcctgagacctccccagccctgcgacactgtgagtcaattaatcctgttttgtttataaattgcct

SEQ ID NO: 656382 - DNA, 327 bp, Homo sapiens
agggctaaactgtgtgcagtaaatatagagcagggctctggaatgttgatcctttaaaagaaatcttgtatacgtaaaacaagaaaggaatcctgtaaaaaaattagagyaccacaatatggtatcaataaagtataagataatgatagtaaggtagggcataggagagattggttaattttagggaaaaggagttggtgaaagtaaactctatgaaaaggaagaacagataatttatttcaaactaggaaatgttatctaacattgaaataaagtgctgggtttacaggtgtgagacgcccaaagtgctgggatataggtgtgaga

SEQ ID NO: 656383 - DNA, 603 bp, Homo sapiens
attgctaacaaatggtaggcacgatatctgtgtatgacacagtatgctaggttgtctagataacacaaagtagtcaagataatgttcattgcaacacagaagttgcacacaagacttggatgaaaatgtaagcctataaatatttattgaacttctacctatgcctgtgagactcacgtgtccaagtgaattgtctgtgattgaagatccgagtaacattcctatgaggtgatatctacaatctctagaatataaaatttgtgatgtattttttgccttttggagcttcatgctttgctgttcccttcctttcttggctttcaaatactcaaggaaactgaatatacaaaatattttatatacatttatatggttactctaatgtgtgtatatatttacccatttattacttatatattaaagattatttttaagatgttaaaaaaagcaatcmatttcatgggagaacataacagtcctctctcaggctcttgttgtgtcgtactcttagagaataaagtaaaatatggctagtgccttgcaattgtactaaggatttccaggggtacaaacctcttactatgattctcaagcaaggtctcc

SEQ ID NO: 656384 - DNA, 346 bp, Homo sapiens
aatgattaacatgtatgattattatgattcttttgtgatagctgaattgccaatttatggttcttcatattgaatgtaccattcctcacagcgttagtaatggctgtttgccttgttmtctctctctgcaggtaaaagcaaacagttgaggtttgttcttcctgcagaaaaatggtaatataattaactgagataattagtgatgtaaaaataataaatagaataacagattgactattaaatttgcataaaatataaataaattataatatgtccgttgtaattttttttcatcacaaactttctttttccttgatattggaatgggaatatctaaaacaaaagt

SEQ ID NO: 656385 - DNA, 602 bp, Homo sapiens
tggctctagagttcctgctcttaactgcgatgctatgctatctttcagaaagttctcttgcaagtgtcctagaaactgccaggctgtcaggaaagaagaaacactgatggagagctccattggcaaaggctagatattaggcaaagccacaacttkttaggctttattcttaaaacaatgtgagaagtgtaggtgagccttcaggtcccagtgctctgcatttagaaaataacaaaacattggatgaaacacattttgaatactattctatatagagtgcctggcactgtatccacataaattggtatctttctgcaggtacatttcatgcattaagtaatctttcactagattcaaggaaggacagccacttttcaacagtggaaattactagtgcttcatttttttcttttttcattcattcattcattactggaatacatgattactaagtactttgtaagaaccagtaggtaacatattagagtcacacagattgctatgtctccaggaggacatcctaaaagtctgacatctaacataaatggagaaaatggtcaagttacaaattcttcccccacccctcagtacaccctaaaaca

SEQ ID NO: 656386 - DNA, 560 bp, Homo sapiens
ttaatatattggctcatgcacatatttttgaaaatagtgtcctgctgctaatgacatatgaaagctaccattaacatttcctcctcatttaattggtcaccaaactcagactcactaagatcacscaagattatataaatgtaactagagatgtcagagatgggaaacactgtggtctctttactttgtttccgtcctcctactttgtctttaattagtcagagaacattcttacaagtgagatttcagcctatatatgatatggagaggagtcagggaaacactgggcaaaggaaggtggttccccagcaaaggctccaccctcaaccctggaaacctgcggccctaaatgagaataggcattcctgttttcatgcctaaaagttgctttttggctcaccaccccctactatcctgtgctcatataaaccccagactccagaagcagatgaagagtcaaacagaagggtagaagaatggcagaatggcacagcagagaaggagagaagaggagtttctgaacaccgagaggaattcagctgggggcggttgaagaggag

SEQ ID NO: 656387 - DNA, 646 bp, Homo sapiens
gtgtaactacatatattttctcatcttttaagagaggtagaggacaaccagcagattcatttgcttctgaaatacagcaattgaaaattaagtgtaaaatataagcttaatttttaaaaggagacaaaattatatttaagacttagactttatcctctccagactttcagaggggtacaaaatgaaagaaggcatggagtgaaaaaaagaggaaagaagtataaaaaagtgaataaaaataaaatgaagaaaataagataaaaaaaacaaatgttggccgggcgcggtggctcacgcctgtaatcccagcattttgggaggccaaggcgggagaatcacgaggtcaggagatcgagaccakcccggctaacacagtgaaaccccatctctactaaaaatacaaaaaattagccgggcgtggtggcgggtgcctgtagtcccagctactgaggaggctgaggcaggagaatggcatgaacccgggaggtggagcttacagtgagccgagatggcgccactgcactccagcctgggcgacagagcaagactccgtttcaataaataaataaataaataagtaaataaataaataaatcaataatattataacaataattaggcaagataaagaaataaagggcattcc

SEQ ID NO: 656388 - DNA, 646 bp, Homo sapiens
gtgtaactacatatattttctcatcttttaagagaggtagaggacaaccagcagattcatttgcttctgaaatacagcaattgaaaattaagtgtaaaatataagcttaatttttaaaaggagacaaaattatatttaagacttagactttatcctctccagactttcagaggggtacaaaatgaaagaaggcatggagtgaaaaaaagaggaaagaagtataaaaaagtgaataaaaataaaatgaagaaaataagataaaaaaaacaaatgttggccgggcgcggtggctcacgcctgtaatcccagcattttgggaggccaaggcgggagaatcacgaggtcaggagatcgagaccagccyggctaacacagtgaaaccccatctctactaaaaatacaaaaaattagccgggcgtggtggcgggtgcctgtagtcccagctactgaggaggctgaggcaggagaatggcatgaacccgggaggtggagcttacagtgagccgagatggcgccactgcactccagcctgggcgacagagcaagactccgtttcaataaataaataaataaataagtaaataaataaataaatcaataatattataacaataattaggcaagataaagaaataaagggcattcc

SEQ ID NO: 656389 - DNA, 646 bp, Homo sapiens
gtgtaactacatatattttctcatcttttaagagaggtagaggacaaccagcagattcatttgcttctgaaatacagcaattgaaaattaagtgtaaaatataagcttaatttttaaaaggagacaaaattatatttaagacttagactttatcctctccagactttcagaggggtacaaaatgaaagaaggcatggagtgaaaaaaagaggaaagaagtataaaaaagtgaataaaaataaaatgaagaaaataagataaaaaaaacaaatgttggccgggcgcggtggctcacgcctgtaatcccagcattttgggaggccaaggcgggagaatcacgaggtcaggagatcgagaccagcccggctaacacagtgaaaccccatctctactaaaaatacaaaaaattagccgggcgtrgtggcgggtgcctgtagtcccagctactgaggaggctgaggcaggagaatggcatgaacccgggaggtggagcttacagtgagccgagatggcgccactgcactccagcctgggcgacagagcaagactccgtttcaataaataaataaataaataagtaaataaataaataaatcaataatattataacaataattaggcaagataaagaaataaagggcattcc

SEQ ID NO: 656390 - DNA, 646 bp, Homo sapiens
gtgtaactacatatattttctcatcttttaagagaggtagaggacaaccagcagattcatttgcttctgaaatacagcaattgaaaattaagtgtaaaatataagcttaatttttaaaaggagacaaaattatatttaagacttagactttatcctctccagactttcagaggggtacaaaatgaaagaaggcatggagtgaaaaaaagaggaaagaagtataaaaaagtgaataaaaataaaatgaagaaaataagataaaaaaaacaaatgttggccgggcgcggtggctcacgcctgtaatcccagcattttgggaggccaaggcgggagaatcacgaggtcaggagatcgagaccagcccggctaacacagtgaaaccccatctctactaaaaatacaaaaaattagccgggcgtggtggcgggygcctgtagtcccagctactgaggaggctgaggcaggagaatggcatgaacccgggaggtggagcttacagtgagccgagatggcgccactgcactccagcctgggcgacagagcaagactccgtttcaataaataaataaataaataagtaaataaataaataaatcaataatattataacaataattaggcaagataaagaaataaagggcattcc

SEQ ID NO: 656391 - DNA, 494 bp, Homo sapiens
ttccaaacatgccctgggcgtttacacacatggtacaacaaactaaccttagaggtacttgtgtgtcatgtgcagagcattagccaatcttcatatttcaggcttttaaagaccaacacataggaaaggtggaaaaaaacaaagggagatgcttrtaatacatcatttctttgaaagcccctagtggtggggatggggataaaggaaacctaaaagaaactcaaacttaacttgtactctaaccgggcacgacttcaactttataccacacattttgaagaataacatgcagacagaatatactttgaaaatgttgaaaggattccagtaatcaagtgacaactccttaaccaagaccaagctagcctgggtaacacggtgaaaccccatctctaaaaaaagaaaacataaataaataaataaataaataaataaataaataaataaatacataaatacataaataaataaaaatacaaaaatttgccaagcat

SEQ ID NO: 656392 - DNA, 494 bp, Homo sapiens
ttccaaacatgccctgggcgtttacacacatggtacaacaaactaaccttagaggtacttgtgtgtcatgtgcagagcattagccaatcttcatatttcaggcttttaaagaccaacacataggaaaggtggaaaaaaacaaagggagatgcttataatacatcatttctttgaaagcccctagtggtggggatggggataaaggaaacctaaaagaaactcaaacttaacttgtactctaaccgggcacgacttcaactttawaccacacattttgaagaataacatgcagacagaatatactttgaaaatgttgaaaggattccagtaatcaagtgacaactccttaaccaagaccaagctagcctgggtaacacggtgaaaccccatctctaaaaaaagaaaacataaataaataaataaataaataaataaataaataaataaatacataaatacataaataaataaaaatacaaaaatttgccaagcat

SEQ ID NO: 656393 - DNA, 494 bp, Homo sapiens
ttccaaacatgccctgggcgtttacacacatggtacaacaaactaaccttagaggtacttgtgtgtcatgtgcagagcattagccaatcttcatatttcaggcttttaaagaccaacacataggaaaggtggaaaaaaacaaagggagatgcttataatacatcatttctttgaaagcccctagtggtggggatggggataaaggaaacctaaaagaaactcaaacttaacttgtactctaaccgggcacgacttcaactttataccacacattttgaagaataacatgcagacagaatatactttgaaaatgttgaaaggattccagtaatcaagtgacaactccttaaccaagaccaagctagcctgggtaacacggtgaaaccccatctctaaaaaaagaaaacataaataaataaataaataaataaataaataaataaataaatacataaatacataaataaayaaaaatacaaaaatttgccaagcat

SEQ ID NO: 656394 - DNA, 418 bp, Homo sapiens
ctatcagaaataaactgttttgcatatcaataaaactggattaacaattttcagtgcatcctacatcttaatgctatgtagctgataaaaagaatgaagaacatttgcaagtgctattagggaaggagcaccaggatagactctagggaacaacaatatgaacaatattcttctgtccacatgcttctaaagaaagggatacacatgtgctgggatgaacataataaatcactggaaggacatacaaaaaaccttctcaccagcatggaagcagcactggtgggagagggttggatggtgaaggagactttcactctttgttttataacctcctatgtagtgtgcattttaaycatggcatgtggtacctattttataactacattgatttttaaaaaataaattgagaacagaattc

SEQ ID NO: 656395 - DNA, 543 bp, Homo sapiens
atgggtggctgatggtaggagacagatttctcactattggagcaggagttttcagataagcaagggcaggaagttagaatcatccatgtagtgattcaactggaacctaatacatcaatataaactcatgtttagcttaattagatacggatggatacatatagaaatatttatagatatgtggatatatacagggtagtataaatacatacattttctggctctgtcagctgagatggcctacaagcaaaaacaccccagtagcaacatgtacacctagcacctagatcttggtttctccattctccagtaaaaggaaccaaggctccatggagaaatggctaattctaggattgagacagaaaaatatactagataaagcatatactaaagcatatactacatgctttagtctctaaatatactagagcatcttgtagtgccagaaagtgagaaagtgcaaacasacatacacacacatacactgacagtggtatatcaaaaagtcataccaactgaaagagctcccagtggccaaagctg

SEQ ID NO: 656396 - DNA, 494 bp, Homo sapiens
gccaccgtgcctggccaagtcatgtgatatctttactctggtgaatgaacagtgactatctggggctggtaacrtagggttaagaaaaatttaccaagacagttgtagataaataaagacagatttattacagaaagtatgaaaatacattgcaagaaagcaacaggcaagtcagcaagagaagagctaactgcgaagagacaaaggcctgctggaaattttacaggattttatagaatggagcttgtgctctgtgctgaagagggctttgtgcagtatcaatgccaaggttgcagtgagctaacttaacaatttttctgtcagctgagggtctagtgataactggtcacaggaaggttgtgagttgtttgcagaggacagctatgtgtcctggaccatgaagaaaggcagaattgtattgtagcttatttgcttcttctttttgctttaccctggtcccaccagcctgactctgtgcccccacctcctcccag

SEQ ID NO: 656397 - DNA, 620 bp, Homo sapiens
ctgttaataccaggcattagttctgcaaatgaagcaattaatttaagtggatcagagtttttaaagattggatctactaaaacaaacacacatacacacactcatcaacactttcacacattaatacttatgctcatactcacactcacacacactgtttaatttgttactaatgcagtaaatacctattagaagagaaatctaaagaaagctattcctgaagggtttaaattcattttgtattttgaaataagaggacaaaggtggttaacagtgatgatgatgatgataaacgttgacacagaataatgactaatattcagtgcatgtttactatgtgccaggcattatacaaagtactttacatgcaataattgtcttacataatccttataaggccttatgaaataaataattttattactcccttttacacttgagaaaagtaaggtactcttacccaaaagttatctaacattaaagcctatgatatgcctagccacttggttgtctcacctgccaccaccacatccccaaaattgtgccacttaagtgccacgtaccacatgccacaaatatacatgcacaaayacaccttaaagttcattttcacaaatata

SEQ ID NO: 656398 - DNA, 488 bp, Homo sapiens
agaattctcccttaataccttccctcctcctctatagaccaggcaaactctgctaacccctccaaatgttacctcaattcctgccccccaagtcctgcagtcgtcccaaaggtgtgcagagacctgttcccctgagtgtctcttagcaygattcctttaacactggatctgtaacaccatggagaaaccttcccctgccactttcagccattcttaccactcgtactcttattattttgcatatatatgtcttaatttctcaactacattggaaaactcttaaaggcagagctctttttgtcataattatctgtacaccccagaaaaaaatatttggtacaactctttataacaggtactcaataaatattcataaatgcacctaagtttaggactggcagatggatgataagtaaacaaatacgtacccatgtgtaaatcattgagtttaggtctgtgaatttgaaaacaatgttgttatctgcagt

SEQ ID NO: 656399 - DNA, 488 bp, Homo sapiens
agaattctcccttaataccttccctcctcctctatagaccaggcaaactctgctaacccctccaaatgttacctcaattcctgccccccaagtcctgcagtcgtcccaaaggtgtgcagagacctgttcccctgagtgtctcttagcacgattcctttaacactggatctgtaacaccatggagaaaccttcccctgccactttcagccattcttaccactcrtactcttattattttgcatatatatgtcttaatttctcaactacattggaaaactcttaaaggcagagctctttttgtcataattatctgtacaccccagaaaaaaatatttggtacaactctttataacaggtactcaataaatattcataaatgcacctaagtttaggactggcagatggatgataagtaaacaaatacgtacccatgtgtaaatcattgagtttaggtctgtgaatttgaaaacaatgttgttatctgcagt

SEQ ID NO: 656400 - DNA, 486 bp, Homo sapiens
ttccctcctcctctatagaccaggcaaactctgctaacccctccaaatgttacctcaattcctgccccccaagtcctgcagtcgtcccaaaggtgtgcagagacctgttcccctgagtgtctcttagcacgattcctttaacactggatctgtaacaccatggagaaaccttcccctgccactttcagccattcttaccactcgtactcttattattttgcatatatatgtcttaatttctcaactacattggaaaactcttaaaggcagagctctttttgtcataattatctgtacaccccagaaaaaaatatttggtacaaytctttataacaggtactcaataaatattcataaatgcacctaagtttaggactggcagatggatgataagtaaacaaatacgtacccatgtgtaaatcattgagtttaggtctgtgaatttgaaaacaatgttgttatctgcagtgtttccaaacagaattc

SEQ ID NO: 656401 - DNA, 612 bp, Homo sapiens
tcccttcagctgaatgttgaaagaaataataggcattagaagttattttttaaatctactggacatggtagtgtggtgaattcatactttgaagtaccctctctctttcaaacacatggcaatgataaataaaatataggccaggtgcagtggctcacgcctrtaatcctagcactttgggaggccaaggcaggaggattgcttgagcccaggagtttaagaccagtctgggcaacatagtgagacccacctctacaaaaaaattaagaaagacccaaatagccaggtatggtgacatgcacctgtagtcccagctacttgggaagttgaggagggaggattgcttaaacctaggagttggagactgcagtgagctatgattgtaccactgtattctggcctgtgtgacagagctagaccctttctcaaaaagtaaataaataaaataaaatatagaaattaaaacaaaaaaaaatagtttcaaaaacaaaagacagatacccacagaagaaggaaatgaaacagcaagttgagggaaaacacaagcctgctggaggtggtagccagagtttggttcctgtgagtcagaagaagccagacattctctaagtc

SEQ ID NO: 656402 - DNA, 523 bp, Homo sapiens
aggtagaggcatattgttatacataaagaaaggccggagaaaaacaccaagaactttctggggtaacttctctacaggaggttgctgtgtccccctagacagctctatcaacasgtgaggactgggaatctagtggtgaattgatgtgactgggttggggcagaaatgccatggggcctgatgcagcacagctgtacgtcatggaaaatgatccctgagacagtcagcaactggatgtagaatgaatctgtttaagtaatgagtgttcgctttaggagagcaggatgcaggacaatagccaggagagagcaaaacctgtttgaaagagttgagggatttgtgatgtcctgcctgacacaccagcacccctgatgatgctgtcaatggctttctctcaattagtccccctggacaggtggaagccgaggtaagttgggtaattgatgtcttcatgcttccacaaagggcctactttgggaagatggaatatgttaatgcaggtccctgcatgaagcagggaatt

SEQ ID NO: 656403 - DNA, 632 bp, Homo sapiens
gtttataaagaaaataaaaagcctttattctttaaattgagagcaaaagaaagtcagtgcatgtcattaaccagagattgatgtagtccaatttatgttaaattttgtttctctcttgttgccatgtggagaatgaaatgtaggagggatgggtaagaagggagatcagaactaggacattgccatgtccaaatagagagcatcagtagtaatatggtatatgattgtggctcaaatagggttggttttagtgcaaatgaagatagtgaaatatgagaggttaaaaagtcagaacacagagatcagtcgtgaggggaagacgggtaaactgaaatgagtatgagttatgtggcaaggaaaaattgctaaggacagcatttaagttcctagattgtgcaactgggtgtgcagtggtaccatttattgasatttttaaaaaatctgaaaaaggacaaagcttaaggaaagtaaactataagtttggtttttaaattgcatttgaattggtttttgcattgtttgattgaatctataaagtgcagtggacccgccgttgagacatttaagtgaagatattgactaagctgttgcatacattgatgtagatctctaaaatgagttctggaatactg

SEQ ID NO: 656404 - DNA, 566 bp, Homo sapiens
gccattgcactccagcctgtgtgacgagagtgaaacttcgtctgaaaaaaaaaaaaaaaaaaaaagaagaagaaagaaattgatagtgtgctgcagcacattcttgattaatactaaargcatatattttctaaataaacacttcccttaatttttattaaatataagcacaaattttctccatttccacactgtttagtttactgtgttaaacatttgcccaccatttttttaaaggatgtagaatatacaaaaaactcttcatagcttgaaatgtgcataggagatagatgagtttaggtactgcaggacgaaaagacttgatgtgttttatgccatgcttatttattccaactataaaaacagaaatgatccacaaagtagtttgatggataatgactgaagttgtaaaagttattgtgactaatggtatttaccctgtttggttaattgaaaatcaaggtgaaattaccctctagatagatcttatattttataacgtttgtaaaatcataaaaaggttatgtcatcctcaattctcaaaaaaattatattgtttttgagac

SEQ ID NO: 656405 - DNA, 399 bp, Homo sapiens
gaattccaagcagactgtgccatctgctcacctgccctctggaggaacacctctacttttgcggtgttctctgtgtgagcacagtagtatttagataagcgttagattacagcaggttacagatgcagtttcccagtccccacacctgctcaaaatgcatgagggtctgaccgcaggaactgctctttagcaagctcccctgatgatcctgatacacactcaggcttgaaaaccaccactttaggaccatytacccagccacagggtgagcactccaaggtttctttcttaaattttgcacctgagacaaatgccaccaggactagggtgaggcgagtgaggctatctgtctcaggtgcaaaactatttaatagtgtttcctccagcgcccccacagct

SEQ ID NO: 656406 - DNA, 555 bp, Homo sapiens
tcttatcagatatatgatatgcaaaagtgttctcccattctggaggttgtattttcattttcttcatggtgtcttttaagcacaaaagtttttaatttcaatgaattccaatttttttttctttaatcaccttttcttttgatgtcatgtctaagaagattctgaaagatcaagaagattttcttctgtattttcttctaagagttttatagtttaggtgtcacatattggtgtatcgattcytattgactttatttgtgtatggtgatacgagtaatgggtccaacttcactcttttgcttgtggctacccagttgcctagccccatttgttgcaaagatgaatctttcttccatttaattgtcttggtacccttgtaaaaatcaatcaactataaatgtaagagtttatttctagattctcagttacattctatggatccaaatgtccagtcttatgtccatatcacaccatcttgattactatacttgcatagtaagtttgaatttatgaagtgtaagctttgttctttttcaagaatgtttttgctgttta

SEQ ID NO: 656407 - DNA, 555 bp, Homo sapiens
tcttatcagatatatgatatgcaaaagtgttctcccattctggaggttgtattttcattttcttcatggtgtcttttaagcacaaaagtttttaatttcaatgaattccaatttttttttctttaatcaccttttcttttgatgtcatgtctaagaagattctgaaagatcaagaagattttcttctgtattttcttctaagagttttatagtttaggtgtcacatattggtgtatcgattcctattgactttatttgtgtatggtgatacgagtaatgggtccaacttcactcttttgcttgtggctacccagttgcctagccccatttgttgcaaagatgaatctttcttccatttaattgtcttggtacccttgyaaaaatcaatcaactataaatgtaagagtttatttctagattctcagttacattctatggatccaaatgtccagtcttatgtccatatcacaccatcttgattactatacttgcatagtaagtttgaatttatgaagtgtaagctttgttctttttcaagaatgtttttgctgttta

SEQ ID NO: 656408 - DNA, 541 bp, Homo sapiens
ttatttataaataatacctccctccctttgtaaaggcaacgtagcacaagagagatggattaaagggtacagyggaggccgggcatggtagctcacacctgtaatcccatcactgggggaggctgaggcaggtggatcacgaggtcaggagtcccagaccagcctggacaagatagccaaacctcatctctactaaaaatacaaaaattagtggggagtggcagcacacgcctataatcctagctacttgggaggctgaagcagaattgcttgaacccaggaggcggaggttgcagtgaactaagatcatgccattgcactccagcctgggcaacaagagcaaaactccgtctaaaaaaaaaaaaaaaaggggggagggaacagggctctaatggaagtagtcattcttaagttaattaccaagtcaaggactatctctcaatgtttagtgctttaagaaaactttcatcaggtactagatctattacctatgcgtatgggaaaggtgacatttgatccctgctttgaatataaaataaat

SEQ ID NO: 656409 - DNA, 563 bp, Homo sapiens
gcaggatggcctcgatcgcctgacctcatgacccgcccacctcggcctcccaaagtgctggaattacaggcatgagccaccacccccagcccaattmttaagttttgaataatcaatatcaagactcttagccttctgggcctgattaaaggcataagaaaaaggagattcttgaagtcagaagctccttatttattcacacttagtagaaaaataattaaaatattatgagtttgtatatattatgaaaataggatttaaaagccaaagaaaataacaagttaaaaatcagtaatacttacaattccagagtcatgtcttggttttattttataaagtgattttcctttcttctgtctacacacctcttcggcttcttttactctgatggggagaagacacatgtatttaaacaaaacctacttagatcacctcattctaccttatagtaagtgagcaaacctcaactcaataaagatttgaattactgcagaaaataatacaatacacagaagaatgttatctgacatttgaattgaaagcctcaactgttacagctacag

SEQ ID NO: 656410 - DNA, 561 bp, Homo sapiens
aaaaccttattgtttttttttttttttttgagacaggatttcactttgtcactcagcctggggtgcagtggtgtgatctcagctcactgcaacctccgccttctgggcttaactgatcctttcatctcagcctccaagtcccaagctgggaccacaagtgcatgccacaatgcccaactaattttttgtagtttttgtagaaatgggagttttactattttgcccaggctagtcttgaactcctgggatcaagtgatttgcacacctcagcctcccaaaatgttggaattacaggcctgagccaccacaccccgccttgattatttttatttttattaataaaaagtgagtcttctcagtattaaaagagctaggtcattgttcacagtatgtaacctcctgcatttgcctttaaaatatgttaytgtcattttgaatagatagccaagctcatatttaatcatgtgttttaaaccatttgacgtttttgacaaacttcccaaagtcaaattctaaattaactctgtttgactttgaattaactttggaatttttcagttg

SEQ ID NO: 656411 - DNA, 524 bp, Homo sapiens
aaaatgtctccaggtcatgtcagaggtcttcatggcagcccctccatcacaggcctggaggcccaggaggaaaaagtggtttcatgggccgagctgagggtccctgtgctgtgtgcagcctagggacttggtgccctgcattccagccactccaaccatgactgggaccaaggtagagctcaggccatggcttcrcaggatgcaaaccccaggccttggcagctttcatgtggtgttgagactgcgagtgcacagaagtcaagaattgaagtttgagaacctccccctagatttcaaatgatgtatagaattgcctggatgtccaggaagaagtttgctacaggggttagggtctcatggagagactctgctagggcagcatggaaggaaaatctgggatcggagcttccacacagaatccctactggggcactgcctactggagctgtgagaagagaactaccatcttccagaccccagaatagtggatccaccgagagcttgccccatgtgcctggaaaagg

SEQ ID NO: 656412 - DNA, 546 bp, Homo sapiens
taatggaaatagagaatcaatgtgtagtaacaaaggcatttgccattggaagaatatccataattccatattttcttacaaattaacatcaaagtgctttttggggcataagaaaaaaagtaaacaataagtagatgatcctgtgatatttggttactgagatacatgcaaaggattgcctaacacaggctgtattagtttcctgtggctgccttaataaatttccacaaacttggtgccttcagctgacaataatttactcttctcttagttctggaggctggaagttcaatgacagttttgttgggttgaaatcaaggtgtaggcrgagccatgttcccttggaggctttaggggacaatctcttccttgcctcttctggtttctggtggctgctactcttcctttgtttgtggctgcatcatttaaatctctacttctgtcttcacatcaccattttctcttctgtgcatcaaatccccctctccctttctcttataaggacacttgtgatggcatttagggcctacccaaacaaccaaggat

SEQ ID NO: 656413 - DNA, 632 bp, Homo sapiens
gttcctgtatgtgtttgcattcgtatctgtgtaaatcgcagctcagaaaattttacatggctattccacagagaggcttcattcaattttcttccgacaaattgttttagcattgtacaatgttaagtgaaaggactcttttgatattgtgaacctgaaccacaggggtgaaattgataactgtagtcaatatttattttgccaaaatgtatgatgacctaagctttctagtataatgccaaaacaagatgaaaggtgccaagtattagactcttggaaacactgatacttggcaacattttagaatatttttagtgattatttcccttggaagcaatagaagtagttattgctcacataaaattaaacaagaattttaaaacttgaytgtgtctcataatctttgcagtaatctccgtattatccagaagagcaaaaataaggactaggaaagcctactaaatttcccaatatcccaagactagttagtgaaagggcaatttttaaaaacacttttatggtacccaggcttgtgttcagagcctctttatagtaatactgtgctatacaagtaactacttttacaaattttaggactctaacacagaactcaattaataagtcttaatata

SEQ ID NO: 656414 - DNA, 397 bp, Homo sapiens
gagtatcagttgtttactctcatggtaacatggctgactgggagctgtgattcacagcagctacccagcattctgagagagtatgtaccacactgatagcctgggaaaagatcaacatgcaaaattcaaggtacggtttctactggatgcataccactttctcactacctaagttttaaaaaaattataacttgaaccatgacaagtcaggggccatttttattgttaatttttcctcatggtatttaagctaccractatcaggagaggagtaaacatcactcaaggaccttacctcctcttctgagaaagagattagtgtgtttccagtgtacatagggtagttgtattatgctaggtgaaactgtgaccttgttattgtcttcatttggagatt

SEQ ID NO: 656415 - DNA, 575 bp, Homo sapiens
actgtaagttccttaagatataccttctcgtttttttgtgaataacagctcatggttaaaacattatcatttcacatatttgaggattggagataattaactatctctgggaaaattataattatttcatttgttcagaaaattttagagtgctactttaatggttactatacaattggaaattattagttttcttatgaaaggaaaagggaatttgcatttattcttactatgtttctagtagytcaattttaatgtaataaactgaaagaaacatcaaattaaagcacacgtgaaagaatatcagaagaaaggaaacaattgatgaggaagaattagatatagcccatattaaaataggctatttaattctgtagctgaagtggaattatttagatttagtttggggtattcatctcaagtgatctgaataaacttgtctagactaatacaagtgatagctttggatttttcagtcctttccatttactcagagaaaatatgaattaagtagggtgtttggctatttgggagcctgctttgtttttgatgatgatgatgatgtggattttgag

SEQ ID NO: 656416 - DNA, 575 bp, Homo sapiens
actgtaagttccttaagatataccttctcgtttttttgtgaataacagctcatggttaaaacattatcatttcacatatttgaggattggagataattaactatctctgggaaaattataattatttcatttgttcagaaaattttagagtgctactttaatggttactatacaattggaaattattagttttcttatgaaaggaaaagggaatttgcatttattcttactatgtttctagtagttcaattttaatgtaataaactgaaagaaacatcaaattaaagcacaygtgaaagaatatcagaagaaaggaaacaattgatgaggaagaattagatatagcccatattaaaataggctatttaattctgtagctgaagtggaattatttagatttagtttggggtattcatctcaagtgatctgaataaacttgtctagactaatacaagtgatagctttggatttttcagtcctttccatttactcagagaaaatatgaattaagtagggtgtttggctatttgggagcctgctttgtttttgatgatgatgatgatgtggattttgag

SEQ ID NO: 656417 - DNA, 575 bp, Homo sapiens
actgtaagttccttaagatataccttctcgtttttttgtgaataacagctcatggttaaaacattatcatttcacatatttgaggattggagataattaactatctctgggaaaattataattatttcatttgttcagaaaattttagagtgctactttaatggttactatacaattggaaattattagttttcttatgaaaggaaaagggaatttgcatttattcttactatgtttctagtagttcaattttaatgtaataaactgaaagaaacatcaaattaaagcacacgtgaaagaatatcagaagaaaggaaacaattgatgaggaagaattagatatagcccatattaaaataggctatttaattctgtagctgaagtggaattatttagatttagtttggggtattcatctcaagtgatctgaataaacttgtctagactmatacaagtgatagctttggatttttcagtcctttccatttactcagagaaaatatgaattaagtagggtgtttggctatttgggagcctgctttgtttttgatgatgatgatgatgtggattttgag

SEQ ID NO: 656418 - DNA, 603 bp, Homo sapiens
agagagccagagccagagacagagcaagtcagacacagagaatgaaaaaacatccaaactaccaatatccttatgaaagacgggacatcactatagaacttaaaaataacaaaaatataataaggaaatactgtaacaactctacatttgcaaattcaccaacaaatataaaatggaccagtttccttgaaagacacaagactcactcaagaaaataatggataacctaagacatgtcatatatttagtcaagcaattagatttagacttaaaaattcttccaacaaagaaaaattttgtctggatggactcactggggaattcmactaaatgctgaagaaggaattttaacaattctgaacaatcccttccaaaaaatagaagaggaagtaacaactctcacctgattttacaagggagcattgttctgatactaaagtcagacaaaaacatgatcaagtaaaacaatgaactaatctctctcatgagcatagatgcagaatttcttatcaaattattaacaaattgaatatggcaatatatacaaaacatactacatcacagtcaggtggagcagattccagtaatgagagcctgtttcaa

SEQ ID NO: 656419 - DNA, 603 bp, Homo sapiens
agagagccagagccagagacagagcaagtcagacacagagaatgaaaaaacatccaaactaccaatatccttatgaaagacgggacatcactatagaacttaaaaataacaaaaatataataaggaaatactgtaacaactctacatttgcaaattcaccaacaaatataaaatggaccagtttccttgaaagacacaagactcactcaagaaaataatggataacctaagacatgtcatatatttagtcaagcaattagatttagacttaaaaattcttccaacaaagaaaaattttgtctggatggactcactggggaattccactaaatgctgaagaaggaattttaacaattctgaacaatcccttccaaaaaatagaagaggaagtaacaactctcacctgattttacaagggagcattgttctgatactaaagtcagacaaaaacatgatcaagtaaaacaatgaactaatctctctcatgagcatagatgcagaatttcttatcaaattattaacaaattgaatatggcaatatatacaaaacatactacatcacagtcaggtggagyagattccagtaatgagagcctgtttcaa

SEQ ID NO: 656420 - DNA, 635 bp, Homo sapiens
aaatatcttatgtaccccataaatatattcacctattatgtatccacaaaaattaaaaattaatgaaaggtttctatgactcatgtgcaaatataattataatcttagtggtcacaaccagtatatatatttttatccttcttgtgtcagggttccccaggaccactctaaagtttgatgatatacatattcacaactatggtttattacagcgaaaggctacacagcaaaatcagcaaagggaaaaggcttatrgggcaaagtccagcggacaccacgtacaagtttccaagaaacctctcccattcgagtcgcacagatgagagtacagatggtccccaacttacaattttttgactttacattgggtttatcagagtattataggcatttgtgacttacaatattttcaacttacaatggttttataaggtgtaacaccactgtaggtcaagaaacatctgtgattcatagcaatgagttgtaacaccagttgtggaatgtcctctagataagttcattagagacttaatgctaactgcttagcacataccacatttccagactttcagaaataaagcaattgtttagaaaaaccatcattgtttttacaaactgtttaggtactacacacc

SEQ ID NO: 656421 - DNA, 635 bp, Homo sapiens
aaatatcttatgtaccccataaatatattcacctattatgtatccacaaaaattaaaaattaatgaaaggtttctatgactcatgtgcaaatataattataatcttagtggtcacaaccagtatatatatttttatccttcttgtgtcagggttccccaggaccactctaaagtttgatgatatacatattcacaactatggtttattacagcgaaaggctacacagcaaaatcagcaaagggaaaaggcttatggggcaaagtccagcggacaccacgtacaagtttccaagaaacctctcccattcgagtcgcacagatgagagtacagatggtccccaacttacaattttttgactttacattgggtttatcagagtattatakgcatttgtgacttacaatattttcaacttacaatggttttataaggtgtaacaccactgtaggtcaagaaacatctgtgattcatagcaatgagttgtaacaccagttgtggaatgtcctctagataagttcattagagacttaatgctaactgcttagcacataccacatttccagactttcagaaataaagcaattgtttagaaaaaccatcattgtttttacaaactgtttaggtactacacacc

SEQ ID NO: 656422 - DNA, 603 bp, Homo sapiens
actagaaaattgaacatctaatcttaaaagccctataataagtgctataagtttaccattaaaaatgctgtggaactctgaagaaaattaatggaacttaaatgattttaatgaattaaaatcacagtgttcagcagtcgtcagttatgtaactaatatgtcctaaaagcaattgttctctctctgccaattgattgagtgttgcatagggatcctgtaggtctcatttctgaccaatacaatcattgctcagactcctgttgaggctacaccctctcacccaaacaaatttacctcaatccataatgattattataaatattagtatcaactttctgaattagaaaaagagcatgagtattgtctatcctaataaggatactattctatgatcttcatctggaattccctgaaagttcactaaaattctacataacccaagcagatttgtacaacagtatctaaaacttcacttgtttttatatatgtctctagggggaatagatagtaatgtattttataaaagtcaattactttatctctmatttattagagataaattatatcactttaaatttttaacaacaaaaaagaattgtggta

SEQ ID NO: 656423 - DNA, 581 bp, Homo sapiens
cacctcacacccactaggataaccattattaaaaaacaaaagacaggctgggcggggtggctcatgtctgtaatctcagcactttgagaggccgagggtggcgatctcatgaggccaggagtttgagaccagcctggccaacatggggaaatctcatctctattaaaaatacaaaaattagccaggcgtgatagtacacatctgtaatctctgctacttgggaggctgaggtaggagaattgcttgaactggagaggtagaggttgcagtgagctgagatctgtaccactgcactccagcctgtgcaacagagcgagactgtgtgcacaaaacaaaacaaaacaaaacaaagcaaaacaraaaaaaacaaaaacaaaaaaacaacataacaaatgttgacaaggatgtgggaaaattggaaccctgatgcaatgttggtgggaatgtgaaatggtgcagctgctttggaatacggtaggcagtttctgaaaaaacaaaaaataatccaatgatctctcttctgagtatatgtccaaaagaattgaaagaaagatctcaaagaaatatttgaacacccatgt

SEQ ID NO: 656424 - DNA, 525 bp, Homo sapiens
acagtatttttgcaaaatcatcttcattctctgcgatcttaagaaatagggtaattcaaaaacagatctagccaaaagagaaaaataaatcagctaaaaacatgtatagatgttacaaggtgacaggaaagtgctttggagaaagataaaggagaggaaggggtgggagtgtttgaggggcagtcagtggggtctgagaatgtgaggtttgagaaaagattgaaggcgggaaagacatgagtcatgcagacatgtttgagggggaggaagcgggggatagtcaaagcagaaagaacctgcacacaagctctgaggttgcagtcggcctgtagtactgaagaagggtggagaaggcctgtgcagctggtgggaagctgtgacagtggagcarggaagaggagaggtaagctgtaactgatgctagtttaatcattaaacattgtacttgcatgaagagaggacgttttatttttccccaactatttgccttaaaaaaaaaatgaagcattgacttatttcacatat

SEQ ID NO: 656425 - DNA, 590 bp, Homo sapiens
agtcgaaaatccatatgtaacttttgactcccttcacatttactaatagcctgttcttgaccagtaaggaaggctcaccgataacaaaaacagtttattaacacatattccatatgttacatatattttgtactgtatttttacaataaagtaagctagagaaaagaaaatgttattaagaaagtcataaagaagataaattatatttgcttgaatagtggaagtggattattataaaagtcttcatcctcattatctttaggctgagaaggagaaagaggaggggttggtcttgcaggctcaggagtggcagaggcaatacaaaatctgcatgtaagtggactgcacagttcaaacctgtgttgttcaagggccattgctacagatatgtgtatagcagtaattgatgattatttggctatatacagccttatttctgttgtaaatatatacttacaatatagaaaaatatatatttktttatatttatcacataaacataaagttttatatttatatatcatataatatgcattatattgatataaattcaaaaatagaaatataaataagattttatatttatatat

SEQ ID NO: 656426 - DNA, 557 bp, Homo sapiens
tattcaactctgctttgtagtacaagagcacagctacagacagtaaataacaaatgggcatggctgtgtttcagcaaaacttatacaaaaacaagcaatgggttggatttggcctgcaggctgtagtttactgactcctagtctagaatacactttgtttctgtttttaagatcacaacacttttggggttctccaaagaatggacaatacctattttgttatttatttatttatttatttatttatttatttatttatttatttattttagacagagtctcactctattgcccaggctagagtgcaatggtgcgatctcggctcactgcaacctctgcctcccaggttcaagcgatcaagcgattctcctgcctcagcctcctgagtagctgggattacaggcgcctgccaccacgcckggctaatttttgtattttcagtagaaacgggttttcatcatgttggccgggctggtcttgaactcctgacctcatgatctgcctgcctcagcctcccaaagtacatttataactctaagatctgcataatctgtgag

SEQ ID NO: 656427 - DNA, 482 bp, Homo sapiens
aatggtccttggccaggcgtggtggctcatgcctgtaatcccagcactttggaggccacagcaggtggatccatctctactaaaaataccaaaaaaaaaaaaaaaaaaatagccaggcatcatggcgcatgcctgtaatcccagctactcaggagactgaggcaggaaatcacttaaacctgggacgcagagattgcggtgagcctcactgctctccaacctgggcgacagagtgagactctgtctcaaaaaaagaaagaaaaaattaaaagaaagaatggttyaatcatagaacatatgctagctagacaatacattcagtgtatgatttcttttcctaaatatttggagaactcccccatgtacttatgaaggtgactgcacacacatcgttgaatgaattttcatgctgtactttattcttttccacattttagtcatccatagatcatcagatatttggggctggctttgttctcttt

SEQ ID NO: 656428 - DNA, 590 bp, Homo sapiens
ttgctcaatgtagaacctatgattcattctttcacttccttttctgtcactccacacatccagaacttatccatctaccttctcattgctaaaatttttcttcttytttcccttctcaccattcttaccttattccaaggaagattactgctgctacgactagaaaaacagtctgaaaattggtctacctaaccactgtatccacttcaattcattcttaattctaagcaaggtgatcttttttaaaggcaaagtgatcacttaataagcttctttcaatgattttcaactacatttatgtcaaagtttaaaatcctcgatatcgcttaaaagaatccttcttgatcttcttgcacttgttcaagcttcattttgctggtcatttttccaattgctccagagaaactgactttttttaattgaagggaaacaaaaatatttctaaaacacaaacatcatgacatacatatcaaagaactttatctttaaatgtcacagacctattcatgaaaaagacactgacattgagaagaaaaaattttaaaaaattgattaaaaatcacatggctaaaggcagtataattgtttgg

SEQ ID NO: 656429 - DNA, 590 bp, Homo sapiens
ttgctcaatgtagaacctatgattcattctttcacttccttttctgtcactccacacatccagaacttatccatctaccttctcattgctaaaatttttcttcttctttcccttctcaccattcttaccttattccaaggaagattactgctgctacgactagaaaaacagtctgaaaattggtctacctaaccactgtatccacttcaattcattcttaattctaagcaaggtgatcttttttaaaggcaaagtgatcacttaataarcttctttcaatgattttcaactacatttatgtcaaagtttaaaatcctcgatatcgcttaaaagaatccttcttgatcttcttgcacttgttcaagcttcattttgctggtcatttttccaattgctccagagaaactgactttttttaattgaagggaaacaaaaatatttctaaaacacaaacatcatgacatacatatcaaagaactttatctttaaatgtcacagacctattcatgaaaaagacactgacattgagaagaaaaaattttaaaaaattgattaaaaatcacatggctaaaggcagtataattgtttgg

SEQ ID NO: 656430 - DNA, 590 bp, Homo sapiens
ttgctcaatgtagaacctatgattcattctttcacttccttttctgtcactccacacatccagaacttatccatctaccttctcattgctaaaatttttcttcttctttcccttctcaccattcttaccttattccaaggaagattactgctgctacgactagaaaaacagtctgaaaattggtctacctaaccactgtatccacttcaattcattcttaattctaagcaaggtgatcttttttaaaggcaaagtgatcacttaataagcttctttcaatgattttcaactacatttatgtcaaagtttaaaatcctcgatatcgcttaaaagaatccttcttgatcttcttgcacttgttcaagcttcattttgctggtcatttttccaattgctccagagaaactgactttttttaattgaagggaaacaaaaatatttctaaaacacaaacatcatgacatacatatcaaagaactttatctttaaatgtcacwgacctattcatgaaaaagacactgacattgagaagaaaaaattttaaaaaattgattaaaaatcacatggctaaaggcagtataattgtttgg

SEQ ID NO: 656431 - DNA, 590 bp, Homo sapiens
ttgctcaatgtagaacctatgattcattctttcacttccttttctgtcactccacacatccagaacttatccatctaccttctcattgctaaaatttttcttcttctttcccttctcaccattcttaccttattccaaggaagattactgctgctacgactagaaaaacagtctgaaaattggtctacctaaccactgtatccacttcaattcattcttaattctaagcaaggtgatcttttttaaaggcaaagtgatcacttaataagcttctttcaatgattttcaactacatttatgtcaaagtttaaaatcctcgatatcgcttaaaagaatccttcttgatcttcttgcacttgttcaagcttcattttgctggtcatttttccaattgctccagagaaactgactttttttaattgaagggaaacaaaaatatttctaaaacacaaacatcatgacatacatatcaaagaactttatctttaaatgtcacagacctattcatgaaaaagayactgacattgagaagaaaaaattttaaaaaattgattaaaaatcacatggctaaaggcagtataattgtttgg

SEQ ID NO: 656432 - DNA, 590 bp, Homo sapiens
taggttgaaaatccttagcatatgcatggagtggcagaatgataacctgggggtgtaggtagtattaagtatttcagttgacacaagcacaatgtcagtatgacattttgcaaaaatttgaagaagcaaacaaaaagacatgttgagtcgaacactgatgaatgataaaggaaagttacggcccccaacattcttttcaatgtagactatacttgaagattatgataatttcacagtcataagtgcaacgtttccaaggttattatgagtcttgaaagcacacagaactgctgtttcccaataatttaaatgtatgtattaaggctaaacctaaagaaattaggaggatattagagtaggaaactgtttttgaataaagttgctcgataaaacacagaattccaagataaatttgtattttagaaaagccatattataattttgtagtataaatttgcccaaagttgcatgggaaaatgcataggatatatctattgtaaaagttacttgttggtttatctgaaaatcwcatttaaatggatgtcttttatttttatttgctaaatctgatagctctttgttttgaaagg

SEQ ID NO: 656433 - DNA, 635 bp, Homo sapiens
agaagtggaaagctttataaatagtgggttacaggaaaaataaagaactttgttcagtcacctcagctgcagtcaacccccaaggagggaaagaggagccccaccgcctcccgcrtgtcattcagctcctctcccagccagcttcgtctccacatgcacacaggctcagggtaattacacggcttgtttgagaagccagtctggagccaaattcttctttttccctcaaatgcgcggcctgttctcctacgccgcagcaaccctcaactgcaaaacatacaaatgaaatattcagatcattacttctgatatcattactcttcacttcctcacttttttgtgaacttctattaatagaccatacttaggtgacccagagggacaggccatcacttactagaatttgaagtaattatttaaaaacattgattggacttagctttctaccctttatggagaaattctaatgacctgacttcattgtgcacattatccaatttgcacatcaacacgtgacatttctgtttaattctggttttgtcacattgatttttcccctagtatataataatgccatcatattgagaattataaaagttcagaacgatccctaactcccctgaaacctgtcatta

SEQ ID NO: 656434 - DNA, 595 bp, Homo sapiens
tcaaaagctatagagatgcttgttacacacagatacaagaacaggaatggaaagcactgatgtcatccccatgggttaaactggactatctgtctatttttcctgcagggtgaggagtttattaacaagaaacagtgtttatcatactaggcattcagataaatccattttccatttaatttattcatttggaaaggtcaacttttccaccaaaacaatttctgtttctttaatgatttctttaataactttctgtatttttgtttgtatttctcttctctcatttaaaaaaatctcttttcaatatgccaatttaattttagcacacctaatacaaatggcattgaaaaacaggtttcttgagtgtctttttttctttttaaaattattctcatcacttcaccttaggatgttttgtaagcgcatcacatgtgtttcatgtgaacctcactcagtactggatctttttctttccatttacatcctaggaagttattgtttcccattccwatactgtatgcatttttctttcctaattggcgcttgctagtagacagaaaaacattacgtttaaaatccatttggctttaaatta

SEQ ID NO: 656435 - DNA, 531 bp, Homo sapiens
ttaacctgtcttctattaaaaaagaagtgaattaaactgttttgaaatatgagctctgctrcttactaaccagctatatagccttgggcaagttacttgacttctcatttagttcatgggtaaagtagaggaggatcataatagaacctactcaggcttctaaggagaaacaagataacctagcaaagtcctcagcacagattaaataataaatattacctcttgtgaatttttcatttgtaaggaagcattttatcccctattttctctcattagcttgacaacagaactttaatccacatgagttgatgccctataatagaggagttgtgggttgatgttattttaaaattctaaccacatttcctcatcttttgatgacacttcaaacttttcattcattagcttggtattgtcaaggcttctaaaattgccagatgtcaggttttaatttgcagggaccccggagatcatctcatccaaccctctcagttttatagtgggaaattaatttaaaatttaaaaaaaaaa

SEQ ID NO: 656436 - DNA, 531 bp, Homo sapiens
ttaacctgtcttctattaaaaaagaagtgaattaaactgttttgaaatatgagctctgctacttactaaccagctatatagccttgggcaagttacttgacttctcatttagttcatgggtaaagtagaggaggatcataatagaacctactcaggcttctaaggagaaacaagataacctagcaaagtcctcagcacagattaaataataaatattacctcttgtgaatttttcatttgtaagkaagcattttatcccctattttctctcattagcttgacaacagaactttaatccacatgagttgatgccctataatagaggagttgtgggttgatgttattttaaaattctaaccacatttcctcatcttttgatgacacttcaaacttttcattcattagcttggtattgtcaaggcttctaaaattgccagatgtcaggttttaatttgcagggaccccggagatcatctcatccaaccctctcagttttatagtgggaaattaatttaaaatttaaaaaaaaaa

SEQ ID NO: 656437 - DNA, 584 bp, Homo sapiens
tagagaaaaatagacaacaaaacaacaaataatgcaaattaaagtgagataatcattttgctgtcaagataggagaaaaaccaagagtgggaagatattatgattcttcaatcatgtgggcatttatctttactgtgcgtgtgtgtgtgtgtgtttttatctgctgagggcctttgaatactctttccttgctcagaacagattgacaatttttaatttaggggacctaacaatacagaccatattttcagggatatagcaactaaaaggtcttaggaaggccarctcaaatccaagcacatggattccagctggggacaggagtgaaaggagtggatttcttgtgtctgtgagcctagagtgaaaaacagcttcaggaaaccttcactttgttatgtatgggatgaaattgaaatcaagtgtattgtgttagggggatcctacaggaagaagatctgggagatttttcttgaggtttgggggcaggcatttagctgagggtggacatagaggagaatctggagggcttttattagaaatatgcttccataccttgcaaaaaactccaaaatatcacacctgtt

SEQ ID NO: 656438 - DNA, 516 bp, Homo sapiens
acccaaaatatctgctacacaaaaagagtttcatttctctcccacaaacaagaagctaagggcaggctgtcctcaactagyatagcaactccataatcattcagaaccaagattccttccatcttttacactactatccttagttagtgacattacttctcaaggttgccacatggtccaacatacccataagtctctgtttcagggaagctggggaaggacattcagaaattctttgtactattattttgcaatgttttataaacccgaattaatttcaaaatgaaaacttatacatttttaaaaaatataaaggaaagaaggggttcttatgcaaagaaaatggaaccattttaatttgacatatattattataatgggcaaaagaatgtactgagtttataaagtaataaggttatatagaagagtagttcttaattttaatgtgatagagagatccatgaataaatatataattctatttatcttgcatttagtagtttgggggagcaaaat

SEQ ID NO: 656439 - DNA, 516 bp, Homo sapiens
acccaaaatatctgctacacaaaaagagtttcatttctctcccacaaacaagaagctaagggcaggctgtcctcaactagcatagcaactccataatcattcagaaccaagattccttccatcttttacactactatccttagttagtgacattacttctcaaggttgccacatggtccaacatacccataagtctctgtttcagggaagctggggaaggacattcagaaattctttgtactattattttgcaatgtttyataaacccgaattaatttcaaaatgaaaacttatacatttttaaaaaatataaaggaaagaaggggttcttatgcaaagaaaatggaaccattttaatttgacatatattattataatgggcaaaagaatgtactgagtttataaagtaataaggttatatagaagagtagttcttaattttaatgtgatagagagatccatgaataaatatataattctatttatcttgcatttagtagtttgggggagcaaaat

SEQ ID NO: 656440 - DNA, 516 bp, Homo sapiens
acccaaaatatctgctacacaaaaagagtttcatttctctcccacaaacaagaagctaagggcaggctgtcctcaactagcatagcaactccataatcattcagaaccaagattccttccatcttttacactactatccttagttagtgacattacttctcaaggttgccacatggtccaacatacccataagtctctgtttcagggaagctggggaaggacattcagaaattctttgtactattattttgcaatgttttataaaccygaattaatttcaaaatgaaaacttatacatttttaaaaaatataaaggaaagaaggggttcttatgcaaagaaaatggaaccattttaatttgacatatattattataatgggcaaaagaatgtactgagtttataaagtaataaggttatatagaagagtagttcttaattttaatgtgatagagagatccatgaataaatatataattctatttatcttgcatttagtagtttgggggagcaaaat

SEQ ID NO: 656441 - DNA, 569 bp, Homo sapiens
acaggaagcatttcaacatgctcaggtcttccccagctccacgttcccttccagctaacactttatttcccatccccttcttaccttgaaagaacttccaacttcactggttctatattcttacctcttcctgtcacctccttgctgtctgtcctctacctccaccatcacactgaaactgctcttgccaaactcatcaatgatgttgttgctgctccacccaaagaatctttccttccttctctttctagatctctttgtggcacaagactcctttgaccatttccttcttcctgacacactttttccatttgcttctttgacattgagttctcctggcttctgtccttcttctctgccctccttttctcacttctttgaagcctcttcttcctctgctcatgcatcaagggctggtgtttctatccctggccttctttactcctgactctgtggctttcctctggtgcaytcattccctctcctggctttcattacctgtccacatgctgatgatgcccaaaaccatattgccagcccagccctctccaaggcctagtggatatttg

SEQ ID NO: 656442 - DNA, 644 bp, Homo sapiens
ctgcttacactattaagaaaaatagagaagagaatacttccaaactcactctatgaggctactastattatcctgatatcaaaaccagacaaagacacatcaaaaaaagaaaactacaggccaataatcttgatgaacattgacacaaaaattttcaacaaaatactagcaaggagtgttttactaaataacagaaaggaaaggcaatgaaagcttccagaagtgtcctaccattcacaatggagatattcagggaaaatattattgctgttttacagccttctgtctgacatggcaggagagacactctctatatatattctatctgtatttctggacactttatttcgctttcttcattattgtttttatttactagaaaaattggatgggaactttatgctattatactgtgattaatgtaagataatatctgtgaagagcattactaaactacaaaatactataaaaaagtataagcatatataatgcaatattattatgctcctattctaaaacaaaatcctgtgctggtgcactagtgtgaagcagtggacttctaactgcagctgcagatctctggggtcccaagactatttcaggtggtacatgagggcaaaagtatttttaccataatatgacaa

SEQ ID NO: 656443 - DNA, 570 bp, Homo sapiens
ttacaagccacgacaaaaacacacaagtacataggtcaatgacaatataaagaaaccacacaaaaatatctgcataataacccactaacaaaatgataacaggaagaaatttgcacatgtcaatactaaccttgaatgtaaatgggctaaatatcccttaaaattgaaaggtgtagattgacaagttagataaaggagcaagactaaatggtttgttgtcttcaagagacccatctcacatgtggtgacaccaaaagactcaaaataaaggaatggggaaaaatttaccaagcaaatgagaaaccgaaaaaaaaacaggggttgctcttctaatttcagataaaacagactttaaaccaacaaagattttaaaaaaatgaaacaaggaagtgcattacttaatggttaagggctcaattcaacaagaagacctaactatcytaaattatatgtactgaacacaggagcacccagattcataaagcaagttctagtgacctatgaagagatttagataactatgcaataatattggaagactttaacaccccaatagcaatataagacgat

SEQ ID NO: 656444 - DNA, 609 bp, Homo sapiens
cagaagaaattatcaacagagtaacagacaacctacaaaatgggaaaaaatatttgcagactatacatctgacaaaggtctaataaccaaaacttataagaaacttgaacaaattcacaagcaaaaaacaatcaaccccattgaaaaaaggtcagaggacaacagacgcttttcaaaagaagacatacatgtggccaacaagcatatgaaaaaagtgcttatcactaaccattaaagaaatacaaatcaaaaccacaatgagataccaacttggatgggcatggtgactcacgcctgtaatcccagcaacctggggagccgcaataggcatatcactcgaggccagaagttccagaccagcctgggaaacatagtaaaaccccatctccaccaaaaaatacaaaaattggccaggcgtggtggcatgtgccttgtagtcccagctacttgggaagatgaggaggagaatcacttgaacccaggaggtggaggctgcagtgagccgagatcatgcactacactccagcctgagtgacagagmaaaactccatctcaaaaacagaaaaaaaaaaaaaaaaagataccatctcaaccagtcagaaaggctgt

SEQ ID NO: 656445 - DNA, 609 bp, Homo sapiens
cagaagaaattatcaacagagtaacagacaacctacaaaatgggaaaaaatatttgcagactatacatctgacaaaggtctaataaccaaaacttataagaaacttgaacaaattcacaagcaaaaaacaatcaaccccattgaaaaaaggtcagaggacaacagacgcttttcaaaagaagacatacatgtggccaacaagcatatgaaaaaagtgcttatcactaaccattaaagaaatacaaatcaaaaccacaatgagataccaacttggatgggcatggtgactcacgcctgtaatcccagcaacctggggagccgcaataggcatatcactcgaggccagaagttccagaccagcctgggaaacatagtaaaaccccatctccaccaaaaaatacaaaaattggccaggcgtggtggcatgtgccttgtagtcccagctacttgggaagatgaggaggagaatcacttgaacccaggaggtggaggctgcagtgagccgagatcatgcactacactccagcctgagtgacagagcaaaactccatctcaaaaacagraaaaaaaaaaaaaaaagataccatctcaaccagtcagaaaggctgt

SEQ ID NO: 656446 - DNA, 540 bp, Homo sapiens
aaacactggttcaaactgctgaatcaaaagaaaggtttaattctgtgagatgaatgtgcaaatcaaaaagcactttctcagaaagcttccttcgactttttatctgaagatattttctttttcaccatagcctcaatgcacacccaaatatcccttcaaagactatacacagtgtttccaaactgctgaatgtgtagaaaggtttaactgtgggatgaatgcasacatcacaaagtggtttctcagatagcttccttaaatttttatcctgggatattcactttttctccattggcctcaatgagctcctaaatatccattcacatcatgaacaaaaacagtgtttccaaactgttgaatcaaaagtatgatttgacactgtgagatgagttcacacatcaccaagcagtttgtcagaaagcttctttctagtttttgtctgaagacattttctttttcaccataggcctcaatctactctgaaatatcccttaacagattctacaaaaacagtgtttccaaattgctgaatgagaaaaa

SEQ ID NO: 656447 - DNA, 551 bp, Homo sapiens
atttgccaccactctctcactgcctgcaatgagatctagttagccagagatgtttttcaggctttttcagatattatgttcatgttttgacttgccatgtagcatagttaaggaggcctggctttgttttcctactgtgaaaggtttggagagtttgatgtcccactgggctgaatgaatgacagtcaattcaactttcttcctcaygtaggtatgcataagtgacttctcaactattagaaagttacttttaagtaggattcacttgagtaataaccaccttaatatttctcttcttctcttaaaaggaagagaaacatttgccatataaaatactgtatatcttatttcaatataaatagcaaattgatttttattattcatatgcaatactaaagacccccagcaacatttcgaatcagagtttcacatgaaatatgtaaaattgccaaacttgaactgaaaggcatcttaatttcatcattgaaatggtaacttttgcaataaatattttgaatattactgaaaaataagagaatgaaaggcggagg

SEQ ID NO: 656448 - DNA, 551 bp, Homo sapiens
atttgccaccactctctcactgcctgcaatgagatctagttagccagagatgtttttcaggctttttcagatattatgttcatgttttgacttgccatgtagcatagttaaggaggcctggctttgttttcctactgtgaaaggtttggagagtttgatgtcccactgggctgaatgaatgacagtcaattcaactttcttcctcatgtaggtatgcataagtgacttctcaactattagaaagttacttttaagtaggattcacttgagtaataaccaccttaatatttctcttcttctcttaaaaggaagagaaacatttgccatataaaatactgtatatcttatttcaatataaatagcaaattgatttttattattcatatgcaatactaaagacccycagcaacatttcgaatcagagtttcacatgaaatatgtaaaattgccaaacttgaactgaaaggcatcttaatttcatcattgaaatggtaacttttgcaataaatattttgaatattactgaaaaataagagaatgaaaggcggagg

SEQ ID NO: 656449 - DNA, 551 bp, Homo sapiens
atttgccaccactctctcactgcctgcaatgagatctagttagccagagatgtttttcaggctttttcagatattatgttcatgttttgacttgccatgtagcatagttaaggaggcctggctttgttttcctactgtgaaaggtttggagagtttgatgtcccactgggctgaatgaatgacagtcaattcaactttcttcctcatgtaggtatgcataagtgacttctcaactattagaaagttacttttaagtaggattcacttgagtaataaccaccttaatatttctcttcttctcttaaaaggaagagaaacatttgccatataaaatactgtatatcttatttcaatataaatagcaaattgatttttattattcatatgcaatactaaagacccccagcaacatttcraatcagagtttcacatgaaatatgtaaaattgccaaacttgaactgaaaggcatcttaatttcatcattgaaatggtaacttttgcaataaatattttgaatattactgaaaaataagagaatgaaaggcggagg

SEQ ID NO: 656450 - DNA, 529 bp, Homo sapiens
attccacggtgtatatgtaccacaatatgttcaattttagtttattacaacttatatgcaacatacaatggcaagatgaatcagatcagaagataaacaattgagtgtgaaaagacagcagtttttttcctgttttattctctgcagatgtaattttcaacgagaatacattttattgcattagtagtgcttttagaagagacatcwatatgatgcccaggctggtcttgaactcctggtcttaagtgatgctccctcctaagcttcccaaagtggtaaattgtacttcctgagggcatagaaaagagacatagaagcaagtgaaattggtattacccttttttctgttattctttattagtaaaacaaattaggtttttctttccttggttttcatgtgtccaagctcctttctctttcatttcacatgtgcacaaatataataacatacacttttgaacatcaaaagttgaatgatgaaagatcattcgttagcccaaatcaacctgcacatgactttttttttatt

SEQ ID NO: 656451 - DNA, 604 bp, Homo sapiens
tggtgtctgacctgctttgtatctctggattttcacactagagtgcaattatgtggcatatccactctgatttttgcaagtttaagaagttactttagacacattgtaatgtttctttaagcatatttcactcccataaatggggtaacaacattccatattaaagttagtaatatattacaattaaagtgtctaattctcagatcctttgtaacacatgggctacaataaatcacatacaaaaaaagtcttaaattattagaatctattatgtaaaatgtgactaagagaatcatgctagttttcagtttattgcctctgmtctccaaatgcagtcttcaatatatgttctgtactaatggacaggcatctttaagcatttctgcttaccagtaaggataccagtaagcagaaagaaggctgttctgctctttccagctgctgcatggcgggccagcagtgtgggtatgagaacatctggcgtcattctgccccagcgacatgttcaaaatacaccacccctcagtcctagcctgtcctagtgaccaccttcatgcagccctcttgagagagacgctatgtggtccaggtctcttgcccacac

SEQ ID NO: 656452 - DNA, 604 bp, Homo sapiens
tggtgtctgacctgctttgtatctctggattttcacactagagtgcaattatgtggcatatccactctgatttttgcaagtttaagaagttactttagacacattgtaatgtttctttaagcatatttcactcccataaatggggtaacaacattccatattaaagttagtaatatattacaattaaagtgtctaattctcagatcctttgtaacacatgggctacaataaatcacatacaaaaaaagtcttaaattattagaatctattatgtaaaatgtgactaagagaatcatgctagttttcagtttattgcctctgctctccaaatgcagtcttcaatrtatgttctgtactaatggacaggcatctttaagcatttctgcttaccagtaaggataccagtaagcagaaagaaggctgttctgctctttccagctgctgcatggcgggccagcagtgtgggtatgagaacatctggcgtcattctgccccagcgacatgttcaaaatacaccacccctcagtcctagcctgtcctagtgaccaccttcatgcagccctcttgagagagacgctatgtggtccaggtctcttgcccacac

SEQ ID NO: 656453 - DNA, 652 bp, Homo sapiens
gattttcattaaaatctttcaaaattgtagtatgagaacctacgttaaaccactggtagatgaattgcaaagaatgatraagtagaaacagtaactgtcctgttaataaataacctttataagctattaaatattgttttaatagcttaaatataaagatgatctttttaaaagccttggacttaaaaataaatatttacttaggaactagatagagccaacagttttgcctaaaagaactaagaaacaataatcaaatattctatatttgtcattattattattttaggaaaatacctcctcctaaaaaatatcacttccatatatatttatggtaaacatgtgatatgatttattgagtaatatttatctcaattggaaaatttctatgcaaaatattttttcattgtgtaacattttattccctataggggcatatctcaggggaacctgatgaaagccaacgcacaatgtaagaactttcactgtaaggaaaatttgaaggcctggcatggtggtggctcccacctatgatcccagcactttgggaagtggaggtgggcagatcacttgaggccaacagtttgagaccagcctggggttttagtagaaaccccgtctctactaaaaatacaaaaattagccaggtgtg

SEQ ID NO: 656454 - DNA, 596 bp, Homo sapiens
ctgcagcaagttaacaccttgaagtcattaaaagccctctacaaatggaaagtattttgggcagcacttgaagaaataacacacataaagctaactacctgyggcaaggcagcagaggcactgccacaccctccagcttctctccacagtgtcaaccccacctccttctccctgctcatcttcactttctgactttcccagtttccaggatggacaatgagtggagaaggtcctggtgggcagggagcggctaggaaggaaggagggttgtgtgtgatgcttttctccaagcatatacccttgtcttgctcaggatctggagagaggaccctcccaccctctccattctagtctaaaggtgtcttctctcagggcagcctccttagtaaggtggggacctttgtgtcctcagagtcctcagaaggggactttgccacctgaattacgggaggaggagggatgacagctaccggaaagagggaggctgatgaattatgtatggctggaggtgatggtaaacagtctctggatgatgagctggcggcagacaggcagcactgggcgctgagtcatggcaaagggggtaattagtctgt

SEQ ID NO: 656455 - DNA, 596 bp, Homo sapiens
ctgcagcaagttaacaccttgaagtcattaaaagccctctacaaatggaaagtattttgggcagcacttgaagaaataacacacataaagctaactacctgtggcaaggcagcagaggcactgccacaccctccagcttctctccacagtgtcaaccccacctccttctccctgctcatcttcactttctgactttcccagtttccaggatggacaatgagtggagaaggtcctggtgggcagggagcggctaggaaggaaggagggktgtgtgtgatgcttttctccaagcatatacccttgtcttgctcaggatctggagagaggaccctcccaccctctccattctagtctaaaggtgtcttctctcagggcagcctccttagtaaggtggggacctttgtgtcctcagagtcctcagaaggggactttgccacctgaattacgggaggaggagggatgacagctaccggaaagagggaggctgatgaattatgtatggctggaggtgatggtaaacagtctctggatgatgagctggcggcagacaggcagcactgggcgctgagtcatggcaaagggggtaattagtctgt

SEQ ID NO: 656456 - DNA, 560 bp, Homo sapiens
ccatttcagagactttggggagccaagttcacctctgaacttctgggctagtcattttcttgctcctctccttaaatctttttcctgacctgccctccccaacttctatctgtgcactaagaagatgcttaatgaatatggcagaataaaaactcttggctgtctcatttcactcaagccaaagtgcttgacccacaggaaaatgcttaactggatggattttttttttttaaagaayaatctccttgaaagggtaaaggacctaagagtgagtgctataatcccagcttttgtaataccactcaatggaggtctctgaattccagtaaagagcagtgaaattttattatcacaaaaaaggagaaaaatgtttcaattagaaaaagattctcaattgtgctattttaaaagaaaataacttcatatcaaacatatttaaaataaaaaaataaaaatgggcctaaacgagtagaggagcatattattcaaagtacttgggatcgagattcaaaggactttggttcaagttcctgtgctggcacttactggctctgttatct

SEQ ID NO: 656457 - DNA, 560 bp, Homo sapiens
ccatttcagagactttggggagccaagttcacctctgaacttctgggctagtcattttcttgctcctctccttaaatctttttcctgacctgccctccccaacttctatctgtgcactaagaagatgcttaatgaatatggcagaataaaaactcttggctgtctcatttcactcaagccaaagtgcttgacccacaggaaaatgcttaactggatggattttttttttttaaagaataatctccttgaaagggtaaaggacctaagagtgagtgctataatcccagcttttgtaataccactcaatggaggtctctgaattccagtaaagagcagtgaaattttattatcacaaaaaaggagaaaaatgtttcaattagaaaaagattctcaattgtgctaytttaaaagaaaataacttcatatcaaacatatttaaaataaaaaaataaaaatgggcctaaacgagtagaggagcatattattcaaagtacttgggatcgagattcaaaggactttggttcaagttcctgtgctggcacttactggctctgttatct

SEQ ID NO: 656458 - DNA, 559 bp, Homo sapiens
taaatctttagtaaatatgactagttaaatattgctggttgaatagaaagggtttcttttctaagttataaacaaaatacccatgtatttaactttagggtacttgctttgatggtaattgactatatcatgtgctatatcattgattaatagaaaaataacgtagtcattagactaagctttatctaatttctactgtattttttccaagcataattgctaaggatgaataaatcaaataaatataagtagaatcaaagactacaaaggtactccattttaacaacaattatgttgcataatatgtttacttaaagctttctcaaatctctttgacaagtacacccttcaggttttactaagttaaattaagtgataggtattcaaccaaattttagatcattttcaaataagataaaatactaaattwataacaaaaggtttatctattttggcttcttattataaagaaacaaaatatattttggtctgttaattagtatgttctgtttcacattttttaaaatttgtgggaaaagtatttttagaaattacaaag

SEQ ID NO: 656459 - DNA, 429 bp, Homo sapiens
ctctgaggtctccttggacccagaaggtgtcccttcagtctgttagaggggcttaagattttatttttggtttacaagtrtaaaaatttcttgatgacataatattctataacatgtatgagtcattatttaccaaattattcttggaaaatacatatatgtgtgtgtgtgtgtgtgtacgcacaaacaaaaaacaaaaaataattatatttattatatctaaacaaaaactaattatatctatctgtctctaaatataattattttttgttttacacaattatgtggtagctatctccatgtgttatttttcttttgtctattgtgctattgtactagagaaaattacaaggagcaaaattaatatttctaaagttattaacattttcatgtctctttcaatccttgctgtttttgaaatgagaattc

SEQ ID NO: 656460 - DNA, 540 bp, Homo sapiens
agttttatcacttctcagacaatgctaggatttaagaacatattaacttcatttatttcttgtctgtttgagttattgctgtcatacattttaatgatacatgtattttaaactccataaaatattattattactttgtagtcaatagccatttatatttatactcatatttacctctctgttgctcctcattcctctctgcaattctgtctttccagctgggatcatttcctttctgtctaaagaactcccatcagtatttcttttagtgtggatctgctgacaaaaatctgtattatctacaaaatcttgtattaaattggaaaggtattcactggatatagattgctgagtttccaacaatttctttcagcacttcaagatgytattctattttcttctggcttccatggtttctgttgagaacttagttgtcattgtagttcctttgaaggcaatttgcttttttatctggctgttcttatggtttattatttgtttttgtcatttggcaatttcactgtgaagtgactagtaatg

SEQ ID NO: 656461 - DNA, 578 bp, Homo sapiens
ccacagctggcattcaattgcaactctaaattctaaagtgctcagrgtcaatataatgcactgacgattcagacctgactgggcattttcactgcataaatctaaaaagtaaacaatctcattatgtttgagaggatggatggggagaaaactgatctatatttccactaaggtagccaagaaatattcacatgaagggacaatgggagaggagctggcaagagtttgggcagtacttagaaggaagatgcattccttatcatatagattacatatggcagtgaattgacagaggattcactgggacatcttcagaaagtaagtaatgtgtttcaacaccactaaagtgttaaaataggcttcttttcttctcgccagtatgaaaagttagacaggagtcactcccaagaatagtaaaggacactcactggggacagtcatgatgggtgaagaagggatacatatttttaaggcagcaggaataaatttcatcatccttcccagaagacagcaagaattattcaaggtggccaccaagtctggaaaccaggcaaatcttttaacaaatggtttattga

SEQ ID NO: 656462 - DNA, 578 bp, Homo sapiens
ccacagctggcattcaattgcaactctaaattctaaagtgctcagagtcaatataatgcactgacgattcagacctgactgggcattttcactgcataaatctaaaaagtaaacaatctcattatgtttgagaggatggatggggagaaractgatctatatttccactaaggtagccaagaaatattcacatgaagggacaatgggagaggagctggcaagagtttgggcagtacttagaaggaagatgcattccttatcatatagattacatatggcagtgaattgacagaggattcactgggacatcttcagaaagtaagtaatgtgtttcaacaccactaaagtgttaaaataggcttcttttcttctcgccagtatgaaaagttagacaggagtcactcccaagaatagtaaaggacactcactggggacagtcatgatgggtgaagaagggatacatatttttaaggcagcaggaataaatttcatcatccttcccagaagacagcaagaattattcaaggtggccaccaagtctggaaaccaggcaaatcttttaacaaatggtttattga

SEQ ID NO: 656463 - DNA, 568 bp, Homo sapiens
gataatacataacatctgttctctttacatttttacagaatacaatgtatcatcattacctatagttgccttgttccacaatagatctcttggaaattattcctcctatgtaactgtaattatgtattctttaatcaacacctcctcacccccacytcccaactaaagtcctcagcatctggtatccaccattctaccctctgcttctttgagatcaacttattttagattccacatatgagtaaaatcatgcagtatttgtctttctgtgcctggcttatttcacttcacgtactgtcctccatgttcatccacattgtcacaaatgacaggattttattctttttatggctgagtagtattccattgtgtatgtgtgctacatattctttatccattcatctgttgatggacacttaggctgattccatatcatggctactgtaaatagtgctgtgataaacatgggagtgcagatatctttttggtcttttggcaatatttcttgatgctcttacagctctgtaagatgagaatattaatactgatgtccttttatctatgtccc

SEQ ID NO: 656464 - DNA, 468 bp, Homo sapiens
ctaagctgtgggagttatttatatcctactactcaaggtcatcgccaaggtctgatttttcacaaaaaaaaattgtaacctttggcataaatgggttaatgggttcaaaaaatagaaagaatgaataagacctggtacatttaaaatagctaaaagagtataattggattgtttataacacaaaggataaaaatctgaggggatagataccccattttccataatgtgattagtatgtgttgcatgcctattgcaaagcaagtgtatatatttatggggtacatagggcatatcttgtgtacctcataaatatatacacatacacctactrtgtatccacaaaaataaaaaaattaaaaaaataaagagatggaaaatagaatttgcactgttaatgataagaaataagacatgtttacaaactttcaacaaataaaaataactgactttaaatataaatttatatag

SEQ ID NO: 656465 - DNA, 468 bp, Homo sapiens
ctaagctgtgggagttatttatatcctactactcaaggtcatcgccaaggtctgatttttcacaaaaaaaaattgtaacctttggcataaatgggttaatgggttcaaaaaatagaaagaatgaataagacctggtacatttaaaatagctaaaagagtataattggattgtttataacacaaaggataaaaatctgaggggatagataccccattttccataatgtgattagtatgtgttgcatgcctattgcaaagcaagtgtatatatttatggggtacatagggcatatcttgtgtacctcataaatatatacacatacacctactatgtatccacaaaaataaaaarattaaaaaaataaagagatggaaaatagaatttgcactgttaatgataagaaataagacatgtttacaaactttcaacaaataaaaataactgactttaaatataaatttatatag

SEQ ID NO: 656466 - DNA, 472 bp, Homo sapiens
ggaacaagtaagggaatggcaggaggtcaggtttggtcagatcactaggagctacccctgtgtgccttataaagtctggcctttacccttaacacaggtacaagtccaggtcctatttacctttgtatgattagcacccaacataatattgtaaaatatagccagctcrtcttccacgtatgtttgttgaatttattccatctttaaacacacacaagggattctcaggatcagatttgcatttcaggatctggctaaacactgaaatgaaagatactggtgaagataagctggcaagagattactacagagacatgggaggctttgaaatgtaggaatgaaaaaaaaaaggcccactttagaaacactgttggtgtgctcaagagaaagaagggaatgccaaaatgttaattgcaataatgaatgctattatccaagatgagacccaggagaggactttcaatgccactgc

SEQ ID NO: 656467 - DNA, 532 bp, Homo sapiens
ctcaacataataaaggtcatatatgacatgcccacagccaaaatcatattcaacagtaaaaagccaaaagcttttcttctaagattagtaacaagacaaggatgtccattcttatcacttatattcaacatagtactagaagtcctacccagaccaagtggacaacaaaaaagaaatgaaacctgccaaggctaaatcataaacaaattattaataaaaaggaaaaagtgaaattgtctgtttacagatgacatygttttatatagggaaaaccctaaatacttcactaaaaaattgttagaattaataaatgaattcagtacaggttgcaggatataaaatcaacatacaaatatcagtagtgcttatatatattaacaacaagctatctgaaaatgatattttttaaaaccccattacaatagcatcagaacaaaatacttaagaataaaattaaccaaaaagtgaaagatttgcatactaaaaactataaaacattaatgaaagaaataataaggatccaaataaatgg

SEQ ID NO: 656468 - DNA, 520 bp, Homo sapiens
tgcttcatcttgatactctttttttaaaaaaaagctgcttcattttagagactcacttggcaataattaagaccactgacattaatataacaaaatgtttctattttcccatgatatattgagcaattaaaattattgcctgtcttatacaaggaaatttattcccaaaggaaaagcctatgggaaaacagtggcatgctcagatccccattacctgttcactgatgacagattaatttaaaagggtacataatagctgaaatctccaaaatgcrttagttgttttcttaaatttttctgaaaacaaccaaacaaaattatagtactatgagacagtatgtgccataaaaacaactttggagttactttcaaattttttcctggaggatgaaggatagcttattaaatgtcagttatgaacttagtgacaactaattatctttcatttcacagcagctgataataagtaagagcaaaaatggtgaatacctactgttgccaggtaactgcatctactgta

SEQ ID NO: 656469 - DNA, 466 bp, Homo sapiens
agctgaatttcctacaaacttttgaaggccacatgtaggctggccataaggagccctaattatagagcaaataagtacccacctacccctaaatcgttctcatgaggscttcactgagtacacagtggcagcaagctgatggctaagggcaggacagaaatctgagaaagatccctgcccccacccaatgtacacaggaccttcactgattatacagcagcagtacagtacagtacagtggaacctgagaacagggcaggagggtagagaaagaccccctccaaagcacaaaaatccttcattgaatgcacagaagtggctcaccaagagtgcagagaactccacagcagcccaaagctggcagctgggctggatggcatagagagatctctggggactcactatgatcagatcttaagtgctactgaaaggacagtcctgatcctgccctcaaaacatctggtga

SEQ ID NO: 656470 - DNA, 454 bp, Homo sapiens
tttgttctgaaggccagggacactttgcgtagccacttggcatcaggaagtcaagccctggttttstaatggacatccaatactggtggtatgcaacgagatgtaaggattttccaaaatgtggccttatgtagcacaccctccactgtgggggtttgcaaagatgaggccccatctccatcctgttgaatcagaagctctggggggtgacaccctggtatctgcctttttagcatactctgagagaaaagatgcttttatgggcttcagccaagtacaaaaccatagaaccagactgtcaaagctgggtaggggcttgggtatcctctactcccactcccatatttgtagatagggaaactgaggcccaaagaggggaagtaattcaccctagctcccacagctaagtcatgtgtgcccccaagctagaactctaaaaattattattttttat

SEQ ID NO: 656471 - DNA, 597 bp, Homo sapiens
tactgacaatgaatgggaaaagaacatgctggaagaggccagaaatcagcagagtagtcttattgccaaagttcaggcaagaagggaagacaatagaatgagctatgtgtcctgaaacaaaacaaaagatctctcctctctctcagtctctctctctctctctatacacacacacacacacacacacacacacacacacacacgtatatatgtgtgtgtgtgtgtgtgtacatatatatacaaacatacatacatacasggtctcattctgttgcccaggctggagtgcactggcacaatcatagctcactgcagcctcaacctcccaggctcagctgattctcccacctcagcctcctgagtagggactacaggtacacaccaccacacctagctaattttttttttttttgtattctttggagaagaggtttcaccatgttttccatgttttctaagagctagaagaggtttcaccatgttttccaggctggtcttgaactcctgagctcaagcgatccatctgcctcagcctcctgaagtgctgggattgcaggtctgagccactgcactcagcctcaagacataattttaatg

SEQ ID NO: 656472 - DNA, 463 bp, Homo sapiens
aaaacagaatttaatctacagaaatacacttcacagatgttttaggaacagaacctagagaaaatgaaagtcaaaatttaataaaagaatttgtcaggaacttcaaggtaaagactccatgtattttttggcaactataaaacactaagaaggctttttaaatattaaaaagccatttaaacacttcaaattaagattcctcaatatacttcagatttctgtactgagttaccctctcgagtgtttggaagtcttttcttcctcattaagcaaacacttacacagtgttaycatggctttgtattcttagttttgaagacaggcaaatgtactagccaaatatgccaaactaacttattaagagcattccaaacaacattttggatccaattctttttaaatgcacttagatctttcttatattagaatcaagcatatttgtcaattatttaatgtttattat

SEQ ID NO: 656473 - DNA, 537 bp, Homo sapiens
gtgcctagatgatgatctttttgcgatgaatttcccagatgttctttgtgcttcttgtatttggatctaggtctctagcaaagctggggaagttttcctcaattattcccccaaatatgtttaacaaacgtttagatttctcttcttcctcaggaatgccggttattcttaggtttggtcatttaacataattccagatttcttgaaggctttcttcatattttcttattcttttttctttgtctttattggattcggttaattagragaccttgtcttcaggctctgaatttccttcttctacttgttcaattctattgctaagactttccagagcattttatatttctataagtatgtccattatttcctaaagttttgattgttttttatttatgctatctagttcattgaatatttctccctttacttcttgtatctttttttttatatatctttacattgggcttcacctttctctggtgccttagcttaataaccaacctagtgaattctttttcaagtaagtcagggatt

SEQ ID NO: 656474 - DNA, 588 bp, Homo sapiens
gttttaccactggagtggaagtatggaggcttcttgctatgagatactgaatatgagagggctgcctgtaagaggtgaagaaggaagaaagaaamacaaaaagcagctcaacagtcaaaggccgggttattgtggagaataaacctgagaggggcttctggccgagtgaggtcaggagcactgttttacagactaagaatatttaagagtttagggcaagagagcttatcacaggcttggaatgtttctgtgtctctgtcttgcttatctgggagggagagtttttgtgtctgttcccatacatcttcctgcagctgcaggcactgcctttcaagcgctactgaggtaaggatcctagcaacattaggtggatttgcatcagttgtttgacaagtgtaggaaagaagaaacacaacttttttctcacctgttgaaaagttcgtggctgacaactgtattagttcgttcttgcattactatgaggaactacctgagactgagtaatttatggagaaaagtggtttaatcaacttacagtttggtaggctatacaggaagcatggctggggaggtctcaggaaacttaca

SEQ ID NO: 656475 - DNA, 588 bp, Homo sapiens
gttttaccactggagtggaagtatggaggcttcttgctatgagatactgaatatgagagggctgcctgtaagaggtgaagaaggaagaaagaaacacaaaaagcagctcaacagtcaaaggccgggttattgtggagaataaacctgagaggggcttctggccgagtgaggtcaggagcactgttttacagactaagaatatttaagagtttagggcaagagagcttatcacaggcttggaatgtttctgtgtctctgtcttgcttatctgggagggagagtttttgtgtctgttcccatacatcttcctgcagctgcaggcactgcctttcaagcgctactgaggtaaggatcctagcaacattaggtggatttgcatcmgttgtttgacaagtgtaggaaagaagaaacacaacttttttctcacctgttgaaaagttcgtggctgacaactgtattagttcgttcttgcattactatgaggaactacctgagactgagtaatttatggagaaaagtggtttaatcaacttacagtttggtaggctatacaggaagcatggctggggaggtctcaggaaacttaca

SEQ ID NO: 656476 - DNA, 588 bp, Homo sapiens
gttttaccactggagtggaagtatggaggcttcttgctatgagatactgaatatgagagggctgcctgtaagaggtgaagaaggaagaaagaaacacaaaaagcagctcaacagtcaaaggccgggttattgtggagaataaacctgagaggggcttctggccgagtgaggtcaggagcactgttttacagactaagaatatttaagagtttagggcaagagagcttatcacaggcttggaatgtttctgtgtctctgtcttgcttatctgggagggagagtttttgtgtctgttcccatacatcttcctgcagctgcaggcactgcctttcaagcgctactgaggtaaggatcctagcaacattaggtggatttgcatcagttgtttgacaagtgtaggaaagaagaaacacaacttttttctcacctgttgaaaagttcrtggctgacaactgtattagttcgttcttgcattactatgaggaactacctgagactgagtaatttatggagaaaagtggtttaatcaacttacagtttggtaggctatacaggaagcatggctggggaggtctcaggaaacttaca

SEQ ID NO: 656477 - DNA, 535 bp, Homo sapiens
atctaatcttgttttatccayattgtattctattattgcttaactgaattttaataaagcattattttcttctagaatactagacatatccactcattttagaatgtggcatattgatcactgttcaggagaattgaaagcattctcccacaaagaaatcttgttcctactcaaataggctactcagagatttgcccttgtaaaacatgttccatcaccaactgataatttggagtgtgaaatttggagccattataaataaatgtaggatttatttgaagccaatatatttcacgcattcagcatttctcacacaattatcatttatgtggaccttttattgaagctcagtttcagccaatttaaaacataattgcttatcttacctaaatgcacacctgagacatgcaaagtaaattttggattgccaatgtcatcccaaatgctgagacacaattcttgatagcttgctcacatttttgcacatcttgcaagagagttactaacacccttttacctggagtttgtttttaag

SEQ ID NO: 656478 - DNA, 520 bp, Homo sapiens
gtcctgaaaactgaggggtacaagttggcaccagcacaccctagagctccccccggctgctcggtgctcacgcactgcgaatctccaccagcctctctgtcctccagtcagtctgtctgtctgtcgttgggtcagcctaccactctgtttcccgaggtcattctctgagctggggtgaggggccaggaagatgtcactctctctgtcccttaggtgtctcctccctgggtctatactggggtccttgtctcccccagctctgctgatgtgtgtccsggtctctcgcctcctcggtgcctcctctgactagagggtgtctgtgggttgcttgacagcccgcctttcctctgggcctgctgctctctggctctgggtatgtgtgggccgaggtggtgtgtagctgacttctctgtgggcctctaagtcagtggttctcaaagtgtagtccagggggccagtagtgtcacctgggaatttgtcagaagtgcacattcccagcccaccctagacctaccaaatc

SEQ ID NO: 656479 - DNA, 520 bp, Homo sapiens
gtcctgaaaactgaggggtacaagttggcaccagcacaccctagagctccccccggctgctcggtgctcacgcactgcgaatctccaccagcctctctgtcctccagtcagtctgtctgtctgtcgttgggtcagcctaccactctgtttcccgaggtcattctctgagctggggtgaggggccaggaagatgtcactctctctgtcccttaggtgtctcctccctgggtctatactggggtccttgtctcccccagctctgctgatgtgtgtcccggtctctcgcctcctcggtgcctcctctgactagagggtgtctgtgggttgcttgacrgcccgcctttcctctgggcctgctgctctctggctctgggtatgtgtgggccgaggtggtgtgtagctgacttctctgtgggcctctaagtcagtggttctcaaagtgtagtccagggggccagtagtgtcacctgggaatttgtcagaagtgcacattcccagcccaccctagacctaccaaatc

SEQ ID NO: 656480 - DNA, 552 bp, Homo sapiens
cagtaaggggtagagggatagagccaggccgtcacctcgtgtccccctcgctttcaagctggctctcttcccatggcatcacgctgcctgcaacctctgtttgcctgcaaacagacaggcgcggcctctgtctgtttccctctctccaaagaggcctgcatcaagggaaggctgctggtcctccaagtgccagcaatggagcagtgcagggtagtagtccctggagtctccctgtctgggttcaaattccagatctgggctgggtgcagtggctcacgcctgtaatcctagcactttgggaggctgaggtgggggaatcacgaggtcagggtatcgagaccatcctggccaacatggygaaaccccgtctctatctaaaaatacaaaaattagctgggtgcagtggcgcacgcttgtaatcccagctgtttgggaggctgaggctggagaatcgcttgaacccaggaggcagaggttgcagtgagctgagaccatgccactgcattccagcctgggaaacaaagtgagattccatctaaaaaaaaaaaatcc

SEQ ID NO: 656481 - DNA, 622 bp, Homo sapiens
acaaaactgaacactctttagagtaagatagcatagctgagagtctctacaaggtgtcatttttaatgttcagtatggaatgaaaatttaataacatatgaagaagcaggayatgacttgtgatcaaagggaaaatgggctacaaatgctgacccacagatgacccagatgttagaattagcagacacagactttaaagctgctattaaaaatatagtgaaggattgatttaccagaaaaggatggaatgggtgaataaatggcagaatctcagcaaatagatggaaactaaaaagaagaaccaaatgaaaatcctagaactggaaaatatagtatctgcaatgaaaaggtcattgaatgagcttaacaacagaatggacacaacaggaaaaaaatcatttaattcaatttgcaatgtactcaataaacttctctaaactgaaatatagaaagaaaaaaatagaatgaaaaaagaacagaggagccaagactgtggaatgatatcaaaagatttaacatttgtgtaactagggtttcaaaaagtgaaagggtagacagaaaaatatttgaacagttttgtaaaattgatcaaagacagcaccttccagatccaagaaactca

SEQ ID NO: 656482 - DNA, 554 bp, Homo sapiens
tgttgcaacaagtcacattcttctttttctttgccaacaagccacacttcccacggtgtcatgctgctttctagtaagcgcacctgtttctattttattatcttctgatccaacctcattgctacaaaatagagactactatagcagttgtacacgacactcttttgcttactactcaaaatcacttagttgtacagtaaatggaaaatttaataatatatttacaatattgtgatttcatagatacaaatgaattaattatatgtaagtaygcatttaaaaatcatgaaaaggaagtccaatatttgaattaatttattcatcaaactgcctttgaattccttcatcttataaaaccaaattatttaaaattgaattgaaataagccacacccaatcctcactgccaataattttttattcttaaaaatatgttttgggtaactaattacaacacataaccctgattagatattggagcagacttttttcttttcctcccttaaatatatcagaaaaaaagaatatgtatataaatagaatgataaatcaaat

SEQ ID NO: 656483 - DNA, 614 bp, Homo sapiens
ggttgactgttgagtttcctaatcctgtgttcactgcagcaatttcagcactaaagggtgccctaagttcagatatgctgtgattcttgcagactcctggataaccagtcctgatgcactttgagaagatgagggagatttccctgcgtccccatgaaaagtttcttgctcttttccttctctttctcccaagtggaatgagtcttttaccattcttggacgtctagagttaaagggaggggtaacatggccactcccattcctgctgcagctggcaacatgctaagtcacagcaaaagctcacagcctaagacaccagggaagcatcagggcttgcccaaatcctgcagcttgcccactactgtgtgactgccactgatgtttagtcaaggtccacagtaactttagtcttcaggtggtgaagccacctgggactcaygtccaactcaccaggtcagcagattcctttctgtcctggggtggggccagaaaacatcattcccaggaagcatcatttccaagaatgtcatgaaataggggactttgaaattctgcctggtgctctgttttataaactgtggctagggtgataccaggttgcaagacaaaatcct

SEQ ID NO: 656484 - DNA, 614 bp, Homo sapiens
ggttgactgttgagtttcctaatcctgtgttcactgcagcaatttcagcactaaagggtgccctaagttcagatatgctgtgattcttgcagactcctggataaccagtcctgatgcactttgagaagatgagggagatttccctgcgtccccatgaaaagtttcttgctcttttccttctctttctcccaagtggaatgagtcttttaccattcttggacgtctagagttaaagggaggggtaacatggccactcccattcctgctgcagctggcaacatgctaagtcacagcaaaagctcacagcctaagacaccagggaagcatcagggcttgcccaaatcctgcagcttgcccactactgtgtgactgccactgatgtttagtcaaggtccacagtaactttagtcttcaggtggtgaagccacctgggactcatgtccaacycaccaggtcagcagattcctttctgtcctggggtggggccagaaaacatcattcccaggaagcatcatttccaagaatgtcatgaaataggggactttgaaattctgcctggtgctctgttttataaactgtggctagggtgataccaggttgcaagacaaaatcct

SEQ ID NO: 656485 - DNA, 596 bp, Homo sapiens
aaataagattgccatacaggcaattatttctatttgagayattgtaagaggctctgcattctttaggcacggaagatgattaagaaagatcttaagcatgtgggtgctttcgtgggttcttcagagactgtcccatctggacctttcccgttatgtggacaatgactcttctcctgctgcagcttatttctcaggaactctcttactgctgaagttctttgctatgacatagtttcctcttgagcagactcccttctagaatgaggccagattgacactaccacagaagtcatgtggttgatgaaattcaggcacttattacctattaccagaaagaacaacaattattttgcagatgcagctctttactctacaggttattttatctttcccaagaatgggccaggaaatagtcctccatgtccttcaattaccagaacacctatgcttcaaattgttctgctgaagcccttctcattatagccggagtttgaagtagcatcctttctttgcccttttctgtttctgtttttgttgttggtgttgttttggggaaagcaaaacagacatctttccaaataagttccattttggaa

SEQ ID NO: 656486 - DNA, 596 bp, Homo sapiens
aaataagattgccatacaggcaattatttctatttgagatattgtaagaggctctgcattctttaggcacggaagatgattaagaaagatcttaagcatgtgggtgctttcrtgggttcttcagagactgtcccatctggacctttcccgttatgtggacaatgactcttctcctgctgcagcttatttctcaggaactctcttactgctgaagttctttgctatgacatagtttcctcttgagcagactcccttctagaatgaggccagattgacactaccacagaagtcatgtggttgatgaaattcaggcacttattacctattaccagaaagaacaacaattattttgcagatgcagctctttactctacaggttattttatctttcccaagaatgggccaggaaatagtcctccatgtccttcaattaccagaacacctatgcttcaaattgttctgctgaagcccttctcattatagccggagtttgaagtagcatcctttctttgcccttttctgtttctgtttttgttgttggtgttgttttggggaaagcaaaacagacatctttccaaataagttccattttggaa

SEQ ID NO: 656487 - DNA, 596 bp, Homo sapiens
aaataagattgccatacaggcaattatttctatttgagatattgtaagaggctctgcattctttaggcacggaagatgattaagaaagatcttaagcatgtgggtgctttcgtgggttcttcagagactgtcccatctggacctttcccgttatgtggacaatgactcttctcctgctgcagcttatttctcaggaactctcttactgctgaagttctttgctatgacatagtttcctcttgagcagactcccttctagaatgaggccagattgacactacyacagaagtcatgtggttgatgaaattcaggcacttattacctattaccagaaagaacaacaattattttgcagatgcagctctttactctacaggttattttatctttcccaagaatgggccaggaaatagtcctccatgtccttcaattaccagaacacctatgcttcaaattgttctgctgaagcccttctcattatagccggagtttgaagtagcatcctttctttgcccttttctgtttctgtttttgttgttggtgttgttttggggaaagcaaaacagacatctttccaaataagttccattttggaa

SEQ ID NO: 656488 - DNA, 596 bp, Homo sapiens
aaataagattgccatacaggcaattatttctatttgagatattgtaagaggctctgcattctttaggcacggaagatgattaagaaagatcttaagcatgtgggtgctttcgtgggttcttcagagactgtcccatctggacctttcccgttatgtggacaatgactcttctcctgctgcagcttatttctcaggaactctcttactgctgaagttctttgctatgacatagtttcctcttgagcagactcccttctagaatgaggccagattgacactaccacagaagtcatgtggttgatgaaattcaggcacttattacctattaccagaaagaacaacaattattttgcagatgcagctctttactctacaggttattttatctttcccaagaatgggccaggaaatagtcctccatgtccttcaattaccagaacacctatgcttcaaattgttctgctgaagcccttctcattatagccggagtttgaagtarcatcctttctttgcccttttctgtttctgtttttgttgttggtgttgttttggggaaagcaaaacagacatctttccaaataagttccattttggaa

SEQ ID NO: 656489 - DNA, 537 bp, Homo sapiens
attctgctttggctgtttcaaccagtcattattttcagaaaatgactcttcagaataaattatgagaataattaaaaattattacttatgttcaaatacattgaaatcaccttttagcatttagtatttattacttatcatctcattgctttgctcttttgagaattcatctcaagaaaaatgtgttcttgggcatatgttagtatataaaggagtccaagtccttaaacaaaataagaaattgcattattaccactttctctaccatacttctcaakcatgaatatttcttacagaccaaaataccaagttcctaacatcagatttcagtcctaacttcgagtttacaaagaaaatggcaggtgtactgggttttatgattctttaatcattacaagtagcttattgttttgaggaattgagaatatttatttattttcttcttctgaaaatgtattatgcataatatacatagagaaaagttgctccagtgtatagctctatgaattttttgaaaggcatttaaatgctatgtga

SEQ ID NO: 656490 - DNA, 599 bp, Homo sapiens
tgtgtgtgtgtgtgtatgtgtgtgtgtgtgtgtctgtgtgyatattggtaaggactttggggcgtcaggaaaacagggaatataagcaaatttagatcagtgttctgtgatgggcaaaagatccctgaaaatcctctcatgtgtgattatgtgaaatataaaggctaacaactaaaataattgcctttagatatagtaatatataactttagtcaacaaatatgcactgtgtatcttcttgtgccagatatggtactgggtaatgggtacagtatttcaaacaaatctaatattcttactatgatagagcttaaaatctgatggggttgtaaattatagtccgtacggagatagattgggcacactttggtaactgattagagatgaggggccagggagaaagggttatagaagattatgtagaagttttgctcttgagcaactgagaggatgaggttggcattaacttctttagggaatacaacaagactgtcaaatctggagaaagacacttttcagctgttgaataatttgctgaggggggtacatatggacatttgtttagaaatgtccagcaggtattaggtgagattctcgag

SEQ ID NO: 656491 - DNA, 615 bp, Homo sapiens
gtcgataaatccagagataagcaaatttactatgatagtgggatgatatatatgctatgagacaggaggacgtgagtatctacaaaaacaaggaggagtgtctcctaacagggactggagaaccaaggttgcagtcagggaagtttttataagggaagagatgttggatggacaacatagaatgagactctgtttcaaaaaacaaaacaaaacaaaacaaaaaaccagwcaaataaaattatttaggagagatggcagggggtggggatgtgctcacaaagggagtgtggtctgttgaggagctgtgaggggctcagtttgtgtccacagggcagctgggttgatgagtggtgggcatggacctggagggatgagctgaggccagagccccatgcagcctagcatgtcatgctttgtatctcatctggagagtggcaggagccactgaagtctttcaacagaggagtaagatcatgttatttgcatttcaggacagcctctttgtgccttggtagcgcccatcacaaaatgagcagatgaatgaggagatgatttctaactttttcagatcatgttcttttttgagaatattaattttttctctagaaaaaatac

SEQ ID NO: 656492 - DNA, 559 bp, Homo sapiens
gagtgccgtagaggctgctgagtggagaattaaggcctgcatttataaacagggtgaccagaagacataccttaaggacaccttgaaattcagccttgatgcctgggataggactgtgacttgctaggacatgcagtcagacagatgaaccaagggggacaccaattagagatgagaggaccctgagaccagtctgcaacttggagcaactgcaagaagatgctccttccagagtacagaggggaaaactgctgctcccaaaaaagattcttccccctctgtccctcagccccatgaaatgggacaaactgatccagtaccacctcagatttaggcctgttaaaagcctgggaggatattaacgaccttccccataaaacartggctttctcttcttatattttatcagcttccattgctctgcatttaaaaggaggcacacaaaattgcaatgccatcctccaaggtgtgtggcaacagccaaggtgagtggaacaaacgtgaacaatgtttcttctgctctcacaccaccaacaacatcaatacagaagacttttgg

SEQ ID NO: 656493 - DNA, 568 bp, Homo sapiens
aataatcagaataaaggtgtgaatggattatttcctgttgcataaatctacycatttttattgattttgcgaagaaaatatcatcatgtttatcaaattggcctaaccttacctgaaagctaaacaacattatagaaaatcacctagaaataactgaccagtatttaaaattaggcaatatttaaaatttcagtaatggcatctgtcttagtccatttgggctgctataacaaaatatcaaagactgggtaatttgttgataatgtgaaattatttctcacagttctgaagatggagaagttcaaggtcaaggggccatcagttttggtgtccagtaagaacctgtgctttcttgattcatcatcacgtggtaaaaggggaaaaaagaagtgaagtgttttcttacaactcttttataaggttattaatcttgattttgtttcagcaacaaatatacttaggtcattaacttcactcatgatacttcagcctttataatataatcacttcctaatacagttactactatcacagtggttattaagtttaaacatatgaagtgtggggg

SEQ ID NO: 656494 - DNA, 613 bp, Homo sapiens
tgttcaaacacttttagctatcattgtagaggttaacttttaattttttctcctgcagtcactttattttagctttttaaactctttactcaaaaggagacacaaagccacaaagaagtcaaaatctattatacattcttcaaatttcagttaatattccactctaatatgcattgggctgtcagttttaatctgcttctccagatttgaagaaataaacaaaattaaaaatgaaatattatataaatttaatttcagttgattttcagttctttccttctgatggatcttgataccattctgagttatgaacaatattatgtcactaatgaacgattaacagatattaaaaataaagcacagataatatttctaccaaataaaaagttaacrtatttgacttaaagcaccatatcttttaacttgctaaatgtatgattggtatttcagtcatctttgtttaaagcaggcaaacaaattagaattatatttgacaagcaagttaggccttttccacctagccaagaatttgtctctaatagccctaaaataatttgccaaggaggaaaaaaaaaagaaatgatgaagagtttattggctcttgctattattg

SEQ ID NO: 656495 - DNA, 575 bp, Homo sapiens
gcatttgaccccatgaggaatgtaagcaaagcactacatattttatgtcctgctgtctgtcatcatgtggtgtttaggaaataggaaggtgttttagaggcatatggaaaagattgaacagtaggagtttggtgacatgaaagtagaaccatcacttactttatcatttgaagttctatctgggcttggaactaaaaacaatcaaaactttttgcttttctgcaaacatgcatctatgtacagcctctcagatgtatttagaaycttaatcaggcttcctttatagagcaaaccagaactctccagaccccagagagctcagtgtcaggagataatgctatctgaggaaaggaagaaagcccacaattgagtatctgttgctccttcaacttctgctccaccaccatgaaccttctctctctctctctctctttctctgtctgtctctgtctctctctctctgtctctctctctctctctctctcacacacacacacacacacacacacacacacagagagagagagtttgagccaagcagggaaatgtaggtggttcagagcactgtttgggta

SEQ ID NO: 656496 - DNA, 584 bp, Homo sapiens
gttgaaatatgagaaagatctgcagagtcaatagggttgccaagtcttcatcaaagattatcccaaactggtattttggttttggtacaaattgacgtgtcatcttacagtgccaaaagtcatgacgaccaaacagagtggaactaaggcagctttttttccagtttccccatgcttataaatcttcctcctggagaattttatttcttaacagtgctattctaatgacctccatgaagtgctgatccaatcccaaggctcagttttgaactctttgagtaggaagtaggcggtctaaatgcagattaacagaattgctttgactttctttaggaaacttacatggggcagagtgaagagaaagttgacctcattttattactttcataaaggaaaagcttggtgctctcccattctattctgaattcctatcatcactcattcttggaattgtttaggtaaacaaagagtcatagaggtacrgggaaaaaatgcagtgtgctggatggagacctgatccctgattaagacagaggaggttgctggggaatgcagcaagtgataatgccacagattttctaaag

SEQ ID NO: 656497 - DNA, 448 bp, Homo sapiens
  misc_feature 1: n = A,T,C or G
ngcctgcagcgcggcggggcgatgtgtgattaccatggcgaggagtctctgtccgggggcctggctaaggaaaccctattacctccaggtaggccggcggccgcccagccaccagctgcgggagcacccggccgtgtgccctgccgcgccgcgcrggactcgcccgctccccttttctcgtcctgggtctgtgcccgcccgaaccccgctgccccctgccgtccggcacctggcggcgcgccctccccagccccctcagcggctctgccgacgccccccaccgcggccctcgcggctcccgcgccgcggccagccgggctccagggcccgagtcgtcccgcccgggtacgccctcgcatcctgagagccccgagacgtgacctgggtacgaccccgcgctccgggcattgcccgcagccctgcgccgctccaggcggagctcgacggg

SEQ ID NO: 656498 - DNA, 579 bp, Homo sapiens
gagatggatagataatccaaagtttaccaaatataagaaaataataatacctccaggaattctggcttaacagaataaagtaacacaaaggtagtatagaaagtaactttctcactcacccagactccttgggtttgagatgttctgaggtttattgtttgcatcctagagagcaaaaatataaagttaatgtgcaaaggagtattctttttttttttttttttgagacaaagtcttgctctattgtccaggatggagtgcagtggcatgatctaagctcactgcaacctcygcctcctgggttcatgtgattctcctgcctcagcctcctgagtagctgagattgcaggcacatgccaccatgcctggctaatttttgtatatttagtagagatggggtttcaccatgttggtcaggcttgtctcgaactcctgacctcaggtgatttaaccgccttggcctcccaaagtgctgggattacaggagtgagccaccgcacctagccaggagtattctttaattgcagactctccttcttcacttacaatttatagttgcattactcaccgtgggctaac

SEQ ID NO: 656499 - DNA, 608 bp, Homo sapiens
atttaagttgctttttggttaagaaagtccttctcactcaccagatataaactagtcacctaaaatgtcagttcatttattatttcatttattattattaaatatttacaygtaactctttaatccatatagaatttattttgctgtaatgttatattttccatgtaaccgtttttcctaacattatttgttgaatgactccctcttctgttgcatgggatgtatcctttagcttatattaagtttttatatgtcttagggcatactcttcagacatattttatttgttcagtttgtctgtacttttgcctattttaaattttcaaaattattgtatgtttttactacagtatttgtaatatccagtcaggcagatctttttttattacactgtaaaaaatgtaaattatttttttctttttgaaaaaaatgcaaaaaaaatgctttaaaatttgaattgtaattgctctaaaatttcttcattttttctggttttcttttgcatctctcagcatcttgtttctttagcttttttctctagatttgatggatgtcataggcctatttgtcacatagatctcccactatatattcaaattgattgtcac

SEQ ID NO: 656500 - DNA, 597 bp, Homo sapiens
ttgtcttttttactatagcatttctagaggctggaagtggtatcttattgtggttttgattcgtgttttctaaatggctaatgcttcaagtatcctttcctatgtatatcttttttggagaaatgttcattttcagttagctcatccttttattgagctccttatcagatatagaatttgcaaatcttttgtaccattttcatgttttctttggctttcttgatggtataatttgctgcagaaacattttttattttgatgaggcctaatttgttttttcatttgttactactgagtttgatgtgcataacaagcttttgctgggctcaagttcataaaaatttatgttctcttctgagagtttttagttttagctcttacattgaggcatatgatacatttttagttaaattttgtgtatggtaggaagaaggagcccaactttattcttttgtgtgtgaatattcggttgttttataaacatatgttgataaaacaattcttttcccattgaatgctcaattaactacaaatgtgagagtttatttatgaactcagttctgttycattgatgtatatgtcttatgctagtaccat

SEQ ID NO: 656501 - DNA, 484 bp, Homo sapiens
tcatttttaattttatatgttatgctgtagatagttttatgggaacactggtacaggagtatttagtaatttgtgaatggtaaaggtctcaagacttttctcagaacctgtgaaaatctcactgcctgctcgacttcagtatgactggtgggtaggaccactgaggaatggggacaggagggcttgctgtgcccaaaggcgtttgtgcttcatcctaagcaccagtgagacctttgaacctctagaaaaggagagcagcccagtcacatgggtgctttggaaggatcactgcagttgacatggagaatggattaagggcagtggaggcggcagtgaagrgtaccttaaaacctagcttcaccttcgtgacttctttaactctgtttttaaaatgctcaattaattttacttgagaaacatctctggaaagtctaacatcaatgaagaggctatgattaaaagtttaggctatggagccagactg

SEQ ID NO: 656502 - DNA, 570 bp, Homo sapiens
gttctcacttacaagtgagaatatacgatgtttggtttccattcctgagttacttcacttagaataatgatctctaactccatccaggttgctgcgagtgctactatttcattccttcttacagctgagtagttgaacaggaaattttaataaagatcgttttaaaggcatagaaaaaaaggtgcaaaagtacattaaaatgttacaggtgctgggattacaatttattttatactttatttttaaaatttctacaatgtatgtgaattayaagcatgaatacaataaatattaagtaatgataaagatacaaagaaaaatacgtcattccattgcaaggtgaatgaagactgccgtcaaaagagctattagatgtttattctacagaagacaggaagtctgaattttggccattttctgaggggaaaaaagacaaattaataaagatgaattgcctagagattttaatgaaagtgaacatacaacagcagcatacttattaccttgaattggtgatttaatagaggcacagctggtagcacaatacatattgtttaaactatttgagca

SEQ ID NO: 656503 - DNA, 570 bp, Homo sapiens
gttctcacttacaagtgagaatatacgatgtttggtttccattcctgagttacttcacttagaataatgatctctaactccatccaggttgctgcgagtgctactatttcattccttcttacagctgagtagttgaacaggaaattttaataaagatcgttttaaaggcatagaaaaaaaggtgcaaaagtacattaaaatgttacaggtgctgggattacaatttattttatactttatttttaaaatttctacaatgtatgtgaattataagcwtgaatacaataaatattaagtaatgataaagatacaaagaaaaatacgtcattccattgcaaggtgaatgaagactgccgtcaaaagagctattagatgtttattctacagaagacaggaagtctgaattttggccattttctgaggggaaaaaagacaaattaataaagatgaattgcctagagattttaatgaaagtgaacatacaacagcagcatacttattaccttgaattggtgatttaatagaggcacagctggtagcacaatacatattgtttaaactatttgagca

SEQ ID NO: 656504 - DNA, 468 bp, Homo sapiens
gttattctcccattgaacagttttctcttctactctttctcaatttgacaatcattctatcctgtagtgaaacacayggttccatagaaaaaggtagaaaatgctttcagttttctcaataaaaattgaactccagtttttattagaggaattccaaatgctggaatttgtgggaaggacttgtaagaaatcatggcaaagacatataaatgtcatttcctgcccgctttttcccattcccttatacttaaattaacttgaggaatagcaggttaaacataaaggactattgcatcaatgttaccaagtttagtatcactttaaaatgtatttatctcaataaaaatcaggtttttttatatagctgagcaaatattcatcataattatttagaactttttattactttcacacaaaaagtaacatattttgataaaatatacaaattatatttttaatatataaaac

SEQ ID NO: 656505 - DNA, 592 bp, Homo sapiens
agaaagtaagtataaagaccctgaggtgggagcaaatgtgggtatttaaggcccattgtggaagttagcatggctatggcagcttgatcaaagatgaatattgttagaaaaggaaagttccaaagggtatccaggaatcggaatacatacatttgataaggactttgaattttattctaaatgtgtttaggaaacattgagggggcctggtgcaatggcttatgcctgtaatcccagcactttgggaggctgagatggaaggatcatttgagctcaggagtttaaaatcagcctgggcgacatggggaaaccccatgtctacagawaatgaaaaaaatagccgagtgtggtggcacacacctgtagtcccagctactcaggaggctgaggcaagaggatcactggaggttgggaggtggaggttgcagtgaactgagattatgccattgcactacagcctgggcaacaaagcaaaaccttgtctcaaaaataaaaaaaaataaaaataaaaataaaaataaaaaattaagcattgaggggaacagagatgtaaaataaatgaatttgtagtattacacattgttagtaccaa

SEQ ID NO: 656506 - DNA, 592 bp, Homo sapiens
agaaagtaagtataaagaccctgaggtgggagcaaatgtgggtatttaaggcccattgtggaagttagcatggctatggcagcttgatcaaagatgaatattgttagaaaaggaaagttccaaagggtatccaggaatcggaatacatacatttgataaggactttgaattttattctaaatgtgtttaggaaacattgagggggcctggtgcaatggcttatgcctgtaatcccagcactttgggaggctgagatggaaggatcatttgagctcaggagtttaaaatcagcctgggcgacatggggaaaccccatgtctacagataatgaaaaaaatagccgagtgtggtggcacacacctgtagtcccagctactcaggaggctgaggcaagaggatcactggaggttgggaggtggaggttgcagtgaactgagattatgccattgcactacagcctgggcaacaaagcaaaaccttgtctcaaaaataaaaaaaaataaaaataaaaataaaaataaaaaattaagcattgaggggaacagagatgtaaaataaatgaatttrtagtattacacattgttagtaccaa

SEQ ID NO: 656507 - DNA, 412 bp, Homo sapiens
gttccaaaatattacaaagggagtgactatgacagggcctccttctcccatgtatgtgcttcttggaggctacttgactgagaagaactctactctaactaggtaacaggggtggggacacttactgaacgaagctttagaggcaagagaaaaaagatatgatatggaaattaaaagaatataatgtttacagtgtaggctgtgaagtagagtgacagagctggaaagaaaagtgttgaccagaccattcagagatttgtaagggtttttagattttatcctaatagcattttttgatcttatcctaatggcaagtttactaatttactattacagtagaaaattttaagataatgcrataatgctgttagaaagaatgacaatcatgtgtcacttaaggatgggaatacat

SEQ ID NO: 656508 - DNA, 598 bp, Homo sapiens
gcaataatgaagcagagtttccaagattagtgtctatacttgcatacgatgcataacaaaccacccaagcatagtggcataagyaacaaaccatttgcagattgtgtgttcaggaattgcaagccatggcaggtttgactcatctatattccataatgcctgaggaacaatagctgggaagatcagttttttagtccatttgggatgctataaaaaataccataaactgaagagtttatcaacaatggaatttattcctcactgttctggaggctggaagctgagctggagctgccagcatggaagagccctcttccaagctgcacattgctaacttctcctgtatcctcacatggtggaaacagagtgtgctagcttcttggcctcttcttataagggcactaattccatttataaggactgtactctcatgacctaattatttcccaaaggccctacctcctaataccgtgaccttgggagttagggtttcaacatataaatgttgaagggggcacaaatatccagtctgtaacaatctggaagtctttcacatgcttggggctggatatcacctgaaggcttcttcatttactca

SEQ ID NO: 656509 - DNA, 474 bp, Homo sapiens
ctacttccgggatcggaaactgtactgcaaacaagactaccaacagtaagcgcttctcgtcctccttccccgccaccgcccggcactcgagcccggtcagccccctgccgggcccggcccgcgcccgctctgccgccggctctgtgcgcggctgggccgggcagctccaagggttccgagagctgcgcgtcttggggctggggcggaccagcccagcccagcsggcactgatggggtcctgggagcctccggacggcccccagttgccatccgttgtcccggaatcctgcgctgggccggccgagggatttggtgcctgggtcctgggatatagggtctggcgctacagaggcctgaattgggaacccaaaattgatttccaaaggaaaataatgttttagggagccaggcctggcggactgcttcaagggcctggtgtgtgggggtttgggattcctggagcctggagccagg

SEQ ID NO: 656510 - DNA, 578 bp, Homo sapiens
tggtgtgaggtaatagaatcatggaagcaggtttttcccatgctgttctcgtggtagtgaataagtctcacaagatctgatgatttaataaaagggcagtccccttgcacacactctcttgcctgctgccatgtaagatgtgtcttgcttcccctttaccttccaccatgattatgaggcctccccagccatgtggaactgtgagccaattaaacctctttcctttataaattacccagtctccagtatatatttattagcagcataagaacagactaatacagtcaggttattgtttttggttttacacattttaggagaacggaagttacagacacagacataaatcaattgatgtaaggtatacattgcttcagcccagaaaggtggcgaggtaggttagataaggtggtcatagcctctcttaaaggggaamaaacttgccaaacagatggacagggcaaaccatccaacagtgcacagaacacgtcctgggtttgtggttagaatatcctgcagcaaagaggtaaaagaacagaaagaaaaaaatccccaaattcacacaagtgcagagacac

SEQ ID NO: 656511 - DNA, 598 bp, Homo sapiens
tactaaagaaacaagtattttcacaatgtaccaccagatagtttaccagaatttcaattacatcttatgtattagttagttctcacactgctagtgaaaacatactcgagactgggtaattataaaggagaggcaccgttccacttggctgggtagacctcacaatcatgcaggaaggcaagaaggagcaaaatcatgtcttacatggcagcagggaggaaagagcttgtgcagggaaactcctctttataaaaccatcagatttcatgagacgtattcactatcacgagaacagcatgagaaagatctgcccccatgattcagttacctcccacggggcccctcccatgacacatgagaattatgggaataagaattcaagatgagatttgggtgaggacacagccaaaccatattaccttgyatttcccttgaactgtgcatgaaaatgttatcttcaatgcattcttgtttaccttggaattggcttaacatattctaaatattagttgacatctttatgatatgaccttggtcaactcagagacagaacgaatctctcaatttacttatgacttattttacaccaataagtagg

SEQ ID NO: 656512 - DNA, 492 bp, Homo sapiens
atcattgtgtgtatatgtttgttttgttttgttttctgagtagtttctgctttatgacatgagaagatgctccaggatcattttgtatattacttgyagtagtctgagactgtcatttctctatagagtcctatgtctcctccttggatcatggtataataaatcaaaatcctggcatcaggtttgttgctaccactttcccgttgttgctagcccctcacctaacagagcaaggaatagattttcacacacacacagacatatttatatccacacacacatatatgaaaatgtgtgtatagaatatatgtacatgagtttgtgtgtgtgaatatatatacgaacatgcacacacacatacatatttaggtatttatgtattaacccatgtttatacccatatttataggaacatgcaaatctatttctacatataattatgtatatttatgttaaattacatagttcatattaaaatctccatttctaatc

SEQ ID NO: 656513 - DNA, 492 bp, Homo sapiens
atcattgtgtgtatatgtttgttttgttttgttttctgagtagtttctgctttatgacatgagaagatgctccaggatcattttgtatattacttgcagtagtctgagactgtcatttctctatagagtcctatgtctcctccttggatcatggtataataaatcaaaatcctggcatcaggtttgttgctaccactttcccgttgttgctagcccctcacctaacagagcaaggaatagattttcacacacacacagacatatttatatccacacacacatatatgaaaatgtgtgtatagaatatatgtacaygagtttgtgtgtgtgaatatatatacgaacatgcacacacacatacatatttaggtatttatgtattaacccatgtttatacccatatttataggaacatgcaaatctatttctacatataattatgtatatttatgttaaattacatagttcatattaaaatctccatttctaatc

SEQ ID NO: 656514 - DNA, 588 bp, Homo sapiens
ccactgactcaaatgttagtttcctttggcaacaccctcacagacatacccaggaaactttgcatccttcaaaccaatcaagttgacactcagtattaaccaccagagcagtatttgtcacaacctacagtttcgtggacagggtttggtcaggactggggaggaatggtgatggtgatagagaaagcaatggactgaaagacacaaggaacatagcaacctcttaccctctcaagagcttagcctccgacatgagtgtgatgccactgtctatttaaaatactgttgactctaataatgtcatcagtggtcttgtgtattgctgtgcactctcatcttcagcatagctggatacacacttattttccctcaacctctttttcttcacatgctcctgctttttgattgtcttccacttttaggttgattgtgctttgaggcagccacagcacctcctaacasttgagattagcccgaggctgagtaagaaactgtgttcaagccacttgttggcttattagaagatgaactggatgttgctgtagtctttcgctggcagcttacagtgcaggcagtgaggtgtatgga

SEQ ID NO: 656515 - DNA, 512 bp, Homo sapiens
ctttcacatttgaaccacagaatggctctctctcatttttcccttacttttctctgctgtttgaatcaggggtcagtcgagtctttctataaagggccagatagcaaattaggctttgcggccatctggtctccgtttaagctgctcagccctactattgcagtgcgaaagcagccatagacgatatgtaaatgaatggcatggctgtgtgtcactatcagtttctttataaaaacgggcagccatcttgaagtcatatagcttgctgactagtggtttagaagagctagaaagaaattctgggctgaggtgtttcgggtttttatgtttatttatttcacatatataaacgtgggcatggggaaatctgtgatccagggaaatgttctttttcttcctctgggtgctggttatacaggaattttaactttgytaaacttcaacaagcttacaatgatcatttgtgcatttttgtatatatatgctatattttaatttaaaaatctatttta

SEQ ID NO: 656516 - DNA, 594 bp, Homo sapiens
tctgttcatgtcaaactgagtctgatgttctgatttcacaaaatgaagaaatggatgtccagggagaaaaagtaactttacacattgccattaaatctttattagttggttgaaatattcacaagtatagaaaacaaggctccttgaggagcaaagaactgggtacaaaagagtagtagccatggtgaccagaaaccttggaatcatttttcacagttcagcttcccagtcctctacgtaagccccactaggcactatttttcttaccattatttaccagtggggaaacagagatgacttttctcagggttacttgtggattgttgttgtcgagagcaaattggagacttctaacatctggtccagcactttgccaccacttcacttttgttctggaaaagagccaaaattagctcattgtaaagaagtcaccaagctctgatttttgtgcaaataaactttatggtttgccatttaaaaaactattactccaagatcaactttcagaattcaacaaaacgaggaccyctgtctctcaacacactatcatgccccacagatgactaaagaacacagtgggctcgtgctttacat

SEQ ID NO: 656517 - DNA, 608 bp, Homo sapiens
acaacagttggcaaggatattaagaaattgggggcygggcgcagtggctcacgcctgtaatcccagcactttgggaggccgaggcgggcggatcacgaggtcaggagatcgagaccatcccggctaaaacggtgaaaccccgtctctattaaaaatacaaaaaattagccaggcgtagtggcgggcgcctgtagtcccagctacttgggaggctgaggcaggagaatggcgtgaacccgggaggcggagcttgcagtgagccgagatcccgccactgcactccagcctgggcgacagagcgagactccgtctcaaaaaaaaaaaaaaaagaaagaaattggaacccttgtacactgcttgtgggaatggaaagtggtacagttgctatagataagtctgacacaacctcaaaaaattaaacataaaattacatatgatccagcaactctacttctaggtatatgcttaaaagaattaagagcaggaacttaaacagatacttatagggcaatgttcatagcaacattatccacaatagctaaaaggcagaaataaccccaacccccaaaaacaaacaaacggatgaacaaaacgtagtatatacatac

SEQ ID NO: 656518 - DNA, 608 bp, Homo sapiens
acaacagttggcaaggatattaagaaattgggggccgggcgcagtggctcacgcctgtaatcccagcactttgggaggccgaggygggcggatcacgaggtcaggagatcgagaccatcccggctaaaacggtgaaaccccgtctctattaaaaatacaaaaaattagccaggcgtagtggcgggcgcctgtagtcccagctacttgggaggctgaggcaggagaatggcgtgaacccgggaggcggagcttgcagtgagccgagatcccgccactgcactccagcctgggcgacagagcgagactccgtctcaaaaaaaaaaaaaaaagaaagaaattggaacccttgtacactgcttgtgggaatggaaagtggtacagttgctatagataagtctgacacaacctcaaaaaattaaacataaaattacatatgatccagcaactctacttctaggtatatgcttaaaagaattaagagcaggaacttaaacagatacttatagggcaatgttcatagcaacattatccacaatagctaaaaggcagaaataaccccaacccccaaaaacaaacaaacggatgaacaaaacgtagtatatacatac

SEQ ID NO: 656519 - DNA, 608 bp, Homo sapiens
acaacagttggcaaggatattaagaaattgggggccgggcgcagtggctcacgcctgtaatcccagcactttgggaggccgaggcgggcggatcacgaggtcaggagatcgagaccatcccggctaaaacggtgaaaccccgtctctaytaaaaatacaaaaaattagccaggcgtagtggcgggcgcctgtagtcccagctacttgggaggctgaggcaggagaatggcgtgaacccgggaggcggagcttgcagtgagccgagatcccgccactgcactccagcctgggcgacagagcgagactccgtctcaaaaaaaaaaaaaaaagaaagaaattggaacccttgtacactgcttgtgggaatggaaagtggtacagttgctatagataagtctgacacaacctcaaaaaattaaacataaaattacatatgatccagcaactctacttctaggtatatgcttaaaagaattaagagcaggaacttaaacagatacttatagggcaatgttcatagcaacattatccacaatagctaaaaggcagaaataaccccaacccccaaaaacaaacaaacggatgaacaaaacgtagtatatacatac

SEQ ID NO: 656520 - DNA, 608 bp, Homo sapiens
acaacagttggcaaggatattaagaaattgggggccgggcgcagtggctcacgcctgtaatcccagcactttgggaggccgaggcgggcggatcacgaggtcaggagatcgagaccatcccggctaaaacggtgaaaccccgtctctattaaaaatacaaaaaattagccrggcgtagtggcgggcgcctgtagtcccagctacttgggaggctgaggcaggagaatggcgtgaacccgggaggcggagcttgcagtgagccgagatcccgccactgcactccagcctgggcgacagagcgagactccgtctcaaaaaaaaaaaaaaaagaaagaaattggaacccttgtacactgcttgtgggaatggaaagtggtacagttgctatagataagtctgacacaacctcaaaaaattaaacataaaattacatatgatccagcaactctacttctaggtatatgcttaaaagaattaagagcaggaacttaaacagatacttatagggcaatgttcatagcaacattatccacaatagctaaaaggcagaaataaccccaacccccaaaaacaaacaaacggatgaacaaaacgtagtatatacatac

SEQ ID NO: 656521 - DNA, 618 bp, Homo sapiens
gtatttattgtagaaatgtgtaattttcttgaagggagcaaagtgaatctttcttttgcatttcctctactaaactatccaacaacttgtatacacasatgtggtcacgatcatcatcaagataatctccattaccacttctgtagctgaggaaaaactacgattatattttcctctcctacatctcctagactttttttatatataaaaaacaatctattgtttcattgcagatagaaaaagtcacataacttcaacaagtaaaacgtttagcaaatttattcaaagtgaaatggatagctgatgtcatagatttattgaaaatttactccgcagtaagtttaagaaaaaacttccagagatatagcaaaattcatgaatttgccttagtcatctgatgctaatataacagaaaacagcttacattaacttggataattaacaacagaaatagaagaaatagtatttgatatgtagttgcaagttgatctttctaatgtcatcatattaatgattaatacttccatatttttaaaaatttcccacaactagcaaaatgattattcaatgaaaaaatttttactctacttagttaaaggaataatatatatgtaattt

SEQ ID NO: 656522 - DNA, 600 bp, Homo sapiens
aaactgaaatttacaattaccacactgctatgtattttcatgtagaacatcatcaaactatttagaaaattgattgattagctaaaaaataggccagaagtatgtataatgctgttaaatatcaaatatagtggctccatgtttatttacataaataaagtgctttcaatttggacacagtcttaatagcgagttagttagatggttaactaggttcaaacccctccccaatcaccatagtagtctagaacaaaaagctctccaattaggaataatcagaacagggctgcaacactatgcaacttgtaaacatagccatacctgagacaatacagaaatggttataggacattagaaaggaaaagcatattaataattttacaaaaatcatacatagaatggatgactattgcagattcagctatttgtaagtaatcccaaaggatcagaacatgtaaaattctgatttatttgctgtttggtgaaccaaattcaaatagcagcaaagaaaytgcagtgtataatttactgaaaaataccaatgaatagattgacagtgacacatgtgaagtgggatttgaaacactgaacacagattat

SEQ ID NO: 656523 - DNA, 535 bp, Homo sapiens
tatagcacaataaaaatagaaattgaatttaaaaaatcactcatagaattacatagaaattaaacaacctgctactgaatgacttttgggtaaataatgaaattaaagcagaactcaaaaaattctttaaaactaatgacagcaaagatacaacatagactccctaggacacagctaaggcactgttaagaggaaagtttatastactaaacaccaacatcaaaaagtcagaaacatcttaaattaacaatctaacattacaactagaggaactagaagaggaaactaaccccaaagctagcagaagacaggaaataaccaaaatcaattctaaattgatggaaattaagatgcaaaaaaaaaaaaccataaaaaaggtcagtgaatccaggagttggtttttgaaaaaattaataagacagatagaccattatctagatgaatgaagaaaaaaagataagatccaaataaacacaatcagaaatgacaaaggagacattacccctgaccacaaagaaatataatagtaaaaaaa

SEQ ID NO: 656524 - DNA, 535 bp, Homo sapiens
tatagcacaataaaaatagaaattgaatttaaaaaatcactcatagaattacatagaaattaaacaacctgctactgaatgacttttgggtaaataatgaaattaaagcagaactcaaaaaattctttaaaactaatgacagcaaagatacaacatagactccctaggacacagctaaggcactgttaagaggaaagtttatactactaaacaccaacatcaaaaagtcagaaacatcttaaattaacaatctaacattacaactagaggaactagaagaggaaactaaccccaaagctagcagaagacaggaaataaccaaaatcaattctaaattgatggaaattaagatgcaaaaaaaaaaaaccataaaaaaggtcagtgaatccaggagttggtttttgaaaaaattaataagacagayagaccattatctagatgaatgaagaaaaaaagataagatccaaataaacacaatcagaaatgacaaaggagacattacccctgaccacaaagaaatataatagtaaaaaaa

SEQ ID NO: 656525 - DNA, 532 bp, Homo sapiens
gcttgtcaaagatcagctggctgtaaatgtgtggctttatttctgagtccttcattctgttccattgatgtatgcatccrtttttataccagtaccatgctgtttcagttactatagctttgtaatagaatttaaagtcaggtaacatgatgcttccagctttgttctttttgtttaagattgcattggctatttgtgctctttttggttccacacgaatttaagaattgtttttttttttctagttctgtgaaaaatgatgttgatattttgatagggattgcattaaatctgtcaattgctttgggcaatatggccattttaatgatattaattcctctgatctataagcatggaatgtttttccatttgtttttgttatccacaatttatttcatcagtgttttgtagttttctttgtagagatctttctttcaccttcttggtaaaatctattaggtatttgtagttattttaaatggaattgtctttttgatttctttcttacatagataattattggtgtatagaa

SEQ ID NO: 656526 - DNA, 532 bp, Homo sapiens
tttcagcgtagacttctctcctgagctacaatctcatgtttattcctgtcttctacaaaagcatctcagactctcatttttaaaactgaacttattttatttccaaagaaactgctcttctcccacactccttatcttagctcatatcaaaaatctaaaagtcctattatactcctttgtctcttgtaatgggatgtaagtttctgatgcctgctgatgctaccttctgcacatctctaaagtctgtcccatccttttcaagctcactgccattgtttgagttcagcttatgatttcccatctcgactattgaaatagactccttatccaagcccatgccatctgtctagcctccctccaattcatcctccacaacaacaccgtggttagatctagagggaaaatctgatcctcttcctccttacatccccttcagccaggacagacagtacccttcgagaatttccctgcaccgacrcttccagccttgctcccagacacctgggataagcctacactccaggcataccag

SEQ ID NO: 656527 - DNA, 565 bp, Homo sapiens
ttaaaagtgctaaaaaaatgctacaatggaaaaatggaagcttaaaacatgtaattgcaccaggaatatgctctctgtataccaatttcagtagttacccttaggagtttactggaaattttcctacacactgaatagacaggtagataaaatcagaattgatggacaatggcttcataaggcagccatgtgcatgatgtaatatgaatttgaaattttgactactgcctggaagataatgtttgtgatgaattctcaagatgagagaaaataaaactgcaaataggagctgagtggtctggtttatcaattaaatccagttcagattgatattgagccctgatggagagatgatcaccctcaatgtctgatgaaaatgtttacttgagattatttatggaactctgagacaaacagtgttatttaaaggaatagataacacagggattcacagaattctggagamgatcattcttctcatttccatgcaaagcacagcaccactgggaccctccaaggttaaaaattgtttttgggcccgccgcggtggctcacgcctgtaatc

SEQ ID NO: 656528 - DNA, 582 bp, Homo sapiens
tgtgtctccatttaaagtagagtattctagactcatttttaggaagtaagcttcaattttctataattaattacttctggtgatatttccatagtgagccccttgaggaccgtgaaaaaaaggtccaggccagttatgaacaaggtaaacggagaggtcatttgccarataacttatttggaaactgtaattggtgtttccaacagaatcccaatgggaaatgtaattcacccaaatggctcaagtgaagagacctagatggaattacctaccaagggatgggcgaggaagctgaggcactaagaaactggcaactgatgaaagccactacacttccaaggcagaaaggcaaaggacaagtgcaggaattagtgttatcagaacccagtgaaggctataatcaacatcaggtgtggtggctgccagaaacaccacaccaaagcagggtgagagcaagaaagaaatgccataatctttctcttctcccaacctctgatttcttgctggtgcctcccactggccaaacccaatcgggggccagtaggcaaaggaatccaggtgatgcagtccacactggacagc

SEQ ID NO: 656529 - DNA, 611 bp, Homo sapiens
gtatataatttgtaaataactaactcaggaaagcactgaaaaaggcattgtattgtgctacctatttttttaacacctttctttcaacttctcttgtgtatacaaaatgactaagtaggtgcacattttacagagtttacatataacatccattgtacatttgaatcttcaaaatcacctctgtttagattatgaatagtttattagtaactgttggaaaatgaaatatttacaaatgctggctttcactttaattctacataatgttattacttggaattattaaatattttataaattataattgagatacatatgaatgtttataaatcatatataggaaactttaaattccagatgcacatatgcctatgtacacacacacrcacacacacacacacacagacacagacacacacacacacacagacaccccttctgtgttgcttaaccataatttgattccagatttgagatattttgaatttgagaatgttgttatggtttatattactacctgctgccccactctccaaactcccacctaaatgttagggaagcatggcaagtgataaatagattcaaggtatgaaatgacatactatcctgtg

SEQ ID NO: 656530 - DNA, 590 bp, Homo sapiens
attgccagtcttaattcaacacaatcacatttctgtgaaaatattcttatttgaacatttagtacttcattatttgtacataatatatggagacaacattttatatctagcctatttctacttgtaattaggtagagcttattcatcgtgactggggtataggagggaatctttccccttwatgactttctaagttaatttaatgggcatttgaatgtaaacatacttagtgcatgttttcctaacattaaggtaaatgtttctgttgaaagagatactttttctttgcaaataattttgcattattttttcatgccgctcttatctaaaatataagaaaagttagtcacatctcacagttatccctcctgaaactagagatttttttaaaatatcagctggcagtttttcataatggtactgaaaagtacttgctgaatatttgtttttccttccatgagagcactaattgacctaataacactaattatctagaaatcatgataatgtggagaaagggaattgagtggtgaaatgacaattttcgagcctcatattttcaaagcaggtaacttgttaactgtgcttgc

SEQ ID NO: 656531 - DNA, 590 bp, Homo sapiens
attgccagtcttaattcaacacaatcacatttctgtgaaaatattcttatttgaacatttagtacttcattatttgtacataatatatggagacaacattttatatctagcctatttctacttgtaattaggtagagcttattcatcgtgactggggtataggagggaatctttccccttaatgactttctaagttaatttaatgggcatttgaatgtaaacatacttagtgcatrttttcctaacattaaggtaaatgtttctgttgaaagagatactttttctttgcaaataattttgcattattttttcatgccgctcttatctaaaatataagaaaagttagtcacatctcacagttatccctcctgaaactagagatttttttaaaatatcagctggcagtttttcataatggtactgaaaagtacttgctgaatatttgtttttccttccatgagagcactaattgacctaataacactaattatctagaaatcatgataatgtggagaaagggaattgagtggtgaaatgacaattttcgagcctcatattttcaaagcaggtaacttgttaactgtgcttgc

SEQ ID NO: 656532 - DNA, 590 bp, Homo sapiens
attgccagtcttaattcaacacaatcacatttctgtgaaaatattcttatttgaacatttagtacttcattatttgtacataatatatggagacaacattttatatctagcctatttctacttgtaattaggtagagcttattcatcgtgactggggtataggagggaatctttccccttaatgactttctaagttaatttaatgggcatttgaatgtaaacatacttagtgcatgttttcctaacattaaggtaaatgtttctgttgaaagagatactttttctttgcaaataattttgcattattttttcatgccgytcttatctaaaatataagaaaagttagtcacatctcacagttatccctcctgaaactagagatttttttaaaatatcagctggcagtttttcataatggtactgaaaagtacttgctgaatatttgtttttccttccatgagagcactaattgacctaataacactaattatctagaaatcatgataatgtggagaaagggaattgagtggtgaaatgacaattttcgagcctcatattttcaaagcaggtaacttgttaactgtgcttgc

SEQ ID NO: 656533 - DNA, 585 bp, Homo sapiens
agtcatggctcactctcagctagtctgtctttagaatctgtactgagtcactacactaagtattaaaaatatatatgaaaataaaaggaatcaatataattttgatattataaattaaaatagttttgaagtttaattccatttttatatttgcatgcataggtgaagaaaatatcaatacttccaagtttatcttcctccctcttccattgtctccctcaaactgctatgcaaaaagaattcatgggacgagaaaaagaattataaaaaataatggtaagttactgttacaatctttaaatttcaggaaatgtaagatagaaaaagaaagccttaaaaaccmatgtcgttttacttagaaattgtactgaatgaacagaatttatcagagcaggaattcaaagaatactcctaaaagtagaaaaacaaaaatattctaatagtctcaaagtaggcctacatttttgacaactataaaatcgtcaaactctagttgagtacatacagtgcactctcagatatgacctgctgagtacaatatttagatgtttatggctaacttcacaaaaaaacttagttatgtgt

SEQ ID NO: 656534 - DNA, 585 bp, Homo sapiens
agtcatggctcactctcagctagtctgtctttagaatctgtactgagtcactacactaagtattaaaaatatatatgaaaataaaaggaatcaatataattttgatattataaattaaaatagttttgaagtttaattccatttttatatttgcatgcataggtgaagaaaatatcaatacttccaagtttatcttcctccctcttccattgtctccctcaaactgctatgcaaaaagaattcatgggacgagaaaaagaattataaaaaataatggtaagttactgttacaatctttaaatttcaggaaatgtaagatagaaaaagaaagccttaaaaaccaatgtygttttacttagaaattgtactgaatgaacagaatttatcagagcaggaattcaaagaatactcctaaaagtagaaaaacaaaaatattctaatagtctcaaagtaggcctacatttttgacaactataaaatcgtcaaactctagttgagtacatacagtgcactctcagatatgacctgctgagtacaatatttagatgtttatggctaacttcacaaaaaaacttagttatgtgt

SEQ ID NO: 656535 - DNA, 440 bp, Homo sapiens
tcaagaaagataaatctgttctccagattgaggcttttgaaagcacattatcttatttctattatagttggagggtaagtgaatgaatgggagaagagctgaggtatgacttatagtgagactttaaaaaactgtgggatcacgtgatttgaaaagcacaattctaccgttggtgggataagatatttaaaactgagattataatggaaaagctaggaatgtttcttgtgagggctgctctgaaataatcttaccttttaggaggctttcctaaagtgattgtgtttattgacacattacattttttctctaacataaatataatgtctcctcttttctccatgaaaaacattatttgaagaaatgctatgcgttggttaaagtcttgttcattgatatagtcaacaaayatataatgaaatagtactaggagctaagta

SEQ ID NO: 656536 - DNA, 532 bp, Homo sapiens
ggacttttttaacctcattatcttcctaaatatatttttttatatcccctgtatcaatatgagaaaatggtgaaacttgttctaaaagcaaggtataagcacatatcatttatgacagtttatataactcacctgttggttatcttaccttaaagagggaatcatatacagggattcctgtcacacatgcagcctccatttgaataataaattctagtattaacctggaaatataaaagttagattaaagtttatgtaacttcaaaagctagtttaaataataaatttatgctattatcctcagctgaggtaagtaacaacataaaagcagatttgttaattcaaaattaacatctgtaaaatctgttatggacctgcaagacaaagtgaatgtattgggaaaggccacataccaaaagtaaataaacatcaaaagagaaaaagaaaasataaggaagaagtagaatagcaagataagagaatgctgaaaagaactacaaatttaacatgacttattttcaatgctattatt

SEQ ID NO: 656537 - DNA, 562 bp, Homo sapiens
ctatcttttgtatatgctctaactcaaagtgttgtcttgactttttctctgagaaactttctccaatacaatcttcaaaatactacttataattacatgatgatataatctcatacctctcaaagcctggtgttctgtctgtttccattttgatcatgattttatattacttctataattaacagtatattccatggcaaaaatgggattaaaatctcattgcagaaaaaaatgccatttggaactgggaataactgcctacataaaagtgatctgaaaatattcatagcattgggtacataaataaatgccatkatattgtttatattacatccctaaatatttatcaaccctgctctcaaagagaaatttattggccttaaagaggagatggagaaagagataggggtagaacgtgtatttgaagggaaaatatcagagaagttctcaaacctagagaaagatttcaatattcaagtacaaaaaggttatagaacaccacacagatttaattcaaagaagtctacctcaagatatttaataatcaaacacccaaaggtca

SEQ ID NO: 656538 - DNA, 216 bp, Homo sapiens
ctacagctcaggtctttagagcttttttattttccatgccagccaccccctgccttcagagatggagtcaggcagggagtgmtaagagtcagagtggaaaggaggactcctgcgctgagaacacagagggttcaccaccggggatgctgccaccgtctcaggagtaatttgtatcaattcgataaatgtttatctggaaacacccaagagtcaggt

SEQ ID NO: 656539 - DNA, 591 bp, Homo sapiens
gtggaggagcaaaacccagtgaggtaggtgggaaaccagtgaaatatactgtgtctgaagccaagtgaagaagagtgtttccaggaggagagagtgaatagacacgatgggcattcctaatgaccttgataaaagcaatttcagtgaagttgtgggaacaaaaaccagatctgacttgactgacgcaagaatgttaggtgagaaagtcaagataatgaacatagacaactcttgggctttgytgtaaaagaaaagaaaatatacaggtttgtttgttttttttttctgatggggaatgtggagtctaaggatggagatattagagaatgcttacccagtgaagataatggtccaatgtagattgaaaaattgagttaaataggataataaatgtgagtatactttgtaaattaaaaaatgctcaacaagtgtcaggtgtttgattttgatctaaatgagcattcactgtctaacctttctcaacaatgtctcacaaaacattgtatcatgtccctattataaatatttatgatgacatcataaacactctcctacttcttgtttgtgtgcaacttataagagttgctttgt

SEQ ID NO: 656540 - DNA, 498 bp, Homo sapiens
tgaatctcacaaacaaatgattgagtgaaagaagccagacacaaaagwatactgctgcatgatttcattgttcaaaaagttcaaaaaatgttagtggtgggaatagcagtaagaagagagcatgatgtgcttttgggatgctggtgatgatctgtttcttaatctgagtgcttggatacttattactagaactttacttgtatcatgtgtgcactttacatagatcattctttaataaaattttactttaaaaaacaattgtatgaaagtgctaaggcctttctaagtttgaaaacacaagcagtaaaaataaaggcaatattactaaatgtagcttcaatatttgaaaaacatctatgcatcaaatataacgaaagacaaatatgaaaatatatgaaagtatattaaatataatacattttacaagaaaataatatattcaataaaaaaactagctactgaaaacacaactccagtagaaaaactggcaaagaacat

SEQ ID NO: 656541 - DNA, 469 bp, Homo sapiens
tttaagcaagataattccaatgagttaagtattctgccaaagtcaaatttggttaagtagsctttaactacttgccaaggaataaatagattcagccataattttcagatatatggacatgactcttttatgatttcaaaaattttataagaaagctcgagtgaattgtgtttctttgatttcaactgcagttaaacatatatatgtgagtatatacatatatatgtattcttatttgagcaattattaaatttatgtataccagctgctatcttaggcagaggggacaagaattatagataaaactttgaccttctccatgggctcagagtagagtaagttaggagagaataacactacactctagtgtaacaagtgcacagagaggcaagaaaacagcatcatgacatctcaggagaagaagggctcaggagaagaagctgcctggaaaggatggagaagagtttta

SEQ ID NO: 656542 - DNA, 469 bp, Homo sapiens
tttaagcaagataattccaatgagttaagtattctgccaaagtcaaatttggttaagtaggctttaactacttgccaaggaataaatagattcagccataattttcagatatatggacatgactcttttatgatttcaaaaattttataagaaagctcgagtgaattgtgtttctttgatttcaactgcagttaaacatatatatgtgagtatatacatatatatgtattcttatttgagcaattattaaatttmtgtataccagctgctatcttaggcagaggggacaagaattatagataaaactttgaccttctccatgggctcagagtagagtaagttaggagagaataacactacactctagtgtaacaagtgcacagagaggcaagaaaacagcatcatgacatctcaggagaagaagggctcaggagaagaagctgcctggaaaggatggagaagagtttta

SEQ ID NO: 656543 - DNA, 589 bp, Homo sapiens
tcccatcagtcacaggaccttggtacatcttccttccttccttccttacctctctctctctctttccttcctgyctgcttgcttgcttttttctttccttcctttctttcttttctttctctttctttctttctttctttctttctttctttctttctttctttctttcttccttctttctttcttttttctttctttctctctctctctatttctttctttctcttcaactcttaagttcggggttacatgtgcaggatgtgcaggtttgttacataggtgaacttgggcagtttactgcacctgggtactaagcccagcatccattagctatttttcctgatgcactccctcccatagacaggccccagtgtgtgttgtaccctccccccaacccacattgtgtccatgtgttctcatcattcagttcccatttataagtgaggacatgctcttctttctacatggagctctctgctgctgctcttcacgcagataaattcagcgtagccttcacatctcggctcaagtgtcactccttcacagaggctttcactgcatcttcagactagatctggcctccttacta

SEQ ID NO: 656544 - DNA, 618 bp, Homo sapiens
aaagatctttattaacatatgctgatataatgtaaaatattgtgaattccaggataagggtcacaattagatagtaccaacagggaggaccagggcagttaaaaccctgattgattccccaggaaaacaaagggtcatttctaaggaagtcagctaagacaagaaggagcaagtaggtacaatagtatagayggataagatgtcaaatataaggatcataagatcaatatctatgaacacggttgaactctggtctctgcattctaactttgttgcttgtttcttctactaatttatactatttgccgagcatggaccatcatcagcccaaaggtaatagtaattaaaaaatacaatttattgagcacttgctacattcaagcactttgcttaaattctatatacattatctcatttaatcataacaaccttatgaggcagctatgagagcataaacatttttaatgttcatagacttctagcccaacaaagagacatctgtaatagccacctaatctttccttgtattcctccctttcaaaggagaaggattctttcttgctgggagagaggccaaacattgagataattaataagatgctgatagaagagaggggt

SEQ ID NO: 656545 - DNA, 568 bp, Homo sapiens
atgatcagttgacttattaccttttaatttttcacgaacttgttatctgttggtttagctacagaacatycttcaacaaggactaccgccctgatcccacatctactcagtacccattatgccaggaccctttctaaatgactaaggtgtgctcaagaaattcagatgtttcacttttaatagaagactgttcgattttttctttctttttaaaattgtggctaaacacacacacatacacacatataacatgaaatctacccttttaacacatttttcagtgtacaatgctaaaagagtttcttaatcatcttggtttggagagagggaaaaaacactttatacaaatataaataatttccacaaattttcctgtggtttggagtttttatccatgttacccccctcctttgccatccctaaaaataaaaagaaaaaaaaataacattcatttcctaatgcaagtttaatttttgtagatattttctcctccaaggcacttggtgctgctctccttctcttacaagggaagtggcccatgtttcacaaagaaacagtggaagtgagc

SEQ ID NO: 656546 - DNA, 578 bp, Homo sapiens
aagcttaaaaagtaactatgaaataaaaagaaagttttaaaaatagaaaaaatttcacttccagttagaaacctacaaaggccatcagctcaaagtcagtatgggtgttctgaactgaatggtgttgcttctttaaaaataaaaaaagtatttaaaacatagaaaaaaaaatcttawagaataaggatatgaagaaacaatttttggccgggcatggtggctcacacctgtaatcccagcactttgggacgccagggcaagcagatcacttgaggtcaggagttcaaaaccagcctggccaacatggtgaaaccctgtttctactaaaaatataaaaaaattagctgggcgaggtgatgagtgcctgtaatcccagctgctcgggaggctgaggcaggagaactgcttgaatccgggaggtggaggttgcagtgagccgagattgcaccactgcactccaggctgggagacccagcaagactctgtctcaagaaaaaaacaaaagaaaacaaaaaacaaagaaacaatttttatgcagttacaatgtattagtgttttaagctaagtattgtcacaaa

SEQ ID NO: 656547 - DNA, 589 bp, Homo sapiens
gtaggctgtttataaaggcaaattttggaaggtggcaggatgatctgttatctccccacactccagcctttgggttacagtggggagaaagctgctgatagtttcctgacctcactggttcaagctgtagcagaactagaatgggccaggtagtgactatatttctctcatgtttgctgaacaaggacactttattaccctaactttcagtggacatttttaatttttctaaaagaagaaaaaaatgcaaaaaaacccacacatgtaagtttaaccacattcaataagcatagcacttgtcatcagatgattgtaagacattgtaaaaataattctaatggcacttataataamaacaacaatagaaatatcaacaataatagtaaacatttagataggccttactatgtgccggacaccattctaaacactctcaatgtaattaactccttcagtctgcatatgaagtaggtattaccagtttgttaaaattactgataaggaaaccaagacagaggaagttaaatgacttgtccacggtcatacctccattaaatggaagaccctgttttcaaaatgaccattgtat

SEQ ID NO: 656548 - DNA, 536 bp, Homo sapiens
ttccataatggctgttctaatttatatccttatcaacaatgttcaagtgtccccttttgccacatcttattgaatacttgttatctttcatcttttagataataaccattctaacaggcatgaggtagtatttcattgtggtttcaatttatgtttttctactgattagtgctcttgagtattcttttcatatactgttggccatttgtcttcttttaagaagagtctattcatgccctttactcatttttagagttggaatatttgttttcttgctactgagttgtttcagtttcttaaatattttagatattaatctcttaacagatgtatggtttccaaatattttctccarttctgcaggttgtttcttcactgtggtaattatttcctgggctacgcagaagatttttaatttgatgtaatctcatttgtcttttttttttttacttttttggcctatgcttttggttcacatccaaaaaaatcttttctcagaccaatgtcatgaacttcttcctcaatgttttcttcaa

SEQ ID NO: 656549 - DNA, 490 bp, Homo sapiens
tggcacatcccctgaagttatgctctcatttatttccacagagaactatgccctgggaagccatgcctgacagaataagacacagatgtttttgcacatgtgggtacttgtggcaaatcattatgtcacctaggagaagctactttctaaattaatggccatcaacaagcttaccaactctttattattgatcatatagactaagccattatgaaaattcaagaattaagttgaaagctcctggtattgagtgagagaaaatcttcatattggatgacttagtccattttgcattgctataaaggagtacctgagactgtgtaatttataaagaaaagaagtttatttgccaatgcaggctgtactaacatggcactcatatctgtttggcttctagtgaggcctcagtagacttacaatcgtggcagaagggagggggagctggtatgtcacayggtgagagagagagcaagagagaaaggaggaagtg

SEQ ID NO: 656550 - DNA, 658 bp, Homo sapiens
ccagggtgactctgttggggccctcatcttgccctcatctcactatgtatcttgccatgtgtctgatccctcagggtctccccagagcttagtaagagcctggcacatagtgggtactcagaaaagrtgggtttaaccaagctgaacattttcagggaaaaataaggaaaagctgaaggagttggtaggtttatatgttgagtcaagaaatgcccagtaagctctgtgtgccaggctctgcaccatgaatatagaaatcagtcacttctacagaattatggagtagaagcaagagtgatgaaatgacctagtacctggcaaagtgccagaaacagactaagtattcaaaaacaacctgaatgaattaataagtggagtactagaggtaaactccagctgcctttaccccgatgaaccgctaaccatctaagagtggccaatttttaatttctttattaaaaagtcatgattggaaactccaccacccaccattcttcttgactataatttattctcttgacatgaaacatagcctttctgtgtaaccagaatccctcctgccctcttggatgctcaattcatcttgttctttccggggacgggacattcctccctgtccagctgcctgctctctcacctccctgctccacacagctgg

SEQ ID NO: 656551 - DNA, 523 bp, Homo sapiens
ttccttctatctctaaaattccagacttttctacattttcctctttccatggtacccgccccccaacctccaccccaacactgacctccttctatattggcccytcctcctccttacagggagcagatagcagggacttacagatgaaccaggccctgcgatttttggaaaatgagcaccaggaactgcaggccaagattgaatgcctgcaaggggacagagacctgtgcagcttggatacccaggacctacaaggtactcttctccttggaggccttgagtgcatggcagccatggccaagtgagctaagaaaaaagaaactgaattaagagaaaggcttcagccttttatttgtttgcttgattggctgattggctttataatctcattttaccttgagggagaggcaggactgttttaatcatccaaaattgaaaattaatttcactgtagtagatagagtatcttgttgtctgagctctcttttttagcccatccctctgggccagatcacagctgctc

SEQ ID NO: 656552 - DNA, 646 bp, Homo sapiens
cctataatcccagcattttgggaggtggaggcaggcagatcacttgaagccaggactcagcatagccaacttggcraaaacctgtctctactaaaaatacgaaaattacccagacgtggtggtgcatgcctgtaattccagctgcttgggtggccgaagcatgagaatcactagaacctgggaggtggaggttgcagtgagcaagaactgaggggcagtaatggggaaagagttaacagacatgcaaaaagattcacatgtaaattgccctggtgatggaaaagtgaacagaaactcaagcttaacacatagacccaggattattaattttccaccctcaaagccctgaattctctctctagatccaaacccattaatagtggaatggataacagattccccagttcaaggtaaaattaagggttgatttaggttggaagagttaatagaagcccaggttggagagcacagataagagactttgatggtggaattgctaacaacagctggggtttgaggtgaggtcagagggatagggatggtggaagagttaagaaggacatggtttgagtatagaccagacgggccatcaatgatggaatatttcaaagatgcctgtattcatttcctgttgttgctatagcaa

SEQ ID NO: 656553 - DNA, 635 bp, Homo sapiens
ggggttgagtgagtgagttgaattcattgccagaaaaattatttcctttwtagaagtaaaatttcacaggtttttaaaacacagatttcatcccgcttatgtgtagcatctgaggagacagattcatgtctttcagattaaattaagccttatgtagtttaaaggttactgaggtagattctacagatccaagaaaagttatggaagaaatgaaagtaagaagaaaacacttaaggtctttctataactagttttgagtatttaaagggtggagccatctcccacaaataattctatccccaaacaactcagaggaattgctgcaaggtcaagacaaaacaaggtcccaagatagggctcagtatatgtagggttttctctacctctcatggttcctgggattgctggaaagtttactgtcatcaaacatcttcccataaatattctttattactaactacccaagcagcagccatgacttgacgttatgatcccttcccacccaatttccagccaactaggctcaatttcttacttcttcccaattagaaaataagtatatcttacaatctgggatgtcattttctatgctccatttagaaataaaaatgtggatttgaatcctctcatcactg

SEQ ID NO: 656554 - DNA, 615 bp, Homo sapiens
ttaatatgcatttttttcaaaaggtgtctcagaggattaaattaaaaagtgtgtattattaacttagcaatgagtgcaggcatatgaagaactcaataaaggttaactgtcttgattactgatggcctttgataaagctacacatcaggtaaaattatttttctatgtctcagtttctttttataaagaatggtttatattagcatatttcctaacctctgtggtaggcagcttctgaaatggctcccaatgagccctgcctcctgatgttcaattctttgtataatctaatgccctcgagcacaccctggacctagtgacttgcttatagctaataaaagtgaagcaaaaataaaaggtatcacttctgaaattaggttatacaagcctgtggcttccctcttcctcatattgtcatgtcctctcagttgyttgctttgataaagccatttgctctattgtgagctgtcttaaggaaaaggtcacatgtaaaaaaaccaaaggcagcctctgagaaattgaggttcccccatccaataccctatgaggaattgagccctgtagcaatcatgtccatgaccttggaagctgatcttggctgaagtcccagccaac

SEQ ID NO: 656555 - DNA, 589 bp, Homo sapiens
aataaatatttctccaaagggaacataaaaatggataataggtatatgaaaaggtggtcaacatcattacatttcagggaaatgcaaattaaaatcaaatgagatatctatcggccaggcgcggtggctcacacctgtaatcccggcactttgggaggccgaggtgggtggatcacaaggtcaggagtccgagaccagccttaccaacatggtgaaaccttgtctctactaaaaatayaaaaattagccgggcgtggtggcacgtgtctgtaaccccagctactcaggaggctgagggaggagaatcgcttgaacctgggagtcagaggttgcagtgagccgatcatgccattgcactccagcctgggtgacagagtgagactccatctcaaaaaaaaaaaaatcgaatgagatattatcatctcacacttgttaggatgacagttatcaaagacaagagataacatgtgttgggaaaggtgtggagaaaaggaaatcattgtacactgctggtgccaatgtaaattggtacagccattatggaaagcagtatggaggttcttcaaaaaattaaaaatagaacaatcat

SEQ ID NO: 656556 - DNA, 589 bp, Homo sapiens
aataaatatttctccaaagggaacataaaaatggataataggtatatgaaaaggtggtcaacatcattacatttcagggaaatgcaaattaaaatcaaatgagatatctatcggccaggcgcggtggctcacacctgtaatcccggcactttgggaggccgaggtgggtggatcacaaggtcaggagtccgagaccagccttaccaacatggtgaaaccttgtctctactaaaaatacaaaaattagccgggcgtggtggcacgtgtctgtaaccccagctactcaggaggctgagggaggagaatcgcttgaacctgggagtcagaggttgcagtgagccgatcatgccattgcactccagcctgggtgacagagtgagactccatctcaaaaaaaaaaaaatcgaatgagatattatcatctcacacttgttaggatgacarttatcaaagacaagagataacatgtgttgggaaaggtgtggagaaaaggaaatcattgtacactgctggtgccaatgtaaattggtacagccattatggaaagcagtatggaggttcttcaaaaaattaaaaatagaacaatcat

SEQ ID NO: 656557 - DNA, 631 bp, Homo sapiens
ccctagagctgagctaggttggcaaatgtaacctgcaaggctctgcataattgttccggtgcatcaaactatagcataatgtrgtaacaacggtgataggatgtgaatgttagggaaatgctgttgacctagttggtggaggaagagggtcacagcaggtatgtgagatcagtgattctcaaatttgagcatgacttagaatcacctacagggctgtataaatcacaaagtactgggcctccagccccaatctcctgcaagtttctgattcaggtctagggtggggcctgagaatttgcatacctaacatgctcctacactagccagcactatgctagttaatatttttcaaaaataactgcttcccttccataccaggcaccatgttcttaggaccttccttgagcaaggagtctattttcgtacctgaagacatcgggcttggttttatgacatggcttggcaatgaaatgtgaatgcagggattgtgtgccaagaactattgtggacttttgccgtgtctcttttcgtctctgtcaggagacccgcatgtcccagatgtagggctgctcattcagcctgggtcttataattaagaagacatgaaatccagctgcacctgacccatgat

SEQ ID NO: 656558 - DNA, 522 bp, Homo sapiens
ctgattaattcttcactgactttcagaatacaaacagtatccgtattttctcttccattaaaacaagcagtgattagcagaccctggcaatacatactcagtcattcaaatctctttagaaggtactgaaagatactttgtaggcaagagtcatgaaaccaagatttcagggtcaagtacaaaacaggcacaactcttaagtatattccttttctaataaaaagtattttcagatctcttatattaaaatagaaaatagttttggttgttctgacagcagtttatcatactggctccctcctgagctttctagtgctagggtctggccatgtctgtgctttccgcaaggagtcacagtaacttaatattcttctacaatgtttgaaggggaccgttagctatatatggcctgggcccagatctgtgtcttcctttcctaggcttattttcaaatagaaaatraaaataagtcccacttatgtcaaagagtttcaaagagctttgtatttaaaaaaaaaaaac

SEQ ID NO: 656559 - DNA, 553 bp, Homo sapiens
taacatgaaatagagacagttcctgcctttgaagggtggtgatttacyggtggggagaaaggaagaagcccatgaaaagtcgtgtctgtagaaggtaagaaggggcacaaccgccatggcaggggagtcacaaaggagaagcattcagcctgccgagaggtcccaggactttcctggaggatcagtccccaaactgactgtgacagggagcaatacccagataacagcagaggcccagaataagaaagagtctgtgagtgggcagaattccctccagggtcatgaggggagctgacttctgattagggcatttcatccttctctgaaatgcagctgagaactggtcaagcctcactcccttgctgagaccaatagcaatccctgatgatctcgccacaggtccagcaggtgccccatccacactttgtccccagcccctacctggaagctccaaacacctacctgaggggccaactctgattcccaaggaggtgacacctcctgccccttgttgatagaacattgataaggaaataggactgagttttaagct

SEQ ID NO: 656560 - DNA, 553 bp, Homo sapiens
taacatgaaatagagacagttcctgcctttgaagggtggtgatttactggtggggagaaaggaagaagcccatgaaaagtcgtgtctgtagaaggtaagaaggggcacaaccgccatggcaggggagtcacaaaggagaagcattcagcctgccgagaggtcccaggacttycctggaggatcagtccccaaactgactgtgacagggagcaatacccagataacagcagaggcccagaataagaaagagtctgtgagtgggcagaattccctccagggtcatgaggggagctgacttctgattagggcatttcatccttctctgaaatgcagctgagaactggtcaagcctcactcccttgctgagaccaatagcaatccctgatgatctcgccacaggtccagcaggtgccccatccacactttgtccccagcccctacctggaagctccaaacacctacctgaggggccaactctgattcccaaggaggtgacacctcctgccccttgttgatagaacattgataaggaaataggactgagttttaagct

SEQ ID NO: 656561 - DNA, 391 bp, Homo sapiens
aatatgtggaaaatagtgacaataaaaatattacacatgtgtaatcccagcattttgagatgccaaggtggcaggatcacttgagrccaggagttcgcaaccagcctggacaacatagggagactccatctccacacacgccaaaaaaaaattttaaatagccaggtatagtggtacttcttgtaatcccatctacttgggaggctaaggtgggagaatcacccaacctcaggagttcagggcttcagcaagccatgatcatatcactgcactccagcctcagcaacagagcaagatcctatctcaaaaaaaaaaaaaaaaaaaaaaaatcacatgtgggaaatagctatagcacaataaaaataaatgtattaagtatgaacaacaaaaa

SEQ ID NO: 656562 - DNA, 391 bp, Homo sapiens
aatatgtggaaaatagtgacaataaaaatattacacatgtgtaatcccagcattttgagatgccaaggtggcaggatcacttgagaccaggagttcrcaaccagcctggacaacatagggagactccatctccacacacgccaaaaaaaaattttaaatagccaggtatagtggtacttcttgtaatcccatctacttgggaggctaaggtgggagaatcacccaacctcaggagttcagggcttcagcaagccatgatcatatcactgcactccagcctcagcaacagagcaagatcctatctcaaaaaaaaaaaaaaaaaaaaaaaatcacatgtgggaaatagctatagcacaataaaaataaatgtattaagtatgaacaacaaaaa

SEQ ID NO: 656563 - DNA, 391 bp, Homo sapiens
aatatgtggaaaatagtgacaataaaaatattacacatgtgtaatcccagcattttgagatgccaaggtggcaggatcacttgagaccaggagttcgcaaccagcctggacaacatagggagactccatctccacacacgccaaaaaaaaattttaaatagccaggtatagtggtacttcttgtaatcccatctacttgggaggctaaggtgggagaatcacccaacctcaggagttcagggcttcagmaagccatgatcatatcactgcactccagcctcagcaacagagcaagatcctatctcaaaaaaaaaaaaaaaaaaaaaaaatcacatgtgggaaatagctatagcacaataaaaataaatgtattaagtatgaacaacaaaaa

SEQ ID NO: 656564 - DNA, 566 bp, Homo sapiens
ggtttctatggatgagggacataatatttattaatttattctaaacttyagtcactcataatatacccttttattcctccttcttctgtgatattgggagtgtatagttgtcattgtgacaaaccctttgctgtcagtatctatagtggatggggagaaaaggagggctttgccaatcatcgtctccagtgcatttcccactgtcagtgtcattgtctaatgctgtttgcatccacacagcctaagggaaccgtttaagtgagtgactccctcccttcacttcagcccatcacttaagcatttctctcccttgaaaaaagacaagtggtgcttctaagacttgagtaattctgaatataattgaggactagatgttcctgttttatatcctacagggctggcatctctaatgctgaaagtacaacaaagtgcagtggtagtcactgagcgttcagccatgctgggtcatcaaaataaaaggagatcgacttcccattcctatcaatggcatcatctctaccagatatattacctggaaaaacaatgcatttgcttaaacatccaca

SEQ ID NO: 656565 - DNA, 577 bp, Homo sapiens
  misc_feature 1, 2: n = A,T,C or G
nnttaatgagtattgcttaaattgatgaattgaattagtattttaccttctctgttscttagctaagcagaagaatttgtcatttttttaatttagtgactggttctattaaaagttacctttgtctatatcattttgttatactaaagcacaaatgtataaggtcaaaaaacattctcaagattttgtttaaaccacagccctcagttgtgtatatttatctcttgttttcatatgcaagatttctcctgaaatgggcaacaattacaagagtttttttcctcttctgaactaagaaaataaatatttaattcacaagtttagaaaagtgaacctgaaaaatcacagggctaggtgggttatgaggcccactggtacatgatagtgttgaatgtggattagaatgaactccgtggattagaatctcagaccataggcaaacatttacttgttttagaataagcacatttgagtctgcaataagtattactatttttaagttgaaaatgtaattggtttctaataataaccatattggctagcattatttcaatcgtgtttaatgttttccagtgtc

SEQ ID NO: 656566 - DNA, 625 bp, Homo sapiens
atgtaatattctataaagtagctgtatcagtttatactttaaccagtaatggacaagattttctgttacttcccatctttgttaattattacttttagactctaacttttatcaggctcatggatgtaaaaagcatctcagggtggttttaatttgcatttatctgctcatctatgaagatgagcttcttttcatataattatgagtcattatttttgttttgccttcttttgtttatgcattttgcttgttctatgtcttatttttcctgttgatttttgggagttcatatatattctaaatgtatatttattcactyatatatatgttgcaaatattacagtttatgatttgtcaccttatgatatcatccaaatagagaagctttatattttgatgtagtcatatgttcatttttcctccttaatgtttgtttttcttggttctatgacctaccaaaagtaacaaaaattctcatttatttttaatctaaatgttttaagtattttcctggaattcaccttgaattgatttctattggagataggtatccaatctaatttgcctcatatggataaccacttgttctattactgctgtaacaaatttctacaaactaagtgac

SEQ ID NO: 656567 - DNA, 600 bp, Homo sapiens
agagctcaaatgaataggatacagcaatagtccttaggcggtcattctctaatctttgctggcagagcctttacagaccgctaggagagttaattatgcaaattaaattggttgaatctatttatagcatggcagaactggacagagccctgggcataaacatttgcctggcgtcccctcccgcaagcaacttgacaccactacagaccctctgtgatctggatatgtttgtcctgtaattaatgaaggacaagaaagtttatctggaatatgaatcacagataacttaaaacactagacagaatcaaaaagcagtgaaccttctgtgtaatatttaatgttcggtgaatgccagaaatatttctgaagctctgaaatactttcataaaatatatatacacataaatgcatgcacaaacacaaaacacaaacacaaactcacatctgagctcattaaatacaattcaaaatatatacatatatttgtatatgtacatgaacatgtakgcatatgtatatatgttctgtaagcatttatgatatatgtgtatgtagagaaagagacagaccacacattgttggtgctagtataaatttttc

SEQ ID NO: 656568 - DNA, 621 bp, Homo sapiens
tatatccttttattcttttgtttaggagccttctgtagacttccatggaaacagaaagtttggcaataatatagatgttaaaaacatatgctgggagaaaaacaatcaagcattacttcaaggaaaaaaaaaaaaaaaagcttggcccggttcatgcatgtaataccagcactttgggaggattgcttgagctatatagtcccagcagtcccagctactcagccagacaggaagctgggggaagttgaggtaggaggatagcttgagatgagcgcaggggatggaggctgcagactgtgattgcaccactgcactccagcctgggtgacagagagagaccctctttcaaaaaaaaaaaaaaaaaaaaaagaaagaaagaaagaaaagaaaaaaatgcatttaatctaraattttgtgatgatgatgaagtaccacttggggaagcccaagagttaagatggtagggttcacaagaagtatcaggtaataaaagtttacagaatccgcactaggctcctttgccatttaactaatttatctgattgtgaccaacttgggatattggaagatataatgacctccaatgtgaaatattacaagggaagcaattcacatagtcta

SEQ ID NO: 656569 - DNA, 570 bp, Homo sapiens
tcagtgagaaggatgcctggaatgcctgaagccctcaggcaagtgcaaacactctgccttgggaggaacattgagggtcaggttggaagcatggactatagactgctaattgcctcccgatgtgtcgaataattgaastaccaattaatgactgagctgatagccatccatgataaagactgtattctccaagttcccttgctgctgtttatgctcatgtgactaagagaataagagaatgagaatgagagaagaatgagagaagaatgggaatgcccctttctcctttttgctgcccacaatgtggatttggcgggtggaccacatagtggccactgttaaagtcctgcccggtttccctttattgggccagaacaaccatcctccagctgttgaaagtgttgactgctaatggctcacagctgtcccttttctagggaattattttttttggaagaagaacagcaattttaaggtttctatcttggactgtgagctggaaaccatgtattaaggataatatacaataaagtagaaggaagctctttctctgatgattgtggactgtct

SEQ ID NO: 656570 - DNA, 570 bp, Homo sapiens
tcagtgagaaggatgcctggaatgcctgaagccctcaggcaagtgcaaacactctgccttgggaggaacattgagggtcaggttggaagcatggactatagactgctaattgcctcccgatgtgtcgaataattgaagtaccaattaatgactgagctgatagccatccatrataaagactgtattctccaagttcccttgctgctgtttatgctcatgtgactaagagaataagagaatgagaatgagagaagaatgagagaagaatgggaatgcccctttctcctttttgctgcccacaatgtggatttggcgggtggaccacatagtggccactgttaaagtcctgcccggtttccctttattgggccagaacaaccatcctccagctgttgaaagtgttgactgctaatggctcacagctgtcccttttctagggaattattttttttggaagaagaacagcaattttaaggtttctatcttggactgtgagctggaaaccatgtattaaggataatatacaataaagtagaaggaagctctttctctgatgattgtggactgtct

SEQ ID NO: 656571 - DNA, 391 bp, Homo sapiens
ttactagaaaaaaatacagcttaaaaatattttgtttaacttatgtggtaaagataagagtaaatacaacgtagaaagaaaagagaaattgcaatgaaatgaatacaatacaaaggaaaaataagagcagaaaatgaaaggcaaaaataataatttctcatgtaatgttttctttttccttctgtataatttcttgtcagcctcttgcaagttagttaarttgattggaccatgatgccaacaacggtaaaagccaattttcttgttttaaaagtatttcttgtaggagtgactccagtcagtcatttataaaaatatatgcaatttctccaagagtctctagcaaacatgtggatgactggtagctgaaagacattcttttttttttttt

SEQ ID NO: 656572 - DNA, 644 bp, Homo sapiens
gtcaccttaagtcactaactgcatttacccataacaagagagtcagcctgtcttttgaggctcttataagtctggccacaccagttttaccatctttcactttggtttcttatctagatggtattatctatatggaataggcaagtgggttattgtgagtgacagaaacctaacttggactagtttgagcaaggaggtacttttcagggaaatgatgtttcacaaaactgccacrctgcaggcagaattagaaaataggccttgggaattgcagaaatagggctccaggtccaccagaattatttcctcttttcattccctcttggccctgtaagattggctttatttttctctctcactgtagccagttttcttctggaagagaaaacatggatagtgacagctcttgagccttttagcttatggcttcagctgcttcagaagagatcaaccaaactctattggtcctaactccaaacatccagggaaggaacttcctgcccctgatcctgttaactgtggccagtagtgccatgtaagagcactgaaatttttggaaagaccttagggatgaagtattgttgtcagaggaagaggagggactggtagtaaaaacaataggtgtacattctttgtgggcagtg

SEQ ID NO: 656573 - DNA, 561 bp, Homo sapiens
tctagttcctttgcattttcacgtaaaatttagactgatcttatgctatttatctaccaaaaaccttgctgaattgtgtgaaacctgcatatccatttgcagagaagcaatatatttactattttgactcttccaatccatgaacgttgtatgtctcttcatttatttataacattgatgtcttacatcagcattgtgtggtttttagtatacaaatcatgtatgtgtcttgttagatttacacctaagtaatttttaaaagctaatgtagaagtatcatgttttaaatttcagtatccattmctagtatatagaaatataattaatttttacatgtagatcttgtatcctgccacattgctaatttcacttattagttctacaagattttttcttttgtagaatttgaaattctttcgtctgtaataaagaccattttatttcttcttttcagatctgtatgccttttatttccttttcttgccttattacactggctagaaattccagttttatgtcaaacaagggtagtaaaagtagatccttgcaatttaacattaa

SEQ ID NO: 656574 - DNA, 561 bp, Homo sapiens
tctagttcctttgcattttcacgtaaaatttagactgatcttatgctatttatctaccaaaaaccttgctgaattgtgtgaaacctgcatatccatttgcagagaagcaatatatttactattttgactcttccaatccatgaacgttgtatgtctcttcatttatttataacattgatgtcttacatcagcattgtgtggtttttagtatacaaatcatgtatgtgtcttgttagatttacacctaagtaatttttaaaagctaatgtagaagtatcatgttttaaatttcagtatccattactagtatatagaaatataattaatttttacatgtagatcttgtatcctgccacattgctaatttcacttattagttctacaagattttttcttttgtagaatttgaaattctttygtctgtaataaagaccattttatttcttcttttcagatctgtatgccttttatttccttttcttgccttattacactggctagaaattccagttttatgtcaaacaagggtagtaaaagtagatccttgcaatttaacattaa

SEQ ID NO: 656575 - DNA, 622 bp, Homo sapiens
ccagtgttggaggtggggtctggtgcaaggtgattggatcatgagagtttatgccttgtgaatggtttagcaccatcttcttggtgctgttctcatgayagagagtgagttattgtgcaatgtgcttgtttaaaagtgtgtagcacctccccttctctatcttgcttttctcctgctatgtaagatgccttgctccccctttgtcttctcccatgaatgtaagtttcctgaggcctcttcagaagctgaacagatggcagaatcatgcttcctatgttgccctgcagaactatgagtcaattaaacttcttttctttataaatcacccagtctcaggtatttctttatagcaatgtaataatggattcatacatatccaaaggaatagaaatcattctgccataaagacacatgcatgcatatgtttgttgcagcactattcacaattgcagatatatggaatcaacctagatgtccaccaacggtagactagataaagaaaatgtgatgcatgtacagcatggtatgctacacagccatgtaaaagaacaatattatgtcctttgtagcaacatggagggagttggaggccattattgtaagcaaactaacacaggaccag

SEQ ID NO: 656576 - DNA, 537 bp, Homo sapiens
gttacgtatatttttgaagtagataaatgaggaaggatttcagttgattagttactggaggtatttctcacacaaatttaaaattaatatgaaagatggtgtcagtatctagtccattttcttttactataacataatatcacctattgagtaatttataaagaaaaaatayttatcatagttctagaggccaggaagtccaaggtgccagcattttgcaaaggccttcatactgtgtcatcccatagcagaaggtaaaagggcaagaaagcatgtgcatgcaacagacagcaagagattgaacttgtgtagcctcaagcccttttataactggcattatccgttattgagggcggggcctttatggcctaatcacctctcagaggtcccacctcttaccactgttgcattggggattaagtttctgacccataaactttgaggggcacattcaatctatagcaggcagcaacttttaactgtaaaagttttgaaagttatgaaatatgggataaatccaatcatctgaaaacatta

SEQ ID NO: 656577 - DNA, 621 bp, Homo sapiens
cttgccatgctagacaagggccactgctatgtacaccagcaatattctggacatgccttacaatagcatttaatagctttttcttgtatttttatcagttgctttcagtagcagctcaccataatgttgttagggcctcgcatcctacatttctgggtgactattaaatatttactaaatgaataaataaatgaaattcactgaatctgtaagcaagaaataccaatgatggttcactttgtcccagcacaattcccrtatgaagacaaatgatataaaacattaaaaaaattaagaaaaaattatcatgaaaaaatagggtaatagtaaataaatttggccttcagctaaacagagagagaaaattctatttaacacaaattgcatttcatagtgaaataattcccaattatcctacattttaaagcttgtactatcacacctgaggaaattctatttatttctgaattggcatataaacctgtgcataaataatctattacatttctgtttattacatgatattcacagtgatatattaaaatgtgatgattttaaatatattggttatttgggaattttgacccacaaatctatagctatgctgagaaagccctaaag

SEQ ID NO: 656578 - DNA, 621 bp, Homo sapiens
cttgccatgctagacaagggccactgctatgtacaccagcaatattctggacatgccttacaatagcatttaatagctttttcttgtatttttatcagttgctttcagtagcagctcaccataatgttgttagggcctcgcatcctacatttctgggtgactattaaatatttactaaatgaataaataaatgaaattcactgaatctgtaagcaagaaataccaatgatggttcactttgtcccagcacaattcccgtatgaagacaaatgatataaaacattaaaaaaattaagaaaaaattatcatgaaaaaatagggtaatagtaaataaatttggccttcagctaaacagagagagaaaattctatttaacacaaaytgcatttcatagtgaaataattcccaattatcctacattttaaagcttgtactatcacacctgaggaaattctatttatttctgaattggcatataaacctgtgcataaataatctattacatttctgtttattacatgatattcacagtgatatattaaaatgtgatgattttaaatatattggttatttgggaattttgacccacaaatctatagctatgctgagaaagccctaaag

SEQ ID NO: 656579 - DNA, 566 bp, Homo sapiens
taagaccttttaaactcatgtgtatattacctcacagtttgcaaaactcattcatatgcattgtcttaatctccacagtagcaatgaagtattttattagttagctactgctgcataacaaactagcagaaaacstcaatggcataaaacagtaatcacctatctttggttacaaattgatatcattggctgcacagttcagctgagctcaacagggtttattcacacatctttgatcagtttcaggtcatctaggtagttttgattaccttaactggactctctcacatgtcttgggcattaactggacaacatgtgctatcttgactctgttccacatggcccctccccttgtttgggaatttcttatgataaaggcagaggaggaaaggaatgagcaggtatgctttttcatgtgtcagactgcatcaaatttgctactgtcccacttgccaaagcaaataacatggccaacccagagttacagtacacagaaaaagatgttgctatagaaacaccattaattatggtcattgatacaatcaatctaccacagtttgtgctat

SEQ ID NO: 656580 - DNA, 530 bp, Homo sapiens
aaacaatacttggttttatttatatatgtctttgggttgtttatacacaygcactatctgggcaagtactttgtgaatatgtgcatgattgtgaatgtgtgatgaaaagggccactttacttgaggaaggcatggaacagaaagtatggggtttagatatgaaaaatgaaactgcatttttcttctggagggtctaaacatagtagcagacgagagaggggcagtaaaaatgacaagaatgtgacattgcggcaccatgcttgtgggcatcagaatacctttctatcccccaagtctcctgttagtcacattatttggtgtattttgtgaaaaaaatagaggccccattcccagggcttgttcattaataaagggggctcttggcagggaactcatgaagtacagggactgatttttgttggtgctgcagccccactgcttaaaactctcctttctcaaagcaaccatgatcaggtgttttatttgcatggttgatactggaacttctaaatttgggattaaagaaattc

SEQ ID NO: 656581 - DNA, 516 bp, Homo sapiens
ccagctactcaggaggctgaggtgggaggattacctgagcctgggaggtggaggctgaagtgagctgtgattgtgccaccgtactccagcctgggcaatggagtgaaaccctgtctcaaaaaaaaaaaaaaaaaaaaagtgtgcattaagttccttctatgtgcaaagtattttgttttatccttagaccaggaagaggacatattcacaatgtctacttgaaattatgtctgctaaaggcataaagaaggaaatccagctgcagtgaatcaggaagagaagatggagctggtatggagtacagattaaagtgaggtatagacagttcagagatgggttgtgggcaagcaagmctgtttgagactctctactcttcattctgttaaactaaatttggtctgacactgcctccttactttgagtttctatgtagataactacaacctagtttaagagtatagtcttgtaacaagtagttgagtctcagatgagcttcagccaatcacacgctgccaa

SEQ ID NO: 656582 - DNA, 538 bp, Homo sapiens
aaaaaaaaacacaaaacaacaacaacaacaacaaaaacctagatccattaatatttacacattacacaacatttattttttcagagatgttaggaattatcaggtagtgttctcttagatatcaggtatgatatgagataacgcctctggataaaatgacaccagaaaattttctgcccattcttgattatatgctgacagcaggggaagcagatwgagggaaatttttttaactatattgcctgatttgaatggtataggacttacatgaccaatacaatttttaagatccttctaacaaaatatttcttttctcccacgttctttacattacccccaagaccttcaaagtgctattcacaacttaaatttgggagtgggttctagttgccatagcaggcactataattctaataacaaaagtaggtaccaaacctccaatgtcaagccaggcagatcaggactggaggacaagttctgtgagcctgattctagattcaggcagacctgatttcgaatcccactttaactgagtttt

SEQ ID NO: 656583 - DNA, 626 bp, Homo sapiens
gattttgcagttgattttcactataatgaaactttgcctagcctaactagtaaaatggcattgcatattttacttgtgatatttaggtatgtctcacagcaattttatttaatttttcaaagtttttggcaaacactttactgttgtttgtctccaacaacaatgatctatraagtcataaataaataaattctatatatgtagaatgaagcttcatgttcattaagctaaaagatacttacccagttaaccctagctctgtatatataccctgaactgccacaaaaaaaaactgccattacttcaagcacttccatctaataatttttgctaaataatttgaaaatttcagacagagcttatttatcatattcttctatcaaagaactaaggaaggactggtattgtacccaataagtgttttgtttgtctttttgttgttgttgttgttagagaactctataaagcgtttacattagttcctcctattttgtacatgacatagttctccttcccctctagccctcaggcttgaccatcaactcaggccctctaacattacagaaggtatcccatatctgatcatatcaagattcagcttcccatgattacagaagatatcccat

SEQ ID NO: 656584 - DNA, 496 bp, Homo sapiens
attgccctctgtccacttcagatcctgttactgtcaattttgttgttgtaattgtgattgtagttttcttctgtaagaaagaaattgagtacttcacaatcctttaaaaagaatacatttaagtctttgtttaaacttaaatccacacttgttttattgtcctcagataccacctattatagaagatggactccaagtttcacatctaccactggatctttcccaagtacttcaatttaggatgaatctcctctaatctaaactctgagagtagttagtgcarattttagcatataatctcatctacccaacaatctcattttaactgctttgcacagttacaatttctcctccaccagatcataaggttacgccttaaattctttttttaatctcccctagcccaatgttatgtgattaaagctatttactcatagatacacttggatagcagcttgcttaataactttcattatcaaatgttaaaagccattgt

SEQ ID NO: 656585 - DNA, 619 bp, Homo sapiens
ggatgaaccttgaaaacattatgctaagtgaaagaagccagtcacaaaaggccacatattgtattactgcatttatatgaaatgtcctgaatagaaaaatctatagagaccaactggagactagtggttgtttatggccggggaagaggtggattgggtggtgacagctaaggggtatgtggtttattttgagagcactgaataaaattgattctggtgatgaatgcaaaattctgtgaatatactcaaagtctttaatcttgtactttaaatgggtgaattgtacagcatgtgaatcttatctcaagctgatttttaaaaactaaagctaaacctaacatcacaatggtgaaagactgaatgtttttctctaagattgggaatgaagcactgatttctactctcatcactgctattcgaggtagtactacccagtgcaataagacaagaaagggaataaaagtcttatacatccaaaaggaaagaataaaattgtctctatttacagatggcatgawcatctacacagaataatatgtcaacgaatttataaaaatgagccttgatctagcaatgaagttttggtttgcaggatacaatatcatcatacaaaaaccaa

SEQ ID NO: 656586 - DNA, 622 bp, Homo sapiens
tgggaaaaaatatctggcatattcttacagaaacaaacaactacctattctatgactcagtaattcctaagcatttatccaagagaaactaaaacctatgtccagaaaatgacttatacaagaatgttcatagcagttttattcataatacaaaaaactggaaacattcaagtatctgtcaatacaagaatggatcaataaactgtgatacactcattccatggaatggctaaaggaacaaactggtgacacacagaacaacatggatgaatctcaaaaacatttggagtgcgatagaagccatacccaaaaaagtgtgagaaaaaaagataagtaataatgsttccaagaaatgcacagcagacagcccagaggcaaagacccacaggacggcgggccggtcccaggctgtcgatcctaattaagaaacttctgctggattttgcccagctccatttccaaactattttgggtcagtgacttctttatcccttccatgttgcctcattttgaactagaatcactgtaagtgttattctatgtctgtcacatcattccacagtaggggcagataagctgtatagaatggctaaaattcaaaaaggtgaacacaccaaatgct

SEQ ID NO: 656587 - DNA, 457 bp, Homo sapiens
  misc_feature 1, 2, 3, 4, 5: n = A,T,C or G
nnnnnagaaagcagtgcagtgtacagagcagagaccgtgggcctgtctcctgggctccatccaagttgcttgtcttttctgtccctgtttcctcacctgttcagagggtactacaataatacctacctctgtaaattgctgcagtgaattacatgagctatttcttgtcaatctcctagaacatttattggcacacagtaaacactatctattagttcttcattctgctgtttctaaattaacacaaactttattaacatttgggcatatttccttcatggccttatggtgttatgtgtcacactttatgcttcagatatgattcttaaaatcataacwgaagatatgatttaaaaatcaaagatttttaaaatctttcgcatacttgtccttgaaattcccagtaaaagggaaaccatcagtcccatagtcctaggggccttcccgactgtacaag

SEQ ID NO: 656588 - DNA, 457 bp, Homo sapiens
  misc_feature 1, 2, 3, 4, 5: n = A,T,C or G
nnnnnagaaagcagtgcagtgtacagagcagagaccgtgggcctgtctcctgggctccatccaagttgcttgtcttttctgtccctgtttcctcacctgttcagagggtactacaataatacctacctctgtaaattgctgcagtgaattacatgagctatttcttgtcaatctcctagaacatttattggcacacagtaaacactatctattagttcttcattctgctgtttctaaattaacacaaactttattaacatttgggcatatttccttcatggccttatggtgttatgtgtcacactttatgcttcagatatgattcttaaaatcataacagaagatatgatttaaaaatcaaagatttttaaaatctttygcatacttgtccttgaaattcccagtaaaagggaaaccatcagtcccatagtcctaggggccttcccgactgtacaag

SEQ ID NO: 656589 - DNA, 577 bp, Homo sapiens
tcaaattaatattgaaactgccttttgcttgggctcgtttcccttgcggaagaaggatgaccaagaagatgaacaggaaagaaatgagaaaccgaggcctttgcttagtagctaaaggctaccttctgtaacatgaaatagtctacaagtggccttgaactctgccgtgattyagtgacagagttccctcatgtcttctacccaggttgaagtccagcaaaattgcgactgtcctctttacaacttgcgagaccacattgcttctgcatttgcctgttgtatgagatttacacttgttttaaagcaacattttgtttcagttgggctggtggccatacccggcactagccagtcaatagtgagatggctcctcatggaggaggcttggcttgaggctgagggtctttaacccacatatacaagagagttgccactaagggatggaagccaggctaataaccaagtgccacacagagttcctatctgtcccttctcaccatttttggctggcaggttttgagcattttagggcttgggaagatagtaatactaaatctactaaatacattacccatcc

SEQ ID NO: 656590 - DNA, 577 bp, Homo sapiens
tcaaattaatattgaaactgccttttgcttgggctcgtttcccttgcggaagaaggatgaccaagaagatgaacaggaaagaaatgagaaaccgaggcctttgcttagtagctaaaggctaccttctgtaacatgaaatagtctacaagtggccttgaactctgccgtgattcagtgacagagttccctcatgtcttctacccaggttgaagtccagcaaaattgcgactgtcctctttacaacttgcgagaccacattgcttctgcatttgcctgttgtatgagatttacacttgttttaragcaacattttgtttcagttgggctggtggccatacccggcactagccagtcaatagtgagatggctcctcatggaggaggcttggcttgaggctgagggtctttaacccacatatacaagagagttgccactaagggatggaagccaggctaataaccaagtgccacacagagttcctatctgtcccttctcaccatttttggctggcaggttttgagcattttagggcttgggaagatagtaatactaaatctactaaatacattacccatcc

SEQ ID NO: 656591 - DNA, 598 bp, Homo sapiens
cacgaggctgttcacatgagggtctcaggctgcatagacacccacaccagctgaggggtcctggttttcataaagtgtgtggctcagccaggccaccaacaagaagttcacaaacagtagtaatacgacactttccaaagaccttacttgagtaacatggtgatcctcacaaatttccaatcaggatggtcgcacrgttcctcctgctttaggactcagagcctgcccatggtcacagtgggtaggtgcagactctgaagatgccctttggtcagagaccccgctgaactctgtctaatgaggacctctgtcctgtctgctgaccaccggtcagaggtgcaggctgcactggggagtaagaatgccaccttctcaatgttgggaaaactccctgccagaactgagaatggccctttctaagcagaagacaagctcagactaaagaaggaggccgaccacatcaggttggcagattgccaaagattcactcagggagagcccacatcctgggccatcttgggtggtggcaagatgaggtagatgactgcttttgcaacacatacctgacaacaaaaaatcaacaactgtaaaagagcca

SEQ ID NO: 656592 - DNA, 623 bp, Homo sapiens
ctacattggtccagatacaatttgattatgtaaagtcgtgaataccttctatccttaatattatgtgcatctgtccatgagcccattgaacaagtatcagctgactaacatctattatataacatgtcattgtatgcatacgattactcctcttcagtggattccctctaataagaatttacttgggctacaagtattttcatacttcgtgtctattttaagaagtcatcttcggctgggcttggtggctcacacctgtaatcccagcactttggaaggccaaggtgggcggatcasgaggtcaggagatcaagaacatcgtggctaatacagtgaaatccagtctcgcctaaaaaaataaaaaattagctgggcctggtggtgggcacctgtagtcccagctactcaggaggctgaggcaggagaatggcgtgaacccagaaggtagagcttgcgagcttgcagtgaactgagatcgcgccactgcactccagcctgggcgacagagtgagactctgtcttgaaaaaaaaaaaaatccaactattcaaaagtaaagaaaaaaatatgtcaatccaccatgtgtccactgcacaccatcacaaattttaaaccatgcatgagc

SEQ ID NO: 656593 - DNA, 623 bp, Homo sapiens
ctacattggtccagatacaatttgattatgtaaagtcgtgaataccttctatccttaatattatgtgcatctgtccatgagcccattgaacaagtatcagctgactaacatctattatataacatgtcattgtatgcatacgattactcctcttcagtggattccctctaataagaatttacttgggctacaagtattttcatacttcgtgtctattttaagaagtcatcttcggctgggcttggtggctcacacctgtaatcccagcactttggaaggccaaggtgggcggatcacgaggtcaggagatcaagaacatcgtggctaatacagtgaaatccagtctcgcctaaaaaaataaaaaattagctgggcctggtggtgggcacctgtagtcccagctactcaggaggctgaggcaggagaatggcgtgaacccagaaggtagagcttgcgagcttgcagtgarctgagatcgcgccactgcactccagcctgggcgacagagtgagactctgtcttgaaaaaaaaaaaaatccaactattcaaaagtaaagaaaaaaatatgtcaatccaccatgtgtccactgcacaccatcacaaattttaaaccatgcatgagc

SEQ ID NO: 656594 - DNA, 623 bp, Homo sapiens
ctacattggtccagatacaatttgattatgtaaagtcgtgaataccttctatccttaatattatgtgcatctgtccatgagcccattgaacaagtatcagctgactaacatctattatataacatgtcattgtatgcatacgattactcctcttcagtggattccctctaataagaatttacttgggctacaagtattttcatacttcgtgtctattttaagaagtcatcttcggctgggcttggtggctcacacctgtaatcccagcactttggaaggccaaggtgggcggatcacgaggtcaggagatcaagaacatcgtggctaatacagtgaaatccagtctcgcctaaaaaaataaaaaattagctgggcctggtggtgggcacctgtagtcccagctactcaggaggctgaggcaggagaatggcgtgaacccagaaggtagagcttgcgagcttgcagtgaactgagatcgcgccactgcactccagcctgggygacagagtgagactctgtcttgaaaaaaaaaaaaatccaactattcaaaagtaaagaaaaaaatatgtcaatccaccatgtgtccactgcacaccatcacaaattttaaaccatgcatgagc

SEQ ID NO: 656595 - DNA, 413 bp, Homo sapiens
ctaggggagacaaagttggatgtatctactgccagccccatggggtcagaactacaggggaaggatggggactgtgggattccagaggaacaacagggagggcttcttggaggaatgcttgttcttgagctgagtttttttttttctctgtagctcagtctgaaatgcagtggcacaatcactgctcactgcagccttgaccttccatgctcaattgatcctcctacttcagggtgggactacaggcacatgccaccacacacagctaatttttgtattttttgtagagatggggttacatcatgttgttcaggctggtctcaaactcctgggttcaagyaatcctcctgtcttggcctctcagagtgctggaattacaggcatgaaccaccttatctgacctgagctgagtt

SEQ ID NO: 656596 - DNA, 512 bp, Homo sapiens
gcaacaaattgtattcaatatagagtaaggataaggaagaactctctcattaactggtctcgcggtgattacagtaatagctaacatctattgagtacttactatgtactgatctaagtattttttactctcaacaatcccatatagtaggttttattatccttatttgagatgagtgtgctgaggaataaaatggttaagtaagttgtccaaggtcgcttagctagcaagcctggctccagcgtccctgggttggaagcatattctgtactgctacatcagcataaaagttcatttttgctagtgtgtaacagtattcttcctgtcattaaaattaagtcagtttccttcactattcaacagttctcttatgaactcaacatttctacctcattcaccattgtatttagaggaaaatttattattattgttattacttttatttttgagacaagaacttgatcygtcactcaggttggactgcagtggtgtgatcacagctcactgcagcc

SEQ ID NO: 656597 - DNA, 513 bp, Homo sapiens
ttgattagtctgaattaaacagccatattccagaatattaaatatagaatatgaagaaaarctgtcatctccggtcaatgaagtattttaacttttgagttaatactttttcaaattaatttttttctcttcaaaatgcatcacactacttaactcacttgaaggactggcagagccatcaaccaatgtcatgagggaaaaagccttgtcattttaaggtattaaacagacaatgaaatctgccacaattttggtatttcttgtccatgagaacataataaattaatggagttttttcttttgcttttttctaagcaacaaagttttatgatatcatgaatgaaaaggtccttaattaccttttggtctacatgtcaaggacttctccctcataaaaccagtagtaatcacaacaaaaggaattaaccataaaaagaggtattaaaaatgtatacttgatttttaaatgcaagcatattatttctttacattaaaatttttagatttaaaaag

SEQ ID NO: 656598 - DNA, 437 bp, Homo sapiens
tactttttcaaattaatttttttctcttcaaaatgcatcacactacttaactcacttgaaggactggcagagccatcaaccaatgtcatgrgggaaaaagccttgtcattttaaggtattaaacagacaatgaaatctgccacaattttggtatttcttgtccatgagaacataataaattaatggagttttttcttttgcttttttctaagcaacaaagttttatgatatcatgaatgaaaaggtccttaattaccttttggtctacatgtcaaggacttctccctcataaaaccagtagtaatcacaacaaaaggaattaaccataaaaagaggtattaaaaatgtatacttgatttttaaatgcaagcatattatttctttacattaaaatttttagatttaaaaagtgtttctggaagctcaatctagaaaag

SEQ ID NO: 656599 - DNA, 437 bp, Homo sapiens
tactttttcaaattaatttttttctcttcaaaatgcatcacactacttaactcacttgaaggactggcagagccatcaaccaatgtcatgagggaaaaagccttgtcattttaaggtattaaacagacaatgaaatctgccacaattttggtatttcttstccatgagaacataataaattaatggagttttttcttttgcttttttctaagcaacaaagttttatgatatcatgaatgaaaaggtccttaattaccttttggtctacatgtcaaggacttctccctcataaaaccagtagtaatcacaacaaaaggaattaaccataaaaagaggtattaaaaatgtatacttgatttttaaatgcaagcatattatttctttacattaaaatttttagatttaaaaagtgtttctggaagctcaatctagaaaag

SEQ ID NO: 656600 - DNA, 496 bp, Homo sapiens
aggttttgacgtttcccaacctgtctgctggttacttttcagagtacttgggtcattgttatttatattttgtccagagtttcaaattgtgatcagtggaaatgacaggccgtagcatgcatacaccatcctggccagcatcacaggtggtcagcatatctttctgttgttgttttgagacagggtctcactctgttgcccaggctggagcacagtggcatgatcagggatcactgcattctcaacctgctaggctcaagtgatcctcccacctcagcctcccaaatagctgggtctataggtgtgctgccatgcccagctaatttttgtattttttataaagacgkgattttgccttgttgcccaggctggtctcaaactcctgagctcaggccatcctctcactcgggcctcccaaaatactaggattataggcatgagcaccacacctggccagtacttcttaaaaataattgctgatccacgttgaataatg

SEQ ID NO: 656601 - DNA, 496 bp, Homo sapiens
aggttttgacgtttcccaacctgtctgctggttacttttcagagtacttgggtcattgttatttatattttgtccagagtttcaaattgtgatcagtggaaatgacaggccgtagcatgcatacaccatcctggccagcatcacaggtggtcagcatatctttctgttgttgttttgagacagggtctcactctgttgcccaggctggagcacagtggcatgatcagggatcactgcattctcaacctgctaggctcaagtgatcctcccacctcagcctcccaaatagctgggtctataggtgtgctgccatgcccagctaatttttgtattttttataaagacgggattttgccttgttgcccaggctggtctcaaactcctgagctcaggccatcctctcactcgggcctcccaaaatactaggattataggcatgascaccacacctggccagtacttcttaaaaataattgctgatccacgttgaataatg

SEQ ID NO: 656602 - DNA, 538 bp, Homo sapiens
accacgtgactgaatagaattttagtcacaggattccagtttaacatatgcagttactatagcaattgaggtttccttagtaacagttgcaaaaataatccagccccaattaataatacattttaaagctctttctactccatgctgaacaacccagtttttttggccaagaaccagataattcaggtggtgtcatttgcactgatatagatatcatttgcatgcggtgaattgggttggaaaggaatgaaaagggagccggttgtttcaagtattataggaatccaatctgaaaagtcgactggcaagcgaatgcaaatctagyttccagagcttgggagcttaatggtaaaccctgtcctggattcctagtgtgccctagaggactttctgcatttgaagaagggagaaggcagaagattggacttgctaacaaaaaagatgaacccgggagggtggggccgtggcacacaggatttctctctaagtggtgcctggtgtgttcttgatggcgtgagaaggtctgtgggtttgtgaa

SEQ ID NO: 656603 - DNA, 591 bp, Homo sapiens
tgtaatcacaacactttgggaggctgaggtagaagttgaggccaggaggtccaagacaagcctgggcaacatagtgagtctacaaaaaagtattgagaatctacataaatatagtgggggtgggggtggggaacaagaaaacaaaaaattcaaagcatagtgaaaagaaatatagcaaaaccyggccgtgcatggtggctcatgcctgtaatcccagcactttgagaggtcgaggcgtgtggatacggggtcaggagatcgagaccatcctggctaacacagtgaaacctgtctctactaaaaatacaaaaaaattagccaggtgtggtggcgggtgcctgcagtcccagctacttgggaggctgaggcaggagaatggcgtgaacctgggaagcggagcttgcagtgagccgatatcatgccactgcactccagcctgggcgatagagtgagactccgtctcaaaaaaaaaaaatagcaaaacccaacaaaaaaaattaaaatttgctgggtgtagttgtgcctttagtctcagctactggggagggtctgctggaggatcacttgagcccgggagttcaaggctgtgat

SEQ ID NO: 656604 - DNA, 591 bp, Homo sapiens
tgtaatcacaacactttgggaggctgaggtagaagttgaggccaggaggtccaagacaagcctgggcaacatagtgagtctacaaaaaagtattgagaatctacataaatatagtgggggtgggggtggggaacaagaaaacaaaaaattcaaagcatagtgaaaagaaatatagcaaaacctggccgkgcatggtggctcatgcctgtaatcccagcactttgagaggtcgaggcgtgtggatacggggtcaggagatcgagaccatcctggctaacacagtgaaacctgtctctactaaaaatacaaaaaaattagccaggtgtggtggcgggtgcctgcagtcccagctacttgggaggctgaggcaggagaatggcgtgaacctgggaagcggagcttgcagtgagccgatatcatgccactgcactccagcctgggcgatagagtgagactccgtctcaaaaaaaaaaaatagcaaaacccaacaaaaaaaattaaaatttgctgggtgtagttgtgcctttagtctcagctactggggagggtctgctggaggatcacttgagcccgggagttcaaggctgtgat

SEQ ID NO: 656605 - DNA, 574 bp, Homo sapiens
tctttatctaaaattcatgttattaagaaacaggagaaaattacagggttgaaatgtatcagttttttaaaatatgaagattataaaaacctgttgttgcctgtttttctaaccaatagcttccttttagtaaaacaacttaggtgttaagagattatattttaagagcaatagtaaaaataacattcacaacttagtcacaaaataaatccaaatattactttttataatktattcctatatatttcatcttccaaataatttctgctttgcatttaatacatcaagggtattaaaaaagtgatttgttatacacacacacatacatgcacatatatacatatgaaatttctatcatagtcttagatatcagaaaaattttttaatgcactgtatgacttgatttttttttcagaaacatgaaatcataccaaagtgagaatttttgacttcgtttcagctctgatttctagtttcaagtcttctaccagctatatgacttgaagatactatttgatatgttcagttacttcgtctgaagaattgacatgccatttttacctgaaatacaaga

SEQ ID NO: 656606 - DNA, 636 bp, Homo sapiens
gtgcagaaataagaggttggggcgtggaaataagggattggggcgcagagatataagaggttggggygcggaaataagggattggggggcagagatataagaggttggggcatggaaataaggtattggggcacagagataagaggttggggcgcagaaataagggattgggggttcttgccccgtagaaaagcaggacttgccactaagggtgaaggagaaggggttgaggggtacttgtccgtcccccagaaaagcagagaaggggtagagacaaggagagaaggggttggggtacttgctccttccccagaaaagtgggacttgacactaagggtgaaggaccaaggcaggcgtccctgcgtggtctgacacctttgaaacgtgggtgaataatcagagaggtgtccctgcaatgattaaacaccaagggaaggctgccttcccagtccgtgaccagcgccggagttttgggtccacggataaaacgtgtctcctttgtctctaccagaaaatgaaaggaattgaaattaagagaagggagagattgaagtgtggcaccaagattgaaaggagaaagaggttgagggatagtgagggaggttggagaagagagtaaaaagaggccgcttaccg

SEQ ID NO: 656607 - DNA, 636 bp, Homo sapiens
gtgcagaaataagaggttggggcgtggaaataagggattggggcgcagagatataagaggttggggcgcggaaataagggattggggggcagagatataagaggttggggcatggaaataaggtattggggcacagagataagaggttggggcgcagaaataagggattgggggttcttgccccgtagaaaagcaggacttgccactaagggtgaaggagaaggggttgaggggtacttgtccstcccccagaaaagcagagaaggggtagagacaaggagagaaggggttggggtacttgctccttccccagaaaagtgggacttgacactaagggtgaaggaccaaggcaggcgtccctgcgtggtctgacacctttgaaacgtgggtgaataatcagagaggtgtccctgcaatgattaaacaccaagggaaggctgccttcccagtccgtgaccagcgccggagttttgggtccacggataaaacgtgtctcctttgtctctaccagaaaatgaaaggaattgaaattaagagaagggagagattgaagtgtggcaccaagattgaaaggagaaagaggttgagggatagtgagggaggttggagaagagagtaaaaagaggccgcttaccg

SEQ ID NO: 656608 - DNA, 606 bp, Homo sapiens
ttcttcttgtcctcctctctgctcccatctggtataattaggaataattagtaatcttcctccactgtgtccctcctctgtcagtcctggtacaccacaagtatgtgcattttgagaataattcagatattgctaggcaagttcaggtagttagatgcaaagacagaagaaagggaacatttagcatggtgagttctccactctgtcctaggctcagagacattgatttatttattcctttttgtggacaaagaggtaatatagcttagtggttaagaaaatgcatcccagttctgatcatttctacctgtgtgatcttggccaagtttctctctgtgtcccagattctacatttataagatggaggtaatagtaggtttgaattaatgattaaatgagtttatgtatctatatttatattcacatttatatgcatatataacttagatattttctayatagaattggtactattttttaagttattcaataatagctagctataactgagaggaaatatgtattagaaaacaacatatcaacccatattagttatctaatgctgcattaaaaattactctacaatttaatgacttaaatcataat

SEQ ID NO: 656609 - DNA, 531 bp, Homo sapiens
ggtggttcgctgcacccatcaacccatcacctaggtattaagccccgcacgcattagctatttatcctgacgccaagtctccattttcatgcagaggtaacaaactatggcccaagggcaaaatttggctcagaaaattgtttgaattgggctgcagagtgctcactttttaaagccaatattttgaatctggacgttttatatgaaaatttatgtcataaattatactgaaaaattagaagggctataacgtgatttttcatttctgcacggctaaaattcactagagacaagtttcctcttttgaatgagataagttcttttgaattcaccatactagtctgcctcttcacacactgcccattttctgtgatcttctccttgtctgttttacctgagtattacctacctkactcttaaagcatttgcattttggagaagatagaggtctaattcatcaaaattgtctggatttcccctttaagtatttttctctttgatttttgtttactatccttagaatatttctct

SEQ ID NO: 656610 - DNA, 519 bp, Homo sapiens
aattcttagtattgttattttatgggttccttgactatcaacatacacacatacacaaaaacatcaattggattttcacagtttaagaggaagaatgtatatactgaaaagtttgtgtggtggaggtgcttttcagaaaaccaaactgatgttatgagcgtgaaatatttactataacatgtcaaataattcaaaatttgcctatcttgtgttcgcccttcttaatgtggttagtctgtctgtctgttttcttcttacaaatgctgacctgcaaagtagctgaaaaaaatagcaaaacatcatttgtgaaatcaatggatwgcatctggacatttcataaagaaatgattttaaattatggaagaaaatttagcaggctgtggtcaaagtattaaatatctgtcttaccatttttcagtagatgtttcttgtgcagattcctcagaatacttggaatattccttcagttacaacttatctgttgaaactacacatctattttctcacaaaatgggctat

SEQ ID NO: 656611 - DNA, 420 bp, Homo sapiens
ctagatgttcctatgaggctgtttttggatgagattaacacttaaactgttaaagtgagtaaatcagattgctctccctaatgtgagtggatctcatgcaactaaaaggctgactcttccctgagtaagagaacatttttcctgcttgattacctttggactgagtcattagcttttccctgcattcagagttgaactaaaattttggctcctcctgagtttctgctgtgccagctgtcaaagtggaatgaactggaactgcartattggatctcctggttctcaggcctttggactcatactggaactatactttctgctctcctgggtctctgacttgcctattcaccctacagatcgtgggatttctcatcctctgtaatgacatgaaccaattccttgtaataaatttctatctct

SEQ ID NO: 656612 - DNA, 627 bp, Homo sapiens
gtcccctttgcatttgaaaatgatactgtgactggtattatcattctaggttttggggtgtggctgaaaacctggagccttttgcagcagctttctgtatgctgctagaatattaaagagaaccctttggtctacagctgctgatacaattcactaagcctaatgcagcttggaactgtttcccttttctttttcagaaattaatkcagagcacagaaaggcttcgagaatgagcatatgttggtgcacacatgctaatacgaaatcaatgaggagcctttcataagtaacagaatttgactcaagctaaattataacaaatttattatcagacactaaggattacaaagaattttgtttttaaaagtttggaaaacctgtatagtagtcaggataacccagattgcaagtcaggagctgatgactagtttccatattcatgttggaaagagaagctgaaagccttcctgtctttttgccatgatgattgagattaaaattctatggagggagagatattgattggcttgttttgtggcacagtgaatgacagctccaccagaacactgtggaattgggaagggtagtacttaggattaactaatgctaaagaaaatagaaggtaca

SEQ ID NO: 656613 - DNA, 535 bp, Homo sapiens
gcactctatatagcctctttgaacttttccaaagttttggtcttctcagatgtagtgggagacaggatgttaggaacaactgcctgcctgtcatgctgatcagcttgggcatttcctttagccttctattttccttttatacatgtgttcctacttttatactagctatcttcttaggaagctatagagcactttgcaaagtgytctatagcttcctaagaagattctaagaaaaaaactatttaattgttaacgatttaaattgggtttcctaggtaatgtcaagaaccctcattgtttccaaagcattccaaaattaggtactgccacaatagcatgttgctaccaatttatgtattgattcttctatcactagccaactggcaagctctgatggatgcaatgaagttaccattcctgctgacgtgtgcttctgaaaagcaataattatctatggttgaatggacttctagtttggtggtagaatttgaaatttttctatttcagtcttaaggtatgacctaagagcaaaaga

SEQ ID NO: 656614 - DNA, 535 bp, Homo sapiens
gcactctatatagcctctttgaacttttccaaagttttggtcttctcagatgtagtgggagacaggatgttaggaacaactgcctgcctgtcatgctgatcagcttgggcatttcctttagccttctattttccttttatacatgtgttcctacttttatactagctatcttcttaggaagctatagagcactttgcaaagtgctctatwgcttcctaagaagattctaagaaaaaaactatttaattgttaacgatttaaattgggtttcctaggtaatgtcaagaaccctcattgtttccaaagcattccaaaattaggtactgccacaatagcatgttgctaccaatttatgtattgattcttctatcactagccaactggcaagctctgatggatgcaatgaagttaccattcctgctgacgtgtgcttctgaaaagcaataattatctatggttgaatggacttctagtttggtggtagaatttgaaatttttctatttcagtcttaaggtatgacctaagagcaaaaga

SEQ ID NO: 656615 - DNA, 637 bp, Homo sapiens
caacaggcagattaatgggagaaatttatacaaatttattacttgcaagggggcatcacaggaaagaaaggtgartatcccaaagcccagtgatatccagaagctcatatgccctcttcataaggaagggggaagaggggactgtgtaagcaacttaagggaaggtaaataatgttttggaaagataaataggtccttaggagaaaagatgattttttgtgacagtctttctggccggggtgtcaatttctcctctcctctcctgtgatatgagtctcctggttgatgaaactcctggggaggagactgatgacaattgagttatttttgcaggatctttattcagataaggagagctcagagaaagcctcacactgcatctgctgtgccccaagtgccctctggttaagtaatctgtatacaaaagtagcatattttgaggtagcatttcctacactccttcattgtcaaaacatatgttttcattctggccacagcgagtaagttatctccttcccaagaaggcacattttagtttctcaacagctttagttttttcacagtttcttccaatactgggaatacagcagcttttcactagatttgattaattgaaaattcatgtgaagttcctact

SEQ ID NO: 656616 - DNA, 615 bp, Homo sapiens
aaaatgcctaaatacaggagaatctgatagaatgtactgctttatcattgtttttgtgttcttcttctttcaggtgttgatgacaacgtaaacctttgccctgttactaatccaagatttagagtcagcatgtaaaattcaaaataattacagtgatacatttttgatgtgagtagtatgtaatcttttactcatgcttgattgtattaaatcttacaatgcatgcagtcaagaatggygttgtgtaagatacagattgttggccatgataaaaaataaaatattgtattccactttttaaaaacgtgattgctttccaaaattatctaagacttaatcaagaagagcttaaaaatattatataaaatttccaatgcaaataaggtaatagatattatggtgttattaaaggaggaatgtctataaagtccaaaaatcaaattagaatgtattaataattacatataggaaaaagaagaattcgttatattctacaaaatacttataagtacataaaactctaggttaagaaaaaattagataaattcatagctcttttagttttattatattgaataaattgcatagcagacactttactaaaagggaatgata

SEQ ID NO: 656617 - DNA, 553 bp, Homo sapiens
tgcatagaactagtcagcttttctwttcttggaaaagacctagtaattagatgatgggaaaagagatgtccgacaacaaagactatcatcagtggcattgaaaaatgaatccagttatgcatcagctatgattgcatagaaagaaaagtagtaacataaaaataaatgccactatagaccaaatagaacagtaatcctctatttaatatccttagagaggttcgagaagggtttgtatctgtaaaataagaagagtatattatgaaaaaggaatgatcatagaataagaaagagctcttggaaattaagcaagtatttactaaaactaaaaattgaaaggaagaattgaaagataaagttgaggacattttctataacatgaaaataaagaacaaagagatagaaaagaaaagagaatcatcttgggaagtataatgctttactaattccataaaatgctccagaaatagatgctatcatatgcatatcttattctagaaataaatcaatgcaaatctatgtcaaaggggggataaaaaagaaaaggtgaagt

SEQ ID NO: 656618 - DNA, 541 bp, Homo sapiens
ctctccagtgacacattttctttttgtgctgtgctagctacttacttaccatttcttaacttatccttggcttcatgatgacaggctgaatctgcaaactgaattttcaggactcctttgtagctctactgggaggagttggcaggagattcaaaaaaaggaggaagagagaaggcacactcctcctgttcccaggttttgtaarcatcccaacagcagtagctacagaagccacagacaactccagctcttgcattttttggtatgctaagcagcagctgcaaggcactcccctcaaaggcctaagcaccagatgtgcagtatttcctcaacatacttgaaaaacagccccaaagaagccctgatttagagatctgagtgcctttgtaagacacatacatcccctcccacaaaacctcaaaaattagatgggcagtgccatctctaatctttgagtaccagttgttcaaggagcccagtcaggtccaagcaccagatgagcagtgctttcctctatgttctgaaagcctaacatgtggtg

SEQ ID NO: 656619 - DNA, 384 bp, Homo sapiens
gaattcaaagcaggcagtttgagtgtacaaaggattttaattttgttttgggttagatttttgcattttaattttgtcaagagaatttctaagccaagacactattgtgtctttctttawtttgattgtcccataaatacaagtaagacaattgtttagaatgagagatctccaaaatcttctttttaagaaaaaaaaattaaagttctttctaatttaaaggatccatcttttggccactgatgattagaatttccaatggtttacaaattccagtagtgactcaacaataagcctcttcatgaaaagtccaggagataattttccaggtttagaataagtttttactatataaacaagaggtgttccttgagagcatatgga

SEQ ID NO: 656620 - DNA, 601 bp, Homo sapiens
tccaagtagaattaataaatgtaaaaatcttgactaaaaatagatcttctggacttcacagactgtacttgaatcactactctatatgatctctttcctatgctagatacaatgataatcataaacaaggggtaatctagactttcattatctttggtaaattcacagaaaatgcccatttaattacaagatactactatactgagattttaatagtaaagaattaatgaagaatttaaatattctagttacaaaaataattaatttagaactatgtgtagcagtttgagatttaaatttatttatgaaaagttacattaaaatatgtttcatatattctcaatacctctctgaactttttcttattcttaagatatttcattgaattgtgatactgatttcagatataacattgttagaactctggttaaatacactggtaacatttgttagcggttaaaaatttaacacgggcttatggttcaatgtagtagattgagcatatgctgatgtctactgctttgttccaaaactcattttaataggaatacaartatagaaataagaaatggaggaagagtgtcaatggggtatgaaagca

SEQ ID NO: 656621 - DNA, 620 bp, Homo sapiens
agtgactatgtcatcttggttcactgttgcatccccccataacttagtaataaatcaataacttcttattaaaaaaagattgcctactctgtacagtgccctgattttttatgttgtgcattttccaagtgataaacaaaacctgggtattcttctctttcctaactatgtttgtggtttactagtgcttttactcatactcttccctcagrcattcccttctgttaaattcctacatctaacaaaactcattttggatagcatcttcataaatcttcttccattccctctcccgtccctccctggtccttgcttatctctcttctcttcctgaattttcttggcatatcgtatgtctcttatgatgcctatacattgctttccattataactatttttgtacttttctttaaatcaatgacaaagagcacaccttgctcatctttgtatttaacacagcatgaactataatgttctacccatattagatacctgatatatatttattattacatatttattaattatattaaaataatataatattttcaccaatatctacattttgaagagacctaggaagtcatctccaaatctcaaataatcctaaatcatcatca

SEQ ID NO: 656622 - DNA, 620 bp, Homo sapiens
agtgactatgtcatcttggttcactgttgcatccccccataacttagtaataaatcaataacttcttattaaaaaaagattgcctactctgtacagtgccctgattttttatgttgtgcattttccaagtgataaacaaaacctgggtattcttctctttcctaactatgtttgtggtttactagtgcttttactcatactcttccctcaggcattcccttctgttaaattcctacatctaacaaaactcattttggatagcatcttcataaatcttcttccattccctctcccgtccctccctggtccttgcttatctctcttctcttcctgaattttcttggcatatcktatgtctcttatgatgcctatacattgctttccattataactatttttgtacttttctttaaatcaatgacaaagagcacaccttgctcatctttgtatttaacacagcatgaactataatgttctacccatattagatacctgatatatatttattattacatatttattaattatattaaaataatataatattttcaccaatatctacattttgaagagacctaggaagtcatctccaaatctcaaataatcctaaatcatcatca

SEQ ID NO: 656623 - DNA, 446 bp, Homo sapiens
actcttggctgctctgcttgttagcttcttggtctgagaaaaattatttaacctccctaaagctcacttttcttatctgtagtatgagatcataaggattcctatctcactggtttgttttaaagatgaagggaaatactacatataaaagcacttagcccacagcctgatataaaagacatgctcagtaaatgttagctattgctatttgttgtcaacctaaagctttctgtgtcaagtaaagattttgcatcccttcttcatttatgagctcttggcagtgggragagctgatggtgatttcttaggtagaggaggtaccctggtcactgagaggaacctggaaagctgtgaggtagaagacaaagcatccagtttggacctcttccagaattgaggcttaaagtcagccatcaatttcttcatccttctgatgagtggttgta

SEQ ID NO: 656624 - DNA, 392 bp, Homo sapiens
tttgacattctcttttccaatttggatgcattttctttctttctcttgccttattgctcaggctaagacttcccatgctagttgaacaagagtgttgaaaatggggatccttgtcttgtttgatttctttgaggaaaagtttttcattttttcccatttagtatgatattagctgtgagtttgtcacataggctttattgtgttgaggtatgttccttgtatagctaatttgtttagagtttttatcatgaaggcatactgaattttgtcaaatactttttctgtgtctattgagatgattctgtgtctatttagacgttttatgtctttcattctgttgatgtgatatatcrcatttattgctttgcatatgttggaccatccttgcatcc

SEQ ID NO: 656625 - DNA, 551 bp, Homo sapiens
acctgctcacagtgacattttgaggattaagatagtgcaggtgaacgcatttctaagctttgaaatgttaaccaacataacacattattttgcattattattttctaaaataatctacatttacattgaaaagtataaagtcctgtggatatgttgagtggaactacatgaatttagaacagatccgggcagggagtagaagactactgctctggcaaaaccggagtatgcaattccagtcagtcacatacagtcagtctatataataatgatagtacaaataatacatccatctcctgtcatcttcctaacaaccatacaagcccagtcctatgtacccattttgcacatgaggctcagtaaggctatgggacttccatagagctccagagctgcagacctgaaccacggcaaagctgcacgcctctttcccgctctctctctactccaggctgtcataacttcaccaaacggaatgaagacttgacttcaatttcaacyttaaacctaatttaaataaaaatgtctgaagggagaaagagaggaaagag

SEQ ID NO: 656626 - DNA, 373 bp, Homo sapiens
atttttaatctttaataaatagaaggattaattaaatacactgtgacattggggaactcttttttattcctaaggtacatcttttttcttgccattacttaacctcttttcttcctgttttgttctcagctctcctttacagccatgagttaccaatgcccggtgccaccaggaagagggggtatctgtaggagtaagatgatgaatagcagtgrtaaggggagagcgaggagaagggagggggctctgaggaggctaaagggcaaacttttattcttgaaaatacacaaatatcccaagtcctgggtgtgtggaacgtccttattactgctggggatgttgcttgtgtgtgggaattgggaatttcacacct

SEQ ID NO: 656627 - DNA, 477 bp, Homo sapiens
gaattcttagttcacgtcctgcccctgtgcttggtagctgatgaccagaggcgcctttctcacctcttaacgttttgatctgcaaaaatggagatatccatcttgcaactcttgtaagaaatacacgcattaatactgatgaagctctataaaacaaagcttagcatttaacaatagctattaaatattaattatttaatcaatagtgataaaagtcagaatagtggttggctgtcggggaggagtttgagagaattttttgtagtgatgaaaaaattctatagctaagagtttcggttacagaagtatatgcacttrtcaaaactcttggaatgggacatttaagatttgtacatttcactgcatgtaaatttacctcaaaagagaacataaaaatgtgttgttattattattagagctatagactctaatggaaactacagagatattctaggcccaatctctagattttataga

SEQ ID NO: 656628 - DNA, 415 bp, Homo sapiens
ttaatttcagtagctgccacgtttactagctgtgtggcattaggaaaattatttagtgtttgaataccacagtttcctgaacttcaaactgagaactggtcatggttatgatgtaaagtatatagcacattgcctaggacataaggcttttgtaaaatcatcttagaaagaaaggatacaggaaaagtagaaaagagaaaaagaaatrgatcaggaagagcaatgcagtattatgataaaatatatagactatttgtaccatttatgaatggctttgtttccctgttttatctcatattttcccaaaatacatggtgtaagttttggtggcttacagaaacatacaaaatataatgaaatgtcagtaactgacaatggatgttgtctaagttagaaaagacaacattcagttaag

SEQ ID NO: 656629 - DNA, 561 bp, Homo sapiens
catactaatcttgtggtgctgaaaaatgaaatccaaaaactaccttttgtttcactgtgctctctgcaatcacattatttgggagtgatgggtgttaggaaacaataaagatctggtattactttccaaagacacctttcttcacagtgagtagacatacttgttctgaaacgaaagttggatagtttgcaattgctttgcttaatcctattcaatattcctataagtttaaatgtctaagttgaattcatttgtctatttgttaatggkgatcccacatgagatcttccatcatgtgaatttcacagacttaaaaacataatttatatttgtgagaactgaccagtaaacaattatttgctttctgtgaagtcagggcatgaaaagtaataaaagtaatggttgagcatgacacaaacttactaaaatagatttacttgataggcctttatttactgtacgtctccatcaagattaacagtactaaagaacaaggactgtaagctgtggttcttaaaagatccatatgacagttaggtcagtaccagatataaggtagtc

SEQ ID NO: 656630 - DNA, 581 bp, Homo sapiens
agatcagcttcccttgcagtggtctttgttttttcaccaatataaagattttcagatatttcaatgtgctattctatcccttttatcagaatgaagcttccctgcagatgatgaaaggaacacgcttttaaatgcatttagtttggcattcactttctcaaatacatttggaataacatagtggagcatacttaatcaagctgaaaacaagcactcaatgcaggggaaagacatacatcctagcagtcatcaagttagatgttctgtatacaaataaggtgcccctatccccaagggcagtcaagcttctaccaagtggaccactctttgcactttgaatgggaaatggcaagaagccacattggccctgcagcctgagaaatgctgccaaatagatataagccagggaatctgagggattacattttagagtttgtctaaacattacaccaaagaaggactccatcctacaaacaataataatagtaaagctttgtttgagatatgcttttygtagaatactccctataaagggggaaaagggtcttttggaatttagaaatcaaagcatgaaaagcaag

SEQ ID NO: 656631 - DNA, 598 bp, Homo sapiens
tttgagatatgctttttgtagaatactccctataaagggggaaaagggtcttttggaatttagaaatcaaagcatgaaaagcaagaaaaccatctaaaataagcttaaactgttagtccactggaaaaattgcatgccttaatttgctaacagtctcagggatgtgataactgcaggagaagccaagtatattttcagaacttttactgaggaacagcctgccttagccctacccaatgaacactgtccttcctagtcattgtccattcaggcctgcacattttagcagactgagactatccttctgttgtcttagaattatcttggtaaacacatatagctggggacatttctgcctgattaaccctcagtgcaattttgatttcatttagaatctgaagacatgagttgattcaaaacaaatatttcctcactgggcatgctgtttcactcactgacaacaatttgctatttaggatacagaagaaatataaaaggtgataacaatgtctgaagkagatagctatttagttcagaaaagaacaatagacttaaattactggtacaaaatataggacatgacatataactaaatgtt

SEQ ID NO: 656632 - DNA, 616 bp, Homo sapiens
taaattgggcatcattaaaactaagaaattattttaatcaaaatatgtcattaagagaatagaaaagtgagtgggagaagacattttcaatacaatatatcatataaaaactcatattcagagcacataaggaacatttacaaaaaagttagaagacagacaacgttatttaaaatatagctatatacttaaccagcacattacaagatagacaataaacatgaaaatgtgcttaacatcattagttatcaaggactgtaaagttaagtctgtaatgacctatgtctacatcagaatgtctgtcattgaaagaacacctgttaataacaagtactggggaagatactgagcaactaaacttacatacactactactgggattgtatattggcccaaacgactttggaaaacttgttggcagttatctsgtaaagctaaacacatgcatatggtgtgacacatcagttctacttccaggtatatatacaataggaatatacagagtcatgcccagaaggatatgttaaaagatgtttttgacatctttatgcataatagctaaaaattagaaaccagtagtggtgtagtcatacaatggattgtatgaatgatacag

SEQ ID NO: 656633 - DNA, 554 bp, Homo sapiens
gaaggctgaggtaggagtatcacttgaacctgggaggtggaggttgcagtgagcagagatcacagccattgcactctagactgcacaacaagaacaaaactcggtctcaaaartaaatacataaataataaataaaacatatgaaaaaaaggttacttatgttcacttcaacagtttatatgtcctcatgaatgtggctacccaggaaaaaaaaaaaagaaagatttctatagaagaaataataatgagaaggagagaggagagtagaagattggaattggtactataaattagacttctagaaactagagaaaattcagcctctaaaatatttgtgtcttttcaaatatttagatacattattttactgaaccccttagacatggtattctgatacttgatttaatctaatcagatgaattccttcttgccttctcaaaaagagtgatgatgttgccattttaataataaatatagtgaaatgtaagatgagacaatgtcagggagttatgaacaaatatgcctctttctctaaatagcccagtttttagtgg

SEQ ID NO: 656634 - DNA, 585 bp, Homo sapiens
ttcacttctcataagttctacttcacacaaaaataccagaacatggacacaattcaaccagattttttgcccctttataacttggatggcctttgcttccatttccaataccacactcttcacttctgtcagatttcatcagaatgggctttaccgtctgtatttctgcctagcattttgatcacgacctcttaggtcatctctaagaagactggggtttttctctgcagctctcttcttctgagccctcaccagaatcactttttctagtccttttatagcagcgtagactttttctagcattcacttcaagactttcccagcctttactcattacccatttctagcgsttcttccatgcttttaggtatttgtgatagcaacaccacttcttggtaccaatatctgtatttgtcccatcagttggctataacaaaataccttagactgggtaatttataaacagcagagatttattctcttacacttctggagactggagagaccaaaatcaagggtgttgacagattcagtgtgtggtgaaggcttgttctctgcttcataggtggcgccttctggccacat

SEQ ID NO: 656635 - DNA, 515 bp, Homo sapiens
agcattaatattaatatccttataatttaagccgcatagattatggatcctacctcatgggtggctgaagtcatcattgctcagatttttcaagctggatacatattcatcagagataaattaggtgacattaactgcacaagttttgggagactctcagaattgtagttctatagacagattaaacaagaactccagaaactgggcagattgttcaagcggagcagacaatctggacaggttttttgttgtaggagaagaaaagattcaggagagtctggcggcatgaaaatcaggatttggaggtgagggttggggcctgcaattagaagkagtaagattaactacaagaaactttcaaaatttgcacatgataaggaatataagccattccttttttgagagtgtgtcataaataaaaaacaattcaattgggagaagaaacaaattcctaaccttcagtagaatttgtcccttaagacaggaagtgattagtaaatttctaaatccaatgc

SEQ ID NO: 656636 - DNA, 536 bp, Homo sapiens
tcaaaaaaaaaaaaaaaaaagaaagaacatcactgttagagcaacccacttctcctattaaagggtaaaaaggaagaactttttctgctttatgcagggaggatgcttttctaaaaattgtatactgtgctctcttttttacttattagaccactgagtaacataagtgtatcagtgataataatcagctkatagcacaggataatggacaataataataacatcaggcatgagaactttaaatgtgcactggtttggatctgtctagagtagaggtggaagtctcatctatctcagcagatactgaaaacacctcagccttccagatgaatgacacaaacttaccctatttgagtgctattagtaatttaacagtctcaacaatgaaatgagaaatgtgctcttattcacattttgtggataagcaatccaagactcagacagtcccaagttacttatgaatttgggcattgaactcaggacttttaacatgcttgttcttacaatgctctactgtgttgcttccagtaattgtt

SEQ ID NO: 656637 - DNA, 536 bp, Homo sapiens
tcaaaaaaaaaaaaaaaaaagaaagaacatcactgttagagcaacccacttctcctattaaagggtaaaaaggaagaactttttctgctttatgcagggaggatgcttttctaaaaattgtatactgtgctctcttttttacttattagaccactgagtaacataagtgtatcagtgataataatcagctgatagcacaggataatggacaataataataacatcaggcatgagaactttaaatgtgcactggtttggatctgtctagagtagaggtggaagtctcatctatctcagcagatactgaaaacacctcagccttccagatgaatgacacaaacttaccctatttgagtgctattagtaatytaacagtctcaacaatgaaatgagaaatgtgctcttattcacattttgtggataagcaatccaagactcagacagtcccaagttacttatgaatttgggcattgaactcaggacttttaacatgcttgttcttacaatgctctactgtgttgcttccagtaattgtt

SEQ ID NO: 656638 - DNA, 536 bp, Homo sapiens
tcaaaaaaaaaaaaaaaaaagaaagaacatcactgttagagcaacccacttctcctattaaagggtaaaaaggaagaactttttctgctttatgcagggaggatgcttttctaaaaattgtatactgtgctctcttttttacttattagaccactgagtaacataagtgtatcagtgataataatcagctgatagcacaggataatggacaataataataacatcaggcatgagaactttaaatgtgcactggtttggatctgtctagagtagaggtggaagtctcatctatctcagcagatactgaaaacacctcagccttccagatgaatgacacaaacttaccctatttgagtgctattagtaatttaacagtctcaacaatgaaatgagaaatgtgctcttattcacattttgtggataagcaatccaagactcagacagtcccaagttacttatgaatttgggcattgaactcaggacttttaacatgcttgttcttamaatgctctactgtgttgcttccagtaattgtt

SEQ ID NO: 656639 - DNA, 625 bp, Homo sapiens
aaccaggggtaagtttgttttttttccggcactctgtgtcgccrgggtttgtctcttggctttgttgacttggcctgtgactcacaggtttgataactgttaatgaaaaatgtatcttaggaataaaggaatagaaggctacatcattaatttagaaaatgtgaggtacaagaaacctagagaaatgcttatattttatggagaaatttagtacatgtttttaaagctatgaaacaagaaaaaagtagtagatatgggaaaacacttttaaaaaagaaaaaaatggaaggatcagaatgggagagataagcctctaattatttgcagatgaaatgaccacctgtcttaaaaagcagacacagaattcataaatcaatggttaaaagctatgaagagttaagcaaggtcttagatccaagatcaacttttagaaatcaataatatttttctataccaggaaaaatcaactagaaattttaacggaaaaaacaccactagaaagtataaagtatgtaggaattaacataattgaatttatataaggtgtctgtgtgaaatattaaaaccctaataaaaatataatagataatgtatataagaagaaactacccatgcttttgggatg

SEQ ID NO: 656640 - DNA, 625 bp, Homo sapiens
aaccaggggtaagtttgttttttttccggcactctgtgtcgccggggtttgtctcttggctttgttgacttggcctgtgactcacaggtttgataactgttaatgaaaaatgtatcttaggaataaaggaatagaaggctacatcattaatttagaaaatgtgaggtacaagaaacctagagaaatgcttatattttatggagaaatttagtacatgtttttaaagctatgaaacaagaaaaaagtartagatatgggaaaacacttttaaaaaagaaaaaaatggaaggatcagaatgggagagataagcctctaattatttgcagatgaaatgaccacctgtcttaaaaagcagacacagaattcataaatcaatggttaaaagctatgaagagttaagcaaggtcttagatccaagatcaacttttagaaatcaataatatttttctataccaggaaaaatcaactagaaattttaacggaaaaaacaccactagaaagtataaagtatgtaggaattaacataattgaatttatataaggtgtctgtgtgaaatattaaaaccctaataaaaatataatagataatgtatataagaagaaactacccatgcttttgggatg

SEQ ID NO: 656641 - DNA, 625 bp, Homo sapiens
aaccaggggtaagtttgttttttttccggcactctgtgtcgccggggtttgtctcttggctttgttgacttggcctgtgactcacaggtttgataactgttaatgaaaaatgtatcttaggaataaaggaatagaaggctacatcattaatttagaaaatgtgaggtacaagaaacctagagaaatgcttatattttatggagaaatttagtacatgtttttaaagctatgaaacaagaaaaaagtagtagatatgggaaarcacttttaaaaaagaaaaaaatggaaggatcagaatgggagagataagcctctaattatttgcagatgaaatgaccacctgtcttaaaaagcagacacagaattcataaatcaatggttaaaagctatgaagagttaagcaaggtcttagatccaagatcaacttttagaaatcaataatatttttctataccaggaaaaatcaactagaaattttaacggaaaaaacaccactagaaagtataaagtatgtaggaattaacataattgaatttatataaggtgtctgtgtgaaatattaaaaccctaataaaaatataatagataatgtatataagaagaaactacccatgcttttgggatg

SEQ ID NO: 656642 - DNA, 637 bp, Homo sapiens
acagtgtttaagaaggacttgaaaatacactaggattctataattgatcaaaagttgagtcagtgtcccctctcatgcctttctgtcacttagctcaaggattagagacacagcagagtttaatttgcatagcctggttcatgttattaccttgaccatagagaacaaagttccaggtttttacattcagtggacaacagatggaagagtaattctctccacaaaaaagtgaaatgccagtccccaaaagaggagyggatgtaaaatggcaacaataaatgtccaccgtcatggggaaacacatcttttgaatgggaatatacatatttttaaattacctgcaaatatctcctatgcttcatttcctactctcctggcccaaaagtactgcagatcctcaaataacataatttcattcaacattatttcattgtaattttgagggaaaaaggagtcaattcccagccaggaccactgtctatgtgaattttctccaggtactccagtttcctcccacatcccaaagatgtgcacattaggtgaattagcatgtctacatggccccagtctgagtgagtgtgagtgtgtgtgtgtgtgtgtgtgcgcgcgttcatgcatcctgggataggatgatgtc

SEQ ID NO: 656643 - DNA, 504 bp, Homo sapiens
gaattccactgaatccatgccagcatccaaatccatggcccttgcttgattctagcacaatacatggaattaatgtaaaaatgtcataatattaatmaaagaaagggagtttttttaaaaaaaatcagtttgtcactgaatataggttaattttgaggaaaaacaagatatatagatataatgaatataagtgtcagtaaaattaacaaaatggaagttaagaaaaccttagtttttagcctttttagtttttaggacttaggtagagccaattagaaatcatgtggagctgtattgaagttatagaaggcaagcagaaattgcagaccactgagtgtgcatgatgtatgtgtctgtgtcgttccttatctgacgttttttaactagaacagagtggcctagaagaacttctcaaggtcatggctacttataataacaacaacgaacatatataaagcatttgctatgagtctgggccaatagtaattactttacatatgttgg

SEQ ID NO: 656644 - DNA, 504 bp, Homo sapiens
gaattccactgaatccatgccagcatccaaatccatggcccttgcttgattctagcacaatacatggaattaatgtaaaaatgtcataatattaatcaaagaaagggagtttttttaaaaaaaatcagtttgtcactgaatataggttaattttgaggaaaaacaagatatatagatataatgaatatawgtgtcagtaaaattaacaaaatggaagttaagaaaaccttagtttttagcctttttagtttttaggacttaggtagagccaattagaaatcatgtggagctgtattgaagttatagaaggcaagcagaaattgcagaccactgagtgtgcatgatgtatgtgtctgtgtcgttccttatctgacgttttttaactagaacagagtggcctagaagaacttctcaaggtcatggctacttataataacaacaacgaacatatataaagcatttgctatgagtctgggccaatagtaattactttacatatgttgg

SEQ ID NO: 656645 - DNA, 504 bp, Homo sapiens
gaattccactgaatccatgccagcatccaaatccatggcccttgcttgattctagcacaatacatggaattaatgtaaaaatgtcataatattaatcaaagaaagggagtttttttaaaaaaaatcagtttgtcactgaatataggttaattttgaggaaaaacaagatatatagatataatgaatataagtgtcagtaaaattaacaaaatggaagttaagaaaaccttagtttttagcctttttagtttttaggacttaggtagagccaattagaaatcatgtggagctgtattgaagttatagaaggcaagcagaaattgcagaccactgagtgtgcatgatgtatgtgtctgtgtcrttccttatctgacgttttttaactagaacagagtggcctagaagaacttctcaaggtcatggctacttataataacaacaacgaacatatataaagcatttgctatgagtctgggccaatagtaattactttacatatgttgg

SEQ ID NO: 656646 - DNA, 582 bp, Homo sapiens
taaaacatgtatttattctactctggagcacattgtctggccaaccatgaatttatagtgaaatgtaacagtaaattgtgctctgtggtcaaaaatgccaaatgatacacacagcagcataaaggtttccagcatagggtagaattaaagagcttaggaccagtgcctggattgttggccatattttcacagtggccagttttgttagattcaaacttggagagagcttgaaatcacttatctcagatgtttgcactcasgaccacaaagcctctgagaaacacagaactgatcttgtaataagctccagctgagtttacaagcctctgagcctttctgaaagcctgtttagtttaatgagggttttcagatttcaaagctcacacaccttcacataaaaacagatgattatgaccaaattagggaatgttgttctctgagtgtgttcccccaatatcttctcttttcagttgtcaggcattgtttcagtacacttttcgccttccagacatcattttaaagtacgattttgctaagttttattgtatatagtttctatttaggcagaatgttatgttcaat

SEQ ID NO: 656647 - DNA, 462 bp, Homo sapiens
aataaaatataggagaaaatttggttatgcaaggatttattagcaaaagcatggtctataaagaaatacatgatagagtgggctttttataaattcacaactttttgtagaaatcaacaaagcatttctaaaatgtatatggaaattcaatgstcctatatccaaaacaatcttgaaagggaaaagacattggaaggctctcactacctgaatttcaggcttaggataaagctacaataataaatataatgtggtggtaagtttattaaggatagacatacagctcaaacatgaatttatcatatgacccaacaatgctgcttctgggtatttacccacaagaaacggaagcatgtacccactgaaacacttgtacataatgttcattgcatttttatttgtaatagctgcaaactggaaaaaaagactacaatgtccatttgtgggtgaactgataaacaa

SEQ ID NO: 656648 - DNA, 462 bp, Homo sapiens
aataaaatataggagaaaatttggttatgcaaggatttattagcaaaagcatggtctataaagaaatacatgatagagtgggctttttataaattcacaactttttgtagaaatcaacaaagcatttctaaaatgtatatggaaattcaatggtcctatatccaaaacaatcttgaaagggaaaagacattggaaggctctcactacctgaatttcaggcttaggataaagctacaataataaatataatgtggtggtawgtttattaaggatagacatacagctcaaacatgaatttatcatatgacccaacaatgctgcttctgggtatttacccacaagaaacggaagcatgtacccactgaaacacttgtacataatgttcattgcatttttatttgtaatagctgcaaactggaaaaaaagactacaatgtccatttgtgggtgaactgataaacaa

SEQ ID NO: 656649 - DNA, 584 bp, Homo sapiens
cgtgtttctgatgtgggatgttcaacttcatttatttcaacggatttttcattcaagtctcttttacggatgggagataaccttctcaggtaatcatgagaagttctctttacctagaaatccctctcgtttgatctctcctggtgagcagagagagatgaaagcagttgagagaaatctcaaaattatcagccaaagaataaagaagagagctcaagcaggtggctagaaagagtgccactgtgcctgttctggcctgaccacatgcacaggcaaagctcatgggaaattttcaccactcagtagttaatagagacacttctctttctaatgaaatgaatggcactatgtatacgcctggcaattaattcatgccctaatgatgccaaacaaccattaaaatgatgttgcagggtatctgattacctggaaagatgatcagaatatattgtaagatgggaaaattgtatgtgttgtatgatgttatttttgatactattgcttatgtataaatgaaaasagactaacatattaacagagtttatctctgggtagtggatttatgggtgattgttctttttata

SEQ ID NO: 656650 - DNA, 608 bp, Homo sapiens
gtaataaataaataagcattttgaagttgtattattacataaaaatcagggcaatgatctttgcactgagaaaccatttgatgaagatggaagtaggtgatggtaaaaatctgcactgtgaaataatgactcccggttattgacaagccctacatggcaggaataatctcagctaaatctttgcaaaaagccctatgaactacatattgtcactaatcccactttatagtaaaggaaagtgcctggatttacaaagrcagtaagggttagaactctgattcaaacctaaatcagccttattggattctacccaagtgcattctcaaaagcaagacattgcattgcctccccaggacgtaggtcagaccctagtagcccgtgtgagaacagagctactgtgtcagagacactgctgtgtgtttccaaaattcattttatttcctcctggttacaaagctaaactttaatttccaggcttcgtgagatatgctggagccatatgacagagtctaggtcaatggaatgaggtcagaagtaatgtgagccacttccaggcctagcccataaaaacctccatgcccaatcttctattcacttttctcttttca

SEQ ID NO: 656651 - DNA, 568 bp, Homo sapiens
ttccatgtcaacagatattggatataaccttcggtgccttcatggtttccagggatggaatgagaagatcaacatccttccctacctggtgtttaaagccatgcttttaaatcaggaatatttattacaatgccaggaggatatgtggcagtatctctgggacagatggtgtcacaggataaacatggcagatctttctgcagtaacaattatagttaatggtataaacatgtttggggggtaaaaacatgcacaagttggagagtagaatgtgaaattatcatttttaggacaatgacttcaaagaaatttcaaggtaactgggggatctagagttgtgttcatagatctctagagagataatcttactctccctwcactattaaaagatttggtggtacaatttaatagcattgatttaaagaataggaaaaggatcattagggatgagaaattaaacatccaagaaaggaatgcaatttgtttaatcctttcaaaaattgccttttccttggtgtttcttccaaagcaatttagaaagagtaaaagaaaaaatatatacagaaaa

SEQ ID NO: 656652 - DNA, 568 bp, Homo sapiens
ttccatgtcaacagatattggatataaccttcggtgccttcatggtttccagggatggaatgagaagatcaacatccttccctacctggtgtttaaagccatgcttttaaatcaggaatatttattacaatgccaggaggatatgtggcagtatctctgggacagatggtgtcacaggataaacatggcagatctttctgcagtaacaattatagttaatggtataaacatgtttggggggtaaaaacatgcacaagttggagagtagaatgtgaaattatcatttttaggacaatgacttcaaagaaatttcaaggtaactgggggatctagagttgtgttcatagatctctagagagataatcttactctcccttcactattaaaagatttggtggtacaatttaatagcattgatttaaagaataggaaaaggatcattwgggatgagaaattaaacatccaagaaaggaatgcaatttgtttaatcctttcaaaaattgccttttccttggtgtttcttccaaagcaatttagaaagagtaaaagaaaaaatatatacagaaaa

SEQ ID NO: 656653 - DNA, 653 bp, Homo sapiens
aatatataacctatatatgtcttagcaagagcatgaggtgagcatgtcaaagtcacagcttttaagaaccagaaagtttcaagggaatacagagaaacttctggaattgtcattatgagaaccctctgaactcttctttgctcatcaccctagagtattactaaataagacacatttaagaatatattactgatcccataacggcggtgtgtcatttactctcttctctacagacctaaatgtttagatcttgtctatagataatggctttaaaaaaatatagcagtatctattactatctactagtggaaattcttctgtgcttttaagaagtgactatcaactgagttggtataagaataatgcaaacaacagtaaatgtagaatgcccctgaggttttaattttcttttttttttccattttttaaaaaatttccaactttaaaagttgaggggtacacgtgcagcatgtgcaggtttgttacacaggtaaacgtgtgccatggtcatttgctgcacagattatcccatcacccaggtattcagctcagcatccattagttattcttccygatcctctccctcctgccaccctccacctgatgacaggcaccagtgtgcactgttcctcacccatgtttccatgtgttct

SEQ ID NO: 656654 - DNA, 589 bp, Homo sapiens
cttgcctgcccccatgtaagatgtgcctgccaccaagtaagacatacctttacttcttcaccttgtgccatgattgtgaggcctccccagccatgtggaactgtgaatctattaaatctttttctttataaattacccagtctcaagtatgtctttattagcagcatgagaacacattaatatattctttaagccacaaaagtaacacgagtatcagtaagaacggytgatatccatgaaactgcagcaaacacaaccccagtcacagttcaggccagagtacccctgaaaaatgagctcatagccagtggaaatgagctcatagccaatattataaaccacacaagaaaatgaactattgtaaaggagagttagaaaatatggaagcattagaaacaaattctaaaataagcatgtttaaaatgtttggtgagatgaagaaaagattagaaagaaaacagcaagaacaggaatctaagataaaagaacaggcaggtttgaaacagaattagatagaaatattaggtataaaaattatagatgttggaattgaaaattcgataaataaatagcagtctagacacactga

SEQ ID NO: 656655 - DNA, 573 bp, Homo sapiens
tctatattgtctactttcctcatgcactatagctcttctccagaatctatattgtttctcatttcaacccatcagaattcttttactagattaccagtcatccttcaggtatccttctctgagatcctaagatagatttacgtccttcttcgtgctcctcttgtgcagaatctgaccatagtagttaacttcatatggtaacttaactgtttaacwgattcctccactacactccatgaaaacaaagactgagttttaaatcaagtctctggttcctaaccagcacctgatacattataggctttagtttaaatgtatgaataagcctgggtgcgatggctcatgcctgtaatcccagcactttgggaggccaaggtgggaggatcacttgagtccaggagtttgagaccagcctgggtaacatagtgagaccctgtctctacaaattatcaaaaattagctgggcattgtggtacatgcctgtagttctagctacttgggaggctgaaacaggctaattgcttgagcccaggaagtcaaggctgcagtgagccacagagctcagcttgaata

SEQ ID NO: 656656 - DNA, 573 bp, Homo sapiens
tctatattgtctactttcctcatgcactatagctcttctccagaatctatattgtttctcatttcaacccatcagaattcttttactagattaccagtcatccttcaggtatccttctctgagatcctaagatagatttacgtccttcttcgtgctcctcttgtgcagaatctgaccatagtagttaacttcatatggtaacttaactgtttaacagattcctccactacactccatgaaaacaaagactgagttttaaatcaagtctctggttcctaaccagcacctgatacattataggctttagtttaaatgtatgaataagsctgggtgcgatggctcatgcctgtaatcccagcactttgggaggccaaggtgggaggatcacttgagtccaggagtttgagaccagcctgggtaacatagtgagaccctgtctctacaaattatcaaaaattagctgggcattgtggtacatgcctgtagttctagctacttgggaggctgaaacaggctaattgcttgagcccaggaagtcaaggctgcagtgagccacagagctcagcttgaata

SEQ ID NO: 656657 - DNA, 578 bp, Homo sapiens
aggggtggtggtggactgaggcacagatcaaacagataagatgtccagtcttaggctgttsctttcccgagtccattgaaatagacttttaattggttttatgctcttcaaactctctgtattgtctttcaaaaatatttttccaaatgcagatgtgaaaatgtcctctgcttaaaaatattgtatgaattcctgtaacgacatattttctttacaattctatttcataaaataatggcaggataggaattacctatctatgacgtgtctaccattctaaataaagtcacttttcaagttaagcttcctggttctaagtatttatatggaataatcaaatagatatacagattattataaacccacttctggtattaactatgcagaacatctcatgatttctatcttgtacaacctctatttattggacaatcaatgtaaatagagcaggacaagaaagaggaaggtcctacagtttaggaggactccctattttaactcaccaagacttggttttaacaaaaatcaagtaaatttgcacattctatcatgtcttctcttgaagagggtttttaata

SEQ ID NO: 656658 - DNA, 442 bp, Homo sapiens
ctggttagccagcatgagccaacttcagcagaccactgcgtcacatcagatattatagagaaggactaaactgagctatggggggtcagagcttttctgatgaagtgaaatttaaagtgagccttgagggatcatcagtaatttgctagggaaggagtgagagcaaaagacttttcatgcgtaaggaataacttgtacaatgcataaggaataacrtgcataaggaataacttgtacaataacttgtacaaaagaggtaagaaggaacatggtgttttatgtaatgggagaagatcagtgtggggaagcttagtgtgcctccaaaccagatgaaatagatactattataattatcctcatttgtaaggaaactgagctgcagacagcctgaataaccaagtaactagctcaaggtcatacaactgcaaagtggtagggtgtg

SEQ ID NO: 656659 - DNA, 366 bp, Homo sapiens
aaaactgctatatagttctgcctcactcttacaaagattcatctcttgagagttttgtgctctacccccagatgtggtctttctggttctgaagcttttgcttcagtcaccctgaattttgccagccctatgcatgctataccttggattgccaacttgccctcactgaagccagtttctctggttagaatagttgccccaacccatgccyagtactctagtaaacaaggttctacctgggcttaggttaacttttgctcctttggccctgtgttctaccagcattccatttatctgaaactctccctcatcttaagaacttatctgttctttaatgatttactgctgcttcctgggtttgaaaga

SEQ ID NO: 656660 - DNA, 366 bp, Homo sapiens
aaaactgctatatagttctgcctcactcttacaaagattcatctcttgagagttttgtgctctacccccagatgtggtctttctggttctgaagcttttgcttcagtcaccctgaattttgccagccctatgcatgctataccttggattgccaacttgccctcactgaagccagtttctctggttagaatagttgccccaacccatgcccartactctagtaaacaaggttctacctgggcttaggttaacttttgctcctttggccctgtgttctaccagcattccatttatctgaaactctccctcatcttaagaacttatctgttctttaatgatttactgctgcttcctgggtttgaaaga

SEQ ID NO: 656661 - DNA, 526 bp, Homo sapiens
ttcatgagctctcccaggatgaagacccagccaggctgtctgaagaaggggtgttcttgagtaggagggaaggtctgctccaatacgaaaaatctaacaatagcatagtccttaagagcttgagctttgaagagggagaacagacccatttaaggcacgaaaaataaaggaaactcttgagtccctccaaggaaaattccagccacctggctagcctcaagaagtagatgagcaccctgataagtaagaaggtaataatagcttaaaacaatagtcaagaaaattagagccacraactaatcttaaatgacgagttaatgggtgcagcacaccaacatggtacatgtatacatacgtaacagacctgcacgttgtgcacatgtacctaaaacttaaagtataattaaaaaaaaagaaaattagagccacaaaatgtttgtttccctatagaaactagagataacatcttaacatatgtccctgagttgttttgtagaaatccagaccccgctaaatggaaaatacc

SEQ ID NO: 656662 - DNA, 284 bp, Homo sapiens
aggtaataatagcttaaaacaatagtcaagaaaattagagccacgaactaatcttaaatgacgagttaatgggtgcagcacaccaacatggtacatgtatacatacgtaacagacctgcacgttgtgcacatgtacctaaaacttaaagtataattaaaaaaaaagaaaattagagccacaaaatgtttgtttccctatagaaactagagataacatcttaacatatgtccctgagttgttttgtagaaayccagaccccgctaaatggaaaataccacctgtt

SEQ ID NO: 656663 - DNA, 459 bp, Homo sapiens
tgtctaaacaacggtttaaggtctacacaagattgtgaagtgaacctgcaggattaggagggtaaggattcccacctaggtgggctcacttgctctgccatacctgggtaggatcccagcctgcttctgtgattgtcaggaggcaccaaaaaggctaccctaggttttctgtcattcggcccaaacatttcctctgctgggcaaatgtggaagaggcattaagctggtgctctcacaactgaaaggaaagcaattctctttctgttgtggttccttcctctttggactcttttcttccattccagcctatccccttcttggaaaagctattctaccaatagcagggaagaaacagcsctgtgtacctgatatgctaccctgggcacaggcgatcggaccagggatagacacctgaactgatctgggcagatgccctcttctggccattgagaattgaca

SEQ ID NO: 656664 - DNA, 459 bp, Homo sapiens
tgtctaaacaacggtttaaggtctacacaagattgtgaagtgaacctgcaggattaggagggtaaggattcccacctaggtgggctcacttgctctgccatacctgggtaggatcccagcctgcttctgtgattgtcaggaggcaccaaaaaggctaccctaggttttctgtcattcggcccaaacatttcctctgctgggcaaatgtggaagaggcattaagctggtgctctcacaactgaaaggaaagcaattctctttctgttgtggttccttcctctttggactcttttcttccattccagcctatccccttcttggaaaagctattctaccaatagcagggaagaaacagcccygtgtacctgatatgctaccctgggcacaggcgatcggaccagggatagacacctgaactgatctgggcagatgccctcttctggccattgagaattgaca

SEQ ID NO: 656665 - DNA, 367 bp, Homo sapiens
agaaccaatgccctcagccctgagagtgagggctggtctcataatccattcacacagatggaagtgcatcctcacaggggtcaggcctcacacaacatcgggcatgttggtaggcatatgcctaagtttctgtgcaatgaatgcatgccttactggtgatgcgtcaatagcaaggcattcaggggagagagtaccctgcctcagtgcctagcatgagacatgtatccaggaccatgtttttattcccatctkatggatgagaaaactgaggttcagaaagggtaggcaaaatcccctagctcacctggctggaagggggcagaacttccctgtacgtgctgagaacaccactgttcgagcagagggg

SEQ ID NO: 656666 - DNA, 503 bp, Homo sapiens
tgaagaagtgccgagcaaaggggaaagaatcccttataaaaccatcaaatctcgtgagaactcactatcacaagaacagcacaggggaaactgcccccatgattcaattacctccacctggtctctcccttgacctgtggggattatgggggctatggggattacaattcaagatgagattcaggtggggatacaaagcctaaccatatcagtaggcatgtrttgaattttaaactcagagaaaaatactagtgtttttataggattcttactaaagaaaaaccagaaagtaataaaccatctacgctaagacataaaattcagttgtttagttacaagatagaatgtggccttgtaagaaggcaaaattaacttctaacatacaaagccttagagaagattcaagtgactgacggatcttaaacagagctattattacaactcaaactgcagtaaaatatcctcagcaacatagatgtgtgtgtttcactagtcagagcaat

SEQ ID NO: 656667 - DNA, 656 bp, Homo sapiens
ggtttccagctggtgaaacgacacctgaaggatcctatgacattttcataaatgcaaactcatcatattgtacacattgagttgtacagttatttgtatatcaactctacctcaataaagagctgttaaaaaaaaaaaaagaaagaaagctaaacaatgatgagagctgttgctacaaatcagaatatttgggtaccttgtagaatagctgggaaggataggtaaataaccttaaaggctacaaagccaagaacacccaaaacaatgcttcaagactggtctagcaagctcaggcctattgccactgccaatcgccagaagctgcagctataaccccaacactcccggcactggatgctggaagccaccatgggcactgctgcagctggtactcctgaagcttgatcttgctgcagtgaccgccagagagtgtacctgattggtgggcctaaattacaggcccacacccaaggtgcaaaggaacctgggaagtgagtatcttcacttkcagctttcatagtggcaggtggaccttgtctcctacccaaatcatgtggaggagttttcaaacaagaagattcagatgttaggacacctaaaagaataacttatctcttctacagtaaaagaaggcaatatagcttagagagattaag

SEQ ID NO: 656668 - DNA, 420 bp, Homo sapiens
tcttaatggcattttctagaaaaaagcagtgcatgaatacaagcartcttgaactgcctcttacactgaatacattgcctgcctgcctgccatagtgacatcccttttgtgtaacatgctgttctgtctgttgtgtttttgtctgtctgttttgggaactgcctaggatggccttgccccacccaggtctcccctgttcagcccagttgtaccttatgatatgtacatactgaatgcatccaatccggatactgcatttaattcgaaccctgaagtcaaagaaacatctggtgatttctcatctgtggatcttagcttcctaccagatgaagttacccaggaaaataaagaccagcctgtcattagcaaacacgaaactgaagaaaattctgaaagccaaagtccacaaagtaggttgcc

SEQ ID NO: 656669 - DNA, 606 bp, Homo sapiens
aggcggtctcctttcaggctyctccctaaactgaagcttggggaagctcatgtgtggcctagtgcagcatggcacaactgggtactctacagagatgttctgaaagcagtatctcaataatggtaaataacttgcctagaaaatgtaaagtgttgcaattacaaatgaactttgagtctgactgtagaaaataatgaattccagctcttgcctagttgggaactgtagaatgccaatgcccatagtacagatgtgtggcaatttgaaaccattgtatcatgccatttgcaggtctttgaaaataatttatccatataaaatggtcttactcccctgagttgccacagctacagccaccatgtctaaggttacttctgaatgtcctaattatagtcaagtaagctgaaaacaaagaggccctgctgttctactgtcatggtcctgagcagaaagcaacaggacctgggcccagcttacactgttctggatctgtgcttgttttctgtggctggtgtgacatttagggcccatgtttttttcttaaaccacagtaaaattaatagcatagctaggttctgctggaatggggtataacaaacagcaaat

SEQ ID NO: 656670 - DNA, 591 bp, Homo sapiens
atatatctaactctggctgaacacatttggtgtcacagccactgtgtgctacatctcacaaggacccaataagatagacactattactatgtcyattttacaaaaaaagagtctgaatttcagagaaattaaggaacctaagatgcaccactaagaagtagcagaggcagtttcaagaggtctgtaggggctcaggcctgacctgttcactagcacttctcactggatgtagtaaagcaaagaggaaggtattgaagttctttggctggggcaagaatacaagagctaacagttttgttttgttagccttaattcagttatggggaaggaatgatacttcaggggaaaaaaccaaagttgtttttgtttttccaattaaattatattttataagaattcctgatgaaaccagaggaaaaaaaatcttgcttctcctctctccttcaaacaaatactgaaaacattcctcctagttcctgacttggggaggtggcttatgtcattactatgagagtggcctgtaaaaaaactcagtgacaaatatagtgggctcctcctgcttcagaacagacttccctacagtaggagaga

SEQ ID NO: 656671 - DNA, 602 bp, Homo sapiens
tttgtaagtcaggtttcattaagagaggctttttaaaattaatgctttattataaaatatttataacacacagaagacataatgatatcataaatatctttatatctatcctccaaaataaaaaattattaattttttccagggcttctttggacgcttttaaataaaatgtaatagctacctccccaagcccattcctctctgctctggtcagtgacccttcccctgaatgtttgtattaktttactaaatatgtatataggcacaacaatatatgttactatttgtgtgtctttaaatattacataaattgtatcatactgtatatctttaagttgctttaattcactaatcattatctctgagactaatacaatagatgacttaatagattaattgacaggtgtagctattgttcattcattttgtcagtattataacatattctattcattctcctaactacaggcagattgtgtttggtttttaattattcaaacaatgctgcaataaatatttttgcctctttgtacatatgtgaggccaaactctaaggaattatatccagaactctagatccaagtaaaatgtttaaagaattc

SEQ ID NO: 656672 - DNA, 576 bp, Homo sapiens
tgatataacctgggaatttgagaaaattgccagttattggactccaccctacacctactaatgagaaacttgagggtgtggcccagcaatctgtggtttctagatcctttagataagccagtgaaaattgggcctagcatcacccataatcaagcttttctttcaagggtgaataatattaatacttgtgctgggcctaatagttttgttctttagctttgttttgtttttcctgacaaaggaaggatctgagtaagggaagtcaatactctggaagacaagtgactttctgggggaaggtgttaagccctttcattttgtcctctttgtttagccctttttattccagtggatatttctactcttatctgggamgctaacttggtttttaatttatttttcatcctaattcatctgcaatggatttcccataatattgtatttacctcctctctattggacatgatgagtctgctggtctactcactcttgagtgaagctctttctttgaaaaagctatctgtgtttaaaatctgtgtgattcatcttttctccatccattttgaggctccaagg

SEQ ID NO: 656673 - DNA, 576 bp, Homo sapiens
tgatataacctgggaatttgagaaaattgccagttattggactccaccctacacctactaatgagaaacttgagggtgtggcccagcaatctgtggtttctagatcctttagataagccagtgaaaattgggcctagcatcacccataatcaagcttttctttcaagggtgaataatattaatacttgtgctgggcctaatagttttgttctttagctttgttttgtttttcctgacaaaggaaggatctgagtaagggaagtcaatactctggaagacaagtgactttctgggggaaggtgttaagccctttcattttgtcctctttgtttagccctttttattccagtggatatttctactcttatctgggacgctaacttggtttttaatttatttttcatcctaattcatctgcaatggatttcccataatattgtatttacctcctctctattggacatgatgagtctgctggtctactcactcttgagwgaagctctttctttgaaaaagctatctgtgtttaaaatctgtgtgattcatcttttctccatccattttgaggctccaagg

SEQ ID NO: 656674 - DNA, 628 bp, Homo sapiens
cctgtcctcatcaataggtactttcttcttctctagggtaaggttcgtccagaaagtggtttgctccattccttttctcaggtagcaaatgcccattcattcatcacctcctttgcaccctggaacctgggtgttccatattaccagagcgataagatgcaagctctggccttaaaggattattctggaagtttgccagaccactggattgtttcccagtgctctgcagaatgagcacattgtttctaggtacagttaacatggattattatcagagagctggttcaccctagatgaattaatgaattctgacaccatacttcagattactgtcttttgctaacctttttgtagcctctaaaaaaattgaaatgagacaaaatctggtatcccctcctccatattaggccaggctctattccactccaagtagcaatcaccaaagggaagaaaaggtaccaggtaagtaaagaatgaagagggagattttcaycaaagaaacttttacagttttaggagagcatatatatttatatattaactaagtaaaaggcagagaacctgggcaacatggtctagttcaacagcctagaactaaccagtttaattcaaatatacacacatacac

SEQ ID NO: 656675 - DNA, 306 bp, Homo sapiens
cttattaggggctaatgcaactggttactttaagttgaagacaaygttcagtgactattgcgaaaatcctagggcccttaagaattatgctaaattgactctgagcctgtgctttataaatggaacaacaaagtctggatgatagcacatctgtttaccacatggcttcctgaatattttaagcccactgttgagacctaattctcaggaaaaaaaaaaaaagattcctttcaaaatattactactcattgacaatgtatgtagccacccaagaagtctaatggagatgtactaagagatgaatgc

SEQ ID NO: 656676 - DNA, 543 bp, Homo sapiens
aggacactcaagtgatgtccagggtagcacatacaattttttaagcacgtaaacatacttgaatatactcaaaaacataagcaaccattgctttacattttgcattaattaccaagactstattttaaaaaccagtatctttaaagatatttctgataatgtgagtaatacatcaattgggtaaaggagaagtgtttgatgagttaaggatgacaattaatgctacctggatactagccactagaaatattaaaccactagcccacagtcttcaaaagacttccaacttttgactgaccaactccctagatactagctctagaacagctaacttgctattgaaggcctctaatgagcaactgataatgttccctgagataattacattcacagctaattagcccttcattatcttttaaacaaatgaatttcttagttaccagatttccttgcagaattactttttaatgctctaaaacgaagttctgttaatacttttaataaactgtgtatcaaaaatcattctacaaaatgtagcctctt

SEQ ID NO: 656677 - DNA, 560 bp, Homo sapiens
aaaataagagcatttaatcagaactaagaagatcagatagatatcaccagttctatgactcttcccatactaccagctggtcatagaagtcttttcccctaagccagacccagcctcagagttattctccagaaagcactctagacagccagtcttgaccaacagatcatagccagcaaacaaaytgaaccacatttgacatcctaggactagatgctaaagtgccttccagctctaaaattctaggtgatcctggttagatagagtggtcaaaagatgaagtaaaaatcacataagttattatagctaattggaaacagtcagtaaaagtttcctcaatgtcaaagtgataactggtgattaaattaacgtttaggaaaaaaaagctgtgagatcacttcttttttcaactaatattaggaatactagaagttgtaactaggggttgagaagagttagaggaaaatataaaagatgtagcttataggatttttcactttctactcaataatatagggagagaatgacaaaaccaggagtctctgtctaggattttcatc

SEQ ID NO: 656678 - DNA, 617 bp, Homo sapiens
gaccagtaagtgttgaattctttaaagctggattgtgcccagtgagagaaacgatggtgtgagatgaggaggacttcgtggatatctgagtaccttgggaaaagagaggaattgaggcttttcactcagcaacctaatgaaaactagacaaatagtcttgcatttaatatatagttttcaccaattcatgcttcttttgttaggaacaattctagcctgtataggaaaaaagacagatataaggaaataatttctcattgacaagggagcttcaggtaaagcaatgcttatgaaaggacaagagactaagtttacattggtaaatttccattgtgcaaccatttcattactttaacttcatagaccccaaaactttatgtgcttgaacaagtaatcaaatgcaaaggatagaactaaataatcyatctgggatagcgaggactgtatacaaaacacaaagaataaaatacaagtctttaaggaatatgaataagaaatcgtggcacagaagggaagacttgaaaataagttccaaaagcagtatctagtgctttaaagaataatgaaatttacatgctctgctttaaaatccaaaaaggtatattttgaacaaagat

SEQ ID NO: 656679 - DNA, 614 bp, Homo sapiens
agatctcaaagcattttcaaatgttaattaaaccttcaccatcctggaagacagcaatgccaatctcactgtttaaatactgtattccagaacacaggttgttctaatcattgagagggaaatggaggcctctctaagtaaatccattatgcaagccactacccaaacacttatggcacccaaaattctcttgagtttcctaggaaaccaccgcagcatcttgattctaaattgtcccctactcccattgattgtttctgctgaaagaaatgcaagaaaaaagggggttgggcaggagggaagcagaaaaagactttcgaaaagttcccactttattcaggggtagaaatgtaggtagaacgatatgcaatatatttctgcaaatatattagttctctcatcaaacaactaagcacctttgctatatgctttttcatgyattgtggtgaccacatggggaaaaaaatagccagtttttcccaagatttagatgtgactgttcagactgcagtttacctgtcctcctatttaacaggcatcaagaacttactctgatatagagagcagtcagattttagtcagtttgtgtatccttttagtctggataaaggaag

SEQ ID NO: 656680 - DNA, 595 bp, Homo sapiens
gaggtgtggcctggtggaggtgtctgggtcatgggggaggaaccctcatragtggcttgggtcatccccttggtgataagtgtgttctcactctgagttcacataaggtctagttgtttgaaagtgtgtggcgcctcccctcacctctttctcccattctcgccatgtgacgtgcctgcccccaccttgctttctgccatgattggaagcttcctgaggcctcctcagaagcagatgccactatgcttcctgtacagcctgcagaaccatgaaccaattcaatctcttttcttataaattacccagtctcaggtgtttctttatagcagtgcaagaatggactaatacaaacaagggctgtttgttgaataaacaatgaatgaattctcaaattcatcttatctttcagtacacaaaaacaactggtttggaaatcttttagattaattctcacttaaataaaatacatattttaatcttacttccaattatcagtcaggatcatacattcttgggtaataagaaccataatagtaattttaagagctgccacagaataaagtactgggccaagtactttaagagaatgatttta

SEQ ID NO: 656681 - DNA, 595 bp, Homo sapiens
gaggtgtggcctggtggaggtgtctgggtcatgggggaggaaccctcatgagtggcttgggtcatccccttggtgataagtgtgttctcactctgagttcacataaggtctagttgtttgaaagtgtgtggcgcctcccctcacctctttctcccattctcgccatgtgacgtgcctgcccccaccttgctttctgccatgattggaagcttcctgaggcctcctcagaagcagatgccactatgcttcctgtacagcctgcagaaccatgaaccaattcaatctcttttcttataaattacccagtctcaggtgtttctttatagcagtgcaagaatgractaatacaaacaagggctgtttgttgaataaacaatgaatgaattctcaaattcatcttatctttcagtacacaaaaacaactggtttggaaatcttttagattaattctcacttaaataaaatacatattttaatcttacttccaattatcagtcaggatcatacattcttgggtaataagaaccataatagtaattttaagagctgccacagaataaagtactgggccaagtactttaagagaatgatttta

SEQ ID NO: 656682 - DNA, 563 bp, Homo sapiens
tagtctcacaactggagagtagggtacacaaattactggcacctagtaggtgaaggagacaaggatgcttgttggaaacatcctacaatgcacaggacagacctaataacaaacaactataaggtctcaaaatgtcatatgtgctgcctatgaaaaatctgggtttgctgtacgtgtgccacattgagctagctttcttctgacctcagagtcccaaactagctgtttactataaaggaattttatgtcatggggctcattataccttaatgcagggattattaagccaaagatctgtgaactggcttaaggcaattcataaaatccatgaaattatatgtaaattttgttcacatgtgcagttttaaaacatgagtttaaagttaactttttggaagcctaaagactcccatctcttttaatatttccyccacaaatctatccaagtatctaaaattctcaacaaatcaatgaattcctcttaaaagaaagatttcattgtggatagagatttttaaaaatggtgtttctactcagaactggattgaaaatgcagccacaca

SEQ ID NO: 656683 - DNA, 556 bp, Homo sapiens
aatgtcacctcactatagaagtcaaaattttgttgcaaaaattggacaaaaacaaattaatgacaccccataaaaaatttccaaagcataattttttctaagtgtctctcaaaaaactgtttcagacagtccaggttcatatatattattacagatgaattattaatagcacgttcttttactctcaattttttttttctggtttggaacataaattaaatggcaaccacacttagagccaaatgttttcatggtgcttttgttttatattgaggatagagagggctaactggattgaaaacttaaagcaggcaaagagacacctagagaaattgttaaaatacagattgttgacttacaaccccagaaatgatgatataaattattggggaggagaatattctagaaagatggtggagtaggtagcactagaaatatgtatccctacatagaaaaaaataatgccctgacagaatctgtctgatgttactattttggaattctggaaactaytgaaattaagttccagggaaagacttgcacttcaaactcccag

SEQ ID NO: 656684 - DNA, 570 bp, Homo sapiens
agaggcacaattagaggggaaaaagggttaacatttcatcacagagatggataccaaccaagggagacaaactgatccagggactggcgtgcaggaaaagacatggggccagtgctctggactcagtgctcaggacacagcactgtcaaaccctatatcttggactccttttcttccccttctgtcatcttatctccaaggatggctctgttcactttgaggccatgtttggatgggaagagtacactaagtccacttctcagcatgggacaactcgggatgtctaaggtagggcttggtctgcctccactagctggccaagtagatactgatctgctgctaccttctgctctgaggagctccattttgtgggcagrtggcaaggtctcaggaaaggctttattccagaactttgcctttctctctcctgtaagctacgcagcatgacatggaggatggcactgcctttagcatcgtagaagttggcttagggtttactcgcacggaagaaagaggaggaagcaggggtcattgggaggtcagtgggaatgaaggcaatgtgggaccttc

SEQ ID NO: 656685 - DNA, 620 bp, Homo sapiens
ttgaaaaagatatttgcacacacatgtttatagcagcacaattcacaactgcaaaatcgtggaaccaacccaaatgcccatcaatcaatgagtggatcaagactttggtatatatatrtacatgatggaatactattcagccataaaaaggaatgaattaacagcatttgcagtgacctggatgagactggagactattattctaagtgaagtaactcaggaatagaaaatcaaacaacatatgttctcactgatatgtgggagttaagctatgaggacacaaaggaataagaatgatacaattgactttggggacttgaggggaagagtgggagggggacaagggacaaaagactacaaatatggtgcagtgcatacagctcaggtgatgggtgcaccaacatctcacaaatcaccactaaagaacttactcatgtaaccaaataccacctgtaccccaataacttatggaaaaataaaaatgtaaaatttttttgaaagaaaagaatgtagatacctagaacttgtcctgcaaaatctgatttgtagatctagtatgggacaggaatctgcattttgtcaaacaaaaaatcatttattagcaaaagagaaacaaaaaa

SEQ ID NO: 656686 - DNA, 618 bp, Homo sapiens
aatatgggtggtgggagaaaggaaatgctcctctctctgggattattagctgtatggataatgcaaatccaaaaattgctgtggccatctttgctgcaacataaaggaaagttctctgaagtgattccagraaagaggaggacagaagtcagagatggagagagatagacccttgatgacatcaaatgagcctctggatccagctctgcctgaagtcatctgccccatgattttcagtaatgtgaatcaacaacatattctgcttttctagctaatgttagtttgaatcgggtttctgttccttgcaaccaagggttttgacataagacgaaaaactctgtggggacatatgtatcatttatattttttgtaatcttcaaaatacctagcaagtgccttaaatttaatgatcaccattgttcaccatctcagctcattttattgagtcccctattttatacctttctgatatgcatattggaatatgtcaaccctggcttaaatgcttcaactcttccttaccatggaggtgtacagtgctgtttaaaacgttcttcacagtatagctatacccaccttcacaggcttatctgtcagttcctctctactggtgccatt

SEQ ID NO: 656687 - DNA, 561 bp, Homo sapiens
ttttgttgtgtctctgccaggctttgttatcaggatgatgctagcctcataaaatgagttagggaggattycctcttttcctattcattgaaatagtttcagaaggaatggtaccagctcctctttgtacctctggtagaattcagctgtgaatccgtctggtcctggactttttttggtttgtaggctattaattattgcctcaatttcagaaactttttatgtttaaataatattagggagccaaaatgatagggcaaagataatataattttggattaagaagacatagtgtcaaagtaagatgcttttagtttgaggtttttttgtttgtttgtttgtttgtttaagaagtatagtgaaagttcttcctttacaccagtgattctcaaaccacaacatgtactgtgtgtatgcatcacaatcatggggagcaatttttaaaacacaaactgctggacccagacccaaaaagtttctgattcagtatgtctcatgttggaaggcagcctgagaactgacatttctagcaagttcccaggtgatgctaatgctacttgt

SEQ ID NO: 656688 - DNA, 561 bp, Homo sapiens
ttttgttgtgtctctgccaggctttgttatcaggatgatgctagcctcataaaatgagttagggaggattccctcttttcctattcattgaaatagtttcagaaggaatggtaccagctcctctttgtacctctggtagaattcagctgtgaatccrtctggtcctggactttttttggtttgtaggctattaattattgcctcaatttcagaaactttttatgtttaaataatattagggagccaaaatgatagggcaaagataatataattttggattaagaagacatagtgtcaaagtaagatgcttttagtttgaggtttttttgtttgtttgtttgtttgtttaagaagtatagtgaaagttcttcctttacaccagtgattctcaaaccacaacatgtactgtgtgtatgcatcacaatcatggggagcaatttttaaaacacaaactgctggacccagacccaaaaagtttctgattcagtatgtctcatgttggaaggcagcctgagaactgacatttctagcaagttcccaggtgatgctaatgctacttgt

SEQ ID NO: 656689 - DNA, 450 bp, Homo sapiens
tcctctgaaaacatgaaattacaacttctagtataactcatatcaccatttcttaaatcgcattctctttgacacatttattattttatggttgcattgctagatatctccattactgcactaattatctcaagtctagcagaactttttaatctaaagaaaggtgtgcttgctgtctcacagatgatttcatggaggccagarcaaggaattgtatttgctggaagtatgctagttagtcatttatttagcttaaaggatgatgtagctttagaaataaaagcaattcctgcactcatttctcagcattcactggtgccagaaaataggtgggaaacttggctgttaggatagctggtattttcctggacaatttccaaaatttggatgagttgttattaaaagcaaagtctgtctggtttacatagacataaaagttgtggttataca

SEQ ID NO: 656690 - DNA, 450 bp, Homo sapiens
tcctctgaaaacatgaaattacaacttctagtataactcatatcaccatttcttaaatcgcattctctttgacacatttattattttatggttgcattgctagatatctccattactgcactaattatctcaagtctagcagaactttttaatctaaagaaaggtgtgcttgctgtctcacagatgatttcatggaggccagaacaaggaaytgtatttgctggaagtatgctagttagtcatttatttagcttaaaggatgatgtagctttagaaataaaagcaattcctgcactcatttctcagcattcactggtgccagaaaataggtgggaaacttggctgttaggatagctggtattttcctggacaatttccaaaatttggatgagttgttattaaaagcaaagtctgtctggtttacatagacataaaagttgtggttataca

SEQ ID NO: 656691 - DNA, 592 bp, Homo sapiens
cctttggcaacaccctcacaggcacacccaggatcaatactttgcatccttcaatccaatcaagttgacactcagtattaaccctcacatatgcagtggtagatcattctatatataatagtttttccccattatgcatataatatgatgtcagaatttttatgatcattttatccaataaattagctctggagctatttatggcttacttatttatttcttgtagagacaggatcttgctctgtcaaccaggctggagtgcagtggggtgaacatacatctctgtaacctcaaactcctgggctcaaatgatcctcttacctcagcctcccaaacagctagcactacaggtgcatgccaccacactaagctatttatttatttatttatttatttttacagacagggtctcactatgttgcccaggctgatttcgatctttggtcctcaagtaattccccctgcctcggcctctcaaagtgctgggatwaagggatgagccaccatgtccagccttttagcatatttaaattgaagctaaatattcagtatctagataagcaaggttttcgttatatttcaaaaatccatg

SEQ ID NO: 656692 - DNA, 598 bp, Homo sapiens
aaggcaatagccaaaaacacactaatgcaggcatattgtgttggtaactcaagcactatgagtggcaatgctgctaattggttttctgtaatagaaaatgtcaagccaaacagagttccatctttcctcaacttactcactagttgtattggtagaaaattcagggtatagtaaaaacgtaaaaaaatttcttggtgattatatgtaaaacagaattgagttccagtctcagataatgataaagaatattacacctatatgaatttgagggtaacagccaaaagcagtacaatatgggggacaattcttcagtgggtccattaactcctccatgtctctctcagtcatttgataactaaaataatcaaaaaaatttccaaaatagcttttggggatgatattatctcactaagaaccactggtttcttgaatgtggggttggggagagggaagatatgtgttgggacacagaagggatgatgccaacagtattagttcaataattaaaagagatctagtggcaggactgtcctcamaattgaacagtcaaaatatccttcagcaagtatctattgcatttataatgaaaatattaaga

SEQ ID NO: 656693 - DNA, 409 bp, Homo sapiens
ttccattccattccatagcattccattgcattcgattccattccatttgataccattccatttgatgccattccatgacattccattccgttccaattcattccattccgtttcatgaaattcgagtcctttccagtacatttcattccaatcccatccaatccaatctactccattcaattcctttccattccatttgatttkattccattgatttgattccattcagtttgattccattccgtgaaatttcgttccattctattccattgcattactttccattcaattccattccatttcatttcagtccattcgcttcctttcctttcgattcaattccatttgattccactccattctatgcgatttcattccaatcgattcaattccattcgatgacattcct

SEQ ID NO: 656694 - DNA, 612 bp, Homo sapiens
ctgtagatggatagatttacttctgggttctctgttctggtccattggtctatgcatatgatttcatgccaattccatgcgttttggttactatagctgtgtagtataatttgaagttaggtaatgtgattcctccagttttgttgtttttgctcaggatggctttcactattctgggtcgtttgtggtttcatataaattttgcaatattttttctatttctatcaagaatgtcattgatattttcayagggattccactggatctgtagattcctttgggtagaatgaacatgttaacaaaattgattctttcaattcatgaacatagaatatcttttcattttttgtgtccttttcaatttcttgcatcaatgtcttagagttttattgtaaatatgtttcactttttgattaagttgattccttggtattttgtttcatttctagctactatggatgagattgcttccttgttttttttttttttttttgagacggagtcttgctctgtcgccaggctggagtgcagtggcacgatcttggctcactgcaacctccgactccctggttcaagctcttggtctcttttttcagattgtttgctgttggc

SEQ ID NO: 656695 - DNA, 512 bp, Homo sapiens
aaagatgctaaacatcactgatcagagaaatgcaaatcaaaattacaatgagatatcatgtaaccccagttaaaatggctttgatccaaaggacaagcaataacaaatkctggtgaggatgtggaggaaagggaatcctcataaactcttgttagaaatggaaattagtacaacctctgtggagaacgatttggagattcctcaaaaaactaaaaatcgagctaccatatgatccagcaatcccacctgctaggtatattcccaaaagaaataaatcagtacatcaaagagatatctgcacttcccatatttattacagcactattcgcaatagccagcatatggaatcaacctaagtgtgcatcgatggatgaatgggtaaacaaaatgtggtacacatacacaatggaatattattcaaccataaaaaagaatgaaatcctgtcctttgcaacaacatggatggaagtggagtctattcagtgaaataagtcaagcgcagaaagataaag

SEQ ID NO: 656696 - DNA, 597 bp, Homo sapiens
ttgaaaaaaaaatttgcaaagtattcattggacaagagattaataatcacaatatataggaactcaaactcaatagcaaaaaacaacccaattaagaacaggcaaaatatgctgaattcatagaaatggccaacagatatataaaaaaatgttcartaacattaatggtcagggaaatgcaaattaaaaccacaatgagctatcatctccccagttaaaatggctactataaaaaagtaagaaaataacaaatgctggcaaggatgtggagaaaggggaaggctcacacattgttggtgtaatgtaaattagtacaaccactatggacaacagtaaggaggttcctcaagaaactacaaacgcaactaccatataaccaaacaatccaaacgttggatatagatccaaaagaaaggaaatcagaatatcaaagagagatctgcactcccatgtttattgctgcactattcaaaatagccaaggcaggggtcgacctaaatgtccatcaataagtaaaaaaaaaaatgccatatatatatatatacacacacatatacacacacacacaacggaatatagttcctctatgaaaagtaa

SEQ ID NO: 656697 - DNA, 597 bp, Homo sapiens
ttgaaaaaaaaatttgcaaagtattcattggacaagagattaataatcacaatatataggaactcaaactcaatagcaaaaaacaacccaattaagaacaggcaaaatatgctgaattcatagaaatggccaacagatatataaaaaaatgttcaataacattaatggtcagggaaatgcaaattaaaaccacaatgagctatcatctccccagttaaaatggctactataaaaaagtaagaaaataacraatgctggcaaggatgtggagaaaggggaaggctcacacattgttggtgtaatgtaaattagtacaaccactatggacaacagtaaggaggttcctcaagaaactacaaacgcaactaccatataaccaaacaatccaaacgttggatatagatccaaaagaaaggaaatcagaatatcaaagagagatctgcactcccatgtttattgctgcactattcaaaatagccaaggcaggggtcgacctaaatgtccatcaataagtaaaaaaaaaaatgccatatatatatatatacacacacatatacacacacacacaacggaatatagttcctctatgaaaagtaa

SEQ ID NO: 656698 - DNA, 537 bp, Homo sapiens
gatggggaagtgacagctaaagtggtgaactagacagaaaaaccactaggctttcatctcaaattagagcctgaggataagaatagcttttgyagcaatactcacctgggcaaaattacaaaggacattagtttccaggtctcaagctgcagttggctatagtgagtcttccctcaagggctgcataccttcctctgataaaatctatgaactcccccgggaagtcagagatttccttgttatatctgcctctaattggggttcagcctcttagtccatttgttgccatgaaggaatacctgaggctgggtgatttgtaaagaaaaaaggcttatttggatcatggttctgcaggctgtacaaagagcataatgtcagtatctgcttctggtgtgggcctcaggctgcttccacttatggtggaagacaaaagggagctggcttgtgcagagagcagatggtgagagaggaggcaagagagatgggaggggggtgtcaggatctttataacaactctctctcatgagaactaatgga

SEQ ID NO: 656699 - DNA, 615 bp, Homo sapiens
tagtgcacttgtgaaaataccttaactatcatttatgcttatcacttcttcaaaattacttgagttatacaacctgccactttatcttgttatttaacaaatattgtaaagaactacaattactgtgtctcaattttttaatcaaactatttttagatattggaaatatgcatgcagttctaagaaataatgcccagagatcccttttcccccaatggtaacatcctggtaatctatattatgatatcacaactgggatattgacattgataaaacccatctatcttattcaaatttccctagttttatttgtacttatttgtgtgttatatatgtgtgtgtgtatatatacatgtgtatatatatttttatatgtgtgtgtgtgtgtgtgtgtgtgtgtgtgtgtrtatatatacgcatttctatgcagttttatcatgtgtaaattcaggtataccaacaccacaatcaagatatggaacagttccatcaccacaaggatcccccaagttggcctttcaataaccacacccatctccttcccacaaccctccaccccagcaaccactaacctattctccacttctatcattttttttcaaaagtatcatttac

SEQ ID NO: 656700 - DNA, 611 bp, Homo sapiens
ccctaactttttgcccaggggcgccatgctctgggcctcctatgtgagcagtcaataattacctttctcttgagggattctgccaataacagctgtggagcagctggtccagctccgtcatcccacaggaggtgggcatggaaggctgggccaggacatacctccttcttctgagtctgcacactcggctccacgcagtcactcagagtccaggggatgggtaccattgtgttgtccatgagacagatgtgggaggatcctgcctctgcttaagtgacacatgtcacttctgctcacacctcatcaggacgagtcacatggccaaacccacctgygtagaaaccaggaagtgtgggcgagcagagagccagcctggtgcacagtcctgagcctgccccacatgggcttgcctgattccgtgggacatgtctatatagcatatttctccttgttcatctgaaattcaaatttaactgggtgtcttaggccattcttgcattgctataaagaaatactcaagactgggtaatttataaagaaaagaggtttaactcattcatggctctgcagactttacaggaagcatggtgctggcatcttctcagtttctg

SEQ ID NO: 656701 - DNA, 611 bp, Homo sapiens
ccctaactttttgcccaggggcgccatgctctgggcctcctatgtgagcagtcaataattacctttctcttgagggattctgccaataacagctgtggagcagctggtccagctccgtcatcccacaggaggtgggcatggaaggctgggccaggacatacctccttcttctgagtctgcacactcggctccacgcagtcactcagagtccaggggatgggtaccattgtgttgtccatgagacagatgtgggaggatcctgcctctgcttaagtgacacatgtcacttctgctcacacctcatcaggacgagtcacatggccaaacccacctgtgtagaaaccaggaagtgtgggcgagcagagagccagcctggtgcacagtcctgagcctgccccacatgggcttgcctgattccgtgggacatgtctatayagcatatttctccttgttcatctgaaattcaaatttaactgggtgtcttaggccattcttgcattgctataaagaaatactcaagactgggtaatttataaagaaaagaggtttaactcattcatggctctgcagactttacaggaagcatggtgctggcatcttctcagtttctg

SEQ ID NO: 656702 - DNA, 510 bp, Homo sapiens
gagggcagaacttggaatgaaagaaagggaagatgagatcatttctaaataatttcctggaagaaatggaaataggagatgtcattgacttaaacataaaatatagcagactattaagatcctctaaggaagagcctgctgtactgattccatttttttttttttttttaccatttagtcttaattcacctgyatttatagtacatttatttatttgacaaatactcattatacttatgtgttccatgggtagtgcaagtcattgaggagaaaggtagtcaaggttggcatcattttcacaaacacagagctgagagaatatactaaaagctatgtaaaggaagaatataccaaaagctatgtaaaggaagaataatagttaaattttatcccataatcagatatatacaaaatggccatttaacaaaaggctaatttctgaattcagttgctttttttacctctcaaatcaatctgaatgatcataaggtagaattttatcattaatgc

SEQ ID NO: 656703 - DNA, 573 bp, Homo sapiens
tgtagtcccagctacttgggactagctgggagcatcacttgagcctgggaggcagaggttgcagtgagccatgtcataccactgcattccagcctgatgacagagcaagaccctgtctcaaaaaaataaataaataaaagaaatgagaaccaatagaaatgatgagatgggagygttcccttgaccttgaccccctttgtgggcaagaactgaaatggctcatttcactcagcctgccactggccccttcttgagagagggagcgtgcaagtaagggaggagaccacccctcatattgtgttatgcccaatttctgcctccaaagaaagaagaagtaacaactaaaaggcagaaatgaaatccacaggcagacagcctggcgcagccctgggcctggttaaagatcgacccctgacctaacccgttatgttatctatagattccacacattgtatggaaaagcattgtgaaaatccctgtcctgttctgttttgttctgattaccggtgcatgcagcccccagtcacgtatccactgcttgctcaatgatcacgaccctctatccccttggag

SEQ ID NO: 656704 - DNA, 579 bp, Homo sapiens
tgaaaattaaaataataggctggacacagtgactaatgcctgttacccctgcactttgggaggctgaggccagtggattcacttgaggccaggagttcgagactagcctggccaacatagtgaaaccctgtctctactaaaaataaaaaattagccaggtgtggtggtgcacacctgtaaagccagctacctgggaggctgaggcaccagaatcacttgaacccaggaggtggaggttgcagtgagccragatcgtgccactgcaccccagcctggatgacagagtgtgactctgtctcaaaaaataaataaataaataaaattagacttcagcagaattgaggccaaaacggtaagaacttgctactcatctcgatcagttgaaatactttttggttttttatttcctttcatttctgcattacaattgccatataaattatttaaaatatgaatgatttctaaaagtacatttagaaattacaaataaaggaagacagatgctactcttgaataaatcatctgtattttggcatttatcagacaaacataataaaagtttgtgtttttcttttgtct

SEQ ID NO: 656705 - DNA, 468 bp, Homo sapiens
cccgctctctctctgttgctcctgctgccaacatgtgagatgcctcgctccctctttgatttctgccctgattggaagcttcctgaggcctccccaggagcctggaagataccagaatcacacttcctgcacagcccatagaaccttaggacaattaaacttcttttctttataaattacactgtccaggtatttttttatagcaatgtaagaatggactaatacaggcttcatcatggaagcgatcacctctttatatagtcattggactgctgtgattagaaaattcacagcaatgagttggtctcattttgtatatattttattgagtgtttgccatatttaggttacctctgggatggggtgcaattctcatayacaatatacagaccgtttacttattagaaggatgtctgtgtttgtatcaggagtgggaggacagtggtgaactcattaatgtgattcagt

SEQ ID NO: 656706 - DNA, 595 bp, Homo sapiens
aaaagccattgagctttggagcaggatgggacagaagtttctttttcagaagaggggaaagtataagagaatgtttattaactgccccatatagacaaggcttggcaagatcttcttgaagcagtcctgaacagctccctccacagcccacccaatcctcctggagctctctccctcgacacttcagaggggggtggggacctccactagccccttcatgccagraagtcctgcttcttctgacttagctgtaagctcagcgggtttgaatgcaagtccttctccatctcctcttttctcctcctcagtgcagtcagcatagcctggcacgtggaggggaccatcccctttgctgacttacaactggatttcaaaatcaaggtaaaggtcaaggaatggctgtaaagccactttcatgtaatcttgctagcttttcttgaaccattttgggcagaaggccttacctgtaaagtgcacgaggtcagagtgatgcacttttgaaacagagagaagaggagctggctgtcctacagacctgggtttcagagctgtgcaggagaccctgggcaaactactttcctccccaagcctgttt

SEQ ID NO: 656707 - DNA, 628 bp, Homo sapiens
agtgctcttttataaaaatgttactgacttttgatgtttattttgcaactagccacctttctgaattaccttatgatttctaatagtctcatagtggaaaatacctatcaactggattttgcacttatgacttcttaagaaagaatttawattatgtttgtaatgttttgtgggttattgctaaaaatgtagttaaattcctccaatgtacatgggtttaacaagtaaaaacaaatattttactccacaaaaacttcataaatgtatattaagatattgaaatgaaacaacttatagttaacatatccagtagaaaatgtaattccactcttttttatagttcaatgtttcacacttattaaataatgttttataaaaaattctatcattttttatctgctgtgttttgctccctaaattataggaaaaataaaagtccattaaatggtatacattaacacctactattatggggttagctatggagagtgagcagctgcaatactcagcaagtttgattgctttgatgtctgaacacaagattcatttaatagcacttacttatttgtacaaagaaataatactgacctaggaaacaatttgttttgaaacaggtcaatggcaggaa

SEQ ID NO: 656708 - DNA, 553 bp, Homo sapiens
gaacattgttctttttttctttcttttctttaggccatctcatccatcaaccaaactacacaacaattgagacctaaaactaaaaaacacatgtaatgacacttggttaaatgattgggcactgctaaatccacaaggaatcagactaaccattcaatttgttttaaagaatcagctcaccagtggttagatactcatgtaaacaaatgggtatttggcatcgtgcatcatggaattacagtttgatattaaagagacttcaaatattcagtgtcacaggataggttttaacaatgaaatgaaagtctttgaaacctttaaataaatactatggtgaataaaccaaaaattacgttcttaaaaaagaagtgaatacagaatgtaaacagcatggcaagtaagttttctaatgtggtacagatgcaggagtttgtagcctattggttcaaaataaaatgtaagcagtggggagggatggatgtgtcagccagagatgtagtgacgtggcctgagaaacacragtaacatagtttcagcagtccatagggacagc

SEQ ID NO: 656709 - DNA, 444 bp, Homo sapiens
ttaaactatttcatgctctttggtacatgtgaaaatgtgaatgatgaattataatacttagaactataaacattttatttaaatattgttatcagacatgtacatacgtgttttmgcaaaaattattcttccaactttgcattgatttctctgtcttcacaaatctgttgtacttgtgggtgttgtgtatagttttatatgtgtagctcttcaaacccctaaggaaacaactcttacacaggtattgaaaaccgaaaaggcaaaaagtgaacactaaaatatcacggagtcaataactacaggaaatagctcccctgacttctcttgggaaaggagcccagtggaactgatattccaatccctgagaaaggagtcctgtccagctgatactggtgtctctagagaggcatgagaaggctggttctgtgaatgctggaaaagcca

SEQ ID NO: 656710 - DNA, 583 bp, Homo sapiens
tctctggacttaccaagagcttttctctcaagctgccattgggagcaggggctttagggtccagtacaagtggattcaaattctggctcagtttcccattgttggagcaatattgggcaagttatgtgatctatgggagcctcagcttcctcttttctaaattggagattaaaatagtatttgcctcaaagggttgtttgggattaaactaactagcgtaggtaaagtgtgcctggatggtattaagctcaataaatgttagctactactatttcccttttccatgctagcttcccccttcaattcatccttagttgcagtgtttggacacccaygaatagcttttcatggtggatctagagggctttggggtcattcttagcacagtgctgagacttattcccatatgtatagtgcgacctaggtttgtcataacaaggtaccacaaactaggtggcttaaaacaacagaaatctaatttaacagttctgaagacacaagtgcaaaattaagatgtcagcgggaccacactccctctgaaacctgttggagagaattcttgtctcttcttagcttttgtagt

SEQ ID NO: 656711 - DNA, 588 bp, Homo sapiens
gcacacacacatgcacacacatgctcatatctcccatttgcatyacaccaactctcgaatttctagggtaatattatacacattggcttgtttaatggaatttgcttctggaggacactggaaaaaactttcatttaagtattttaaaatcacataatgtgtgttgcaggaattcctgacatgggctcatggacactgcagactcagagataggcctcagaggtcctcccctcaaggactgcatgcagacattcagtgtgcaatacatgcatttttgtggaaagaagttctatagcttttatcaattcttgaaggagtctgtagccttgaaaatatttaatgaccgctcttctacaagctctaagaatgtaatgcagtggatgagcccagaggttgtctctccaaagagacagatagcttttgtctgatttgatggctctcctttagttctctttcttccattccatcatctgtacagaaagtataaaataatacatgtttaaaaatgaaattaaataatgcacttttaacacagcttttggtaatgttcagcaaatattagctattgtttccacaggtaaatattag

SEQ ID NO: 656712 - DNA, 601 bp, Homo sapiens
ctcgttatatttagttatattaaagaaaaagctgttacattaaagaaaatactgagctatcactttttcattttatccaaggaatatgtggcatttttcatgcctcatattgaaagaaattacttgctttctacatttattctctattagcattttgccatttggggtaacattatcattttgatgaagataagcatttcatgtaggaacatttaaacaagttgaattgcagtccatgtaaaaattatacttgtttgcttcatgaatacttaataattacttaattataaaaaacaagccccaatgtcttttattatgttaaggtagagaaactagcagattttagacygtatgcttaagggttataatcattcttattgttctttcactcttttccactatagtctatcacctgtcaaattctatttggaatacagggattttttcattgttgttgagaagaaattaaaaacagatttgtttagcttactattctacttccagtgactaaaattggtatcactgtatttgacaatgatgatgtgatttctgctgtctttgaggaatttcagctcacacaatttggcattgcagaaccagg

SEQ ID NO: 656713 - DNA, 610 bp, Homo sapiens
taatatccaaaatatataagaaactcctacaactcaatagcaagaaattacatcacctaatttacaaataaggagaggatctaaatagacattattccaacaaagacacacaaatactgaagaggttcatgaaaaaatgctcaatattactaatcatcagagaaatgcaaattaaaactataaatcataataagatatcacttcayatttgttagaatggctactatgcaatggacgataataaatggtgaggatgtggagaaatggaaaccttcacacactgttggagaaaatgcaaattaatatagctattatggaaaacagtatggaggttcttaaaaaaaataaaaatagaactaccatatgatgtagcaatcccactactgggtatacagttaaagaaaattaaatcaggacatctaaaagataactactttctcatattcattgcagcattattcacaatagccacaatatggaatgaacctaagtgttcatcagtggataaatggataaagaaaatgtggtatatatacacacaatggaatactatttagccttaacaaagaaagtaaatcttgtcatttgtgaaaacaaagttaaacctgga

SEQ ID NO: 656714 - DNA, 553 bp, Homo sapiens
atcctagtaatacaggaagaggacattgcattgaaggttcttcacggggaccaatgaagcttattggaatgcaccacartgagatggttcttgacaccaatctttgccccaaagaaaagaactatgagtggtcctttatccagtgtccaggtaataataatgtaatggaaacaatttcagtttctgcttaagggatccaagaaggagtttttgttcttataataaagaaaatttagctttaggaaaaaagcagaatgaaaatgagactaaaatgtcaaagataaaaaattattccatagactatatctatctcagtttatgcaggtggtattcagtttagaatcattagataggctaaatgaattcatggaatatcatgattagctttcatttcttttttaatattttgttatttagtttaagttttgggatacatgtgcagaacgtgcaggttacataagtatatgtgcaacatggtggtttgctgctcctattgacccatcctctgagtttcttcccctcacccccagcccggcaacaggccctggtgcat

SEQ ID NO: 656715 - DNA, 623 bp, Homo sapiens
tacacagcaatatgaatgtatgcaataccactgaactgtatatttaaaaatagttaaaatggtaaattttatataatgtatatgttacacaatttaaaagatgttatcaggagtagtttggacartgcttgatgccttctcattgtgtaatttatgatataaagtgatcttcttttccatgcctctgtgaattgtcagactcctttgtaagttcaggtcaacttccaacatcttattctttgcattttcaatggtgtgaaatatctgagagctcctttcatgtaaaatttttgctggcatcacttcttttgggacacatctttatccttttcatcataaattctctcttcatttgttactttcatcaagtcctttgcatacctagtctctcaaaaagtgacaatgttaacatttcaatatcagctatttttgtaattccatctacattcaatataaatatttcacttccaacattataactttttgtttgcttgctgcactttcatctttgttggccaatttcttcttttggtcatcgatttttgtaaaatgccatgtgagtttatcaatgggagaccaagaggaaacagctttactatatgtgtgtgaactgagtatgaaat

SEQ ID NO: 656716 - DNA, 623 bp, Homo sapiens
tacacagcaatatgaatgtatgcaataccactgaactgtatatttaaaaatagttaaaatggtaaattttatataatgtatatgttacacaatttaaaagatgttatcaggagtagtttggacaatgcttgatgccttctcattgtgtaatttatgatataaagtgatcttcttttccatgcctctgtgaattgtcagactcctttgtaagttcaggtcaacttccaacatcttattctttgcattttcaatggtgtgaaatatctgagakctcctttcatgtaaaatttttgctggcatcacttcttttgggacacatctttatccttttcatcataaattctctcttcatttgttactttcatcaagtcctttgcatacctagtctctcaaaaagtgacaatgttaacatttcaatatcagctatttttgtaattccatctacattcaatataaatatttcacttccaacattataactttttgtttgcttgctgcactttcatctttgttggccaatttcttcttttggtcatcgatttttgtaaaatgccatgtgagtttatcaatgggagaccaagaggaaacagctttactatatgtgtgtgaactgagtatgaaat

SEQ ID NO: 656717 - DNA, 557 bp, Homo sapiens
ggttgaggcataatgaaaagttgattgaatcaattgattggagatcccagtgggattaaagaatttttgttgtctggarctagagaaagtaaactggaaagacagatggtggaaatcagagagagggacaaatgtacaaaaagggagagagaggaggtgtaataggaaattagatgaggttgaagcagcagccaggatcccaatccaaatgtctgaaatgtgtttgcctaagtgtatattatgtatgtgtgtgtataagacacacaaaagaggaattgctgtatcaatcaaatcaatcataagatatatccacttccaaacattttaatagattccatgtatcctttaataatattgcaatttataccatcataaacaatgtgtaatatttatcatttcttcagatacatgccaaaattaaattagtgctgatctatataaatttaccctatttaaggggcaaagttattgcaggttatttaaataagtatttttaaaggtttataggacatttttatatcatttatgttgaatatttagagttttgcttattattt

SEQ ID NO: 656718 - DNA, 557 bp, Homo sapiens
ggttgaggcataatgaaaagttgattgaatcaattgattggagatcccagtgggattaaagaatttttgttgtctggaactagagaaagtaaactggaaagacagatggtggaaatcagagagagggacaaatgtacaaaaagggagagagaggaggtgtaataggaaattagatgaggttgaagcagcagccargatcccaatccaaatgtctgaaatgtgtttgcctaagtgtatattatgtatgtgtgtgtataagacacacaaaagaggaattgctgtatcaatcaaatcaatcataagatatatccacttccaaacattttaatagattccatgtatcctttaataatattgcaatttataccatcataaacaatgtgtaatatttatcatttcttcagatacatgccaaaattaaattagtgctgatctatataaatttaccctatttaaggggcaaagttattgcaggttatttaaataagtatttttaaaggtttataggacatttttatatcatttatgttgaatatttagagttttgcttattattt

SEQ ID NO: 656719 - DNA, 557 bp, Homo sapiens
ggttgaggcataatgaaaagttgattgaatcaattgattggagatcccagtgggattaaagaatttttgttgtctggaactagagaaagtaaactggaaagacagatggtggaaatcagagagagggacaaatgtacaaaaagggagagagaggaggtgtaataggaaattagatgaggttgaagcagcagccaggatcccaatccaaaygtctgaaatgtgtttgcctaagtgtatattatgtatgtgtgtgtataagacacacaaaagaggaattgctgtatcaatcaaatcaatcataagatatatccacttccaaacattttaatagattccatgtatcctttaataatattgcaatttataccatcataaacaatgtgtaatatttatcatttcttcagatacatgccaaaattaaattagtgctgatctatataaatttaccctatttaaggggcaaagttattgcaggttatttaaataagtatttttaaaggtttataggacatttttatatcatttatgttgaatatttagagttttgcttattattt

SEQ ID NO: 656720 - DNA, 520 bp, Homo sapiens
ttcaataatgttcacagcatcttcaccaggaatagattccatttcaataaacttatttctttgctcatccataagaagcaactccttatttgctaaagttttatcatgagactgtagtgattcagtcacatcttcaggctttacttctttttttttttttttaattttactttaagttcctggatacaygcgcagaaagtgcaggattgtttacataagtatacatgtgccatgatggtttcctgcacctattaacctgtcatctaggttttaagccccacatgcattaggtattggtcctaatactctccctcctattacttcccatcccctaacaggctccggtgcgtgtccttcccctcccaggcaggctttacttctaattctagttctcctgctgtttccacaacatctgcagggattttctccactgaaatctaaaacccctcaaagtaatctatgagggttggaattaacttcttccagatttctgttaatgttgatttttgacctgttctca

SEQ ID NO: 656721 - DNA, 586 bp, Homo sapiens
gagcaattcgtcactcatgtagatgtccatggtaaaatctcattctctgagaagactgaatagaatcaaacctgaacactcccaattgccatcgttattgcccagatccatcatgctactaaacacagcaccatacccattattatagactaggaacaaagtaagggactctatctctctgacrcagaagttacgaatgcatgtcagaagttgtgaatcctgctaaagttgaccagtgttttagtagtgaaggaggccacaacacatgaggcattgcttttattcattcctggaaaaatgactaagttgaaacttttactaactgttctgggctaaagtgctgcctcactgctgtcagtgccttttcaggtcacagtgttgctcttccagtccaatcagccaactctggccacactaccatggttcttgatcctaatctgtgtcatgttttcagctttctgatgttacagagctgctggtcaaggtattcaatgggctcccgtgctctgtaacacccacaggcacctggtcagtttgagcattgaaaggatctcctcaaaaatcaacataggaaaatttccagctc

SEQ ID NO: 656722 - DNA, 388 bp, Homo sapiens
tgtaatttataaaagaaagagattcaatggactcacagttctacgtggctggggaggcctcagaatcatagtggagaccaaaggggtagcaaaggtacctcttacatggtgacaggcaagagagcttgtgcaggggaactcccatttataaaaccatcagatctcatgagacatattyacttccaggagaatactatgggaaaaccacccccataattctattatctccacctggccccattcttgacatgtgggaattattacaattcaaggtgagatttgggtggggatacagccaaatcatgtcaggaccatcttctgaaatctggttaacagcctctttcctttgcttgttcagactacagctcatcctgcgacttctgaattc

SEQ ID NO: 656723 - DNA, 601 bp, Homo sapiens
aaattaatagtcactagcattcatgtggcagccactacgccctctttcatttaattcactcaatttatcaaggaagtagctggtgttatcaccttcatttcacagaggaggaggctgaaaaggaagcatctgagcttgcctgytctccatgctgtcagaaagtcacggatgtgactcatctgctgggtagcagaacctgtctcttgaccactaccttacactgagtatttttcaccaagatttagcaggagaggcaccttaaccatccacagaattctttcctaccccagagttcactctgagcctgacagcctcagaatgtatgtttttattttccggaaatgtgatcccaaacaggacctagccccacatctgtcttataacaccaagtatatgaaaggaaaatgagggcaagcacacccagaaatccctccaaagacattttgtgcagaagaactgactttttgcccatttatttcttttcaggaaacagggattaattgtgtctgcccagtatggcatgaaggtttcatcacctgtggtaactccagttgattgaaggtggttacatgaagagatatgttggaacaaattgtgagac

SEQ ID NO: 656724 - DNA, 608 bp, Homo sapiens
gttctttctgcgctacttaaacatagtcagaatgtcccaaatgaaaaattgtaactttccagkcaacctcgatggattgtctttctccagaactgattctcctctgaaagttgtgggttgttgctctttagtctcacagaaaaattaagaccccagaattccagagaagatttcagactggcccatcgtggggatatttatatcacataattcctgctgacagaaactacactctttgatgtgcttggcaagaaaagatggagtgctcataaggcacaatggatctatccatccttgtttctaccctgagcagtataacatgtttctgtagaaaaatgaatgagactgcttcaaaacacattaaatttatacttattctattttggtagggaggccaaataatctatagtttattattgttgacctttgtgtgtatgattttgaaatgttaatttgtttgtatgaatatatatcaacatccctgtgtatgaggataaaaagattatgcactaatcatatattgtgcacacccccccacaggcacagtctcacatgaagcataggtatcacttatataactttcatgtattttggttttgaactgtgac

SEQ ID NO: 656725 - DNA, 608 bp, Homo sapiens
gttctttctgcgctacttaaacatagtcagaatgtcccaaatgaaaaattgtaactttccagtcaacctcgatggattgtctttctccagaactgattctcctctgaaagttgtgggttgttgctctttagtctcacagaaaaattaagaccccagaattccagagaagatttcagactggcccatcgtggggatatttatatcacataattcctgctgacagaaactacactctttgatgtgcttggcaagaaaagatggagtgctcataaggcacaatggatctatccatccttgtttctaccctgagcagtataacatgtttctgtagaaaaatgaatgrgactgcttcaaaacacattaaatttatacttattctattttggtagggaggccaaataatctatagtttattattgttgacctttgtgtgtatgattttgaaatgttaatttgtttgtatgaatatatatcaacatccctgtgtatgaggataaaaagattatgcactaatcatatattgtgcacacccccccacaggcacagtctcacatgaagcataggtatcacttatataactttcatgtattttggttttgaactgtgac

SEQ ID NO: 656726 - DNA, 464 bp, Homo sapiens
gagtgagacttcgaaaaaaaaaaaaaatctcacattaaccattattcattatctatcataggactttgtattagtccatttcacactgccgataaagacatactcaagactgggcaatttacaaaagaaagcagtttattggacttatagtttcacgtgtctggggaggccttacaatcatggtggaaggtgaaaggaacgtcttacatggcaacaggcaagagagagaatgaaagccaagmaaaacgggtttcccattttcaaaccatcagatcctgtgagactcatttactatcatgagaacaacgcaggaaagaccagtccccataattcaatctcactgggttcctcccatgacacatgggaattgtgggagttacaactgaagatgagatttgggtggggacatagcctaaccatatcagactttaagtcaacattggctatttccttagatagtctgt

SEQ ID NO: 656727 - DNA, 431 bp, Homo sapiens
gctgaagctcacgcctccataagtagaggccaaattacaattcacatccaaactctgaaatcagttatgatttgtaaaacctacaaaaatagacatatggggaacttccaataaaaatgccacattttttgcactcttatctttctacagcgaaagccaccagttgacaagccaggttccaatttttaaagacctctccagaaatggctggccaaggattatgatatgtttatgcaaagcctctaaaatgaaagagaacaaaccaattctacaaaacaaaggaacttcaagggaacagaggcaacgyctatggccgaaaaagcctataaaaatactataattagtatcagataagaaaaatatactgcatcaattgaacaacagaatatttaaaataagcattaagataacaagaagaaactcaaaaaaac

SEQ ID NO: 656728 - DNA, 607 bp, Homo sapiens
tactagggaatgagatccaacaaaaaaaagcattaatccaaggaagaaagaaaaaccaggatctaggaaacagtagcaccagcctggcagagaggaagggaattcccaggattgtagttagggaaagttttcagactaggctaacagctgtccattatgcctggagaaaagtccatattggacaggaaactagatgtcttaaactatagtttgtctacaaggaaaaagttgagtatgttgattcccagatgtgttttatcattttgtgacaagttttataagtccagaagataatttggcaattaattagtaatggagacatggaagactaagaaaataaataagggaagcaattattaactttagagaaaatacagaagattgtaagtaagaaagtaagcattacatggctttactttgaagaatatttatttatgttgtaatcataaatcaatgctgaatattaattaaatttaaagcactatatrcaggaaaaggggaaaggggaagtatgtatagctggagtggtgatatatgtatggctgctacatcctcttcagccatgataagaaatcaagagatactatctaaaattgaaacatcaaaa

SEQ ID NO: 656729 - DNA, 599 bp, Homo sapiens
attcttcggagacaagtatgttaagcatagagggttcatacgtcatgaaggatggcagtgacagaatttggatgaagatatgttagtgaaccaattaccagaagttagatgatagcagtaagaaagcagttggaattgtatagtgaaatktcatgaatctcaaatgaatctcaaatgtgtttagtgtgagagtgtgtgtgtgtgtgtgtaggtgagttggattagtgtcccaccaaatcttaagtcaaatttttggacgtggggactggatcatggaggcagagttctcatgaatggtttagcaccatcccttcttggtactgtatggtgaatgagttctcaagagatctggctgtttacatgtatgtggctccatctgtaccaccttgctcctactccagccatataagatgtgcctgcttccgctttgctttccaccatgattgtaagtttcctgaggcctccctagaagcaaaagctgctgtgcttcctatacaggctacagaaccgtgagccaatgaaacctctttttttttttttaataaattacccagtctcaggtatttctttatagcaatttgaaaacaaaccaatacagt

SEQ ID NO: 656730 - DNA, 599 bp, Homo sapiens
attcttcggagacaagtatgttaagcatagagggttcatacgtcatgaaggatggcagtgacagaatttggatgaagatatgttagtgaaccaattaccagaagttagatgatagcagtaagaaagcagttggaattgtatagtgaaatttcatgaatctcaaatgaatctcaaatgtgtttagtgtgagagtgtgtgtgtgtgtgtgtaggtgagttggattagtgtcccaccaaatcttaagtcaaatttttggacgtggggactggatcatggaggcagagttctcatgaatggtttagcaccatcccttcttggtactgtatggtgaatgagttctcaagagatctggytgtttacatgtatgtggctccatctgtaccaccttgctcctactccagccatataagatgtgcctgcttccgctttgctttccaccatgattgtaagtttcctgaggcctccctagaagcaaaagctgctgtgcttcctatacaggctacagaaccgtgagccaatgaaacctctttttttttttttaataaattacccagtctcaggtatttctttatagcaatttgaaaacaaaccaatacagt

SEQ ID NO: 656731 - DNA, 599 bp, Homo sapiens
attcttcggagacaagtatgttaagcatagagggttcatacgtcatgaaggatggcagtgacagaatttggatgaagatatgttagtgaaccaattaccagaagttagatgatagcagtaagaaagcagttggaattgtatagtgaaatttcatgaatctcaaatgaatctcaaatgtgtttagtgtgagagtgtgtgtgtgtgtgtgtaggtgagttggattagtgtcccaccaaatcttaagtcaaatttttggacgtggggactggatcatggaggcagagttctcatgaatggtttagcaccatcccttcttggtactgtatggtgaatgagttctcaagagatctggctgtttacatgtatgtggctccatctgtaccaccttgctcctactccagccatataagatgtgcctgcttccgctttgctttccaccatgattgtaagtttcctgaggcctccctagaagcaaaagctgctgtgcttcctatacaggctacagaaccgtgagccaatgaaacctctttttttttttttaataaattacccagtctcaggtatttctttatagmaatttgaaaacaaaccaatacagt

SEQ ID NO: 656732 - DNA, 610 bp, Homo sapiens
ggatagttctagaaaatactgtgggaaagttttgaagatgaggatatggtagacagctgagtccaaaaaaagcaagtgcagaacattgagaagaacagtacagtaaatgatagaagatcatgtttccttatacatgaggcattgaccgatagaaaagagagcaacggcagatggagaacccttttgagcagggtgatgtcagagtgtagggacttgacagtttgactctctcagctggagtgaccctccycggtggtttccaactatgactatatgatatatagctggggtgaaggtagttagagaaatcaccaccattataaattaatacattgccatgtatatttatatatcaatccccgccaaatatttttagtgtgaatcattgtaatagtataataaaatttttgtatattgacacaattgatttcctgcacctgcaaatctaatgtccaatatttaaattactatgtttccaccaaggtaattatattatgagatttgcagtctaatagccaaccagtcaactttggaggaaaaatcatattatcttctcatgtcttttaaattgaaacacatatggactaagatttttatcatatatgaaaaa

SEQ ID NO: 656733 - DNA, 610 bp, Homo sapiens
ggatagttctagaaaatactgtgggaaagttttgaagatgaggatatggtagacagctgagtccaaaaaaagcaagtgcagaacattgagaagaacagtacagtaaatgatagaagatcatgtttccttatacatgaggcattgaccgatagaaaagagagcaacggcagatggagaacccttttgagcagggtgatgtcagagtgtagggacttgacagtttgactctctcagctggagtgaccctcctcggtggtttccaactatgactatatgatatatagctggggtgaaggtagttagagaaatcaccaccattataaattaatacattgccatgtatatttatatatcaatcccygccaaatatttttagtgtgaatcattgtaatagtataataaaatttttgtatattgacacaattgatttcctgcacctgcaaatctaatgtccaatatttaaattactatgtttccaccaaggtaattatattatgagatttgcagtctaatagccaaccagtcaactttggaggaaaaatcatattatcttctcatgtcttttaaattgaaacacatatggactaagatttttatcatatatgaaaaa

SEQ ID NO: 656734 - DNA, 552 bp, Homo sapiens
ctagcttctctaaactaaactggtcattagcatgcacatcccaagagcatattgcagacatgagatggtgtgcctgatattactgctatgctcctggtattcatgctgtattgcatatttttatcttttcttaaagctaagtaaatttggtatgcatgaagcctcctatgccttgtaatgttgatttacttttaaattcaagacaactacacctagtcaaattgaatgaacaatgctttaaaacttcttgaggcttgttttacagatctgcatattgttaattttggttaaatgtcccatgtgcacttaaaaaaaaagtgtattgtgaagtttaaggttgaaaaacaatgtgcgttgtgaagtttaaggtttatggttctatatctagcaattaagtctacttagtttactatggatagccttgcagamttgtttgcctgcttgttgttctattagtatcacaagacagcattttaaaatctccccttctaattgcaaatatatctatttcttcttttatttgttagtttttttttcttttttaagatatgt

SEQ ID NO: 656735 - DNA, 590 bp, Homo sapiens
ggttgaataagccatgcacttgctattagatacctggttgcttctaattgttcattaaatgatcgtatacaattttgaaagattgaaatatgttcatagaattgaccttctagttttacacaygccattaaaagtttgaggattgatctccaaggagactgattctgttttaaatgccaccagagacataaaagtattctagatttcctagagtttattcaatttttactggggcaaccattcaatttcagcttctgtagggcagagaccatttcattgacaatacaatatacactgaggatttagcataataactgatatatagtaaacagtaattaatcatcaaatgaatgaataaatgaatgaatgttgagcaccattttaatttaccttcatttatttagtaagtgcattttagcattatatagtttgtttgtatccacattttgatatattattctatcatcatataatatcccctgtgtactgcattaatgtaatagatttctgccacacacatttcagttcttaaccaatagccattctactcattttttcctggctaacatacactaattgcgtttagaaga

SEQ ID NO: 656736 - DNA, 590 bp, Homo sapiens
ggttgaataagccatgcacttgctattagatacctggttgcttctaattgttcattaaatgatcgtatacaattttgaaagattgaaatatgttcatagaattgaccttctagttttacacacgccattaaaagtttgaggattgatctccaaggagactgattctgttttaartgccaccagagacataaaagtattctagatttcctagagtttattcaatttttactggggcaaccattcaatttcagcttctgtagggcagagaccatttcattgacaatacaatatacactgaggatttagcataataactgatatatagtaaacagtaattaatcatcaaatgaatgaataaatgaatgaatgttgagcaccattttaatttaccttcatttatttagtaagtgcattttagcattatatagtttgtttgtatccacattttgatatattattctatcatcatataatatcccctgtgtactgcattaatgtaatagatttctgccacacacatttcagttcttaaccaatagccattctactcattttttcctggctaacatacactaattgcgtttagaaga

SEQ ID NO: 656737 - DNA, 605 bp, Homo sapiens
tagtacactattttggagatattgataagctgattctaaagttttattggggttcagaaaatgacaacccaaaatatggcagtttggcatgctgagtgctttgaaaaaaaaaatgttgaaaggcctcagaaataagcctcaggaccatggcctctctttaatctctgsccccccttaccccttcctttattgaagcctcaggaaaacccttctctcaagttcccttatctgattaaaaaagttcctccagaagtcatgaaattgtcttaaaacacacttcctagaaatttcaacagaaaacagggaaagattaaccactggagaagagactagatctgaagtcatcaccacgctcagagagatttttcatctagacttctgagggaagctccaagagattaccagggacactatctgcataataagacaaattttgttcatggtgaacatctcatcaccttctcataacttgccaccacctcgcccagatctcaaaagaactttgtctttttttaggctaattcatttctctaaacatcattgcctatactctaaattgcctgcactcccatctccctctcccctatgaagagtgttatttaagc

SEQ ID NO: 656738 - DNA, 634 bp, Homo sapiens
ctattttggagatattgataagctgattctaaagttttattggggttcagaaaatgacaacccaaaatatggcagtttggcatgctgagtgctttgaaaaaaaaaatgttgaaaggcctcagaaataagcctcaggaccatggcctctctttaatctctgcccccccttaccccttcctttattgaagcctcaggaaaaccyttctctcaagttcccttatctgattaaaaaagttcctccagaagtcatgaaattgtcttaaaacacacttcctagaaatttcaacagaaaacagggaaagattaaccactggagaagagactagatctgaagtcatcaccacgctcagagagatttttcatctagacttctgagggaagctccaagagattaccagggacactatctgcataataagacaaattttgttcatggtgaacatctcatcaccttctcataacttgccaccacctcgcccagatctcaaaagaactttgtctttttttaggctaattcatttctctaaacatcattgcctatactctaaattgcctgcactcccatctccctctcccctatgaagagtgttatttaagctgcagccatctggcccttctttgagactcatatttt

SEQ ID NO: 656739 - DNA, 605 bp, Homo sapiens
tagtacactattttggagatattgataagctgattctaaagttttattggggttcagaaaatgacaacccaaaatatggcagtttggcatgctgagtgctttgaaaaaaaaaatgttgaaaggcctcagaaataagcctcaggaccatggcctctctttaatctctgcccccccttaccccttcctttattgaagcctcaggaaaacccttctctcaagttcccttatctgattaaaaaagttcctccagaagtcatgaaattgtcttaaaacacacttcctagaaatttcaacagaaaacagggaaagattaaccactggagaagagactagatctgaagtcatcaccacgctcagagagatttttcatctagacttctgagggaagctccaagagattaccagggacactatctgcataataagacaaattttgttcatggtgaacatctcatcaccttctcataacttgccaccacctcgcccagatctcaaaagaactttgtctttttttaggctaattyatttctctaaacatcattgcctatactctaaattgcctgcactcccatctccctctcccctatgaagagtgttatttaagc
